United States Patent Application Publication US 2014/0057251 A1 - sequence listing, part 131

SEQ ID NO: 240147 - DNA, 1728 bp, Cannabis indica
tatatatctatatatatatcctttattgtaacaacttgggatgaaattttaggcatatatattatccattctagcaatatgttattctttcaaattttttcttaaagaaaacttatactactaattaccttagaataatagtgaagagggcggctaattttatgtttgaaatcaaattagtattaataaattattaattaactatataacaaattgatggtgaaagttatttgtagtttcaataatatcagctggcactagtaattaataaataagatcaaagcaaatatatatatatatatatgggaaagataatataaattaaaattgttttatatatagtatgatatatatggttatatctcaagctttaaacaagtcttcttgttcacacagaaaattgggtatttatcttttgtctgctctagctagtgctttttgtgcttaagtaaattacaatggtatgttaattaatttgtatatatattttatatatagctaggactaatttttaatattttaggggtttattgaccgaacctctagtgacctgcaacggctgccaaccactcttgtagatatattggtttaattggagctgaaattcttgttaattagcagagacaaacttgagagctgatctatttaccttcacagaaatttaaagggatactatattaatgtaatatagtatagaattaaatatattttaatttaataattattacgaaaatcattaaccattcctagctaagacactaacttataattttatttagaaaaattaatgccctaatagcaattctctaatcttaaacacagaaacacatacaagatatatagttgaccaagccattaatgtcaaaccagtgacgcatatggaaaccatctcaatgatacactctcggggagggacccaaaagtagttacgacttaggaacccatataaataatgtggctttagaattttttctgactttttgtacacactttctagacagctattttccaccaaatcttcactttcctccataaatattatcaattaattaccctcctatattattcttaattaatattacatactctacttctaataaaaaattcttcacactctacttttataataaaattgtgtatttttctctttttaaccactcattatcgtggttagtgaaaaaaaaggacctcttttaattttttttatttgtatttcaaatttaagttttattttcttatttttatgatctcattgttgcatgggttgtgatttagattgttgcgtgaattgtgattctaaattaatttgggttgcgatttgaattgctctgtaggttgcaccgtatatttgtaattgcaagaacttaacagaacagagtttttgactagaccaaaaaagagagagcaaaaacgatggagaaaaagaagaaagaaaaatgaattgctcaactaactttattgaggttagaccttcttatttatatcttgtaaaatgataagcgaccttacaactgaaaatcataacaatttttttttacagctgtagctctaactaactaccttaacaaagttagtctcatggttattttttttagttttctagtcttacaatatccccctcttaagtgacacggatggacatcaagtgacaacttatttctcaaaaaaataaacagagacaggtaatggttttgtgaagatgtttgctggttgatttatggaagaaaa

SEQ ID NO: 240148 - DNA, 3081 bp, Cannabis indica
ctaaatatcatgttttattaagtttaatactaaaggtgttcatcaaaccgtccacactgcacaaactacctgcactgcaccacaccacattaaaaatacagtttgaatttctttgcagtgcagttgtgttggtatttttgccaaaccgagtggtgcaatgaggtttgtggttttgaatttaataaacacgattcaaatcgcaccgcactatatattacaacgttactactttttacaacataattttaattcttttgtttcatataagaacaaatatatgtaatatgtgtatatattacattattttttagagacaattcaatataatgcattgatgattagtatatatgttatgatattaaaattttaataagattttttttacattgttaaaattttattagattgatttttaaattttcattacaatgtttaataattatgatagtgtaaattgctcaaattctaccgcaccacactgcatttttgtagtgtacgtagtttttgcggttgtaagatctcgcattgcggttgcagtttaaaaaattacaaataccacatatgtagtttggtttgaaaaaaggctacaatctgcaccacccaaccctgaacatccctatttaatactccataaaaatatcattgttaaacgtgtaatgcaactaaaagtttgaaataactaaagcaacaatattactaaatgataaaataaaacaaaacatcagcacaacaaatatacaaaacaagcaaatattactgttaggaccttcggacaccatctatctccacattaatatgatattgtccactttggacctaagctctcacggatttatttttagccactttcccaaaaggtctcattccaatgaagatagtgtccatccttatattcctaagacccttcccatttctagccaatgtgagactttgattgtacacccaacaatcatcctctcaaataaaggactaccttacgattacagatttaaacattgagcaaccactcaagaacatatttccaactcccttggaaaattgcaaatcgaatcacttgattctaacattcaagattcccttgagtaagctagatgaatcttttcactagctagatttgaactcccttcaaatcagatctgaacctccgacagctctaccaacaagcttcacctcctttgtttggcactctgaggattcattctgataccacttgttaggatcgtcagacaccatctatctccctattgatatgatattatttgctttgggtctaagccctcgtggaattattttcaaaacacattttcaaaaggtctcatggtaatgaagattgtgtccatccttatatactcaagatccttcctatttttagccaatgtagaactttagttgtacaccgaacagttacaaattcaacacacacaaaaatttagtaaatatataattaaatatgtattttttattatacatatataaatataaaataatttctttaatatatataatgtaattgaattggatctaattatctttaattagattttaagaatgatatccaataacagatccaatctaattagaatgtaatttttatcatctaatctaatccaattgtaaatagatacattttttttttataattgaactggattagatgttgtccacctctaattaaaatagtcatatatacatatataaataaaatagactttaaatattaattattttcatcaaaacaaggagtaatacaatcagggtagccaatagatacaccactagtgttgtaaatacaggtcgagttgtatgacaagggatgaaacttgcacgagttagtgaggcacgagcacgatcagatatgaaaaaatatgggcataggcacgatacgacacgatgctacagattggcacaacaggccaaaaaatatgggcacaacaagctcaaaagacatgacacataagcacgaatattctattttgtaagcacgacatgtgaaaaaccttatatttgatagtagtaataataataatttaaatatttattagtaaatatttaaattttaatagttttaattaatttttatataattttatgtgaaaaattatataaaaatagtagaagctaaatatatatatatataattttgtaattatctcattaattgtgagaatttgataagatccatgacattccatctcaaaattaactgataatgagaggagtagtccattcatcttacatatgatatttatttttacatattagcaatgtgggactaactctaatacactctcctcacatttgggcttggaaagtgtaggtataacgaacgacttttaagagaccacaggactgaacgtgacatttgaaggaatctcacaaggcaaactcgaaaaatttatgagtgtacacgccaaaaaatttgtgaatttttgaaagaggtcaaagatcccaatattagaaaatggcacatattggccgaaatgtcccaaattaaggttaaaggggagactagcacacattgaccaaaaggtctaaaattatggttaaaggggagacaatttttttgtttggctatgatactatgttagaattataagatgcatgaggttctatctcaaaaccaattgactatgatgaaaagtgctacacatttctacacttttcttctctagaaaattctagtattaactacacaaaactaagaaaactagagaaaactagaattacctagaaactatatttgtaagctaagaaacttagaaaattctagaatatcttagaaagataaattgtaatttaaaataagaaaaatctagaaagttgtagtatcatccttagctccctataaataccaagcttgggttgaggagctagtgtaacaaaacaaccaacaccaaaaaaccaaagttccaaactatcaataaaactttactactttctcaaacaaccctctcttctaagccaaactcatttcttatactaaatcaacaactactcatcaacatcactacttcactacattaccacaacaaaccattaaccacatatccacctattccaaatctaaaccaatacaaattt

SEQ ID NO: 240149 - DNA, 887 bp, Cannabis indica
atttttgaagaggcatcaggacagaaggtcaactttactaagtcatcaggtttctttagtaccaacacgtcgcaccaggataaaactcacatttgccaagtgttgggtattgtggaagcaggagaagatagcaagtatcttggattgccaagcactttatcaagaaacaaatcagccgtgtttggttaccttaaggatagagtgagaaggaagattcaaaactgggacggcaagcttttgtcacgagcaggcaaggagatattaatcaaagcggtcgttcaagcgttaccatcttatgccatgaacgtgttccaacttccacaggatacatgcaaggatattgagaagagcatgtgtgatttctggtggcattcgaagtcatctcagaagaatggaattcattggttaagttggaaaaatctgagtaaacacaagggaatgggaggtatgggctttcgagatctttgggattttaatcttgctctacttggaaaacaagggtggcgattaataactaatgaagacagcctagttgccagaatttttcgtgcaagatactatcctaatggtcacttcctcactgctgaagtaggagctaatcctagctttatttggcgtagtgtattagcttctaaggatctgatcaagatggggattcgaaagaggataggatcgggtgttaatgttgacattttaggcgaaccgtggctcattcaagatgaagatcctttcatttcttctactcacccggcattgtttaacaataaggttagttctcttatgaaagtgggtgtgagagagtgggatacagagatattggaggatgttttatccattcgagatcagcaacttgtactgagtgtccctttaagttcagatgttgatag

SEQ ID NO: 240150 - DNA, 887 bp, Cannabis indica
tatttataggatacttaatgcatgagggaaggtttcctttttgctttacaatgtataaaaataggaaaattacatgtattacataattatgatacacgaaataggaaactagagcaggttgctatatttctctgattcaatcccacgattgtagggattgcttttgtgtcttggcatcgacaagattactctgaagtaattaactctttggaagtacgtagttcggcaagtcaaacttatcaaaggttatacattgcccagatgatctattttcatcttgctcaggtaatcaaaggttatacatgctgatgtacaatatagaatctgttcgggacattcacctccgcccaaatacaaaaaatgcaggacacgtgtcacctatttttctgccacgtcattatacaaaaaattggataacaatctcaaagagtgctattatagatttttacaaataaattttaaatcttgcttttaattatattttaataattttggtggaatttttttttctattattttatatcatttatttgtgtcaggatatttttggcctattatttatgttatttttagagttaattttcttctttattatcactttttggaatagaattacgcttattttcgttaatttcaagtttcgacatctagaatgtataaattggtcgaatctcacaaaaagatgatttacaaaatagagaaaattgtgcaagaaaataaagttgaaacttcaagcctaaattagactatgttctgatcagattttggagaaagtcaaaacataaaagttctagatctctcttttatcttttcggatcgtctataatcgtctaattctgagcaatatcgagagagttatgaccaaaatattatcagtcgacgtagta

SEQ ID NO: 240151 - DNA, 1794 bp, Cannabis indica
gtgtaaaaatctcaaatatatataacttttttagcgaactagctaagtaattgggttactaaataatcatcttaaaagctagaatttttcttttttttaatagtagtgtatgttgttgttttctgaaattttcaaaaacggaataaaaataataagaatagaagaataaacaattgaaagagaatgtatagaagtgacatagttttttgcgtagttgggacgttaactaatcttactctacgagtcagttttattcagtaagttgtttacttgtaaatgctttaggagatacacaggaagtatatatgcatgtttgcttgagcaaagtacctaagagagttcaactcttatggcgcgtttactaaactataattggaatcagaataatcaatgggagaaatgtatcggtttaaaatagaaaataaccggaatcaatattttattatattgtttactaaactgtccagaaagaaaactagaatcatattattttgtttacataactaggaaaggtaattggaatgctttaatttgacaaaattgccattattagaatatgtaattatttttttgtttatagatttttaaagggcatatttgtcttttttatttttaattaataaaattaaaattagaatgaattaagctaggaaagggaaaggtattcccaataaaaatggggagtatttagtaaacaattgtataggaatcaataccataccatacattcccattccctctaagtaaacatgtcattaattcatgcaagattagtggagtatttataatagttgtagaattacattagagttttccttttttccctctaacggtatatctttggactttctcacgaagttcaggccataaagagtataatctactgactaggtggattggagttaagttgatcgaatcaacattgcgcccaataatagtgggtggttattcatttttaaagtaggttgctttcattcttttatgtaatatttataaaatcacaattaatattaaattaagtttcttttagaattgttaaaactattattagtgttaaatatttttttttagtgtcatatctattgatatatttaagtatcaaattttatataacttaaaatataatttttttcagaatatggctaattaattatgggatacttcctataaatataatagacaatatgatactcaataaaaaaaagataattacatgatgcaccattttttgtaaaaaaattacatttttacctttacagatattttttacatttttacagttttccataaaaacaacacgaaaataaaaaaaagaaaaaaaaacataaaagtaacatctaaataacatcaaaacaacaacaaaaaataacatgcatgtaacaaaaaatcaacaacaaattaacaagaatacaacataaaaagactgtattttctataaataaaataaaaaaatcgtaaaaatattaaaactctattaaactatatttttagaatttttttttattatttttgtgtatttgtgaaataattcccaataaaaatgcttttttatttttagaaagaaaaattaaattaaagttatatgagtttgggagttacgtttagatggagaatggaccgcgaaaggtgatccattacaaatacaaacaaacacagttaaacacgaaacacatggcgcgtatacaccacgctctcgccacacggcacctaatcggtgacctaagcctctgactctctgacccctcttccctctctcactttcatgccctcatttaattaatgacctgtccaaca

SEQ ID NO: 240152 - DNA, 1237 bp, Cannabis indica
tttgtttgggtctgtgaagtctacgcacattatccaagttccattagtcttttttgagcaataatttattggcaagccatatttgatataaagcttcctagagaaactctatattggtcaactggctacttctgcttcactgcttctgctcaaactagatctaatggtcttatctcctgacagatttgttcaatcgtgggatctgtgtttaatgcatgaaagatcacttgagagctgattccagtaaggacaaatggctccaggctaacacatcactgttttcttttactataaagatgattctttctctagtagctggaggtagattatttcccactttcatgactttcacaggatcctcatcattgatgcacacttcttatttctcctccattggtttaattattattttcaaacctacatgtggatctacttcatcttcttcatagaccacccccaatgtcggctgggtggatgttccaaattcttcacgacttctttctcggaccatcaaaaatggttttgtagagacattgtagtagatcaatgaactcttatgattcccttttattgttctaatgctctctatatcacatggcaactttaagcacaattagtgaatccaagttacagcaccaaagtcaattaagataggtcatcgtaagatgaaattgtaggttattgtgtaatctaccaccacataagtatagtatttgaaaaatgagaccatgctgcttccagaaatatctccattcaatgtaaatagtttttttatttttcccatcagaacaagtatatctccatcaaagccttagagttgaactgggcagaatgtctaacttgtttctacaaggcctatggctttgaaagcttctttgaagagaatgttgattgagcttctgttatctacgagaactcaagatactcatttgtttgtaatttgggcttctatcaccaattaatcattgtgtggaaaatgtatgtgcttggcatcatcttcaataaaggatatcaaaagattcatcattagaggacgttgtggaggtgatagtacaagactacatgcttcatcctgttctagctcatttaggtacctcttttctttatttcttatgctttcggtaatatagggccctctggatatggttgctacatggccatcttgttgggttttgtgacccaaaaaaaacccatttcaatataatcatatttactaattaataaagatcagaaatca

SEQ ID NO: 240153 - DNA, 899 bp, Cannabis indica
caataaataattttcctgcttatgctctaatgtctggttggagcacaaaagagtacatggcgtgttccacttgcaatgaacacactccttccattgccctaaatagtaagatcgaatacaatggccacaaatattttctcaaaatgaatgatccaaggaggaaaaataaataatacgatgagaagcctgagaagagagcaccacctcctttattgacgagggatggtattttatcataattggagcgaattcaattttattttgctagaaaacacaaaaaatttgggagtgtcaaacggaagcattccgcttaagagctaaattggaaaaaaaaaagagtataatttttgaacttcagtaatggaagagtttgcccttatgacataatctcgatgtaatgcacattaacaaaaatgtgtgtgacagcttactaggtgctcttctaagtatcaatggaagtcaaaggattccgagaaagtaagaatgggtttgcaagaattacaaatacgatatgagttatggttgtatgatgaccgaaatgggaagtagaaaaagtctctagctagttacacacttagtgttcaagaacggattgaatttgcagaatttataaagactgtacaatttcttgatggttttgctacaaacttagataaaaatgtaaacttggataccacaaagatttttcagacccaaatcccatgactgtcatgtgttgttacaacgtttaatacctgccggtatgcgtaagtacttgaaaaaagatatatgggacacaatcattgggttatgtgtgtaattaaaaaaattatgtttaagaacacttttgatgtggaaaacaccgaaacaaatgttctaactaatccgtgcaagtttgaaactattttcccaccagtttt

SEQ ID NO: 240154 - DNA, 1986 bp, Cannabis indica
ttttttttttcttttttttgtatttttctgttttattccctaaataataataaaataatagaaattagtgctaattgtcattacagcttcactctctctctctctattatggtattttcagtgctattgatgttatctccattagagatcaaagaagctgccgtggctcgtggttgtatattcctcatattaggttgggattgagtatccattgtagagtcaataacattgagccaagtagcgtatgccagatagcgattgaccaggccatcatccatcatagtggggaggtaagtgtctaggctcttaatttaaagtgatgccttattattgtgtggccatatggcaagtgtcccattattaattattttgatataaaggttgtaggacatggttttcggacggagaacttgcctagtaaactgccgctagagttaagacacatttgatttgattaactgaaggttctcctacacaaaaatgatttggaccgaaccattttcaaatttaaatttactaaaatattgaattttcttcaatatttattacttaatctctcccataagtgatggtatttattgccgatttgccgtttaatgtaagatatattaatctctccactccacaatttgtcttctccctataatattttacattatcattattgctattgatttttttttttaataattaggtttcacattaaattaatgacaactaactactcaaaacatccaatatttattgcttgtatacaacagatatatatatatatatatataatttgacttttttcatattgcagataaagaatatatataataatggaaaagatttaaaattaggttaatgaagattttttttttacaaattttctatccaaatttttaaggtcactttaaagtttttcttaaatgattgaaattgttgaatttagaaattttatctaattttattaaattttactaatatgaccgattatttttgtaccaaattatatgttcgaaattttatatatatcaagtcgtgctctcgaatttttacatgtattaaattatacaccttaaacttttatccggtcagacttccgttagtaaaattaaaagaaaattttgaatccaataatcttaatagtttaagaaaatttttgaatgtgttaaaaaattccgaagacataattaaatacatacaaaatttttaaaaataaaaaatcttaattaacgcttaaattttttttattatatatatttttatatatatgtacatggttcgtgacttacgtaccttctaatttattcataaaccaccaccaaatataattaaattaatgagacaaaatttgaagacaaatatatcgaattaaattttaaacctatatatattagatatttataatatgacttaattattaatttataatattaataaaaaaattaaatctaatacagtacttcttatatatatatatttaaatatttaaaatataatttaaattaacgtctaattcaaattaaaattaaaatttatataaaaaaataattatcaaattttgttaatatttttaaataattgtctaaattatattttaataaataaattaaatttagatttttaaaattatttttcttttttaaaaataattgattgattgctaatggattaacaaaaattgaagaaaaaaatatgttaaactaacaatttttgtggaatatttacatttaatataaaatagatgtaatataataaagataagattaaaaataataataataataataataataataataataataatatatttttaaatatgtgtaataaatttaaatttaaagcataatattaaatatttttagatgtataaaagatttaaatttaaattacaatatttaaaaataaaaaaaatacatcaacatttaatatgatatatatatttataccatcccctcatggccaattattcatgcatatatatatactagcaaa

SEQ ID NO: 240155 - DNA, 1354 bp, Cannabis indica
ttttcttgtacacataattcttttgttttataatcgtgcaaaagaaattatttcaactttattttttttgttttataaatttatcaaaattttacaaagtttctatctttaatacaaaagactaattaactaaaaaatgtgtaatatataccaacaattaggttatatttgtaaaatataaataaaaataccaccaaataaacaagaaataataataatcaacagagcaagtacacaattaagcaggaattatcgggtaaaagtagtggtcccatcccaaatgctaataacgttctggtatttgtttttctatgaataactactacaccaccaacaacaacgtgagtaaaccgaaaatgcccatcatttgaagttggtctcatacatattgggatctctaaattcaaatattttaagctgaaccactgactttccaaaaaattcaataatcttttcgcaacttcactaaatgttggatattttcaggtcaaatgtctccccacattcttcatatatataaaaatagttaaaaatgattctatcttgatgtctatcattttttggatgatatgaatacatatatatttatatattagaagatttctgatgatgaaggagacgtcccaatggccagtgcggccattcctaaccacgtttgtcatattatttaggtgccacagagaaataaatacataataataaagagaacctcactccaaaatgtggcataatttacattttacaaacattaatttcaaagcggcacatatgatgctccgcttgtcatatatctcaagcttgttttctctagtgtattttcaactaattaaaaatagatatactcagcggtaattaaacatcaaaaagattacaaagaatgctatagattttcaattcaaatgaatacaacacacacttggagaatcaattaaaaaatttgtaaattaggtaatgaaaatcccattattcaacctaaaataataataataataataaaaaaaagaaatagcaaaactaattatgactatgtcaatcgataaaggataaactaataaaatatggtgttattaataatgatatgagaatctctcatatttgaacacagaaagagccaaagaggtacccatgccacctacacgtacagaaacgttgtgagccccaacaggaaacaacaccataatatctcactccataagcaaaactaaccttactaccaaagcaagaagagggtagtggtactggtacaacaccattatttaaaaaaacaaaaacataaacagcataaaacaaaggaaaaataaagaaaaaacaaaggataatacaaaagaaaaaaaaaactaaaactaaaaactaa

SEQ ID NO: 240156 - DNA, 1071 bp, Cannabis indica
gctgttattattgggagcataatacaaaaagtttctattcctcttcttcattcaaggtttgtatagattttgtgttttcaaacatgtatagaagcatgtaatgcaagtaattttctaagcacactattgatgttttaaaacaatggtgacctcttatattagtgttggcgaaccatactttcctaatctttaggaatttatatcaacttgtgttttgtgatattattcgatattttaaacaagcttttatatgcttttgtagtgttgcattgttgaaacttactgatatagaatattgtggtacaacaaggtactccaatacattttacgcattatatgttagaacagaagtattatatattctataagatgttatccatcaatgattgttgatttgaaatgtgttctacacccactcgccaactaatgatgaaatgtaacctatttgacgtttcaaattgctcgaaaaaatgtcttgacattgttgagttaaaatacttgcagttactttataaagatccttttggagaaaaagtatgctcttccatatcgggcacttgatgctcttgttgcacattttgtgagattttcggatgacacaagaattatgcctgtaatatggcatcaatcgctgcttgcatttgtgcaaaggtattcaaacattcaattgggtgttccaagtaagagtttgggactggcaaagttattgattcttttacaattaggtgtcattgcttacaggtacaagaatgaactgcagaaggaagataaagttagcctgagagctcttcttgaaaagcaaaatcataaactagtgagaacaattatctaaactagtttcatttattcaatattcaattcttttcttaacataactaagatcgatatgtaatcattttctctggttgaatataaattactcctgagataaccagggagctaaataatagctgcaatcggggtgagaaggaggatgatcttatgctaattgatatcctttgtcttacaagtgctgtttttttttctttatttgtttttattttcatagtttcttatgactaaataatttag

SEQ ID NO: 240157 - DNA, 1798 bp, Cannabis indica
ggttttcattttttcaatcaagtggatctctttttccatgttttttgttcatgagagttgtgaattagtttcctttttttctttatattgtataaggtaaaacaatattctgattgtatagaaataagtctgacccagttggtttttattttaatataatttagtaacaacatttcttgtataattaatatgatttattcctttctctttttcaggaaagagtttgtgaactatgtggtggtaatgatggtaattttaaacatttacttgtaacttgctctgtgtgcaacacaacttgtgaacacatgtaagattcactctcttagcatgagaatgcctttgtttattctaactttgattattgaattatctttatgatttgataaatgaagtcaatggaaattattttgtgtgacatggattagatagatgtatggctgttattgctgtccttcttgtttttttttatgttgttcaagtatcactaaggtagcgtttggttgggagtaatgaaatggaatggattcgaatcgaaatcattccaatggaatgggttttccactatttcggtcgaatagaacatttatcaatttttttttatgtattttctatttgattccatttgatttctattcctaaccaaacctcacctaattgcttttgttgacaaaagtttatggaaagaacagagcattgataataatcaatcttaaatgatttttctgttttcagttattgcatgagaggagaagtaaaggatgagatacctgaatattgggtctgtgaatcatgccaaagtgttagttactcgactttgatagaaacagtgaagaacgacgaagctgtcacaggagcattgagaaatgggaaattctcagtttcacagcttcattccaataagcaaaagactgtagaaactggtaaacttaagttcatttctcatgaagaagtcattaagctatctcaaatgcttactaactctaaaaagaataggtagagagatatatgtgcatagcatctacattgctataaaattttgtgttgaaattgataagattgtttgtatcatcaattctgcatctttcttttcatttgtaaattcattaaaaagaattacattttttgcatagaaagtcaagagggaaatggaattggttgtaattgacgataattatacagttctgtgtgtgtttgtctgatcatgtaattacactgtaatggtgtgtaattgagatctgtgtaattgagagatctcaattacactctctaattctcacaccctcatgagaatttggtgtaattatattgtgtagaaactaaaaactatccattttaaatattagatactaaaaattattattttcgcatgtaattactaactattttgccaaacaaaacattcagaattcataagtaattgccacattatatccaaacacaccttgtattttaaaatagaatgtaattacttctctagtaattacacagttacttctaaaaacaccctaatatattaaggtggtgttcctaggatcctttaagagaaaaaagttgttgtcccccatgcacaaagagcctctaacaacaaaacagccggtacattgttgccatcaccattcttaagttgctttgttgtttgattcacagtctatgtttctgtaggtggtaaaactaaggatgttcaagaaggagagctgccgaaatttccaccgagtttttcctcgtatattacattttttcctgctccaaatgcaacttggaagtgggtaacttatcctttcaatttatttatttttac

SEQ ID NO: 240158 - DNA, 1917 bp, Cannabis indica
gaaaacataaattatctatgcctcaaaatatctctaattacaaaattaattaaaaaaaaatacaatccaatacaaagatttaaagaaaaaaaaacataaaacaagataataattccaatttcttaataactaagtaatcacaacataagtggttcaagataaacccataatcataaaatgatatattccttttaagttagaataagattgttaaaaatggcaacttggtgttgctaaataatttaccaaaaaaaaaaaattatctgaaccgatcgaagtatcagatccatttttttttccttactaataaatttttatatatatataaaaaaatattattattattaataataatattaaaattaaaaaaacaaaagtcaaaagtcatcggaatgaggcggcggaggttccaagttgagatccaaacctcttctgttatcgttaatactttccgtttcatcatcaacgccgttatctccgtctaaaaccatagcgtcactctgaccttttacaacagccctccaagttttggccgtcaactcacggtttcctccgtttttattcttgaaataattagctgccacgtggatcctcttgagtatagcgaaaaactcctccacctcatcttccgttgccgtcaccgtcgttgtcgtcgtctttccgcctataatctcttcggattttcctttcttctcgttaacgtcgccgtctgttctccgttttctcttacctttctccattatacgacgtcgtagtggattaaaatccagaataaagattttacattagaaggaaatgctcttctctttttttttttggttatttgtttgtttggtttggtagaggtttttaatgtaatagagtaatatatattaaattaagtactgcgtttggggaattttttgtaaaggaagaaagtgacgtcactcgacaagaggattgttacgtcactgttgtgacgtgtttggtttactattttattctacaaaaacactgaaacgtggaggtttaataattcaaacaaaagttttttattattattatttttttttatggtgtgaatctttgatttgcacactgttttcttgtgaaaattgtatgcattcttcaagtgtatctagaaaaaaaaaaaattagttggaatcaagctatagttatttaaactatagttatttaaagatattttttaaaaattttaaaaaaattatattataaattattttaaataattatattttgtacaccaatataaaagattagattaataaatttttttaaatactaaaataattaaaaattgcccccaaagtagtaaagagtattgtaaaaatactatatattttttaaaatttataaataatatttaatacactatcatacaaaaaaaaaaaaagctaacttaaatatcaaaacatatgtttatttagtataatttactgatttttatgtatttttagtggaaccgactaacaaaacccaaatattttcttttgcttgaataaaattttattcgtaaagaacataaaaaatgactagttgctgtaaatagggaagaactcgacagattcagaacttaataataaacaaagaaaatacaaaatagggtaatttattaaaatccataataaatgagcagaggaaaatatcaacatgtatggttccaatattatccgtacaaataactggaaaaatattaaaaaaatgtcttggtaatttctaacattttcattaatagtaattagtaaagaaaaatactaaaaagtactagtattacttagcactctcatacatgttaatattattagtagtctaattaagtatcgagtctcataattttaatgtaataatttttaaaaaatatcgatagttaatcgcaagacgataccactaaaaggcactactagtgcttaataacaa

SEQ ID NO: 240159 - DNA, 1727 bp, Cannabis indica
gaggccaaccacattagagctttgcttggttggtctctgtaatctaatttatttatttatagacaaagggtgtttttttctttttatttgtcttctttctacttggaatcttctttctagtctataaatatatataaatatcttaacctgaaaatggaacatgaatgtctttgtatacttaaattaatttctttgactttcttattaatgaaaggttagccaggttctttggtctctttcagtctcaaactactggaacgtaatataattattgatttttttgggaggctaaaaaacaaaattcctaaaatgggattttggttctctattagccacctttatctgggattctgggttctgtcaatttgggaaacaactgtcaccaatcaaatgcatctttattttcatttatttctgttaaatctaaaaataacttaaaacttatatcatcaatacttaattatgcaaacttaaacagtttaaaatgatggaatgcaattttgcaaacaaataaaattaaaatacagcacttaatcgaagagcgacaatggcagcgggtgattttagaaacggattgtttgaccgttgtgcaggctctacaaagttctgggcatatttttattatttttgttaaacaatcagctaatatggtagctcataactttgctagagcttctatattatattttggtcgtcagttcagtttggagtatgttctaactgacttgctaccttgttttatagtagaatttgttggttaattttaatgcaagaatttttccattaaaaaaaaaaaaaaaaaaaaaacacatccttcttgcaaccctcttttttgcaaccctaagtgttgcggaggtctctcccttcttgttaagataacacaattcgaaattcacacaaaattcatgaatttcagtttacataaaatgaatttagatcattttcaagtcaacttgtggacttcatagattaatattaatggattatcatgtttgatcccactcgaacaagattaatttataagttagttaagctggtggtatcttatcgactagtttataaaccggtcgtggttagattttattttttgacgtgattattaaacgtattgtgttcgagtctagcatattcttgtaatacatgagacaagaatatgaccgatttcatgattgataggaaggagagttgtgggacaactttttattcaaatccaacgtacgcctttggaaaatatttattggctgtggttttttgcctttgggtttgggtattgtggctggctgggttgccttagtgtttttaattagttttgtgtccttaattttatgttttacatttgtgaattggtgggaagtttgtgttggtgtttcactcactttgtcatgtttgatccttgtcactattttctgagagagagtttcagtaatccaatactgtaacaaaattaatatatatcgataagcttttcattatgagctgtatctttttgtatatattgaccgactaatttgtacatatttaaatagttgggtatttttttcaggatgttcatcatctgattcaatatgtattaatttgcttatagtacattagattaattaagtgttgaattttatattttagattcaatctaattgtacataattcaaatctaattaactcgaaaaaatacggattgaattggtcacattttaatattgaataatttaatatttattaaaaaaata

SEQ ID NO: 240160 - DNA, 830 bp, Cannabis indica
gataacattttgcaaaccctaattaacataattatatatttaatatataaattctatattgtttttgtttattctcaacaactgtgtttcttagcacgtttcttatccttacccacctaattattatatttatataattttgtaagtatatatagctatacttatacatataaatatatatatgtagtaacaaagctaattaagcttggaaaacaaagaaaattgaagtacatatcaacgaggtattattctctccctagtcttcataatataattgaagtaatatatgtatttattttccaatttaagtcataatccaatttttttattttcctatttattggttattttcaatcatagtttttactttaataaagagtttccatttttttctatcttctttttcctttctctttttgaatttttttgaatgtcttaatagttaaaatgcattttatttacatgtatttttttagaagatgacatagaacaaaaaaattaatataaattaaaaatattattatatgttaattatttttctttcataagtttttagggtatctattaaattttgggatgttaataatggggcgcgattatatataaatatattttttatgtattatatgatttatatttatatacacgtgaataatttttgatcaatttaattgttttaatacgatgtgttgttattgttattaattaatgtatagttataataataaatttcagttttcaaaaaattctaaataatttaagtaactaatgacacatttactatacagtattcagaatcggaataaattaaaggagaaatgtaacggaat

SEQ ID NO: 240161 - DNA, 2186 bp, Cannabis indica
tagaaggcatcccaggtcatgtttttcaaataatgaccctatgatacaatttcccactaaatgcgagcatcctcacgcaacatataaatgacacatctaacctgaccattactctcaacccgcatgaaatcaaaaatggatgttatcatactcatccactgtttcgccttaaatggatctacaccacattcgaacacttgtagattcagctttctgaactgctcatacaacggctctagacgattcccacatcctgtggcacaaccaaaggtgctggaggtttaggagtaggtcgagcttgctgctcccttaattctctaatctctttgacttgctgccggatggttaattgcatcgcggcatacatttgttcccagtcttgtagtggaggaggattcacaccctcaccgccaaccctgagccccaaaagctcacgattacccttattaaatcgccttgggtgcatattctaatacactctcgaccataactttccatcatgagaatctcccaaaccaaaaattaatgctaataagcattaccacacatgcatatacatatttaacaatcttcatgaaaatctatctgcttccctagtagcttgcacattttaaataacgaggtaattcaaacaactaacaaataatttattaatcacctaacaaatgccacgtgtgtgcttttataaattaatctatagctataaattaacagtttaagaaaagtacaatttatgtaaaacttttgattaaattgaaacataattattcattcaaaatactgctagattcggggatcccctgtttaaaagcttccacatcacattacaaaaccatttttacaatagagggttacattttgaaaacacgatcaaaagggtggatcctgtccacaaaagccaaaacatagcggttgatatggacatcaccgggagacctctgactcacagctggtccacaatttccttccgttttatctacacaacgaagcacccttgagtcacaaagactcaataagaaaagtaaatgaaattcaaacaacacataacacgagaaatctcaacattgcataaccaacaaacttatcattcaatataaacatttattcaatgcgtattcaaatattacataaaaaaatatttgtcttataagacaaaccgactttcacgcttcataaagcatccttaccacccgttgcccatgagctacgtatgtcactattgtttcccaataacgcaattgataaataagaaacctatctgcagtttcaagcgatcaattactcattcacaataatgttatgacagtatctttactcattctcattaacagtaatgaccgtatctttacctcaatcattatcgagccacacacgataataatcatttctcacataacatgcttagcagtgcaaataacttttcttaccttaatctaatatcaggtgtgcgggcaacctgagtggaactacgcttgacaatccgcggtcctgtctcatggcaacaaaacttgatgaacaacttaactgaattctggaataaaccataatttcacaaccggacaaaccctaatccctactgacttagaaatagcttaaacatcactaaaatactctaaactaagttcgagaaagaaccccagggaaaactagatttgagagaaaaactcaaaattttccctgctggccactggtataccggttcactagtgacctgtagaaccggtcgaccggttcctgtagaaatgggaaatttctggtttttcacaacgaatccaaaccaaaacctcttcaaacatattcaaacctcccaaaaaattttgacaacataaaaacagtgtattcaaacatccaaaacttattaacacctcaaaaacacaaattcaccattaaagagtaaaaattgagttcttaagctcaatttttgctaattctaaacctagcagactaagagttacccaattcacatacaaacagacttaatttaacatctataaactattataaaatccattttatatcacagccccgaaattacaaaaaataactaattaaaactaaacctaaatcttgaaatccaaagagaagggatgcaagacttacctccaagctttgaacaacacctagggttagttaatttagcttagaattactggattgaagaaaaaaaatcctcttgctcagctggt

SEQ ID NO: 240162 - DNA, 884 bp, Cannabis indica
caccaatatcaaatatacaatatcttttctttattgttaatggtccatttaactttcctatactatgaggtaaagttaaaggagagtacattagatttatcctatataaatatatcatgttataaatcgaaaagtgatagatttgtgtctccccttagccttccatcacaaaagtgtttaaagaagataatcaaacttgtgacatgttgtagctgatttgctttaataaaactactatttttcaaaaaacaaaaaaatatatagatatattatctaattataatgtatattaagggtcccataatttatattcttttggctcccattttcctaattacggccctatctatgttttcttttaactgaagttttgtttgtattttcaaaataaaataatgcaacagcttgctatacaactcactaataaacagagaatattcacttcataattatgttagttgattcgactatttgatctgtttgaaattttatttaattcatgagctagtatatttgctataaaaataaaaatggcatttcataaaggcaatccaaaaccaagagaactcgaacgctcaaatattagatttttatttgagtttaaattaatttctattagttttattaaaatttagattgattacatagtattagtccatattattggtgattaatagctaatgacttaacatctgtatgtataaaatttagttgaagtagaagtatgaaattttctaattaactaaaatctttaatgagcagacccagtttaattagagttatatagttctcaataactctataaatacatattgtctcatcatgattatagaccttttgataatcaaataaataaaaaacttctgatttagagatatagggag

SEQ ID NO: 240163 - DNA, 1639 bp, Cannabis indica
taataagaagtgggatagtcagataagataggcttcaaaccttttagatactagaattttttggagtgatcatcctgagttcaaggatattgtgctaactaattggaggaagccgatcaaagctcagggcatgcatgcaacttatctcaagatgatgcgattaaagcattgtcttagaaagtttaatcatgatctcattggcgatattgggaagaagtatcaagaggctaagtctgatttcttagaagcaagattgcaagcccaagctcacagtgaacccgtgttccttgatattgaaaaggtagctacagctaatttccttgttcaggaaaaaatgtacttcagttttcttcgtcaaagaagcaaggtcacttggatccataaaggtgatgaaaactcttctttttttcatgcttgtttaaagaaaaaaagacttgaaaataacattactagttttactaatgaacatggagaaattgttgagaattaccaggaggtggtgaaccatttcatttctcacttttatgggataatggggactcgaaatcagattttccatggcctaaagacagattgtatgtcttatggtcatgttcctgatcttgacgaacagctggggcttttaaaactgttctccaacaaggatataagggctgtttttttttttttcagcattccagatacaaaatctcctaatgtcggcggttttggttcaggttttttaaagaaactttggcccaaaattggagctgaaatatgtttagctatcaaggatttttttattaatggaaatatgcctaacgatctcaattcaacccttattactcttattccgaagacagagaatccttcaaatgcaagagattacagaccaattgtttgttgctcgacgatctataaatgtatatccaagcttttgtgttctagactagccggggtgctccctagtttgatcaatcaaaaccagggagcattcatccaaggaagatcgattgcccataatgtcatgattctccaggatctgttgaagaactacaacaagaaaaatggttctcctagatactccctcaaaattgatataagcaaagcttatgacaatgttagttgggattttttggaacaattgttggcaactttcaaatttccccaaagatttatcaagtggattatggtttgcttaagggcaacttcctactcgattgttatgaatggcaggattcaaggcaaatttgaaggtgaaaaaaagttaagacaaggggattctatctctcctttgctttttgttcttataatggaatatctaacgagaagtcttcttttggctgctaataactctccatttaaatatcttattcagcaaaggtacaagagcttcaataatggcgatcaaacatactctggatgagtttggcatgacttcaagtttgttcttaaataccaataaatctcatgtgtattcaggtgtaacgtccccgcttcaagtctcgcctcactcacacgcttcttgagaaaacttctcaagaggtcacccattctccaagttaagcacgcttaactatggagttctttcgtgatgggctaccagaaaacaagatgcaccttattgatataggtagtaccaatcaatccatttaagctc

SEQ ID NO: 240164 - DNA, 2312 bp, Cannabis indica
aagggcaaagcagcaggagatgagatcacagcagactgattggtattcaagggcatagactgagtaggagaggatgtggaggaagttgtaggaggctgaagttgagtatcaacaccacgattatcactaactacaggtggttgtgtaggaggatcagcaatagtgacagtaggaacatcgaaagtagcagcagctccagaattttcacctgtttcatgcacagaaggttggctgggatgccagtgagtagtaatatgatcatgcatagtagtattaggctcaatattgtcaagagaaacatgttgatcaatctcattttctgcagaattcagcagatcagacaaagtgtaagattgtctgaaatgtgaacatttaggtatgatagcagaaatgtgactatttttagtgagacaaggtgatttggaatgggtaggttgattggaaattgactcatatgggaagttaaactcatcaaacacaacatctcttgatatatataacctaccattagtgtcaagacacttatatcctttatgattaaggctgtagcctaggaaagtacatggggcagatctgaattccattttgtgtttattgtatggtctgatattagggaaacatgtgcaaccaaaagtcttgaatgtagagtaatcaggtttagtgttaaaaaggacttccaggggtgatttgttgtgaagaataggtgtaggaatcctgttatgaatatagacagcagttcgaaatgcctcatcccagaatttaagggggagagaggcttgagccaagagagtgaggccattttcaacaatgtgcctatgctttctctcagccaatccattctgttgatgtgtagtagggcaaggatgtctatgatgaattccttgttcagttaagaacttggaaaatgatctaaattccccaccccagtcagtttgtagaactttgattgacttgccaatttgcaattcagcctcggctttaaaatgcaagaaagttttgaatgcatctgatttgtgttttagcaaatagagccaagtaaatctggaatacacatcaacaaaatgaatataatatttgtaaccattataggaagtgttgtgggaaggtccccaaagatcagacacaactaactgtaaaggttcacttatgacagtgttggaagcctttggaaaggggaatttatggatcttaccaagacaacaagcagtgcacacagaaaagggagaaattttattgcttaaaggcatattacacgatttgagtacagtatgaacaactttctcagaaggatgccctaatctattgtgccacaaggtaaattcattctgcacattcgaattacatctaagacagcttgacacagtagctgttgtgttatttaaagtgacaatgtaggtgctcttggtttccagggtacagaccatgcttttggcttgagactctacagactgttcagacttgagacactgatttggactcgaagagacaggtccaatttgagttgaatcaaaagtatataggccgttcttgtgtgtccccatcaacaaagtagtatgagtcatctcctccttaacaaaacaaaaatcagcatgaaattggaaatagacattattatccttggcaaacttagacacactaattaaattcttagtgattgcaggaacatgaaggagattgtttaaaacaagagactgagatgagtgtttaggtgaaatgaaagattgaccaatatgtttaattgacaaacctgagccattgcttacatacatttgatcctgaccagtgtaatcgaagcaagtagcaaggttctgagcttgtggagtgcaatgatttgtggctcctgagtctggataccagtttgcatcactagcaactcctgtagtggtgagattagcctgctgttgaacctgctgttgtgtttgtgtgttgctgttttgtcctaagttctgacctgtgaacgatttgtcaagacgataaaacaatcatggacagtatgtccaaatctcagacaaagttgacattgaaccctgttattcatagctatagcagatctgccacctctgttaggattaaaattacctctacctccatatccagtattagagtaaggtgcagattcattacctcgcataaagaatctatttccagactgacctgagctgttattgaattgagagattcctctaccaccatattgttgctgtctgaactttctaaatgcaagattggcctccatatcagtttcttgatcactcactgttaagttggtactgacttcaatatctttgctgttcttttcgatcctggattca

SEQ ID NO: 240165 - DNA, 2536 bp, Cannabis indica
tcaagatagcaagtataatttttgtaaacgggataacttctgtatagattgcataacacatagatttgatagttggtatcctatgtttcatgtccaacttattgtaatagtttttactacggaatttccgagaaatatggtactaacttcgatagggcaagccatctagattcaagttaggacttatctccaataaacccccaagatatatacaaggtcactaggtctagggagtttagtagttatcatagttcttcttcctcaccatctgatagttatggtaaatttctctaagtgatagtttattccccaaatttttattatctattttttcattttcttttctgtttgcagatatggattttgagaacctcctcaatacttcaagaaaaaagggaatgaagagagttgccgcctcggagacttcatcggaacaaacttagaacccgtgaagagatcgaggaaaataattgcccacaaaaaacgtgcctcatagtaaataattagagagtcagccgatgatcaggttcattcccagaccccagtcactttgggcattgaagagtaggccttaggttcaacccaccaaatcaaattcttgattctgaacctgagatggtcttattggaaccttcctgccccttgccttgagaagcaagaattacttgttcgcaagtctgctcgtagtatgctacctcaagttggtgtcatttcaaatctttttagtctagtgattgagacttggtcaacaacggcaacttcgaggagttatttgagaggagtttaagctttagtctctaagttagttcctttcttcattttctattttattatatgttattccttatccttgttctaaatttattattattgaaggcatctttattgtctcacgtggcacaataatggggccttcaaaaaatccaacaattagaattggagcttcggaaatccattgtacaacgcaggttattgcaaagtagaggactaatgtctaaaatgggaacactcatttgaccaaggatgccaaggagctaaagaggaaccacatggctgagcttgaaagtgctcaaaaggaagccaaagatcatcgcgaggccagccaaaaaatttaggaagagcgcaatgaagacaataaaaagcttgagggtgctgaggctgatgccaaggggaggtgcaaaaacgttgcaaaatgctatatctacagagcctggctagccaatccaaatatggacttcaacttcctgaatgatggtactgtggaggtgtcggcttattgcgagcagactaaaaagacgaagcagtgaattccaaagaagaagaagaagaagatccatccaagtctccagccatgtagacttggtttttattttatcatatattttattatttttttaatttagaaaaatggccctttggccgagacaatggttgcccctagtggcattttgtgaaaacttttgcatcgttggatggccaactttgcttatttatgtatttgtaccttttgtgcctcgtatcttatacttgaactaaatatgttagcttattgcgttttatttcacaatctaatcatttgtatcttgacatagattaagatactttaggttgaatgtgtttccatcgtacttggtttttttgagatacttaagtagttattaatctattgtgtttatatgcgagcagttttaatccgcgagcagttctaatccacgaacagttctaatctgacttgttatacgcgatcagttctaatttgccctgtatacgtatttattttttttagaacaaacttaaaatattttgaataaatcaccttaggaattattttgaatattttttgattgctcctatgaacagttaatggtctattcatattttagcttaagtattatttttcaaggcattcgtgtgcctcgtttataatacacgccagaacaacgcaagccgttgaatactcaactcacatatagcttaattttgttttatgagttgatttcacttacaactgctatttgttatttttttttctgtttaaggaaaaggtttttcaattcttcgactttatattgtccatagacaattttaatcaattatcctttcctttgtcgaaatttttttaatttgtttggtttccaatatatatatgtatgcccccaagtaattttaaagaagataaaatttgaaattactttatcaaactttaactttcttcataataagaatttgactatacagagataaatatagtatttacattttgaagttactagttataaggtcataaatgttcactatgtcagtggttctttattagcgagctgttaagctacgataatttgtaaaccccagttcccacgaccgcttcgatgacataaggacctttctaatttgggttaaacactccagcaccggatctcgcgtatttgtaaaatacacctcttaacactaaatctccaaccttaaagagccttttttggactgttttttttaaaatacctcgtgatttgatgttgataagctgcattagttattt

SEQ ID NO: 240166 - DNA, 2534 bp, Cannabis indica
aaagttaagaacttagaaccgataatggtctagaattaatcaacattgaatttgatagattgtgtaatgaggatgggataacttggcataggacagttgtgaaaactccacaacagaatggaatcgctgagcgaatgaatagaacccttttgaacaaagtgagatgtttacttcttagttcggggttgggaaagccttattggggagaggccttagctactgcttgttaccttgttaataggagtcctaatagagtcatagacttgaaggcaccttatgagatgtggtatgggaagataccaaacctgaaacacttgagagaatctggatgtgcatcatgtgtacatccattcgatgataagcttaatgctagatctatcaaaggcacgtttctaggatatcctataggcagaaaaagattatacaatctgcatatactagaatggaaaacctaaggtgattatttctagaaacgttgtatttaataaaaatgattctcctcacttgaaagccgagaaaggcagtgtgttacctgatgcaagattcatctagcaagagggaagatttggtagagtttgaaattaatagctgaaaggatttgaaccaagtcagaacatgacagcatagacacagtgccagatgagactaaagaacaatcaaatctgtctgactactagcttgctagagatagaaccagaagagaaatccatataccagtaagctttgcagaagctgattggattgcctatgctttgtccatagatcattcatgtgacataccataaccattgagtatagaagaggctttaaatgaaaagtacaagaaggagtggtctcaggctatggatgatgaattaagctcgcttaataagaataagaaatgggtattggttccaagacttgaggacaagaaggtaatttcatgcaaatgaattcgaaagattaaataaggtgtaataaatgatgagccagtaaggtttaaggatagattagttgccaaaggtttcactcatgtgtactttggcgtcacctcttgggtggggtgtacttttcattgactatcctttcctagggttcctagttttgcaatccatcaatctcagacttgaggtgaaggcattttttgttggtgtgacacatgtctttgagaaacttacaaaactttctcgggtccctcctggacctgttcgccttcatcgggggtgagttgttaaaaaggcacctggttcctattagctataaagacatgttctctcggttcaaatagttttgtataatgtgtatatcatgggggatgtgggacacatggtgtcctctctcgcctgaccttctcattcttgtgcccttctgctgaggtttcttatgtgttggacacggtctctcccactctttgacttttcaactggaggtcttttccttcttattcaagtagatcgattcgaggaatggatcatgccaggcaaacctatttttctccgatgttcctttgttgcaaggctccacctttgatctggtgggaggtgcctcgccagagatggtttctctggcaacttcaggtggttttaggtgacgagaagtgttggtgaactatcccccattttttctaggcagaggtccctctaccaagttggattgagcttttttcttggtgatgactaataaggagtatgtacttctcacatggagtattgcaatataagcttctaacttgtttcacaattctttctaatttggtcactaatatcttcctttggttgcttcaataaattaatagcattaaggcataattcctcaaacaaagtcttgtggccaagttcaaacctattttgatggaagttaggtagcgtttggttggaaggaatgaaaacataggaataggtaggggtgagcattcggcctattgggccgaccaaaccggccaacccaacccggattgggccgaaacatgctcaaatttaatggggtcgaaaccctcttgggttgaaaaattcccaacccgtcacttatgggttgatattcgggctggagggtttttaacccaatgaacccaacccgggccgtaaagcccaataaactttaaaaaaaatttaaaaaaaaaatcaattttttaattgaaaccctaaacctaatgcaatataagcctcatttttatttcctcacaacactttttctttgaaaaaaaaccctctcaactcactctcagccgtcccaccaccaccgtacaggtttccaacccgcgccaccatcttcaggccacaccacgccacccaccgtctagttctcccagccgtgccactgtgttttcttcccttcggctccaagagtggcgtgttcctccattgtaagtttgtaacttttaagaacttctttatattttttttctcttggctggcagtaaaaatttggagaaaagcaaaaagagtctcatttttttgttttttagaaatttaaggtcacctcaaaaagtttgatcgtcgggagtcccgttgcttaggtcgcgttgttgttgggagtccgatttcctcactgctctg

SEQ ID NO: 240167 - DNA, 1397 bp, Cannabis indica
gtctataaataaaggtttgctacaccgttttcgggtatccttttagctccatttctgtgctcaattattcttcatctgcttttagcttctttcttggtttttaccttccacatgttgtcatcgtccttgacttgcgtccatggaatcttcaacttcagatcctctggcctcaatggcccctgttgctcctcttcctcctcggttcactgggacccatttgtaaattcgctttcttcttccctcaccccaaaactcgatccccttaactacctgtcatggaaatctcaagtagttcctacagtaatcggccatgacctcgatcagattctgttctccgatgtcactccacccacaactctagtcaccaaagctcccaacctagagtatcttcaatggaaaaagaaagaccaactgctaatttcttggctccggtcgtccatgtctgagccgattcttgcctcagttgccacatttgccactttttttagtttggcgagcttttgaacaatgattctccaactaaactaaggctcgcctgctgcaactgaagggtgtgttctctcatcttcagaaagaaaacctgtcgattgctgaatatgttgaaaaggcccaagccaccgcagatgctctggccatagcaggatcgccagtcactcctcaagatctggttttgcaacttttgaatgggtttggactagagtttgatctagttgtttctggaattacttcttgcggtaactatctttcctttgaggaagttcaggccctcttgctatcacaagaaacatggttagaacatcacaacaatatgactgatttgtctctcaatatgaaagccaacttgagtgttaacccatcaagaaatggaggacatcatggatctggtggtggacaaaaaatggcgtgcgtcgtggttctggtcgatctttttagcgtggtgctggatcaagattgttgggtcaagtttgccttcggtttggacacacaaccgttgtctgtcattatcgatttcataaaaactttatcacccccaaatatggtacttcttcttcatctcaagcttttttaactgaaattgattgtccttatgatccacaggccttgacaactaccatgctccttgacatcggtgatgatgatctctggtatgtagacaccagagctacgaaccatgtcagttgtggcacaaccaatttggaatctaccacaccctaccatggtactgaaacattggttgttagtaatggtaagcaattactaatttcgtatattggtcaatctattattccctcctcaatcgatttctctcctttacaattaaacaacattttacatgtgtcttccattaagaaaaatcttgttagtgttccccaactcactactgacaatgatgtcta

SEQ ID NO: 240168 - DNA, 1637 bp, Cannabis indica
aaaattcaacaaggtctgatctccacaggttatgtgaagaccggagaacaaataggagatattttacaaaggctttgaatggggtgcgggttgattatctttgtaacaagctcggcatgattaacatctatgctccaccttgagggggagtgttagaatattagctgtatattagttgtaaaaaattagggtaacttgtatttagtagtttcctattttgtaattagtagtttctcatttagtctcctagctttgtatataaatatatactattttatggaatacaacacataattctattcaccattctctacagtccggatagaagttatagattccgtatcaatgattagcggtcccactcaattgtactatcatgttctcaagatgtatgtgtttcccaaaccaataggtaggctttaactaacaactctaagaacataaataacactcttgagatcgaatctaaccatatcaagattaagatcttttgatctaagatcaaccagtgatattgacttacaaagatagaacagtaagattataatatatttaccaagatcaatatcagtcccagtccaatgtatactccatgcatccgatactagcatactttgccaatgtcttggaaagaacataacacattatccaaggtgtaactaaagtttatcactaactatcacattagagtaaatctagtgcgctgatgaatcatgggacataatcttttgaagaaaaccttccactgtgttgacatcactataattgtgaattacaatatattttggatttaataaaaattgtatattaaacaataaacatgagtaatatatgtaaacataaatgatttctaatcttatattgataacatataagattatattaaaataggttttatttatggcataaaatcccaacaacggggcctaccaaattattaattaccctcgacaccaaaaatgaatttatagcgctatagtcaaacaatacaatataataagagttgttgacaagaagctaacttgttcctactgaaggactgacggccgcattcagttgtgtaatggaaaacacccagattaaagtggtattttcctcttgttctagttcctctcctttcaatacaggacaatctttcttatagtggcctacaaaaccgcattgaaaacattccttacgattacattctcctggatgatgcttcttatagtcatgaaagcactctagataagtataatgtcctccaaacccaccctataaactaccttgaccttacgtcccccaaaacctcttattctaactcgagctcaccaatgtcgatgcaggtttcctcttttgttcaaccaaggagtcactaccacctgtactataattggaagtaagaggagcagtgatcccaccatcttataaaatcccttgaggccttaaacaaattatgtagggctctcagtctaaagagcattcttgatatctagctctccctaaaggactggaggtccttgcatccaaagtctcccatacaatgattccatttggttaccagccatactctattcttttggtaacactagaacacagatgattggaacttgaggtcaatgtactattgtgctttctgtcctaaataaaactcattt

SEQ ID NO: 240169 - DNA, 1555 bp, Cannabis indica
attttattttagttttcactattcttttagtgtgttgctgctaaattttaacttgtaatgctggcgtgtacatagtgtacacatagtatgttttcattggtcacataatattaattatttatatgtaattaaaattattctaaatataaaaaataattttaaaaaaaaaacaaataataaaaattacaaaataattttttctcttcaacttttccttctttatctagaaccatgagaaacatcaccaccaccaaaaccctcactgcctaccaccatgacaccacaaccactaccattataaccaccacactatatactattaccacctctattattaccaccatactaccattaccaccaccaccaacatttctctaaaattatttttcaaaaaaatatatatatatttttccaaaatcaaaaaaaaaaaaaaatcatagatctagttctagaaaaaagaaaaaaaaaacctcaagtagatcgtatagatcccaatacagatctgtttagtaccaactacccaggccgcccacacccatggtgttagacaaggagaaaactaagagtaaataaactaatgttctttgtaatgaattaattgatcaaatgatacactgattataacttagcttatatactgagctaagagagaaagagttagttacatgatatgaaagttagttacaatcgagatacaaacaactaactaactaacagatttaagaacagctaactctatctagaacctattctctaacagccccctcaaactcagtaaggtcgatgaaaatacacttagtttgtctctaagtatggaaaatttggagcttgagactgcctttgtgagtaaatcagcaagttgatcaatggttggtacattttgtaccgccaactatgatcgaagcactttttccctaacatagtatagatctatttctctgtgtttggttttggcatggtgttaggttatttttagtattaattttagattaattttagtataattttaatttagttttaatcgtgtttggagcattttaacgcttgttatcttttatttttgcaggtttaaaatagaagaagattagaaaatatcaaaggaataagatgaaaaaaagataaaaatatctcacaaaaagatgatacttaaaatagagaaaattgtgcaagaaaataaagctgaaacttcaagcctgaattcgactatgttctgattagattttggaaaatgtcaaaacatgaaagttctagatttttttttatctttccggaaacatcttgaatcgtccaattctaagaaatatcgagagagttatggccaaaatactatcagtcgacgcagcaggaaactcacctcctcttctaatcctaagcagaataggttttctaatcctaaggagaaaagagttttttcttcagcgaattttattttattttatcattttttgactataaaagaagtggacttcaatagttttggggaagcaattttagagggaaaaaggaatacgaatttcagagacagaagtcaatactggaggcattctgcagagag

SEQ ID NO: 240170 - DNA, 1023 bp, Cannabis indica
atatgtaaaaaagataaaaaagaaaaacgaagagcattaccggtgcactggaggttacgggcgctgcactggcggtggacgggcggcgcactggcggtgccggggaaaaaaggccggagaaggggcctgtttgaaaaggggaagggggaaagtttttctgaaatggcaaaaatgggtttctgaaatggggttggatatttatagatatttaataccggcgtgacccgccagtattaattggcgggtcctgccggtattaatccgccggcattagtgtattcaaaactttgggcggtaaaaatcccaccctcttttttcgaggcgggattccgctggtattaatacccttccgccggtattaatatattttaaaataaaattttatttatttaattaatatattatttattaaatagttattaccggcggattactaattccgccagtaattcccctattattagaggcgggtggggtccggcggcattaataccgccggcaatgcccccatttcttgtagtaattttaaataatagtaataaattttaaaataactaatacaattatatatattagctcaatatgtaattttaatttatctttattaattatattttttatatcgaatatctttgctatacattaatactgtatatgtttatgtgaatttaatataatatttattaaaataatattaatatattttaaattaattgatactttaaaatttctttataatataaaaaaatttcgaataggatcatacatataatggtaatgatggtaagcccttttgatggttgctatttagtaaatattttatgttatatttttttatttagaaaaactttgtattctaccatatttaattttgagtgaaagaactttttattattatatcaacttttatgtatgtgtaatttttaatttcattttaaagtttagtatcaaatgtattattttttaattttttgaacaaattaaatgtattattttattaaaattctttattattgtgccatt

SEQ ID NO: 240171 - DNA, 792 bp, Cannabis indica
attttttttgttaaaaaaaaaagcttggaactctcatcttacaatcatactcgactaatgatatgtgcactaaaatattatatgttgtcgcgtttgtttttttctaactaattataatttatatttatttgagataaaacctatacataattttacacgtatcattacttatcaaactcaaataattgaacttcttggcacggaaatctcaagttgtttacaagagtgatcagtcatggtcttgatgacattctcttcagcatttcgttcttcaatgacatagcatctatggtgaaatatgactcatcatttacaatgtgaagagcctatgagcaagaattctccaattaatatcgtattgctacaagttgtgaagtgtgaacatcactgattggaatgaacctctgacaattggaagaaatacaatatttgttaatgtcccataagaacagacttgaaggataccatacataattacatagaaattataggccatttggttcttttggtagaggtacttttattgacaacaatggaacctgctctagtctttgtagctgtctacaaccagatttttactaaagtcctgtggagatatatggtgccaaataagcatgtcttgttgtgacagaagatatttagataatggagagaattagactgagtcatacgcagtaagaacaatgttctattcatgttcaaaagatggtcataggaatccaaaaatcaataggatggtgtttggttgagagaaaagaaaatataaaaataaaaattgaataaaatttaaaa

SEQ ID NO: 240172 - DNA, 764 bp, Cannabis indica
tccaaacagcaaaattgttctgtttctttgtcctcctggggtcgtaataaaaatcaattctcacaccgcatcaaaagtatccaatcagatattgagcgccttctagcgggtcccattgtttttcattctgatgccacaaaagccaatgatctccaacgtaccctggataatatcttgatcaaagaagaaattttttggaagcaacgctccagagtaaattggctaaaagctggcgacaagaatactagatatttccacaatcgagcttccacgaggaaacgtaccaacttcatcaagtccctcaccttggatgacgattctcaaatcaccaatctgaatgatattaccacctctttcgttcagttctatactgaactttttgcttcccaaggtactaatcctgatgctatgtctattgctacgcaaggtctctctaagcaactcactcccaatcagtgtgcgtttcttacctctcctttcacttttgatgaagtcaaagcggctcttttccagcttgctggagataaagcccctggtcctgatggatttaatcctagtttctttcagaaaaattgggattcggctggtagagatctctgtcagacggctttattcgctctcaccaccaatgctgatcttgcccctctcaatgaaaccattttggttctcattcctaaattaaaaatgcttctcgggtcaaggatttttggcctatcagtctctgttccactttctacaaggtcgtttccaaaaccattgcaaac

SEQ ID NO: 240173 - DNA, 2021 bp, Cannabis indica
tgactgaattttgaggcttgaatgtattcttttggagctttgaaagacggtttaataagtgctttaatggatctagtaaaagaggaaggggtcttggtgaaaggttgatatggatttaagagaggaagagaatcagaagtaattttattttcatctggaacataagaaagttcataaaggaagtctagcttattagaagttgatttgcgacaagtaggagagggtgtaagtgcaagggggccgaaagagtactgagcgagcttgatgattcgtcaaaattagccattgtggaaagcagagactcgtcaataggatggtatgagttatggctctgattcctcatttgagttttcaatgtataaatatatatatatatatatatattctccgttcatgatcgatccgatattggattttttttatttctaattattttgattacattttattattagaattgtctttattcatgagttataatatttctaataaaattaatgttctattctatttatttatcatgttataaattagataaacattgtatatgaatatatatacttgaaatttttagttcccggtaggttttattcaaaatatattgttttcatttttgtgttttcttttttgaatacatttacactaatacatttatataatgctatagaggtatttgtgcatgaaaacaatttgaaaaattatgaaaacttaaatttttttttggaaatatcatgttcggaaccaaaagttttttgtgaatttaaactctatgttttatgtgttattctggtttgatcagctaagcttgttgatcttgataagtttctgtgtatataatcaactgtatctaattattctattaagcaattactattcattgtttactctgctatatagtccggtttgtctttcgatttatggtatttattttacacatgagtagttagttagctgttcaaaatagtactataattaaacttattgtcctgcaatcttataaatagtctagatatatgcatatttccgttgctaataagatgaaatatttcaggtcaagttgaggtttggaacttacttttatgaattttattggaataaaatttggacagataagaagagatggttcttaacattcccttgtttctctctctatttttagtttcatcaaaacctataactgtaacttctccttcttcttcttattttacttgtagcaatataattattgatgaagctcatattggtaaaccaattgaaaatcaagaggaatttagctcaattagacaataaaaagagttataatattgatttgattttgtaattctagcatataatattcatctatagtggcaatgaaagaaataagttatgactatagtttcatgaataagaaccacttaatctgttcagaattttcatgtacaatgatgttatggtttatatatttgcacatgtatttaccacacacatttgcttaatgcagctgaaatgctattatgtgttaagtgatgctcttcatagtaaaattcctatggtgtttgatgtctcaaccacgatctttggtgctgatgtaacacatccacactctggagaggattctaatccctcaatagcagctgtaagtaattaataatcttttttttttaacaagtaattaataatcttttattccttttttttatggtgtgtttcttttagtgtaatcaaagttacaatctaatgcatcattatattgttaggtttcactttaaaatattgtaatcctattcggtggtaattgtagttaccttatgtattataatgatgattaggtgagggaccatgtttacaagattctattgcatcactgcatcactaagtcgtcaataactaaagcaggacacagactgcacaagaaagtttctactgtatagttatgccgctagaaatttaagagacaaatgttactcaaattttaacgatgatgacgtgtgaagagtaacaacacgtggcataaaaataccaggactaaattaatgaag

SEQ ID NO: 240174 - DNA, 1052 bp, Cannabis indica
agagagaaaactctatattttctcaattgtatattgtatgtaacatgtattgttattttgttctttctttttattacttatatatcatatatatagttttagaattatctgtggtgcacccttcaaaataaacgaaagtgtgcacctcctattaataaaatttaattggctctcaagttgtcatttgtgtttcctaccacggggttgagctgcactatagttattacttaaaaggcaaaacacgtttttgagggagaaaaaaaatacgtttttcaatgaggaaaaaaaactcgtgtataacttattatagatttagattcaactgttagcacccagaattaacacgtactataagaaaacaaatattcgatccgttaggaaatcttaaattctactattgtataacatgttcccagccactcatgttattaagctcccaaagttgaagttgtaagaatcatcttctctaagaaactttaacgagtgaatcaaagaacttagtgaacacaaataggagttcatgtatactcaggattcaagctgatctactaatgatcatcattgtgatatgaataactctttcatggtaaatgatacattgataaaagatgtttattacatatcggctcagtcatgcataatcgaactatacacaacacctttagtacatgtctatccacatatgtgattcgaattaaaatcacacacactagaagtatattgtatagtaaaccatacttagcaattctatattaaagattctcattactttaatatactaccaacttgttttattcatgtcagataatcttaattctcttgtacatccttacaagattatacattctccatatgaataaggaattttttgatatttaataattatgctcttataattaatgtatcatttatcttataattttatttcatatattctctaatatattatccattaattacttacttttaggacataaatcccaacacatcttcgagctggtctaaaccgaagaagaaacgctcgggacaagtacgtcccgcccaaaacactc

SEQ ID NO: 240175 - DNA, 1418 bp, Cannabis indica
tgcataactataccagtaaaagttaagtggaaatgtatttaccttgttaggatcttgacaatcttattttgagcaatcgtcaaaactataagggaatgagctgtcatgttaccagatccagggaaccaaaacacagaaaaactaatagcatgttcagtattattttttaatttttgttttaaaaaaaatagttttggaaataaaaataaaaataatttttgaagtttttataatacaaatcgcgtttgattaatattttttaaaaataatattgaccaaaagtgaattgttttttaaaatagaaaacaagattttattgttttaaaatttttgttacaagtctaattattttcaaaaaatatgttttttagttatgatgtcaaccatgcactaaaattcttgccgggagcaataaaagcaagctagaatattaatttgggttgtggatctcatgtcaatggtaagttggagagctttaccattaattaaaaaagacattgttgtcggaggataatggacaacaccaagatatgcgagtattcagctaagcaagaatactcacagagtatagtgagtattcacctagaatgacgaatgctcaaatacaatataataagtagtgaaagtataaaacgaggagtacgtaaggaacacagaaatatagtggttcaacaagagctcgggttgcctagtatacttttgcaagagtttgtgatgagctttcttatgtgtggatcatccctttatatagaaagtaaatgacccttttagttatataactggccagacatgatcgctatacatataaatttcattaaaagaaatgagaaacgtttgtacaaataaatgagagaacaatttccactgttcacatttaagtccggaatgggggccactatcttggtcgcgtattgatcattcgtatactggcaatttaagaactcaagcgttcagacaagttaccgcgaatattgagcctttggaccaaccgaaatgaaggaacgaccttcacataaggcgtaagggagaaacacttggccagcgcatataatcggtatacgtcgcgattgtgcttacttctttctatgtttcgcttttatttttttttttggttatgcgatgcattacatgtgaccagacattgtcccagtcgctaccttcttgtatgtttctatcacgcgagaatgtatttttatcgggatttatgtccttgatgcatcatccttttcgtaagagaaataagtccatgtgtcagttttatacgagactgttgtactcgttatttaaattaaaaaatcatcaggtacgcaacggaatcgtaccacatcctcaggatcaccatatgtatatacattaaatctgaaataaatagacgaaaagaaaatttacctcatgaagcctatcagagtattcttgtt

SEQ ID NO: 240176 - DNA, 1004 bp, Cannabis indica
tacaagtaacttaagaagttgtggatttcatcttcttaattattgttaatttcatatgcaccaagtactatacgtaccactttggaactaataattaacatgaaacaagtatttgcataaatcttaattaaactttgaccaaatcaaagattatacaactaagagagccaagttaattacaaaactcaaagaaagtgttttactatttaattcttaagtaaatatatgatatatgactttctatgaaagtatatataaatattgtaacctttcttcctaaaataagagaaaggttcttgtcattgtgttttcctaataatttgaaagaaaaatattgtaatctctttgttataataatttttttttgtcaattatacaattatttcaactcaattaatttatttgaggttctcatatatacacatacatattaaacagctcaactagatgagaatatttgtgtcatatccaacaaataataatgaagaaaaagaagaagatcgatcaaaaacattatacatatatattttcatttattcaaacaataacaataacaacatcagaatgagataaagaaacataaacaaaataaactaatccatggatgtatcatattattacagagtggtacgtgtaagatctaaaccattgtagattttgatcattttttaaaaaaaaaaaaaaaaaacaacttcacaataagataaataatgatagaataaaaatatccatgaatgtattatatatatatagagcattgttattaggcaccagtagtgtctagtaccaggatgctaggcaccacaggtgccctttaacatttctaatatatttatattatgggtgtatgcacatcccaaaagaaggtccataataataacaaatacaaaggaggacaacaataccctcccacactttcgtcgcaatataaactttcctgatcttcacaatcgttttgtagtagttttcgtcccatcataggcatgccatgatgatcggaaacc

SEQ ID NO: 240177 - DNA, 2219 bp, Cannabis indica
gggcataaaacccaacagcacctcctactcaaactggccagcccgcatgcaaggcgtcctcgaggaaggcctcgcgtttcgaaggctaggaaggcattaagagcccctgtcagtgatgataatcagaataatccaactgatgattcccaggaatgacaactatgtcagtcaatagttccaaggtcttttgggtacgaatgagagtcttttcgtaaacatgttctagttgatgtggttgaagagggttcaatggttactaagaatcaagctagtttcttgcagcagtgttacactaaagatgaagtcaaggttaccctcttttcaattctggatgataaggcccctggtctagatggttatggtagtgctttcgttaagcagacttgagatataacaggcaaggactttgttaacgctattctttcattcctgcattctggaaagattctgaaagagatcataccactacggtgatccttatcctaaagaataaatgccctctgaatgtgagtgagtatctccctattgcctgttgtaattttgtttataaagtggcgataaaattgattttttataggcttcgtgagatactccccttcctaatctcagagaatcaaagtgattttgtgaaagagagatttattgctcataacattatggtctgtcagaatattgtgagaagttatggtaggaagaatgcaaggcttcgtgcatgatcaagattgaccttatgatactcttgattgggaattcttttatgaaatgctttggcgtttaaattcccaactaagtttgctgacttagtcatgaactgtgttacgactcctcgattctcctttatgatcaatggtgctctcactggatacatagacgctaaaagaggtcttcgacaaggagatcctatgtgccttttgttgttcgtgcttggcgtagaataccttacaagaatcttgaacaaagaagcctctaaacatgaattcaaataccatctttgttgtgagaagttgaaattgatccatctctacttcatatatgatttacttctctttaattagtaagggtgactttccttcaattcatcttttatttagaggttttcaactctaagagttcttggcttaaagcaaataaaggcaaatcagccatttatggagcaactatgaatcaagaagtgtgggataccttgattctatgaaagggtttgtgaaagggtctttaccttttaattacttgggtatcatgaagatcaataataagcgtatctcaaaggttgattgtgagtgtatggttgacaagatgacacaccgtatccgtatttggagctctctgaagatctctttcactagaaggtgtgttctaattaattttgtgttgttctctataaacacttactcgtgtctcaaatactattattaattaaaagaattaattaaatttgttgagctttttttttggaaaagaaatcagattatgaaaagagatttgtaagtctaaagctcaaggaggccttggcttcagagatgttgcattgtggagctgatgaggataatttgtagtaaaataggttcataatatttacttgaggaatgataattggtggagctactctgctccaagcactagtagctagttggtattggacttaaattgttcgagtcaaagatgagttaaagaatggtattggtattgctgatgagctccaaaagaacaattatataattgcaggtgtttatactaagatgaaggagaatgttaatcacttactcttttatttgggatcacttaagtgtgcctaagcacaaagttcatttcgtgattggctttgaaaaatagattaacaacaagagattatttattttgttttagtatgacttctgatttttattgtcttatttgtgatcagcataatgaatctattgagtatttgttttttcaatgctattttaatttgaggagtttaaagcagatagttcttctgataacataatgataacataatattcttctgataataatattacataatgctaacttaaaagagtacttagcattacacaacataataataattaataaacagaacaacattaagtacttataacaaaatatagttttaacacaaaagcacaacattatcataactaatataatatacttaaaactagaccccaaaagccaaagctaattacaagactaatttgggccaagatttccttaca

SEQ ID NO: 240178 - DNA, 1286 bp, Cannabis indica
tgacagtgagagcaagaaggcctgggttcttgctcttggctgatttggggactgaacaacagcaaccataagaggcaggctagaaccaagagttcttttgcattatgcattattatagttcttttaagcatttctcaaacaaaaataggagtagtgagctacgatgtctatcccctcatggtgatgagattcaacaattcctacccttgaggtgatgttgaagatctgctatctatgctagattattcagacatattctatgttgtaatgtgtatgaaatatggtaacatgtagtgattttttctttttagtgtcatacatcttcaaaaattaaccaccaacaacaataaaggggactaacaacaccacttcatgtgtgtgtttatcttatattattgatatgtgagtaatctgtggtgttaatgttacacttagattgtgtttgttacgagttttggtttgtatgagaatatgagcaagaaaattatttgtggggaaatatgaaaattaagtgtataatggtattatacatagttaaaatcaaacaatactagtgaaaaatggaaaacgctattcgtacgcccaaattttttgattgttagggtttatagtgaccctccttgagcgggtataggggttttttcccccttgtatctctttatacttctctgtgtgccttgctattcctgcttgttgctctgtttctctctgcttctgaagtcctttttcctttctctccctatggttgacaaggaaaaatagtagacaggaatgaagatacgagttgatgtttgtaaaatcgaggaccagtccattttgttggaatcgtctgctgagttaggaaaggatatcatcaatctctcggtggtggttcccattatttccaggaaggtcatctttcttggcctcctctggtctgtgctcactcacaaatggaggttgagaaaaggatggcaactgacaaaggtagctcaaaatacgttcatactctgttttacgtgccataaggaagcagagtttgtggttaaacagagtccgtggattgtttgtgatggtttttatttactaaacatatgtgaccactaccttcttaaatggagaactagaagagtatatatatatatggaataacctaaagggtacattaaaaaggagaagaaaacctagtttgcaaattggaaaaaaaatttatatgggctcaagcagtcaccaaggcagtggaataaaaggttcgacacctccataacaaaataaggatacatgagaagctattatgagcattgctt

SEQ ID NO: 240179 - DNA, 1500 bp, Cannabis indica
ccattgctgtctctcatggttggccagtcacacaactcgatgtcaacaatgcttttctacatggtactttgaatgaactagtctatatgcaacaaccagccggattcgttgatgcttccaaacctacacatgtgtgtaaactcaacaaggctctctatggcctcaaacaagcaccccgggcatggaacgacaagcttaaatcgacattgctacaatggggttttactcaatccaaatcagacaactctctttttgtttctggctccggctcaaacatcatcctactactggtatatgctgatgatcttctaatcactagtcctaacagccgcttgaagcaaaagcttatcaatgatcttaatcttcaattctccctcaaagacttaggccccctacactatttcttgggtgtcgaagtggttcggaactcagttggcatgtatctctctcagtccaaatatatcacagatttgttggtcaaattacatctcgatggtgtaaaaccaagctcaaatccaactagttcgactcacaagttatctcttaccactggagaaccctttccagatattcatttgtatagaagcaccattggtgctctctaatatctcaccttaactaggcctgatgttgcatttataatcaacaagttaagtcaatttcttcatgctccaaccacaacccactgggaagccactaaacggctcttgaggtacctaaaaggcaccataacagagggtcttctcctcaaactagcaccactcctaaatctatatggctactctgatgctgattgggcaagctgccccgacgatagacgatccactggtggctacaccatcttccttggtggaaatctcatttcttggtctacaaaaaaacaagccgttgtggctcgatccagtactgagagcgaattccgagctttagccaacaccacatccgagataaaatggctggtatccctcttatccgaactgcatatctccttacaccaacctccaatcatctgggtcgacaaccaaagtgctgctgcactcgccgcaaaccccgtgttccatgcccgcagtaaacacattgagatcgatatgcattttgttcgtgatctcattattgctcaccaactccatgtccgctatgttccatctctcgatcaagtagctgacctgctcacaaaggccctcaccaccgatcggtttcagtatctcaagtccaaactcaatgtcgttccaacgccatttcgtttgaggggggatattagctgaattagttagtgtcagtcagttagtttttagttatctgttattactgttaaaatgttgttacaagtgttctgtttttatctttcccaaagtttgttataggttagttattagatattttctgtttcttgttctgttagtttttctcctggtttttaggttgtaaaactctgctatatatatatcagaacacttgatcagtttgattgatcaaccatttcatttcattacagtcctg

SEQ ID NO: 240180 - DNA, 762 bp, Cannabis indica
atatagatgagagcttacaaaagatctagtttaaagtaggttaatattccttaaaatgggaagatatcgccgaaaataaccaattaattgtcccaaaaaattaggtaaatatctaaacttgaaccctacttttgtgggttgtgggagtggattcacagctgagagtgagccattgtttatctaaagtcaaagttgcagaaacaccacctgtggctaccagcataaaagttggccgacctaccctttgttggaggttggccagcacatgctactttatggccgaccatgggtggtctggccagaccttcttggttggccattttgttgtatcattgtcctgcatgaatatttggactctttgtcaattggtaagttgtgcatgatgacttggtcctcctacttacaagttgtactccacgtggtatcaatcttgcctatgtggacatgccatgtcacatggacaaaattgggataacttttgcccccaagtccatgtgcaaatgtttgtacggataaggaatttttaacttcagttctaacaattgaagtcttagtcggacaacttttggccgttcaaatacttgggctcttcatatgaaaactttagttataattttttttgctgctgacattcccactagggaactattaatcttctacatggctattttgtgggatgtgtaagtacccattacatgtttgaagagaagggcatgccaaaacctatataaggttcatttggtcatgcctcattcccacatt

SEQ ID NO: 240181 - DNA, 1544 bp, Cannabis indica
ctatcatcggcgaagaaaagatgggagattgttggagcatgccgtgcaattttaataccaagagaatgactccggggttgccgttgctgggttgtataattgataagtgaagaaagaccctcggagcacagtagaaataagtatggcgagaggggatccccctgacgaatgcctctggtaggcgtgactgttcccatgacttgttggttaagggaaaaggagaatgttgcagtggagatacaagccataatgagatcgataaaacgctgtggaaagaagaagtgttccatgattttgcgaataaagacccattcaacccggtcaaaggcttcggccatatcaagttttaaggccatccaacccagtttacccgatttacgatgattgagagagtgcatgatctcctgaccgatgataatgttgtcagatattaaacgggaggggagaaaagcactttgtgagggagagatgatacggctgaggattggcttgaggcgattaactaagacccttgaaatgattttgtagaaagtggagcaaagactgatgggtccatagtcagtgacctgctcaggatttggccatttgggaataagaacaataagcgtttggttgactgtcgatagatctgcatccccatttagaaagttgagcgcagcagctgtgacgtcctggcctaacagatgccaattcttttggaagaaactgccattgaaaccatctaggcctggggccttgtcatgagcaagctgaaaagtagcagtttttatttcagcagctgtaaaggtggcctgcagaagatctatttcagccggagtaaggcgctcagtgatgccagacagaacaagatcaatgacatcattatcaggtaattggctttgaaataagttggtaaaatattgctcgatagttgtcaaaattgaaagtgtatcatgagcccaggtgccatccaaccgctggagagagagtattttattggtagatcgtctcgtggaggctatgcgatggaagtatctggtgtttttatcacccaactccgcttcaagcttcctaccttgatctggaagtatctggaagtatctgccaataaaggtcctctttttgcagcaaactacccaactccgcttcaagcttcctaccttgatctaattgatcattcgtaggttggggcaatgaattgataattttgagttgagcttggacattacaaatttgggtagctagcggggggctaaagagtcgaatgtagtgaattttatggaaataatataaatgtgttgtcattttgataaggacaaaattatatgtgcatggcgtgtaggtaggtggtgacagcaacaaggggagggtatatcggtcactttaaagaaaatttaatgtatcagccgtagtagtgcggtcggtaaggctgttgaattcatagaatcatatataaatatatatatatatatatttatatatatatatatttatacactttcggttgataaaccttacctgtctagccggtcactctctccagtctccagtctccactatcacac

SEQ ID NO: 240182 - DNA, 1945 bp, Cannabis indica
tagtaacattaatttattgttatggttcattatgttacatttattaataacattttcaaaatgtaattgtataagttttaattacattattattatattatatataaaaaagcattatattttaatattgttataatttcataataataactattttttaatgttatcattcctcctatgttatattcatttaataacacttttaaaatgtaatcatgtaatttttcattacaattttaatatgttatataatactttgttaatgttatttttgttgtagtttttataacactgttggagtgaaattattaaaatttataatacatattctatatcccaataatgtcattacaatttcataaaatctaagtacaaaataacatgataaaagctcatgcaatgtctaataaatctaataaaagtatttgtaacatttatcatcaattataaaatgaggtactgacataataaaattatgccgcgctctcgactttctgcttcttctagtttcctagacaactcttctatcctctcacggagccctgcagatctgctgtcagctagttgtaaggacttctctgctgcagcctgagcagccatggctgcagcaacaagttcttctttcagctttagtttgccatttgatatgtccaaagaagccattgttttctctaactcttgtttcagaatgccaatctaattacacagttttagacaaatcctgaaattactatatagaccaggaaagaaagcatcaaagtgaataccaacaaagaaaggaatggaatttaaccactttgtcgcgttcttgaatctcaattttatttttctttatttaaataataaaatttttaattttatagtattttttttatgaggtcaatttgtaagggttccatttatttagtgttgattagtttcaagcaagaggtatatatattgaccaacttttattattaattaattatgaatactaaaaaaagtttgaatatcttaaatattgatccacagaaattatgcgaatacatataatgcagtcacatgagtgataaaattttatttgttaattagcatgaaaaactattttttttcctatcatttaacacttaacaaactttgatatatttaatttaatacgaataataaattagttactaaaagcaatatatattaagggtacaaaagaaaataaacaaatagttattaataatactaatgtaatttttagttgatgctcaaaatatttttaaaaatagaaaacatgctttgatgaaatatatattgtaccaccatgcatgcacccatatgaccaacaaacaaattattaactaaagggatcaaatccacaaatatgtagctttattatacatagcgaatctaaccaaaccaaagcaaaagcaaaagcacacaacacacaaacagagttgataaataattaataaacataattctgtctttaattattaatatctcaaataagaaaattggaaagcaagtaaatagatttgtgcagccccacaattattgatgagtactatagccaaactcctcagctgattagggattagtaaccttctctcaacatatctccctgtaaaaataatatatttagaaaaataatcagataaaattaatcactaataattatttaataaaaaaattacttctcacacgtagaaaatgaaaacttaccctcaagaaaataaaaccgaccattcaatgacgattttaaccgttagtaagtttttttaattttcgattccgtccggttttggtttgaacttttcttttcggttttctgaatttcatactcagtcagccctatgtatacatcagaaacaaaatttatttaaccacaaaaagaagaaaaagagaaatcaaacatttaattttatatatggttttgattgatgaataaaaataactgataatatacaagtgactt

SEQ ID NO: 240183 - DNA, 1655 bp, Cannabis indica
gagaatttttaacgaccaaaaaagttcaggaggtatgatttggtacatgtcaaagttcgggaaaaaaaaattactaattagtcatttatatatgttgtgtaattcagctactcggacagttgtgtccacttgtcttgctgactttaggcagttaataatttcatctcaaagtttattgtgtttcttttttatcacatattttcatttatgtattgaattttcctaagtattgtgagagatttggaggggtgttaaagggtgcatactgcatagtgtttctgatcaatgcctctcttgtgagttaaaattgtaacggtgccaggctaagttgtcttgtctcagattgtaaaagcacattagatatttaattaagttttcttccattattaaaaggctattctgttttcagattgatgttaattactctcttctttctatttctattttcaatttcatttgtttagtttgattctcattctcttgattgcattgattgaactctattcttgtataggtgtagtgttctacatcacaagtgtatcagagctctgtgcttgaaacatcaagagcctactgcaagaattcaagaaaacttcaaaaatagctggtgtgaagtttgaagttgataaattcacaggccacaatgacttcagtttttggagaatcaaaatgaaagcactcttggcgcatcacggacttgttgaaccattgatccaagaactgcaataaagaatgaagaagatgatgatgggaagttcaatactattgaagtaaaggctcatagtgcaattctgctcaatcttggaaatgaagttcttcaagatgtgtcaaatgaggatacaataattggtttgtgggaaaaacttgatgcaatctacttgaagaaatccttggaaacaaattatatctgaagaagaagttgtatactctacatgatgttaaagaactcagaaaacatcttgatgatttcaacaaattcatcttggagtttaacatcataggtgtcaaacttgaagagggggatcaacataatttttagtcacaacaaaatgttaattgtgactaaaacatagtatttaattacaagttgtcgctaatttagttttagtcacaacaagtattatgactaaaaatacatttagtcacaacaaattgtaatttttgtgactaatacttttagtcacggaccttttaatcacaatttataattagccacaattttttcacttttaatcaaaaattttgttgtgattaaaagtaagattttttgtagtgatttttatagttctacaattttttagtgtagtttttcttttgttttaaaatcaacattgttttcacgttactgcttcgagaaaacaaagtaaaaataacattttgttttaaaaaataataagtgaaaattttgtagaaaacaataactttaaaagtaagaaaaataaaatatctagaaaaatgtagaaaaaaaaaaaaaaaaatctaattttaagtacattattgtgtaccatctgtagatcaagttgcaaataaactgttagagagtcccaaataacattattggttctttttctctttgtttttcccagacaaaattttattagagctttctgtttgtagaaaagcttcttttaccttattgttattattttgaagat

SEQ ID NO: 240184 - DNA, 1420 bp, Cannabis indica
cttctatatttatactttgatttatatttatgtttgaattttctttttcattatttttgtggtaggacaaaaaaaaaattgagaagttagagtggaagaaagaatggcacatgacaatatatatatatatttatatgtatatatatatatatatatatagtcttggtcaagataattgatcatatattgaaacaatgccccatccctttctttcattaaggaagtggaatctctgctcttcccatatccttcttctccttgtcccttttgataatctaaaaaaaaatctcacagaaaaaagtaataataaaacaattaattaattgaagaatttaacattaaaaaaaatcaataattaatatgtgacttttgtttaataatatttatattaatagataatgggacaatgagacatagtatctagtaatgcatagcctaaaaagcaggcaaaatcttcatatatatatttaaatattctatattaatatattttatatataatgtgtggtgataatcgatatagaaaattaaatatatgaaattaatgcagggtatggaagcatagaatggaagaagagtctttgtttgatgatttgatatattattttggaatgtttgatttttacattatactatattttatatatctatatatcaatattataagtttatattaaaaataagataaggacgtaataaggggtagctagattattggctcttttgtcctgatttattttgaaaaataaaactcatgaaaaaacacctatctactatactatatagtatatatattatatatatataattgttttttttgtaagaaagagagttatgttatgttaggttaattaattattgtgatgtcaaaggatctaaatttcagtgttttttctcggagtgataaaataatgtcttatcctcacattacttaaacaaattaatgttttgttttctctcatttataataataatattatatatactctgtatatatacatttacacacgtagatatatatgtatacatgttcattcattcattcatatatataaatatatatatatatccacatttcccaacgccctgtctgaatagttgttttctgttggggttgaggatgaagcagaggatttttttttttttattttaatagagcactacaattgaattcgttatctgacaaaatatacattattgtaatgcatgctatttgtaataaatatagatatataatatgtatatatgtcttatgcatgaactattcatatagaaagtatatatagcatgcatgacgtaaaatcgacggatcgcccttcatcgatcgatatgttatttatttatatatatatatatatatatatataacttgctaagtatataggttaaataaagttgtacttaagtataactatatata

SEQ ID NO: 240185 - DNA, 1194 bp, Cannabis indica
gatttcgactattcatcaatagtgtatatatatagtcaagtgatacgtatcatttttacaaataatatgcgctattacaatatataatagatacgcgtattatcttcaatgttgacgtttgacctttttgaaaaacgacataaaaaactaactaataataacaaagctatatatatagcacaaaaccctaatttgtagttaaacgctaaaagctattacatattatttttatctcatatatgttctcttttttattgtgttattgtttttcttttatcatttctcactattaagcatggaaattttctcaatgggaccacttgtgatagatagggctggcctagtttggaggtcttaaaccaaaattaaaattgagtattttattaaaaaaattaataattaatcaatatattataaattaagtttccatatatcataaattaagtttttttttaaaaaagaaataatactcataaattttaaaataggaaaaattttaaaatcatgtgtactgtgacaataagattttatcaaattttttatgtaatgcatatttacttttacgaacatttatgatgtatacacactacaagaaatatcacttttgtcagcacatttttgtgttggcaaaagttagtattacgttggtaaaatagaatttacttgtgatgcgttggcaaatcaatattagtattagaacttttgccagcataaaataaaaagcgctagcaaagatgacttttcctagcacgtaaatgcgttggtaaaagttagattttagccactgcaaatgtacgctggtaaaactttgacctctttgccagcgcagtttgcgaaatgcgctggtaaaaattacttttaccaacgcagtagcgaactgtgctggtaaaagtgacatttcttatagtgatactatatatacattatcaaaataatatttattatattatacatataaagggatgataaaaaaaattaatccttttaatataagggactttgtgcaatgacccaaaactgtcatatgtttgggtcgaccctaataatagggtatggacattcctccaaacgtaaaacaggacgaaaacttttcatctctgaatgttaaaggaggcattgccactaatttttttatttaaaataaattataatttttgtaattaatatttttaactaaatgtagtgataacataa

SEQ ID NO: 240186 - DNA, 1351 bp, Cannabis indica
aatagagtaaattaaaccaataaataaattaggtgtggagagaaagagagagtggttgagtttttgtatttattccaaaaaggcagatatgagatgatgaggggacacaagcataaaggcaaaaaggtatgtgggtttggagagagaatttttttaaataaataataataaaaaaaaacaattattgttattttttaaaaaataaaaaatattaaaaaaataataatgaatgataaaaaggacaccctgtcccttagttttatatgcactcttactttttctgtataaagacaaagcaagtggagctttcttgtgatcaaagtatattctttcataggcaacaaggcatgcattctctctctctctctacaaaattatgtgaatttaccaatacaccctttgccaagaatactatgctcattatttgtatatattacttgtaattaattattataaatatttagttaaaaattctacgtaatatttataattattacacatataattctaattataaaaaataacgttaaaattattttattttataattttattataattgtacattttttgaatcatcaagtattaattcagaaacacgtgacaatatattattaaactatataataaataaattaaagaattatgtcgctacttgttttcgagctgacacttaataggtttaatgacacttaataactaaaaaaaagtacgattgtcaaaaaaaattataaaataaaatacttttgttgtcacttttttttttattaagattgtatgtgtaataattaattataaatattaaagaatttcgctgcaaatatattccttaattattacttaatagggattaattattattattgtttcataaaggtgaagtagatgcatctaaattttgtataatattatataacataaagatatatatagacataaaaaatgtttgcaaaatattctctcatgaacaagaagacaaaggttatatatttatttacttatattatatataatatgtagatgtagtattccttaatttaccttcttcttcttttatgattgattattattcttaattataaaataatgagtgttggattctacatcatggtgttgttatattaaaactaattttattgattagtgtagtataattatgattatgatgaggagtagtaagtggacgagggtagttgatatatggaaagtttatacatgtaattattaacttatataaattaattgggtcaatattaattttgtatagatataattttgttattatttatatttatttatattattagcaatacatattaggcctgcacatgggttgggttgggcgattttt

SEQ ID NO: 240187 - DNA, 1293 bp, Cannabis indica
gtactttgttttttttttttgtttttttttttttttctctggaagtagacatgacataactgttggggaagagaaaagtggtgttctttttacgaacaggatatctacaaacacattattaatattgatattaatgtttcttagcaaaaaaatattgattaatgttcttcttcttttttctattcattttttgtttaagtatttatttacatttgggtaaataagtgaccacatcgtattagattgtattatattatattagtgttatttaatataatattttatttgtgtaaaattatattatctttatcattaactcgatcatcaccccaacctcgttccttaaagacacgaggttggaatttggggctaggtcagggatgggatccgagcttagggtctcgggtttgagtcctgattcaagggtcgaatctaggtttgggatcaggttcgaggctatagtttgggtctaggtctggattcgggtctgagatcgagtttaggggtcgaggttgaggtcgagatttggggttggagtcgggactgggttcggggtcggagtcagggttaggtccgggatctggggtccgagttcgagtctgggtcccaaatccaggtcatgggtacggggtcgagtcaaggtcccccaatgtcgaatcctttgtaaatattataatatgagctaatatgaatcatttgtattaaataacacggtaatgatcgcataattgcacataattgttagcatataattaacggcttaatagtgattaaattaatatttatgattatatgtatattagtacaaaaatgggatctattgtcagaaataggtgtttgagaaataatttctcaattatggagattttattcagctctatgtgtgttatgcatgttatatataaattatgatatttttcatattttatgcctggtaatagtagaatacgtcaatatggctattagtgtcacagtgttacggtagagtatttaagaattagcgaggcaagtttatggacatttagaatgtcgagattattgcagggtattagtttttgaccattttaccctagacattaaggttacttaagagggaagtaacaaaaaataggtctttttaccctaagattgatattagctgttttagtggaatttctagattggaataagtgttatgttgaataccaagtagaataaacaaaaattaaggagataacggtataaaatcaatatcattctctctctcctcactttctctaggtttggaaacccttagaacaacctccaattttg

SEQ ID NO: 240188 - DNA, 771 bp, Cannabis indica
atttagtcacaaaaaaaatatattgtaactatagtattttttttgtagtgatactcgctcgttgggatactaagaataagtaatctatccctttcctcaaagagatcatcaataatttcctcatttgactctttcaaaccaattttgacatattggagactttattgtcttgaagagtaggatgtgcagcatgcacataaggattacttagatgaggaattcacacttgttgaaggatcgaaatgtctcgagctgaacaagttctccttcgaacaccaagtttaaccacccattgccttgaacctctataacacttctccatataaagctcatgatagaacccaattgaacatttagagaagagtctctaggataatatctggcagcaaaaacttttcccgccaaggaatgtagttgagtgagtaaacgcctaccttacttgccctgactaagttaaagtctcgaggattcttaaacccccaaccctgtttgttcttatgcaaacacaatggcccatttcttccaataaattctttttaaagagttagaacttgagcttatagcattgaaaaattaattgaaacatattaaatgataaaataatatatcaatgaaatattaaattctctctcccaaaaggtggcagaactggtgcaaaattggctgggagttggctgaaggagtattaggcttcgaaaaattggttggtggtcatcagcaaaaacaagaattgcagaatttttattgctgtcatggctgccatgatttata

SEQ ID NO: 240189 - DNA, 1455 bp, Cannabis indica
attaaactttaaattctgctaccaaacaaggaaacaaatcagttgagacatctcccatactaaaactacagtcaagatataaattagaagctctaggttgacattcccaacaagggtttcagtttctagaactgtcttagtgcaaacgggtcaaaacttgaattgggatatcaactagacataccatggatatatttaaggcaccagaatcaaattcgaagcaagctcatttttgagcacctgaagcacctggtgctcgggcatccaacacccaagttgacaatttgtcaatttaggcaccttccaagtattagataaacaatctgacttttttttatcttctttgtcttcatcaaaaaatggggaaataggtgctttcagggaagaaacatcatttcttgggtgctaaaagtaaggcctagcatccaggttgacacctggggcaagcccagggcccagatttatattttgtcaacctaagctgtttccaatctagtcgtagcaaaaagtgtttcgggcatttttaccatcatcaatcataataaagatttaagtaaacttggggagaaaaccacaaatctatacccctagaaatagggcccagggcctaagttgacctggtgctgggcctaacgcccaggttgacaatcaacctgggatcctgccttctattactccaatgtcaaattcgatgtgaccattgaattcgacatggtcaatctgtactttgaagttgtgtatgtgagagagaaagtcttccttgctagtgtattgatgccacagtggatttttaaactttaaggtgatctccaaagccttaattcgatttgagagaggagaacaccgctctcgatctaacccataccctattggatttggagtagtgatacccttaaccagagcggtaaaggtgttaaattcggccctacacactgtggtgatgtgtatatcagctggtcgcttcttgttgacattgttatgcaggctcttttatcttctaagttgatcaaaggcattgatcgacctaggccttgtgtttgtttcctggtcgtgtggccttaatggaaactttggggatttatcctatatgacgatagagtcgtctctcaagcattttcttcgcgaggagctactcaaagtactattctgactatttctttcaaaatagttccttagagtgacatgtgtggagggagttggaatgattgctcaagttcagcatgtctccatgcacccatgggaagtatttatactgttagccgtcaggtgctcgggtaaagtacatacaccaagcacctcgttcatcacgaaagtatttttgagtgtggagtagttcattgatcttaaccctccaaatcccatactcttcactttcatgatagagcttctggggtcatcccctaagtctgactacaggtccctttccctttgcagggtcacgaggtggtctagagt

SEQ ID NO: 240190 - DNA, 2552 bp, Cannabis indica
tgtgattcttggcttttagtcacgaagaacacaaagaacagaacatgtttgagttcttgaaaaagcacgagttatgatccatgcagatccttgccagccaaggaggccttatttgaggcctggtcggtcaatggaggctatcaaggggtatggtcggcgaaggggtgataccccctaggctggcctatgccttggggtccagccaacgactaaggcctagaaccctagccggccttggccaaagctccaagtgggaagctagtttttctcctgcttttgacctaggctagggtcttgtgatggccttggagacatatacaactatggccttatgcattatagttaattatacaacttaggacttactatatgtcatagtaagtgtacttaagacagtccttagtcgatgattgaccttgtacattgtgctttatcttgaaggtacctttgggtactgttgacttgaatgtgtttgtagctttgacaggttgctcacctccccttatttcttccatgcatgtagcaccgggtgttgaataagggaggtgacaaccgtgtaggtcccccatttacttcgtatttatggcaagaatgaaatagaccctccttagggcaccaccttatgaacctcatgtgcccagggtggcgacgaggggtcaagttaggatggtggaggagacttcttagtcccgcactagtgttgagcaagagattgaccgaggggtcaagagtctcgctaccgaatttgatttggaggaggccgcaccagtgatgaggaggaggtacaggacttgttatgtcatccttaatagacccttgggtggctatgacgccaatagtaacatgttgaatagggtcagtgagcctttacagtgtggactggatcatgtcctagagcagtcttccaagcaggagatactagatgcaagatcacaggaggacagttgggtctctcttgcttctaccctttttgacgaggcctttagcatgattcttgctagtggcttagtgaggggcatcttttgtgagatttcccatagaaattatcgagtgcatcgggtccctctaggttggttggcgtggtctgaatgccatattgagcatggggcagtgttactgcttcatcagtattttctagacattgctacttactttgggaggtgtcggacacaattcacactgaaaagcatcaagtatcttttggcaatgtttgtcttatagagggagctaggatggcctcaacctactcctacgagatcaaatactactttgattagaagccagctccgaaacagataggactgtgtatttttatttcattcatatcagtcaccaatgtatgtttatctcacattgcaaagaatctagagaggaaggagagggctctctgccgacacctggctagtgggggtccagtaggtgatgcttctctatagatcggtcctagaggcaaggattttgaggtacctactcaccccatgcctgtatctagaggcaagggtaaggcagttgtcgaggactctgatagttcctcttctgatgacgatggtatttgatagttgaaaacatcatactcttatattgtattgaacatttatgattgctttctaacattgctacttttatttagcaaatatgtcttccaggctgagagatcttactgggggacctccaaatgagaccacaggatgagtgaaggccaaggtggctaggacatctcatggtggagatgttgtcgggtcgtcactgcctcccccttccctagggcctagaccaactaggtagtctgcgttacggcatgcagaccagggtacttgaaggcccgacagaggagcggggtcagttgttggatagggggctgctgaggtagcctgtagatgcacagagaaagctccccccttcatcgatgaggaattgaaggagcttggcagtagtcagccaaacaggctctattctaccaatctttgggacctttctctggtaagttatactttcagctctgttcaccttttttgcactgtataggctggccggccatgaggcttgttgcatgtggttggtcggccttggatgttgctatgaagggttggccagccatagaagtgccaaggggggactggccggacagtgttgtggctttgactctaatgttattttgttatgttttaggcattgatgaacctaagctcagcacatgagggctcccagggatccttaaattcccttagggagtaggtgaagaccttggaggattcccttgtagtgaaagacaaagccatatctgagctggtggctctcctggcaaagagatagagaatggtatctggtttagaggctatgcttggcgctagaaacacaaagaacatcgcaaaagctaccttcatctctgagttgcagtctgaccttgatgagcacaaggagaaactaagggaggctcttgatggccagcaggccataagggaggagtatgctgacttatcctctaaacacacttatgagttgaagttgcggaaccctcgagctactctctcatacatgggtagtgaggcttt

SEQ ID NO: 240191 - DNA, 2444 bp, Cannabis indica
actagatttgctccttgggttgcatcaatcaaaggttgtggcatgtgatctccgttaggcacccaagcatcaaaccatattgatgtagctctaccatctcctatttttcggcaaagaccttctttcaataagggcctagactttaaaattgctttccaaagcattgtctctgtccctttcagttcagcatcaaaaaaatgcctcccttttaggtacttctcatgcactatggaactccaaagattatggggatcagtgataagtttccatccccacttcagaagagagcggtattaatatttttaatcttccgaaaaccaagccctcctttgaatttggatttgtatattgaactccaagatatagtgtgaatggatttcctcttttcactgtcgccccaccaaaaattccttaagcattgttccattttatttgctatcctgcttgggatcacctctaaggctgctacatagatgggaatcgaggttcctaccgattgtataaggcaagcacgcccttctttggagaggagacgggatttccacccatcaattctggcaagcactttctacaccagatattgcatgtcttttgatcattaaatatgtacaatagtatttaatataataattaaattgattaaatattaaattagttaataaaaattataaaaaatttatataataattaaattaaattattgaaaatttttggtatttcatatcaatatattgtaataaaaaaataaatatattagatcattaaatatgtacaatagtatttaatatatcgtatcattgaaaattactacatcgttgtaataaaattatatatcataaaaaattatattaatactaaaactagtatattaatactcaaaaaatatatcacactaagaaaattatatacttctattaaatatgtatccattactaaaaaaaaattatatataatcattatatataataaaataaaaattaaatatcaatgttaaataataaatgatatattatacacaataaaaaatatatatcatacaacaaaacatatatactattgacctcgcttttagccaacgacaataagtcttaattaaagcgataagaataaataaacaatagaaatcaaagagtaacaagtaaagaaaacactagaaattatagaggttcgaccgagtgatactggtcatagcatattcccctttttattgtattgacttgtgagtagaggaacaagaaaccttgatctctctcgaaagcttttacaaagatctttgagtaattcacttttagatccaaatttctctcttgagtattttctccccgaattaattcgtcccctttaatagtgagatgagaccaatatttataggagctaattacatagaaatgtgttaacgtagattttcgttaactaaataaataacctttttgtaataaatacactacaaaatttaatgataataataaataccaaatattttacgtaattttatagttaaaatctacatgctccactagttcatattattaaggatattttctcaaacacagaatacaaatctcaatatttgaaataataaaatttctctctatttttttgtcgtccctcttcccatggattctgctcctatttataggaatataggttgacagttatttttattgggattgattcatttacaactactgatgaaatgtggacattccccatgttttatttatttacacatgggataatatctaatagctatccaactgctcctaattttttttttagacggttatgctaactaggaaggttgcatctcatcaaatatgagttctccttcttatccatcttaatatgaaaaaacattaactgatagaagtacttcatcttattgtacccttttttttgtattagtgatgtgagatgatcactacgttgtgtatattaatgcgaggcggttgagtgttgtcacttttactctgctcgtgcaggacagtcaatgattcacgagatctttaaatatctcttctcgtttattttactatctttatcccgagacagacatatgtctcatcaattctagtttaatagttattattcttgtctcacataagactgagtagtcagcaagtttgaatatttgtatcaaacatatacttaattggaactagttatttaaattgcatttaattatcgaatgtcattattatattctttgagttgattcctattctttttgtaggacatgtgtcagcttctgatgcataatcaaatttcgggtatagcaattgccccgtgaaaagtactttttaaatgattctaggggtataatcgtatttaactcttttaaaactttacatgctttgagttttggcagttcaaaacttcgaggcacatcattcagtatttaatgcactgactgttatattttgcaatgttcccattcgttcgat

SEQ ID NO: 240192 - DNA, 991 bp, Cannabis indica
aaaatccacataaaaacccgttgctatcggaacaatctaaatcgcaactaaaatttataaaacaacctacataaaaatcacagaacaactcaaaccataaataaaaaaaaaaaattaaataaatagtatgtagaataatttcacaactaaattttaacacaaatttgatattcttgtttatttatttattaaaatacaataagtttaattaaaaagacttttattatacattcatcccgagcctccaaaccatgcatgtggcacattgccatattcccacacactataaaactatcattatttcacacttaagtaatataaaagccacacaaaacttcacccttagatcccttctctcaaatacatacgagaataaattaattatatatgatcatcacgaatgacgatcatcagtaaccaaccatgacaactgatcattattataaattaataattattggttcgaaaatgttgaatactagattgaacatcaacctcatcataaccagtggcttccaaggactgcttgtatgtggctccatcgtacttggatgggtgatcgtcgtcgtccacgaaatcagacacaggtttcacaaaggcatccaacgatggtccgtgaagtgtcgccacagatatcctcttcactttgttgttgcctaccacaactctatgaacatggctcttgtactttccattacttacaatctgaacaaatttaacttatataagtattcttaattggacaaaatcatgtatatatatatatatacactatagctaggtattagtaaaccacttcagactagcttaagtggttataagataaagtgtgttggaagtctgagttcgaattccaaattatgtaatgtaatatataaacccttaaataaataaaaaaatagaaacattgcttagaattattattatttaattattagttaaaataataataataataaaagttaattttaatacaattcaattatatttt

SEQ ID NO: 240193 - DNA, 1747 bp, Cannabis indica
acaagcaagtttatcccaaaaaattttttggtctccatcgagttactcccatatatagcagtgacagagaaggatctcttttgcccataaaacttcactttgcaatgaagaagctggttgtcttcactaatgatattcacctaaacataattcttctgccagagaagcagtattctcccaggaaccacattactagaatagaaattccaagtaggaaaattattctccataatatcaaagattttctaatgtttaatcttggtttcaaataaagctccgaaacaaatttattcaatctaaacacattaagaatagcaattcacttatcctttttattcaaacctctcacattccatcctaacatattacaagcatccatgaaaaaagattagagttaggaaccgaaacctcatctattgtagcagcctgcagcacttcatatctgttattgctgctggcaattataggatctacaaagttttttgaagcttcactctgtcttagcccttttcatttgggggtaatccaattactatcattctcagatctatctttttcttcaccccctgattatatttgcacctcagttggtctcgagtcaatggcaactgtcctgggatcaaccatctcccctggctctttatcttgaatgatatcagcttttttgattgtccatcatttttctttctcagcaccttgtttcttcctccatataactttcttctctttattgcaattagcaacaaatgtcctaaattaggacaagccgatcacttattagggagccactcatactcaaatgactgctctaccaactatttcctttcattaatgaaggataaagtctttggtggatcgtctaaaatctcaatttcaataatgacacgagcaaacttcaccatagatcgctcttgagtaaccttatcaatcatcactggtttgccaattgtgctcaccaaagcactgagattatttctaccccaatattgaagccccaacccattcaacctaatccatacatgcacaaaattcaccattcgggtagagtcaatttccgtggaccatggtcagagcaccactagttttttgtcgaagtgaataactccaacttcaaggattagatcacgagttgcttcatccctaaaattgacaagagtgcatcctgagtgcattcttacagtcttctcaacaccaaaattgccccatattattttcacaaatccttcaaaaaccttgaaaggagggttagcacctaagacaatacaaaaaatggcatttctccaataagaagcctctacctcaatctcctctaggtcaagttttgcaataatctaatcacctagtcaaataggttcaatatacttgagtctagatggaggagttggtacctggttagtattgaatttgctccatatctcctttccccttgactgaacatcagctttctcaacctcctcagcccagctaccagattttggaaaaactcgagtgctctgttcctcaccaccgatttcaattcttgtatctatcattaagttctcgcaggtatcttggaattcttccacctagtcacatttaataactacttcgtggattgatgggagctcttcgatggtatcattgctcaccgtgatagtattgatcagctattgggtgatcctcttcttcttcgccatgggacaggcaggggaacctcgcatgccctttactcatatttaggatgctaataaatatacttgttagtaaa

SEQ ID NO: 240194 - DNA, 1378 bp, Cannabis indica
tttggatagatttgtatccaaaagattatttcaatcacgttagctagctatatatatatcatccataaaatctttttctatatatcttgataatgtttattactacagtcaatatttaaagaaaagaagtaaaaaagaaaatgaaaaggagcaatgatcaaaaaaggttctggtactggcttgttcaacgagtcatcatcatcatcagaaatagtagtactccatgataccggaggaaatcgttggctgaggccggtttccaagaagaaagcggtggcagccatcgccccagccgttattctgatagttttcatctccttctctttctctctcgttataatgttacctgcagggtggatcaatgttgtaagtactcataaatattgtatgtataagtaaattaatgaactaataattaaggaatatttatgtaaacttgttaatctgtattattaatttttgcagtctaataatgaaaatgcaagattaataaaaactactacttgtccaagaaactacacctacagtaccagttggtcatctttaatcaatcctagtgatccggtggtgagtaatactactactactgtgtcgacgtgtccatcatacttccgttggattcatgaagatctgggccattggaaggagagtggaatcacaaaggagatggtggagagagctcagaggacggcgcattttagactagtgatcgtggaagggaaggcgtacgttaaaaagtacaggaagtcgttacagagtagagacatgtttagtatatggggtattttacagcttttgaggttttaccctggtcggttgcctgatttggagctcatgtttgactgtaacgatcgtccggtggttagaatgagggacttccgggcacccaacccgcgaccaccgccgcttttccgatactgctctgatcggtggagcatggacattgtgttccctgattggtctttctggggctggtaatatataattctcttacttatattataattatttattttctattatatatatatatataattaactatatataaaagtgcattgcaatgcgtgaccaacaccataccatattgtgagttgcatgtaattggcatcataaacataaagtgcacttaattagcatttttctatataaaataaaagtattattagatactaatggtattaagtactttttgcaccttattattagttaaatcatattttaaaaattattttttttcacttatatatatttaattacaccaataataatataacacaaaaaaaagtactaggcaccaataataacttgcacgccaaatttgattaacatagtgatttgtctagagaaaaagtgctttatttatattgttaacgta

SEQ ID NO: 240195 - DNA, 1213 bp, Cannabis indica
aattaaattaatttcatcattttacccttctcgggtcataattacaaaaatacccctggctcaccaacgaggtcttaacatataattaatcaaataaatcacattaattcacatatactgaattatataataatataatttctcaattatttataattatctaattaggattttgctaatccattcctttattctaggatattacagaaacctaaccaaataattccaaacttcacagaacaatcatacaatatccatacaccaatttctacgtgacagaaatcaaaaacatggcctcattcaaaagttgccatgagcgctcaagttttgagcttaaaaactcatagttgactcccacctaaccacaactgcaaacttatcaagtgagcatcaaaaccaatcccataataatccaaaaacaaagccacaagctcacaaacccgacaccagccccaaaacacaaagtcaaactttcaaaacctaagctttttttttccaaaaagagaagaaccaacctgtaccttaagcttcttccaagcttacttcaacctagctgctaccaaaaggatgtggaaatgatttggatagagagaaatcaaaagaaattttttagtgatggtggtttggctttgctcgagagaaaaaggaggagagggttcggtgatctttgattttattttatttttatgttatgtttatgtacatacaaatatattacttcagtttataaaataataataataatttagtttaaaaatgaaataaccattttatctcttttcttggccactaagaaaactctaaccctaaggcatctggtcaaacccgagtatcctgaaataccccaataattctaaaaccaacataccacaataatcccattaaaattactaactaaacctgttgtgacatttttgacctccaatctggtcttcaaggtcgcttaacttgaaaaataattttattccgctaatagctcacatcatacccacatattctaaaaaaaatctttgtaactaataaattacacttagttatccactaatggcaaaatttataattcatgttaaattatactagtaggatcataatcctactcactactctctcattaacccataatataataaaccctaattattgataattaagtttttgagatattacagaaagagttgatatttcatcctggttcatcttgttgaattatgaa

SEQ ID NO: 240196 - DNA, 1779 bp, Cannabis indica
cggtgaggtttttcgcctaataggtttaaactccctattagaggataccctttcgggccaggaggaagattcttcttcttctcattggttttatttcttagaacataaccaactagaaagagtactaaagttagtactatccatagccaattagtcattttatgttaagtgtttagaatcatggtaattgatttatttaaatgcacagaagcttagatacttttcacaacttgggaaatttggtcaactttaagtggaggtcaataaacgctatgttaacaattttattatacttttctttgtattgacaaagaataagaacattttttaatccaaaaatttcttttcaaacgtagatatagtacaaattacactaccataccattgtagggacacacaccaattttatccatatattttcacacttagaaaatattttttcataacaattgattctaaattaattatttaataaatataattattttatatatgatcaattttgattcaccaactaatttctttctcaatttaattttttaattgattgtcaaaatattttaacgattttgataacctcacttatacaaatatagtcttcaaaataatcaattatacgctataagaaaataaatatacaaatataactaattatttaagtttgatgtttaagtataataaattatttaatttttttaaaaaaataggtaaaatactttaattataatatgcattgttatttaagaaaaaatatatacaattttttatatttaaaaataaattacaccatacttatttttttttttctaatatatattatataatattaatatttttaaacttaatattgatagttaaatttttttagtactgataatactcgttaaaatgtattccataaatacatatacatataaagttgagatataatttatttataagttctaaaaaataataaatatctctacgttaaggtgaaaataatattcctaccttaaaaaaataatgaaaactaaagtttgtattttccatagcaaataggccattttctttgggttatctataattgatttgttcaaatggagagatattaatttggattagagacaagagtttttagtcaataaaagctcatgtaaactttgaattgaaacttgaaaagtcaacaatagtgggtgcttgctttgctaaaaataagaatagatagacattttttttttttaattaagtagagtatatttttattaattctattaactaatgatgaattttttgacttatagctaaaatattttaatcaaattgtgattagaaaaatagtacttgaaaaaagattaattaattaatttaattttcctcaccatcattacaagtagtattattgtgattaagtgaaaattaaaatagacctttttgataaaatattattttcattaagagagttattaaaattttattttcagacacagtaattatgtgaactttaatttatttggatataatactcatagaaagaggtatatttaatttttttttttgaaaataaatttggttaatgtaaaaaaaaaatgacgaaattgcattgtatacctattttactttatttattttaatttttaccttcattttcatattctttaaaatatacctacttttatagataatttcttattataccccttaggttaatataaaatatgtgctagacttaagtggaaaatgatagtatattaggaaatttactcaaaaaaaagttagtatattttaatgaaatataat

SEQ ID NO: 240197 - DNA, 1035 bp, Cannabis indica
actgcagaaggactcttcggagtcttatccgagacacggacacggacgtgatcttcctctcggagactaaggtgagcacagaggttatggtaaatgttttacagaggctgggctttggcaatcactgttgtatccctgcggtgggactcgctggtggatttttgtatcggttggagagtgggaattcagcttcgaatgatggaagtatatgacacgggatttaaagctttggtgagttcctcccttgggataccaccttgggttctttactgtgtttatggcccgccttatgtggctctaaagcaggagtttcggaactggtttcttctcaaaatccaagagggcaatgaaccgtggatgctactgggggatttaaatgttacactggaggcaagtgagaaaattggcgggagagctttccacagtcgagaaggagaaatccttaagaattttctgtataactcaggaggcattgatctcggatgcgagggtccgatgtttacatggcaaaactcaagaaaattatcgcagaacattcgcaaaagactcgaccgagcgattgctgatcctcaatggtgtgttaatttccccaaagccaaggtatctcatcttcctatatatggttctgaccatgctcctctgttgctcatggcttggggcgatcgagaaagactagcctacccgtttcggtttcttgaagtttggacatctaatagtgaatgtggagaaactatttcgaaggcgtggactacccaggttctagggagccagggcacaatcttctgtaaaaaactgcagaagacaaaaaaggagttaaaagcttggaatgtgtcaaggtttggtaatgtagatcataatctaaaagacttgaagcaccaactgtctgcaatccaaacgctccaaccatcccaggttaatctcgagactgaagcgggtatcaactggaaattttgaagatggaagcgtatcaggaagaatatggaaacagaagtcgagagaaacctggcttaaagtgggagaccgaaattccaaatt

SEQ ID NO: 240198 - DNA, 940 bp, Cannabis indica
ctctctctctctctctctgaataggatttactattcttttcttcataacttttacgattctatttttcaaatcagtgatgctagtcggaaaaacaggaagcacactctatttagaaaaaaaaaaaagaaaaaacaaaaattaaacgcactaatgttcaataatcaaacactttattttggggtagtagtttgatttctattttcagctttatgtttatgaattaatttttatacaaaagtttacatattatatgtagtatgtgatgagtcgatcattcaatctataccgtttggacctcaatttggttcatgtattttgttactttttctattatctttccttcatttttatttatcatgattttaaaattaaaatacagtcttgtcttcttttgacatggtctctctatcttttttaaactgtggtttggtgttagttttctcatttttcttgatttggttgttatggcttctagtagcctagggatgacagatttagactgtcaatgtactaaactttgtatatacgatgaggaagacgatttggtagcttattatactttggaagcatcttaggccggggtggacacgagatagtgtttggttggtaagtttttgactaaggtgcgatcgattttgatattatgcagcatcagttggcgtcactgtgaaaaccaagtaattaaatgagttcttctcattaagatgttagagaataacaaatatctatttctatttaacaaatatcaataaacctctgcctcagaggatgaagacacaacaggaaggcaatgattggtttttgatttattttaaatatgagcacattctaacattctgttacatttgtggattaatagggcatgctgaaaagatatgtctcgtttatttgaataattaccgatagagaaaattgcaaagccatatggctcgtggatga

SEQ ID NO: 240199 - DNA, 935 bp, Cannabis indica
ccataaacatgaaaactacatgtaaacataaatgacttctaatccttcattgataacaaatcagattatattgaaatgagttttatttagggcataaaatcccaacaggtttcactcccttagttgttgtcatcattgatgagggaatcctcacggtgtgaagcttggttgtagggatgatctttccaacaactgcagttgatcatttgtttagtgtgggggtcaaaccaactctttctaaacaactcaaaaataaccttgtccaccgccttacaatgatagctaatgattacgtgatcacgaacctcaatgaactccaggattgcactatggtatgatttgtacacaccagctccttcacctttaaaaactacaaagtaaacgttgtcatacatgatggatgcttatggaatactaatatacgtacatagcaatgtgtaatgaatgaaagagtgaatagggatgtggttagattggtattgtttgggaaaattagttcaatttaaaaggcatgattgtagggctctttataagcaatgaagcattcgtctcctttacaatgatataactgaattgttgcatgattatatatgcaatttgaatctaataatacatttattgtagcaatagaacagtctccttccttaaaattaatgatataactaaattgttgcatttcatagggctcttcatattttgtagatatgcattgagaatctaataacacatttattaagaatggaacagtcgccttacttacaactaatgatcatataactgaattgttgcatgatcacaaggctcttcatatttcatgtgcaatttggattgttaagtgtgcaattttattgtagttcaagtgatgttatttgatgcacaagctctatgtaaagcccgcttagttaatttggaaattagcagttatttatgttaat

SEQ ID NO: 240200 - DNA, 1004 bp, Cannabis indica
caaaatggtatttacccaataaacaataataatcaaatttgttttttttacttaatatatgtattgacacttgtgaatattgaatgtttatgcatcaaattactttcattcaagcattgagaaatcatttgttatgtgaaaactctttctcttgtgcacatgtttttctttatttttatttttcaataaatgtgccatttctaactatactggttgtgattcatgtttaggctcttccaatcaagtttgtaaaattgtatggagattcattggccagttttgcatcccttgttcttccatgtggccatacatggaagattggtttggttagacgtgataacaagatatttttacaaaaagagtggccaaaatttgttcaacattatgggataattaaaattaatagacatctactgatatttgattatagagggaattcaaagtttgatgtttctataacagatgaaacttcatgtgagatagattacactcactttcctttccattctgatgggaagaagattgacaaagcacctgtgattcgtttaacatcaagtgaggagtgttcttctaactcggattccgactcggtttctaactcggtttatgaaggtaagtaaaaacttgaaatatcttaatatgaaatataatgagaaatagagtgttaaaaaatttaggcaattttggaattttttattcacttttatgtttttcttatatattttttattttttataaaagttgtttttattttgagattatgcggctatttttataaaagtttttctattttgaggttatgttgtttctatttttataaaagttgtttccatcttgaggttatgttatttctattttcaacgtgagttatttatattttgaagttaaagtgttttcattttcaatgctaattatatatgattacatttttattgtaaccatcatgattatatttttttaagtcattagattactattaaatgattgtgattaatttagaaatt

SEQ ID NO: 240201 - DNA, 1455 bp, Cannabis indica
aggtggcatggtcatggttagggctgaacttcgagtgaattgactgagctttgggtttaggaatttcgggtgaaagataaatgaaaaagatcatgaattggagtcctccaataatgtcttttgcttctagctgtctttctatgctctaaattaatctataagtttgaattcattgaaaacctagatccaaggacttttatagaccacaaataagaaagtttctcgactctcgctaatgtcgcgactttcccgttgtttccaaaaacgacccttttttcactaaatagtgaatgtcgtggcatagccttcaaagttagggcattcattaagtttcttgattttttcatcttcttccttttttcttcctaaaagtctaagggccacgacttttgaagcaaaaaattttgaactctgaatttttaagcaccgagaactgcaactaatcatagctttgaatcccaaaattctctccttcgatagttgattgatttcatcatgaaaagacttaaaaaacaacataactgaccaaaaacaaagaactcttcatctttcacctgagaatcaaataaaagtaaatatcaagcataaatttgaacaaatcacaaaattactaaaaatacacactaaaacagaacctaaaaatgcataaactaaacctaacatctccatgactccattgtcttgcaactccacttcaaacaaatttattatctgagttgagattaaaaatgcactttctttcctctcaaaaaaaaaaaaagcactttcttgctcggggttcaagctctccttgcttgatgtgagcataagtcacataatcaaatacttttaagtgctcatattttgtgttgattatagaaatttatgacagcttgaaataatatatataaaaaatatatatgagagcttaatgagatgcggtaaatggtcaatttaagtacttaagcttatttttttttagctatttgctattttaaatgagctgaggatgcttttagaagtagctacattttagatcaataaaaagagatttatggctgccaattgtatttccatttctgtttagtaaaaataaaatttcaataaacacaaccatatgctcactaaatatgatgaacaacaagaacatagaccaaatatatgtatcaagcaattattattgcattttttcttttatgtacgatattcatgctttgatatattaatttcttcccaaacaaacagtctaattctccatctcattttaaagcacataatttctttccttttttttcattcatgttaaagcaatgttgaaagtataaatataaagttaatgctagctatataaatggaattacaaagttgattaaagtctattaaaacaaaaacttatataataatagatcactacttagaatagacaacatatttttttgcaaacaacaacatgatttattaagaatacacacaaaa

SEQ ID NO: 240202 - DNA, 1129 bp, Cannabis indica
gtgaaattagactaatttaacgaatatttgcataatttaatgagatattcatacataaatcgatgtaaagaatgctggcaaattttatgcctaaatattaggattgaagtttttagcaagaaataagtaaatatttcacgagtaatttgcggtcaaactctttaaactttgaagttttgtacggttaaacccctagactggaaaaattatgactaaactcctcaacctccacaatcgttttggtcaacacttcttccgttagtttttgaatgttaagtgccaaatagacctattactgtatacacaagtgtacaactagtaaaatattattgaaatatcacctatcacttctgttacaaatgtatatattatgttattttttaaaaattaatttataatactaataataataaatttattttttagtgatatttaaaacaattaatattttagtcacatttttattagtgttagtgaaacttgatgatggtcaattagtgacattttttattaagtgacactaaattatatctattatgacatttacacataaatgttactaaaacaaatgttacttattttctttaaagttacacttttgagggaatgtaactaaaatagtgctattctcataatttttaacaaatgttacttattctggtgtcgctaattgtatattttggtctagtgtaacaaaaatttacttgtgaataaaacatagtatttaaatacaagttgtcataatttaattttagttgagggcaaaatagggacatgacccaatgcacacaagctccgcctcctctgccatcacctgcgtccttccgcctcctccaccggcaaaatcgacactacacctctgcaatcacaatcgcaacctctgatctccaacctcttccaatatttgaatgtaaataacctccaacgatttgggtacttgaatttatattctgcaataatttttttcatatcatattggaatgtaagtattgcttggaatgtaagtgtctaactatgctcgtctacaggaacaggtatttgatgaaagttgaggtatattatagagtcaccttgctaaacttaaaacttgttatcatcttttggtttaaattaatgcatatttagttta

SEQ ID NO: 240203 - DNA, 1108 bp, Cannabis indica
ccaaggatactacatgtaatatttacatcattacattcctattctcactagcatcaacagagatataaagcttatagtaaaactaaaagagagcataaagcgaaggccttgatcctgttttttatatctgatgttacaatccttgtagccactaaataaagatagtagccaagtgagaaaattgatgaaaaacatgaaagagaattgtgagtgaggttcaaattctccgggcatgtaaaatccataggaagtcggggtgcaaccggaaattaaacttaagtatttatactgcaaattactcttaggaaaaccaaaagtaaaaaatcactttcccatgtagaatcaatttcagtcaaaagtgaaaaacagataacaaaatgttacaaacaacctaaaaatgacacttttttttttctattttgtgcaaatttaccataaaagaatagtcttttcttttttatcttaataattcaactaaacttagcactaataagtccttgaagtgatccaatgacaccagcaactgcaacaagaaagcaaacaaagctaaaagtcttgagaagaagccattttcttgtccatggaactatgttgttttgcacacagtacatttccactggaaaatatataaccataggccaaaaacccaatgcccctgacactcccaaaacttgattgaaataaggaaacaacatggcaattcctgttgtacacattacatacgcggttcgaaagcataatcgaaagggatttagttcaattgttggcaccagtggtaccttcaaactcttcccgaattcgctgttcgggtatttcttattgtaccatctttcgactcctgcgaatactggctgactgtatatctagccacacaacaacaatgtcatattattagtaattgaattaatgttcaatcaaatcgctgaatcagaatcaaaataagctatttgtcttgtttgtgagagaatctgaatttgaatcagaatcagcagtattctcattgatatgtttactttattagtaattttagaatataaattagcaatattgatatgtttatttacgttgaaaacgaaaatagtacattttagttaatgagctatataac

SEQ ID NO: 240204 - DNA, 2499 bp, Cannabis indica
tttttttccataacttttattaatgtaggtaaaaaatcaaaaaatctactttttatttttacagaatgagttttttttttttcagaatttttactgaatgagttaatttcccttcgaatttttttttttttaaaaaaaattgtgtaaagtaactaactattttgagttttcatgtataattttttttagatcttgatatccataactacaatttttttgtgagtaataagttacatatatcattttataatattttagtaaaggtatttaaagttaggttacgaatgggcattatatcaatcttttgtgagattctttaaagtaaagtaaacaatttttgtgatattcttagcacacaaattaatatgttagtaacaaattacgatcgtaaattttttatatttttactatcaaattgctatcttgggtaactagttatcgtcattctaggtaaccaagtacttatattttagataactagatacttatattttggatattcaagtacttatatttttggtgactacataagtactatcttgagtaaccaataacatatattttgagaaccatgtacttatattttggaaaactaagtacttaaacaagttgggtaaccaagtatattatcataggtaaccatctacttatattttaagcaactaagtacttatattttgggtaacgtgagtaactatctatttatattttgggtaattaggtacttatattttaggtaattgtactagttactttttgggtaactaggtacttatattttgggtaacctaggtataatcaagtactttttttttgtgtaactataagtactattttagataaccaattacttatattttgagtaatcaagtacttatactttgggtaactatgtacttatatttttgacagccaagtacttttattttaagtaactagatatttatagtttggataacatgatacttatattttagataattacactatcttaattaaaaaatcgattacttatattttgggtaacccgacacttatattttaggtaactaggtacttatattttgaataacaatatacttatattttgggtaactataatatcttaagtaatcaattagctatattttgggtctacttatattggatgataaagctcttatgatgagtgtatcataagaatagccacgaaggaaccccaattataattgagcaatgtaaaaaaaaaaaaatacaataattaataaaaaataaatgttagcataactatgtaatattaaattttgaaaacaaataaaagaaaaataaataaataagaaaagctagaaacggtggaagattaagagaaaataaaaaattaaaatcttaaaagaagggaaaatgcaaaaggaaaagaataaaaattatgaagaaaaaagaaaaagaaaataaatagaaaatggaaaaaaattaagaaaccaaatgagaaaagaaataaaagaaaaataacaaaaaaaataatatataaatgaagaaatatatatataaaaaaaatagaaagacaaataataattagaaaaacgggaaaacaatataaaaaataggtgtgcataaatcaatcatccaatctaatgacaacagatcgatttaattacaacacacagtctctaaaggggggtttttgtaggaatgtacatccaacatccaatcaaaataattagtattttcatttagtttggatgagtaattaaattttatattgttgtacgtaaaatatatatgtatatataaaagttaacattaaaatttacgttttttttttttttctggattggatggatccaatatccaatccaatacataatagacctaaaatattagatggatccaatccgatccaaaatatactagatctaaaatattaaataaacttaaattaaaccaataaatatatatatgaaatacatccaacggattgaaccaatccaatccaacatctaatagatgtttgatcgattagatgactgaaataaattggatcggatcggatggtaaaatctaatatccaatatataattggatcggatctgaatagacctaaaaatattagatgtcgtctaatgaacaccctcgaatgaaaacaataagaaagaaacaaatacaaaaaaatgaagtaaaataatatgagaataaaaagtatacagaaaagtaaaataaaatatctacatgatttttatatttaaatatatagtaatattataaaatttataaaaaatatgttgttaagtaattatgataagttaacgtaaaaaaactaaaaatatcgttaaattaaaaattttattatatagccacattttatatagaatagatatagaattttaaattattttgttaaaataaaatgatattataaaatatttaaatagggtggtgtatagaaaaatttgagtgtaacctatgatgcattatttttatattccggtcattatcttactgtatcttaattactgtatttca

SEQ ID NO: 240205 - DNA, 857 bp, Cannabis indica
atatatactcatctttatttagattgaattattatttggaatactctaagttttattacatactatattattgaggaaaagtagttagaatcactactatcttttctttgctacatttatataaaaaaaattatgaactattgttgatttttactagttgagagcactcttttagttactagataataaatagcaagagagtcaatatttcataatatttatcgctcataaaacttttttattttttctcaaaatatctatccatttataaaaattaattatgtctcttgttttttagttttttagaaaagcttgttatcattcaagataatttgagttcataatcaacacatacattctcattacgaagaaaagcatacttcaaaattagttgcaatgattctaaagcttatatcataactaaaagcatcacttaataggacctctcttatatcttcttatgctctaacttaaatactaaagtattattaactcattattattttttctgatgtatttaacaaagacttttatttggtaattgacaattattttctgtgaagctcaaatacaagctgtaactttacgttatattatttacaaaaaaaaaatatatttactttaaaagaagtaagatgagaagaaagtaagaaaagtgatcaaaatctcatatatctaacttattcaccaatatcacatctagcctaaagtaagatgataaaagaccttcttaaaggcataacgaaatgagtcgcatccatagcgaattcagccgacatatcaaaagaccttcttaaaggcataacaaaatgagtcacctccatagcagattaggccgacatatcaaaagaccttct

SEQ ID NO: 240206 - DNA, 936 bp, Cannabis indica
aaaaaatatataatttttatttttcaattataaatacctattaaattttatttatttttcacactattttttatagctttattacaattcatcaatattacaaattttacactttttttctcatgacaaattcattttacattaatatatgaattctaaaaatattagtgtgaatatataaaattaaagtgagtgatatattgaataagagtattgttattatatatcagtagtgactaacactttttataggtattaccctcccattcctcgtttctggatgttgaattaggtgctaatcctagctacgtgtggcggagtattctagaggcaaaagctgtggctagaatgggtgtgagatggcgtgttggagccggtttgtctataccggttcttaatcaaccatggcttccttgcaaggaacatccgtatgttatctcttctcatgtggactgtaaggtcaataatttattaaaagtgggctctcttcagtgggatgaggaagttcttcacgatttatttgttcaaagggatattaatttgatccgttgcattccgttgtctccgttttcggttgaggattattggtattggatgttggagactcgtggagattattctgttaaaagtgcttatcgcgccttacaagacagcaatggtaggtggaatactcaagacaattcgggcttttgggagatgttttggaacttgaagttgccacctaagatgaagatttttctttggcgtggtcttactaattgtctccctacccttgtatctctgcggtctaaaagggtgcatgtgagcagattgtgtccgatgtgtaatcgggaggatgagataatttttcatataatggttggttgtgcatttactaagagttgtctggacatggggctgggaggaacgatttgggggtgaagctgttgtgtttgg

SEQ ID NO: 240207 - DNA, 764 bp, Cannabis indica
aaaaagggtatacaatgtaattttcccaaataaaatggttaaaatacactatcagtaacaagtgacaacttaaatagaataaatagaggacataatcaaatgaaagagcatttatggatacaaaagagaacaaagaatgaataccagccattatgaagataagccatagagacaagtatgcattaatattatctgttaaaaaaaccaattacaaaaaagtggtcactggtgtgacactgacactgtaagcaaccgcatcagggcatataataagtccaaaatgcatataatggtggagatgcggggtatcgatccccgtacctctcgcatgctaagcgagcgctctaccatctgagctacatccccttatgaatattctcttacacaacgccgataataccataactaagaggggtacgcattttcaaaaaatcttattgtttcttataggcatttttcttttgtggggccaaaatttctatctaatattatattgtataagaataaggacacgatgaaaggaagaacttataacaacctccgttagaacatagaagctcatcattatcactcgatgggagtatgctacacatatatggtatctattatcttgttttagaaaatattaccgcataaatacttattttattgattttgttgctaataaatactcaaattttaaaaatagtagtataaatactcaaatcatgaattttagttacagttgttggtaggggtgttcatccgatccaatccgcactttt

SEQ ID NO: 240208 - DNA, 1283 bp, Cannabis indica
tatctgcataccactctgcattatatatacccccaaaaatttgagcatagggcttgcggatcatagtcgaagactttgttcagtgaggtgagcttataaggctgagaggaattaagctttggagtgacccaattcaacctgagaaatttcctgcgtgaaagaaaatatggggtagaaaaattttggtagggaaagttatgccagaaagaattatcagtgacaaagtttaaaaaaaaaaaacaaacaaactaatttaaactgtgcgtttcgtttaattaattaaagtttttaaaaaaggaattatcggcgcagttgaacttcatcggcaaaaagtgaggatataattagggttcctcaattcttgataggctagaaataatggggtgaattttatattgcgttttagaagtttattttagttgattatatttattttgtgaagattgaaaaattacgcttaatttattttttgtttcaaattttattcatcaaatacatcttatgaattgaaatgagaagaatcatcttaaataagatgaaatttgatagatttaggattaaatttagaacggtaaaatataaatggtggaaaattttaaattttaaattttaggtgcttaatatgtttcgtttataatcgaaaattaagatcatgtgagcgaaattattattattattgtagttttgaaatttctgattcttttatttgaatatatattcaaatatatatacctataatatgcaagaaaaggagggaggaaacgtcattaatttgtaatcatatactaattcattttggattgtaaatctataactcaaaaaaaatctcatatattatatttattgaggataatggagaatataatatgtaaaaataacttgatatcttatctgattacaaatacaatactttataatgaataataattgagtacatataatataataataataagttaatcaccatgagtaaggcatgcatgcatttctctattattatatattttttaaaagcttataaatacgggtctaaagaatttgaccaaaaacctcaaacgtaccaaaacaattatatataaagaaattaattaatactaattaatatacttaatcaatggcgcccgaaggcattcttaggcttcctattattgatttttcagttgaagatcaggggctgaaaccaggtacacccgagtggaacaccgtaaggacccaagtccgcgaagcactggaagaatttggttgtttcgaagcaaagttcgataaaataccaatagacattg

SEQ ID NO: 240209 - DNA, 1903 bp, Cannabis indica
tcttaatgctacaagggttaaagattttctcctccacgtctggtttagttccaaatgaagagaaaacagcagtgttctgtagtggaatgaaagatgatgaagtaaagagagtactagaagtatcagggtacataagggccagtcttccttttagataccttggtattccaattttttctaagaaaatctcttcagccgactgtaaaggtatccttgagaagatggtcgcgcgtattaaagtatggagctcgaggaacttatcctatatgggaagaataacactcatcaactcggtgttaattgctattcactcatattgggctcaaatcacaatcttgcccaagaaactgctgagggatgtggagagcatttgtagagcatttctttggaaaggcatgacaatcaattcagggcatgcattagtagcatagcagcaggtgtgctcaccaaagaaagcatggggctaggctttcgaaatatacatgaatggaatactgcagcaatgaggaaatatgtttgggcaattgccaccaaaaagacaatttatttgtcaaatggatcaatgaagtatacttgatggggaggaagtggtgtgagtaccagccaccaactaattgcagctggtactggaagaggatagtagcagtaaagaacaccctcacagctaagattgatcaacaagctttttcggtattgaggtatgacatcaaaactagtattgatttattgtttaccaaaccagtggatgtgaactggagtaaaatagtttggaataggccaactataccaaaacatagggtgattatatggctgatattgctgcaaaagctcagaataaaaaagcaaatacaaaagtttaatccattggtggataagagttgtttattatgtagcaatggctccgaaacattggaacatctcttctttaattttcattacagcaacatgtgtgtacaaggcattaaagaatggctagaatggaaaacaaaggtttctgcagaagattatataagtgaataaaatatgatatcattaaaatttaaattttatattaattatatgttgtaataatttttaattaaataggaggaactgattaaggagcttgataggaaatggctcaaaagacaatcccaaagcgataaatctagtactgaatctgatgttggttatcagttcgacgtacttggaaaagttcttggcgaaagatctaacaatcaaagaggcgtgggttataaggtcaaaggcaaagaaaaaaaaatcatcaagtcaaagtcagtcgtcggcgcctccttcgcccccaaatgaaatgtttaatactgtggctaaaatgttcacaactatacgtgacacattagggagtagcctgacccctgaacaatgtgctaatttatataatctacagtttgagaactttattcaaatgtacaatcaatcgcagttgcctagtggttcatcttcttagagttatgccgctcctccacaacatcaacaacaacctactttgcagcaacaatttcggccttcttcgcgacatcaattctagaatttttcgcagcaacaacaccaatcttttcctcaacaacaacaacagtctagtccgcaattagaaaatcagttcttatatagaaccccatcgaagtctcctctgcttggctcaaattttgttgattttggaatatttgggagttcatctcttgagcaacaattttttttgactcctattcccaaccaagctcagctatggaacctaacacttggtttatcgtcagatcaaccatatgttacttctccgccacagccgtcaggacctcggaatgataataatacagatcaagagactttgtaactcgagaccttaacgaagattttatggaataattagtttatgttttttagtaat

SEQ ID NO: 240210 - DNA, 521 bp, Cannabis indica
attatttctaacaaaaaacaataaaaaaaataaaaaaaaaatttcaaaaattacgatttctacggaatttttaaacatttctttcgtattttttttgattttatttaccgaaaatacggtcttttatgttgtaatcttgtatattgttttttatatatatgttatttttgttgttattttaaagttatttttatgtagttttcttgttaattttatgttgtttttgtgttattttttgtaaaaaccgtaatattacgaaagtgaaagagaaacattttattgatctgaattgttaaatgatacagagatgggatccagctatatatagttgagatcctttacaagagataccagaagttagttaaataactaactatactcaaccgacttaaatgaaactaaaaccagaaaaggaaagttacagtggtaactgtaataacagaagctaacagcaactagggaccaaaataactgtctatattcaaatcctaatacgtaaaaatagtaaaaaaaatattttt

SEQ ID NO: 240211 - DNA, 1334 bp, Cannabis indica
tttttttcaatttcgtcaatacgcattttcacctaaactcaataatttagaatctaagcctttagactttacatatgtcctatttaaaatattaatagaaactataataaaaaatttgaagaaaattatgtttttattaacattagatacttaggttactattaaaaattatttagaatctaagtcttcagattttacatatgtcctatttaaaatattaataaaaactatactaacaaaaaatgaagaaaattacatttttattaacattaggcatttatgttactattaaaaattattagttttgtgctgcttacaaactaatgacttttgttacttatgctactatttaatcattgtgtttctttgactaaattacaatacagaaacctgtatcttctgtcaaataggcagtagacaattgaacacatggcagacaaggaaattatcctccttagtttagttggccagcagctctccatctttctctattcacgtattcattaaacatattgattgggattacaaactactatcgtggcatataatttaattttattcttgttacactggccaataaaagctgtgcagatatagaaaaatcacataactagtctatacttgtgtctgcttattttcattttagttcttttgtgcagcctttctgttttaaatttctgattatatctcttgtcgttaaaagattggggagctgaagaaacttgttgaggagggcaaaataaagtacattggtctatcagaggcctcagcttcaacaatcagaagagcacatgctgttcatccaataacagctgtgcagcttgaatggtccttgtggtctagagatgttgaggaagatataattcctacatgcaggtaaagcttattggaaataatcagtatgtcttttatggttagtaattcaacacaatctaatatcctcttttctgtatgtatcagggaactgggcattggtattgttgcatacagccctcttggacgcggtttcctttcatctggaaagaactttgtagaaagtttgcatgatagtgacgcacgtaaggtttgttgattgcccacagaactatataactcaagcatgaatcatgtgtacattcttgtagtttttctctgaaacctatatattgtgtgatgcctaatacaatagcatttgtaggcacatggtaagcaaatatcatgttcgggtactgaatctatttgtgacagatcttcctacttttactattgttttttagttgattttcaatgcaggtgcttaagttttttttttttctttcttttttctttttccagtatcttccaaggtttcaagg

SEQ ID NO: 240212 - DNA, 1122 bp, Cannabis indica
cccaacacgtactacaatcaacataactcaggcttattctatatatatatatatactgctaacgacatcagataacaatcaatcatataaccgttaaataatacttaatacccattagtcgagcttgtcttcaccgcaaatgtacatatccaaccagtcttcaggacctttaaaattgtggctgctttactcttcgtgactttcctcactcgatttttatgccttgatgtaggaaaaacacgtttggccaagaatttccttcccctcttcttcagctgacctgtgccatctccttgtgtaaaaagatggcacaaatcgactagcttaggaactgacttggaaatgatttcttcgttgtgttatgcttcttgatgtttgaggaacacattttgacaagtttcctatgacacaattaaaagatggcacatgtttgccaagccatgaagaatgagtttctagtgcaatcttaactttatgttcatgtgttagccgtcttagccttaatgagtcaagtccttgctggttttcttctcaaattgaggtctctagaatgaaaactcttgcatgggtccatgaaaccctgagttgggcatccttgagtgtgggtcccggcaccaaatagttggctagtgtttttatgagttttctagatgtgtcataggaccctctaataggatgtctcaacttcatttgacattcttaagtcctggtcatactcgtaagattgagttttatgatttttttcgaaaatcgagtataacaaggtttaactcttgtgttgcacacacgactattttttctatagatgtagtgaataaatatttgcaatttatttttaatattataaactattcagaattttctaaaaatttacatgtattcctaaacaattaaaacaaagctaattaggacttcccccccccccccccccgaactttaacatgtaccaaatcatgcctctaaatttttaaggtcgttaaaaataccccctgaactattgagattgttggagttaaggatttttgtccaattttagtaaaataagtctaacatggatgaaagttcagggcacatgatttagtacatgtcaaagttggaggggcatgatttggtagttatcaa

SEQ ID NO: 240213 - DNA, 1041 bp, Cannabis indica
aaataccattaaacaatattataaatataaaaaatgttacctttaagtttattaacaaaattaatataatgatatttatttattattttaaaatgtattttataatatttaagatactatttgatatctttataaattattttagaaataaactactttacattttcataatttttaaatattgaaatgataaaataatttcttagtaactcatgaaattaattaatttattaacttttgttgaaatttaaaatttgataattttttagttaatattttttctttttaacatttataaagtttaattagataaaaaagaaactaaaaagttacttatgttttcaatcatcttctccggttaaggtaaaaaaatatatagttcacacatattaaaataatcacattaaagagtagattgcgattgcgtaacttttaagtctaaataattaccgatgtaattaaaaaaattatttttaaagtttaaaaaagaaaaaaatttgctttaaatattataaacaaaaagacaaaaggaaaaaagaaaataaaataaaaatagttgactgagataaaataaattcataggtttcctaagagtgtgtgtgtaaaatttaaagaaaacaagagacgtgtatattaaagaaacaactaaagattaaataaagaaaaaaaaaaaaaaaaactagaataaaatgtaaaatggttaagagttgatgttttatatcggtgcacgtacttgaaacaattaaagaaaaactcggtatttgaaacaataaaaccaacaataaaacagtccacaataattatgtaaataaattaatgttttcggtgtgagatgtaattttctcttaatattattattaattgaaaccggcccagtagaagaaagagccggcccaatttcctttccattaaacccaaaaccatctcccagaaaccaaaccttagcctcgtgcgattgtatttgaacgttgctcttatttatttaaaagctgagtacagctcaccatttagttgctcttttttttttaccgttgttaattt

SEQ ID NO: 240214 - DNA, 832 bp, Cannabis indica
tagctcgtctagaccttgtctcttttttaggtttctcacatccccttgttttttgtgtcaagatgattttgagtgactactaggggaggtgacaaccacgccgatgaatatttacttggtcttcccttcatggactagtgtccagttcattattctagcaactccttgagttatctcgaggttagtggtggtttattatgccgaaggtcatggagacatgtcgtagggaaccaccttatgaccctcatatcgccaggctagcgactagagggagagtaggtattgctggggatttgcatagcctctggatgatagagagccaggggttggccaggttgaggcacttgtggctgagcccgtggctgatcgagatgagaggagctcgaatagtgagtctacgatcgaggaggtcatgcttgtcaggaggaggcatacaagaattaccctcttttcctcaaaaacttcttggattcatatgaagaggatagatggcctttgaatagccttagtcatctttctgaggttgaagttaaccacgttttagaggaggatgaaaagcctcaagtccttgattatggagagcagcagaactggtggatctctcccccatccgctatcaccacccgacacttaacaagattaaggaaagtgagctggtgggagatgtccaatgtgacaagcatttgagaaactaacaagcacatcgcttggccttcaactagatggcatggtcagagctccataaaaagcatggagtggtgttgcccatacatccttatttcagagacatctccctatactttagggtgtgtctgactcagatcatccaaaa

SEQ ID NO: 240215 - DNA, 696 bp, Cannabis indica
gttggttaaaacttctacaatagaacttgtcttcataaatgacatattgggttgctttgtatcacaatctctttgcttctgctttattgtttggtagttcaccaattttgaggaatgtgagaatttgggtcatctaaatagtcttattgtcgtggtctattgttggtctttctacgttctttactggaatggcatcgagcaattcagtttctaaaattacaaaaaatgttattggaaataaccttcttttagtgccaaatgttgtcagagcaaaatagataataccaaaaactgtgagtattcaaactacgcaagaacactcacaaggagaactgcgagtactcatctacagtgacgaatacccgatataaaataacgagttaaaatataaacaacaagaatataaaagatacaaagagattatattggttcaacccaagcttggtccgctagtcgactatagaagataaattgtgattcgtcttattcatataaaatcatttatttatatgaaaagtaagtgatcatttaattatataattgatcagacaggaccattacattattagttacacttaatcgacatttgactataattatttaatatttgaatgggtgcgattatataattgcatatcaactgttcatattgttgtaaccttttgagcttgcaaattcactcgagttatttgcata

SEQ ID NO: 240216 - DNA, 1899 bp, Cannabis indica
cagtgcaactttaagtacacattaccaataccctaatatgttaatttgatggaaactgaaacatgcatgttaacacatgtacatatgtgcatctattatactaatcttacctcaacttcgcaatcaggtgtgccggttaatctgagtaaaacctgtcgctcgacgattagtggctctaagtcacaattacgtaaaactgttaagtgtctcgctaaaatactttcggggacttaaattcaaactaaaagttttctatcgataaatagtgtggcaatatcctaaatatcgagaaaatataaaaatcgaggtactcgaaaatcaccccaactggttacccaagtccccaaacggtgcaccgtttcctggagtcttgtttggggaaacggtggaccgcttcatagcaaaaaacacaaactttgagttttctctctcaattctactccaaactttactaaaccatccaaaacacctaattaagacataacaaacatcttcaactaatagtagtaccaaaaatctactgaactgaaaatcaccatggttgagcaagctttgagttctaaaactcaagcttgctcaaaataagctacaactactacaaatttctcaaaaccaacacgaacaatcataactcataccccaaaactcaattctaacagcctcaaatcctaatagaacagaattctcaaacttatgcatcaaaaccaagcttttcttacaaaatcaaagagaatagagagctaggttttaccatggattagctaacacttcttcctcaaaacctagctgaaaccttgcttgaaaatggaggaattcgactcgaagtttatagttttcttggtttttttttggccaaacaagaaagagaaggagagggtttggagagagaaacaattttggcttaaaatgtaatgtttatcttgtgttattctaataatacttcagcataaaaacttatcctttttcctagaaattccactaagtggaattaaaatcaaacttatggctaactaccaaaatgcctatttacttcacctttaagtaatcttataactaggagtaaaatggtcataactaattatctcgcataactcctacgttctaaatgtccttaaattttactccactaaatcttagatactcaatcgtataatagccaaatcgtcgaattccactcttaccaagcataaaataagaaaatatcgatacacttagaattcaataaaatttccataattgagaaattatctcactaatacttatttctcacaataaatcttattttctactaatgcaaatataatcgtaaagtaataattaatttactaataaactgctatgtttgttgatttttatgtctaattatacggtcattataaatactcacttgagaataaaaaatttagacaacataactctggaaaactatacttaagcattaagatcaataaaattataggtgaatttacccattatcgcaaaaaaaaaagggtgaaacactataaaaatcagttgtttaccattgttaattttccttctacaaatcagtttatttaggtcaatatttctatgggtttatcttgctcatttacaatattcttagaccagttaacgaaaaccgcaaaaactgaaacaccttaggaagtctattagttgatttttctcatggcatgtttactaataagtaatgggaatcaatagtaaggtaatcattcccttacatttgtttacttgcattataaaaattaggaaagggagaagttgattaaataagggagaaaagaaagggagaacttctcccaccaattttgtaaggaatgccattaagggtaatggatttttattatttttattttattttttaatattaaatatataatgacaattttgtcctttaaa

SEQ ID NO: 240217 - DNA, 2493 bp, Cannabis indica
tagatatttacaaaagaccaaagtgtccttgattgtagatattattcagccattctgttggcttttggggcccaattcgtagcccattatcattggccacgtgtaggagtgtacatcaaggtctgtaaagcactccttggctggcaagcccctgtggttgccaggctggctggctggccatggtgctgtcctaggttggtcggccatagggacagctagggctggccgaccaactcatgagagggagatggtctgtcacttgatcccaatctgagtgtcggggccttcgtttgctcgggtgctgagttggccttccttttattgagctgtactaccatgtggtactggttccgtccacgtaagcatgccacatcacgaggacaaaaattgggataacatttgtccccaagtccctgtgtggaaattcctaataatataggataatcttattcattatgctctaaacacacataatgttccatatttaataaaatatagttagatttttggaatattacacatcgcatagaatccgaggacaattttataattggagtgagttggaaaggagaaacatcataatatgtcaaaatcactttgacaaaggggtggaaaggaaccacgacaccacagtgaacgatggggactgaaattacagcgacgttgttcgggataatcggtgggttagtacacagtttaggaggacattgtatcaacatgggtttcgtacaaccagtattgatcaacttcagtttttaaaacgtcgtcaaatcagacttccttactagtgaaaccaaatcctcataggaaaatggttcgtccaaaggtgcgtcctcagtagagttcacgtcatcttcatcatcatctcttttgtcccagtgggcaggtaactcaaaatcttgccccatttccttaacttctacacctgaaacaacccttggatggatgaagctcccttgagcagatacggtgaactcgctccttcgtatctcgatagcaactggtgcctctaactcttggaccatgcgatctattttgccagaagaccatgagccttgttggtctacccttgctggaacctcatcttctgacagtgacgtgggaataaaactgtccctcttttgaggtttgtctgcgaatgctccaccctcagactcaaacatctggctattgtctgagagatttctcatctgaaagatagaagatcttttcagcgtgctgtaattacaatttaaagagtgtcctcatacggataagaaatttagattgaacaaaaatagaaaaactaacaacaagatagaatgaagtggttcagtgtatcacagtgtgttaaggtttatatgggtaaataaatattaaatcactatgatacacccaaccacttcaaactcttttagtttgagatcatggttgaaaactagatacgtgaatactcaacatgttctaactaaaggtgcgactactcgaagttcataacagaaaagatgcgagcattcaagttataggcaaatttttcaaaaaaaattattctttttttgccttatttcttcttgagcttttatttcccaaaacctatcctactgttgtcatgcaatttttaccccaaaatactcagaaggcacacgactattcaaagtaaacacattaaacatagaaaacttgtgtaaaagaaccaacctttgatctgaaagcttgtccttctgagcttgataatcacttcgaaaaaaaaaaccctttgaactttaagacaatcttcggaaaaggaaattgaaattttggaaaaaatttcttttgaagtctcaaagaaaaaaatctcagtgaaaattgaaaataagagggaaaatgaagtgagatcaattcatatcccatgggtttaaatgcgaatcaacctcatctgttaggatctcgacatgtgttattcgaaaaccaaaggtcacttaatccaatggttatctcaagccacgcttgcacaaacctcgaagggttcgatgacatgtggcatcttacgaaaataaggaaataaatatgattgtcttttaagaccctcgacaagacaaccaaaaatcattgtcatgtgacagaacaactcccctgtccctcgtgaatagtttcacttgacaaacagttgtcatcgcaaaactaggggcatgtgttataatgcaaatttattacctagacatacaagtacagactcataaatagctaacacgtggacctagttcccgatggaaaaggatgacgtgttaataaaatagctccagtagagctaacctcgcttgatgtaaacttgtgagaagatgcgaccgagacaaggtctagtcgcatactgtgcctcacgtagtcaaaagaataagcaggaccaagaggagttaatgttggttgcacatatactaattatatccattgaccagtaggcctctcctgcgactaaaagaaagattaattctttacatagttttgtcggaatgactaatgtgtttgacgactcatcat

SEQ ID NO: 240218 - DNA, 1062 bp, Cannabis indica
gcttttagggcccaattcgtagctcatgccttggttcacgtgtagagttgtacatggagtcttgccaggttaatcttggtcttccatatgcctacaaggaattctagtcggccatgctcctgccaagtaaatcctggccggccatggtcctgctagatactggcaagacaaggcctatagggtctggcatgacactatagctccatcaagaggagggcaacctttgagtgtggaggtcatccttttgcaagttaaggatactttgtacatcgtttccatgaaaaggtcaggttcccttagccaaacgaatcctccttgggtttgtagtcacttcttggctggtaagcttgtgtacagatcctggccgacctataggctcaccctggctgacttataggctcctcttgtccgtccaaggatgttggtatagatccttgagggcttgtttcactcttttcagttgttgcttgacatttttgctatatcttgtatggaggctctgttctgctattggtagggctgtactccacctgtactctatctttggcctacgtggacatgccacgttaggtaaacaaaatttgggttaataatttccccccaagtccttgttcaaacatttggtcggatagggactttctagccattgtcttgtctgtagtagtctctgttgagcagccttgtctagccaagtgttggatttttgcctggcatgcttttggatctttgatcttttcactctatatgcgtctcatcttctcttcttgagaatctcttcttcgtacctgccattaacaagtttcaagctttttaagcttttggaaacattttagttcacatattagtttgtaatctctttggtatatagatccccgtgatagttttagaatgtgcaatgtgtgactttttgattgaaaatattcagtttcggccttcactatgattcttgactctttgagtcataagaaatacttggcacataatcaagttttgaaaggaaaacacacattaggattcaaaacttaacttggccagcctaggaggtcttgcttgagacatggc

SEQ ID NO: 240219 - DNA, 1326 bp, Cannabis indica
agacattgttgccaaagacaaagaagtcgaggatctcaacagggccaaaaatcaggcagaggagaaggccaagaagtcagaggagaagactaagaagttaaaggaagagatcgttaatcttattcacaatattgaggctaaaagaaaatagcgaagaaagcttatgatcaggctgattttgattacatctataccaccctgaccaagctgccagacttcgattcgaattttttagtccagaggctgtttagatggctaatgcttttcacaccatatctcctactaagactcaaggactaggagggagccttttccctgaggaggctgaggtcacaaatactgctgaagtcacggatgtcactaataaagtcgcagaagatctcaatgcccctgctacttaatcttttttcctttcttcaaactttttttgagcaatacaagggtattcacgctttgtacttggtttttaagacacttatatttatctttttatgttgctctgtaagaacaatgtattcttcaggaatactcttttgcttctaagtatttttatattccttgtgaagtttttatgcatttataattacaacttgatgcctttaaacgcatattcatatggttgttgttttatctatgtaaccatccttcacagcttgatgtgacgatatatgaacatttcgatgttcatatttaaagtgaaaaaatttacaaaatttctaagtatacaattgcgaagaaaatgaaaaattttaatgtttcaaaaattaacaattcattggataatcaatagtacaatggcaagatatgcatatacccctatacttagataatttagagcatagataaattgactaagtatatacatataggtactattaataataatacttcaaatattcttcgttctaggctctatcgaagactgagtcattgagatcgaatgaccgctacattgtgtttctaatcttttcaatgattaggtaaggaccttcccaattgtcgccaaaaatcccatgcgtagaattacgtgtattgggcatgacttttcgcaacaccaaatctcctactcgcaaactcttttctttaaccttagagttaaaataacgtgttgtgtgctgttgataggccgcgtttttcatctgagcctgatcacgcttttcttctagtagatcaagttggagtaactgattctcctcgttgctctcaatgttaaaaacatctcttctcaaggatctaactcctacctcgactgggaccatggcttcacacccataagaaagtgaaaagggggtttcgccaatcgtggagcgaggagttgtgttgtat

SEQ ID NO: 240220 - DNA, 3292 bp, Cannabis indica
ggggatccggactcggacttggatctgaacctagactcagttgaaaattcagacccagacccaaactagaatgaaaacccgggccctggaccaggacctaggacccaaacccaaaccctcacccacacctgagacccgtacccagacttggaacctagacccaaacccgagcccaaacctgaacctgcactctgactcagacccaaacccgagcccgtaccacgtgacctgaaattgcaactggaaatggaagcggagcgagactaaggactcgaacccaaaccttgacctccaccgataccaggacctagaccctgaacaataacaagaccaggacatagactcaaacctagaactagacccagactggaacctgaactcggacccgaactcagacccgaacatggaaccagactcgagacccaaaaccaagactgggaccaagaattgaaacccaatattggtcccaaacccatacctagatttaggacctggataaccacccgtgacctaaaccagaacaagattgggacctgtgactaggatctggatcttcacccaggatccaagaactgggacttgaactagactcgtagtcggtgtctggagctgagactcaaaccagttcccgaacccagacaaggactcgaatcaagacccagacccaggacccaaaatcagatcctgaactagaactggactagaacctaggaacaggactaggaccgagacaaggacatggactcggaacaagaaccaaactcagacccaaaccaaaactcagacccagatggtgacccaggcacaaacttggacccgaacgcgaattttgacccagacctagacccagaccggggacccaaactcgaacccaaacaaggacctagacaaagatcgggatccgaacctggacccaaacctagactcgaactcggactagtacttgaaccctgacccgaaactggacctagacccacaacctggcccgagacaaggacccagacctaggacccagctcgggacccgagacccaaattgggattaggatctaggcccgggacctagaacttgaggcttggactcgacccatagtcggcgtctgaatttgggactcggaccaggacccgaacaccaactcgaacccaaactaggacccggacacaaacccaaacccacgatttgaaactagaacctaaactaaaacaagactaggaccctagaacaggatcaggactaagactaggacccagaccaagactcgaaactagacctggctcggaccaaaactgggatcaaaatcttgaccaagacgttgccctcaatcgaggctggaatcaaacccagacccggaccataacccagcaccggacccagactcgagacccaaaaccaggactgggacccagaatgggaccccagtctcagtcttgaaccgagacctagacctaggacctggactaagacccgagacttgaaccaaaataaagtttggaacatatgacagcgatctgtattttcactgaaatttgagaactggggcttggacttgacccgtagttggtggctagatctgggactcgaaacaggacctcaacccggacctagacctgggacccaaaataaaaaccggacatggaccttagaataggacaaggatcagcactaggacatggacccagaactaaaacaacccaaacctagactcgaaccgagatggggatccggactcggacttggacctgaacctagactcagttgcagattcaaacttggaccgaaattaggatgaaaacccaggccctagaccaggacctaggacccaaacccagacccgcacctaaacccgggacccgaacccagacttggacgcagactctgacccagaccgcgatccagacattgacccagacccagactcgaactcagactcagactagtactcggaccccaaccctaaaccagacttgggcccgaaactagacccccgaaccaggaccggaacttgggcctcggaactcagatcgggacctgggacctaaccccagacaaagaccaggacctagtacccaacacaagacccgaaacctgaactaggattaggatctagacatgggatctgggactcgggacttggacgtgacccatgattgatgtctggctctgggactcagaccacgacccgaacccaaacaaggaccccaacccaaacccaaacacaggacccaaaaccagaacttgaaccgaaaccggactgggacccaagaacgagaccagaacaaggactaagacctagactcagacttagaactagacctggctcagacccaaacttggatcgaaatccggagccggatcgtgccacaaactcaaatcgagatcaaaactccaactcaaaaccaggctagaaccaaacccaaactcggacccgaactcgacactgaacccaaacccaaacctaaactcgaaactgaacctgaaccgagagctagacccaaacccaaactcggacccaaactcgaaccccgaccctaacccagacctaggacctagatcgggacccgacacttgaactagaacaagacaaggacgcgagatctagatccaaatatgaactcagggcatggacccgactcgtagtcagtgtttggatctaggacctgaactgggatccgaacccggacctgcacctgaactgacacccagactaggacccagaatcaaacctacacatgaaactgaatccgtaccccatgacccgaaaatgggactgggacgagggcctaggaatcgggccctggaacctagacctggatcggaacacaggactcaaacctagacccggacctagacctggaccagggacctgaactcgaacccgaacacggacccgccccaaacccaaaccaggaccaggaccagaaacaagacccaaactagaacaaaactcggacctgaaccttaacctgacatcatacccaaaccagagacccgaactcggacccagacacaaaaccgtacctgaacccaaacccagacccgaacccaaactgggatgaaaccccgggactcggacccacacctagatcgagattggaacctgggactcgaacctagacccagacccagacctagacctagaaccgaactggggactcaaaccaagacctggaccagaacccagacccaaacggagatccaaacccagcatcggaccgtgatagagatccggcctgaacccgaactcgcaccaggactcgaacccttacacgaactcgaacccaatcctagactc

SEQ ID NO: 240221 - DNA, 1147 bp, Cannabis indica
gagagagagagggctgcagtttttttttaatgagggaggcgctggagttagaaaggattgaggaaaagtttatattaggatttgttaaaggggagaggggctgatgttaggaaagagaaagagaagttaataggtttttttttatttattatttttaaaaaccatgcgcctcacatgatattgatagggttggtttctatgcatctattaaatataattatcatacagtcacacgctaagtgggtcgggaaatatttatcgaatcgaacttggcgcgtcactataggccatagattttaaattaataaaaataagaaaagtttggattttactctttaatgacactctatatttttagtgacacacattacatgaggctaacaccgaaagtttagagtctaattatgcgtgtcactaaaaatcactcctaactatttagtgacccgcacttttgtgcgtgtcactaaaaggctaaattatagtagcgtgtcagcacaatagaatataatcatggttatatgtttaaaattttaagtcccatgacttgtcagtacattggatttagactgacatgataatctgcggtaaggtatacttacaccttctataagtgttatgtcctttccagggcattagcaaagtacgccagtatcagagctatagagtatacattggattggaccgatattgaacttagataagatcataaacttaccgttaaatctttcttagtcaatatgactggttgaccttaggtctatagatcttaatccctaaatagttaagttcgatcatagttgtattattatgttgttcaatttattcattaaagttgaccaattagatcttctcgtgacatacagattaagcaaatggtagttcaattgagtgggagcgctaatcatagatatggaatctataacttctataagtatttagaagtaaaacgattatttccttcgagcttggcttgatagagataaataattgaggcctcctttcaataattatatgactttattgaaatatcatttataggtagctaagtttttaacgataaaatgttgggttttgtgccctaaataaaacccatttcaatataatcagatttacttattattgaagatcagaaataacattttatgtt

SEQ ID NO: 240222 - DNA, 787 bp, Cannabis indica
cactatatcaccatccacgagcagagaggcagtggggctagaccaagaagctacgacccatgagttgcgacgacaaattcaagaggggtcatcagatgtaatgactctatccagctagagactctgacgccggtgctggcgtgagggcctgatctatattccaacaactacatcccctacctttgcactaggtggcgaagtagttcaaaaatcgatctataatggcgtcggctgagaggagaccatcagtactgtcagcgtctgctgggtaaccaatgagcctggttatggtactattggacggagcagaccaccgttggcaaagttcactcaatgcccttcttgtgtccttatatggctgtaatcttggtgttgcatcaggaagggcagctcaagacataataagccagtaaagaatccttgatgatccactacttaacctacttggagtccgagtgcttgccccagaaaccataaattgccttgcacttcatcggaggaaatagattgcccaagagatcttgggtgtaagcatgcacctcctagagacttccatgactcgggagacacatgcgcactgcatgtcagggcgtgaaaagatcatttggtgtgctgcacgtattcaatcctctttcctagaaggaagaaactacatgaagtgtgctttactctcagtaagtctttcacccattgatcttttcaagcaagtctaagcttgaaattttatacaacttcagacttccttcccaaagctgaagcttgcttcataaatctcaacgtcactctt

SEQ ID NO: 240223 - DNA, 1375 bp, Cannabis indica
ataatctatcttgactaaaaataattacttaaaaatgtgttacatatgttctcatttgtgtgtaagttgttattttattttgagtaatttgtggtataaatacgtaagtttaactcagagttgtaaataaatacttaagtttaatttttagcggtaataatacttaagttataattcttgaattgttgtaagtacatgatgttaagtgttaagtaaattatcacgtgacaatttctgattggtcaaagttattaaatttgtaatttttttaaaaaaaattaatttaaatatactaataaaaaaaatgatacgcggataatgacttaatattaaactgttagtacctaccgaattccaaaaaatataacttaaatattattatttatgtatttatttacaagtaagaattaaaattacgtatttattttccaaattaggtaatttatttgaaggcaaattactatttaggtaaatactgtagtagtagtttgagtttctttctaaactcttccatctcaaaacacgtccacaaattgaacttgtggaccataactgaccaccacccattcgattcctacagctacaagtaataaagtgcaagtgtatttcatattttatcctaacccaaaacaacattcattatacgaactgaactcagctgagctcaactacacaacacaaccatggctattactactgcttcttccatttttaaggtgtcatttctaatgacccttctatcaggtctctggccagaccaggaggcctctgtaacagtgtttccacctacgtgtaatcgaattgagtgccctagcttcgaaaccatcgaggtgggtaatggctacgaaattcgtaaatacaattcaaccgtctgggtttccacctcccctattcaagatatctctctcgtcgaagccacccgtactgggtttttgcagtgagtttcatttctttcttttattcccattcctctctttttactttttttttcttttttaataatataattaatgtcgatttcaaaataaacacagtcaaaaaagagaaatgctaaagttgattggtgcctaccaattcacagtaggtgtactaccagttaaattcaatatacttattttactttaataataattataaaaaaccgtttaactatttataagatataatcacataataatacttaatagcaattcttatttgaaaaagaaaatttgattttctatacttacaacatcaaaattttttttccctaaaccaaaatttaaaactaaaaaactatcctttttttcaaaacccaaaataccccctcacaatattctctctctctgcatcatctctctctccctctatctcaccccaaccgcccaccctcacc

SEQ ID NO: 240224 - DNA, 1333 bp, Cannabis indica
ccgacccatttacactcctaatagcatgacactctgtaaatggttaataatttttaataattattattaaattaaaatatataatactcgatattaaactctacccgtagcaatataacacctatggacattgatttatgaactaatatttgagtccagatcgtatcagttaaaaattaatgaaatgcctcaatgctaacataatgtatcaaatgcacaatataatatattaatatagacacaaaaatatgtttcgtatgacattataattatgtattaatacgtaattatgttactatgaaacatcgattctagtcattaatcataatgttatacatttgatacaataattatagtccatgattatggttaattaactacacaatattcttgttctatgtataattaagttgtttctcaaaactaaacctgcaaagttaagagtaaggacaaggaattaagattttgtaggaacaaaatcaaattccataattaagatattacaaaacataaaagacaacaggaaataaatactaaatattcttgattgagttggctttaattattgacattttgttgtattaattttttagtttgaaaataatgtcaaataataatatataataaactctaatatatatattgctaaacagtgacataagtacctaaagttttaaatttataagtggtacaaactcaatatttatttttagcggtataagtacctaatgtttataaaattataatttttctctaattttatctgcacagactctgttattgccttaaacatgacacataatatataaggctcaaattctagattattgggtctatacagaaatatgtagtatcagttacttttaaatgttattttaataaattcaaaacggaatctgtactaacaaaattataagaaaattacagttttacaaacatttagtacttatgctgctaaaaataaatattaagtttataccgcttacaaacttaaaagtttgggtacttataccgttatttactctatatataataattaaatttattattattaatattaattattatgcattgaatatacagagaaattttgtctaaaaaaaccacacaaataattggaatgaataaaatatctaaaaataaattaggcaaccaattattttgggcatcttccccttgaaactctctctttcacacttttaaaatattcctctaaatttcaaattattataaatagaagccataatcccattcccaaacatcatcacaacccaatcaattacaacaatcccaaatctttttctctctcaaaacacattttctctttagagtt

SEQ ID NO: 240225 - DNA, 634 bp, Cannabis indica
atatatatatatataaatagtttcaagggtttcgagcgaaggtataataagtaattcatttgaggtttgactggatttctatatcttatatatattgatgtgaacgtaccaatacaaaatttataattaatatataataagaatatatgttttgtttgtatataaatatatatttatatcgagttgatcagtaggcgtggccatgatatatatccttgtcgattagataataccttgtttggtggtgtctttgcatgtgcaccatttatagcctcttaatgctgcaattctaaatggtcctcacttatgcattgaggctgtgagattgaaagataaccacccagcccaaagaaacaaaagaaacacatatcactcctttatatatacctattttcattttacaaatgctcaaattaattactaagtaaacaaacttctattttttatttttatttgaaaagtggtaaaaatttgttaggaatgaaaagtatggatcagagatggaaagaagatctcattcatcatccatatattctaactagtttactgtctcagttaaaaccattgagataattcttgtgtaggtattattgtgagttaatagtgtttctcattctttagctaaagtagctag

SEQ ID NO: 240226 - DNA, 772 bp, Cannabis indica
aaactatagcttcttctttgttttatgtttttatctaaaaccatagatggactttagttcttttcctatacgagatttatttttattttaaattttactttttaaaatgcaacatagatgaattcatcaattttctcttcattgattaattgtatttttatgaatgccatgaagtattgtcgcaggacgaaaaatgagtgctaggtacaccctcattcaaactccattaaactcgtaatactttttcaggaaaaagtaaaaataatatttataatagccattatctcattatcttactttataaaaaaagatatagctataagtagggctatttattagatctaattggtacttttttggtctaaacatttaatttacattaagtgtagattttatatttttagattcaatttgatctactgttaatagtgcagaatgaatcagttgtgtattttaatattttattaaaatgaaaaaaaagcaacagttgcacaactaaaattggagatggagttttcatcttagagtgtaagagaagaaaaataattaggtttaaaaattagaatttataagtttgttcttttaatattattaaaaagttcttttaatattattaaaaaaacttatataatattatatattaaaagtgtctatctaacggcatttcttggtttaacagttaaatttaacgataggtttgatctcctgttaactttcaaaaatatataaataattaactaaaaattaaacaattttttttaaacgtttaaac

SEQ ID NO: 240227 - DNA, 1012 bp, Cannabis indica
acgaaaaaaccatagcaagaacgaaatcagattcagattcagatcaattgagcacaaagcaaaacagtccagaacaattaaaggaaaaaaaattaataaaatataaagggaagaaaacgaaaacctgaacgacccaaagagcagtggtggtagcagcgaagccccataaggcggcggatttgatgtcctccgattgaatacgaatccttggcttcaacgatttgagcaaacccgcttcacctgccattttttctgatcgaaaaccctaaaacttaaaatggaaatcaatgaaaccgaatctttgtttcttactgcaagcgtcaacgtctatagaggaagaaagaaaagtaagaaagtgccctattattttgaatccagtgggtcggggtccacacaaccaattgtgaacgaatttcgatcgttggattgcctccccgaactccctgctatttagatttgtttttcctcccatacaaccaaaaataaattatttcttacactacattgaaacttttaattttttactttttttattataaagtaggattttttatttaaatactgtctcaagttttcacaattgtttcacggttattctttaattgttccactattatttttttttttgagttaaagtgtaaagctttattcaaacactttcagccattacaatagacttgaaatcagcagaaacattatgctgattaaaaatacaatctgacgaaaaacaagactctctagcaagacaatgagcaaccctatttacagatcgcttaacaaattttaaagacacattatttaaagacgacattaaagtcctacagtctccaacaagtaatccaaactgagaaggcattgaaaaagagctattaatagcttgaaccacaaccagtgcatcagtttcaatcactacattggaccattgtttcctctctatccaactcaaggcctcctttattccaatcgtctcagctataacaggtttaaccaccccaagcctcgatgcagaaat

SEQ ID NO: 240228 - DNA, 861 bp, Cannabis indica
tcaaaaagaaaaaaaacataatttgttttttttagtaccaaatttagcacaatatttgccacttgcattgcaaatgggctaagacaaactattattaaaagacaagggaaatggattatggacaaggaaagacaaccttttctaacaaatgttgtttaagacgggtcaactctttgtatggctttatcccttttcacgtcatgcttccttcatctctccatccaattttcgaagaaatagctccatttcttcaatcccagtaaacttaaacttgctgatgcctctaccttctgtcaaaatgaaagattactaggtaagtggttgacttttacatgatcacatgatgttcgtaataagaaaatgaaaatttttaaccggtaatttttcgtcaatgggcttcctactgatttccgtggtggccttaagttcattcttcaactacaaaatgagacattattgtaatgtattcccgagcccatggcagtaaagcagtgataccaacctctcccatactcaattaacgaaaggtaatacaactaactttaaggctagcattttccttttcgacggttgcaatgtcatcagcatcttcagcttcctttctcatcagctcatcttgtactttgattgattcaagggaggactggttaatgaagaaaacatttcatcgcagaaaaggcacgttcagagaacaaaatagactgaaataacttggacgttaaaaaatgacaaaaatagagtggaataacaaagacattcaactatcctgtgtgtagcattcaaactcaccttttctttttccatttttagtaatttgatcaccttccgaaaagattcattcagctttctttcctctgaaat

SEQ ID NO: 240229 - DNA, 613 bp, Cannabis indica
aaatgtgtacaaatgttaaattaacggtgtggtggtatatatataataaaattagcattttatatttttggtgtaaaaattttctttttttttttttcttttttttttttaaatttatctcattatttaattaatagaaaaacatatatatttttttttttcagttcttattttactggtggctacaaccataacaatatcacacctcgtggtgtggtgttaacgagctcactattagtactttttagcatttctcgaataaaaaatcttgaaagccagaaagagtaataaaacaagaattcaaccgtaaaagagaacccttcttttattatttagtataagagttaataaagcaattaaaacaagaattacaataagcttttaagttaatcacaagattacctattacaatacaactagtaataatataatcacagaacaagatccttaaatgagagaagaagaagatgacctttttataaccaccattttcactcattcattttcctattacacatcatcataaataataataaataaattaataatgaaaaagaaacatctcatctcatcttttgctatgcccataaatattaattacaacaataactga

SEQ ID NO: 240230 - DNA, 2135 bp, Cannabis indica
taccactgatcatggcacttatacaagaaaaaaaattgagttagccttgattgctaaagaggtgggacaacatgtaattaaagagcaagttgcaaaggatgtctcatggcatctaatcctagtgtgggtggtagtatcagtaaggggactgacaatggcaacccagatcacaaacagaaggttaaagctttcgaagcaccaggaagtaatagaaagtttaggggaaaaagtggtggctgtcaatgccgcgggtctacattcagatcatatccagagtgtcccaaatgcaaaaagcaccatcagggtgagtgtcgggctaagacatgtttccaatgcagtatggtggaccactttatccgagattatccacaggctaagaaagacgaaccaaaaaagaacaacaactggaatccggggcgtctgttcactatgactcatgctggcgttaatgctagtccgtcagtgatgacaagtcagttgtccattaacagttgttcttattcagcattatttgattcaggagctattcactcttatgtatcgagtaaagtaattgagagttttcataatcgtgtgatgtgcatgctttagggtttggtaccctgttacccttaggagtcctaattgtatctactcgttggattaggtctttgtctttttggattgacggttatgaattaactgccaatctaactgagttacaattttctgattttgatataatcttgggaatggatattttatctaatacggggcaacaattgtctgcaagtggaagatggtggtatttgaaccggacagtgcccatccagcggtgtttgtgggtaaagtacaaggattgcgcatacctagaataacactcctaaaagctaaaaatttgatgcgcagaggttgtgtaggattcttagtaactacgttggatactagccaacctgtgtcatttgtacctaaaaatacgagattgatgtgcaaatttctagatgtagttctggaggatttacctggattaccaccttcctgagagattgagttcgtaatagagttagttctaggagaagaaccaatattaaatgcaccttatagaatgactccgaaggaattgaaagagttgaagatccaaatccaggagttacttaacttgggatttataaggccgagttattctccctggggtgctccgtgttatttgtgaaaaagaaagacgggtcgcttcgaatgtgtatcagttatcggaattgaataagctcactatcaagagtagatatcctctaccctgaattgacgacctatttgatcaattgaagggtaaaatggtcttttcaaagatcgacctttgctcaagttaccatcaactgagaattcgtgaagaagatatcccgaagactgcattttgtacttggtatggacattatgagtttttggtgatgtcttttggactcatcaatgccccatctgcatttaaggaccttatgaaccgggtatttaaggattacatggacaaatttgcgatagtgttcattgatgataatctgggttattccaaatcaaaggaagagcaggaattgcatcttagattattgattcaacgattacgggatcacaagctttacgctaagttcaagaaatgtgagttctagttgtcacgtgtttctttcttagagcacatagtggataaagatgggatcatggttgatctggccaagattgaagttgtttgggattggccaacactgaaatcggctaaagttagaagctttttgggttttgctggttactatcgtcgatccgttgagggtttctcaaaaattgcaacatccctaatggaactgaccgaaagaatttgaagtttgtttggactagtcagtgtgagaaaagtttttaggagttaaaacaacgtttgattaccactcatgtactaactcttccttcgaataaggaaaagtttggtgtttattgtgatgccttgagacaaggtttaggttgtgttcttatgcaaactggaaaggtaataacttatgcttcttgacagttaaaagagtacgagcagaggtaccttatgttggattttgtgccctaaataaaatccattacaatctgattagttatcaattttgaagtgaattatgattacatgt

SEQ ID NO: 240231 - DNA, 1101 bp, Cannabis indica
attttgaagcttttttctttagtttgagtatgtgattttgtgaattgatggttgttagggttagaaatttttagcgttagaattttaaggttcatttgagttggtttaagcttcttgcagctagttttagtttatggattttgttttgtgcaagtttaatataaatacataaaaaaaatatggatgtacaccttaaaaattagaggaggaggagggtggtcgttcgtggtggtcctcgtggatgtggtgggtgcggacaaaggaagaagtgcctgaagttatggtgggtgcggaaggaggaagatgagactagagacagataagagatgagacgagagacgaacaatagagggagagacggagatgggtgtttttagggttagggcagaggaggagatcgatagatatgagagacggacgagagagggaggtagatattgagagatggacgagagatcgatgagggcggagatgggggttggcaggctagggcagaacttctattatgggctgagacaatgaacgagaaagagagagggtattcacgagctagtataacatttggagtgtaaccaacagttttaaatcgtcaggtataatagtactaaaaattttctccattttccttaaaatgatcgcctatttcaataacaagtgttctaaactattgagaatacccactttttcctgatgatttaaaacagtcatgtaaatttgtgagcgacagtcccccaaaaaaagtattttataaacctataggaattcctagtttcataatagtggatcctcaaaaaggagactaagaaggtccgcgtcgatccggtgttcacctcccaagtattcgtacatattatttgtgcaaaagaaaagagggaagttaacatctgaacaacctaaaattagacaaacgacatctaatgagccggccagggtaaaacaaaacatatgtgccagccagggtgattaacagatcaaaacaacttaatctacaatagaaaaaaatttgaacttcgagtttccaggttcctacccagccaaaaatcatgagaatgcataacaaaggaaataggaacctccattccttttcaatatacttacatt

SEQ ID NO: 240232 - DNA, 853 bp, Cannabis indica
gagaaaaatcctaattaacctttcttttatatatattcatcgaggctgacaatttagtcacataaatagtaatttgcgtgtccaatcactcactaaaatagttcatgtatataatattaattaactaaaattaaataatatttttacacatattcatatatataatattaataaactaaaattaaatagtattttgacacatgttaatttttacagacaaaagttttgacagctaagccaaaagtacacatttattgttgaaagtataaaattacctagtatagccggttttgttaacagggtggattggcgccaagtcttttaataattatttacttgaataatttggtaattttatatgtatggtaggactattttaaaaaataattaaaactatttttctttcttaaaagaaaattaaaactcataaaactactacctaatttgcatttagttatagtattttctttattttcaattcttttataaataatttgaatgtttaaaataattataattaattaatattatatatttgaagagtaattggcagtataactatttaaactctaaagtttggtacgttatacccatttattaaattgttgggggttaaaccttccaaagtttacatctattttagtttttacagtttcgttagtcagctgttaaatgccaaacaaatctatcattatgtacgcatggcaggttgtcattggtccacatcattatttaaatattattaaaataattcaaaaatcatttaaaatataaaaaaattagagaaataaaaaaaaaaagttacttctttctctctttctctgagtctctctattatactcgaaattcggct

SEQ ID NO: 240233 - DNA, 982 bp, Cannabis indica
tatttctcaattatattttctcaatgtgttctaaattatatgcttatctagatattttataaatttttaatataatttacttatagtgttctaaattatatataatttagtttcctgatatttcataaattttctaacagtaagtgattaatatgtaaatatatgtacatgtacatattatatgtatgaaatatatatattgattgtgaaagttttttgcttgctaccaataatattggtctaaccctatctaagtattatctaagtattattgatgtatccctgtatagagggaacactttaaaaatttgacaaatattttttaacatttctcattaatattggactgacccacctaagttatcaaaccaaatattattgatgtatccactatatacatacatataaagggaacatgtggtatatttttttaaaaaaaaaaaatggaaagttgtgaaaataaacaaatcataccatatacgttgtaattatttaagaagatttgtaaattttgaaaaaaatcgaaataggttacattttgaaaataaagttcaaagatcttatttcacttgtgactatttttttcatatagacatgtctttaaattttatttttgtacattgtaaattatttaaaattttttaaaatttataagtagttttaaataactacaacatacacaatcatgaaaaaataggcttagcaagctatttacaataatatgaaaaaaaactctaacagcaacctcaactaagaatccaacaagctacccgtgaataagcatcaaaagagtgtaaagtatactaggcttccaaactaaatgaaaatgtgacagagtccacctactaatgactatcaaccaatgatcttccaataaaaattgaaacataacaatcctattatttcaatcataaattaggaaaataataacacgaccaatcatgtagtactgctcaatcaaaaaagattagatcacataaca

SEQ ID NO: 240234 - DNA, 783 bp, Cannabis indica
agtcttagaattgttacctcaataggaatccactttactcaacctccattgaagaaaaccttgaagttcttgagaaagaagaagatgaatagtggtttttgaaattttggtgaggttttagggattgggggttgattttgaaaggaaaagagtgtttgatgaggggaataatggtttagaatgatttgggatgaaggtttatggttagatttgaagaaaaagggtttagggtgagatagatgaaaaagaatgtttagaagagaggttttttcggtggtgtttgttgttagggttgaaaaggaattgaatttgaaattgtgtaatttctcaccttttaaaaacccatctgacactctctccgcggccagaatacatctcgccgcggccagatagcgtgaaaaaaacctgtctctgcccagtttatatggccgcggtgggcctcctcttcgccgcggcgggcctcctcttcgccgcggcgagatgtcttcgaaaaaggggtctctctgcccagggtatctagccacggcggccatcaatctggccgcggccagataccttcaaaaaatcaccattctgtaagtcccatatggtcgcggccactgggccaaaccttggaaaaaactatatttttttttctatacagtacaaaaatttaaagaaaactaaaattgttttaccagttctctaaacataactaaaaagaatagaaataaaaataacaactaaaaacataagaaagttcaactaaaacataaagaaaattttgggttgcctcccaattag

SEQ ID NO: 240235 - DNA, 808 bp, Cannabis indica
tttttccaaacctctcacaatagttttcttctaaggattactatcaacttcaccgaattgtttaagtgtcaatctaacccttggtgtaaataactaaccgagttgtttttccaccagtgttaacttcacctttttattgaattattgtagtgaaaatcttattttactcgaattatttacaccatatcgatgtcaacctcacttataactgagttacttttctatggataacctctaaccttaatacaatagtaatttgtttttttaatacaaaacaaactctctccaaaatgataaaatacaatttagaaacttaaactagagaaaataaattaactttgtattataaaagaataatacaaagtaaatttataacatgtaatatatggtcaataattaatcatatatatatatatatcatcttgtctaaaacaaacatacaaactaattaatacacacatacatataaacttcatcatgcatatatatacatatatattgactttcatatcgttctcacaattaataagtcattcttacatatcacacaatacattaaaacatatgcatagagtactatagtgaccatgatcatatatatacatacagattatataatatatatatatatataatattagtagttgttagtactcccaatcatcactcttccaatatttgttccacaagattgtaatccattagagccatctctaggaggacaaaaacttataggtaaatattcttcaaattcacagcaaaactctgatttcctaaatcttctctctaatgcctcccttccctatat

SEQ ID NO: 240236 - DNA, 1414 bp, Cannabis indica
tagttctctcttttttcttttttgattttattcctgccttgttagttttttaagcgatttcttttcttactttattattatttttgttattaacaagtttatatcctatttctttattttatatactatgatttatttggatatattttcctgcgtaccatatgtagcaaatgattcgtgattctgtgcatattttaatctcatgttgcagaggtacaccgtacatctttaccggatacgatcaactgtatgaatgcatctccactaaaggtatattggattcagtgttattttggactagcgatgagttgcggtttgagcgggtggtgcgaataagatggcgtaaattgcgatcttgataagaattatggtcaaaatggtcgcgtgaaagcttttattgtatcttaatgcctaattgattttggtttctattttggatgcagccttaacatatctcatttgccttgattaccgtttttttgtattgttttggccctttgctactttcctttttatattttatataatcttcttaattattttattttatatacagtatattattttcatttattgcttaattaatggtgttaatttagggcatttatttcttattcttgccaggtatataatatttgatttatacaggtaacattaattgttatatacatataataatatatattaattatataaagttattatttatgttttaattatttttaatttaattaattttgattttatatattttcaattttttaagttatgttgttgatttattctaattttatttctgagttagtgaaaggcgtctagattttagtacttttgtttgaatgtttgcaaagtgtgatgaagtgttttgagttaaaattttaattttaatttaatcgtgggtgattttgttcaatttattgttgggttgaatgctgaaatggtggttagttgaatatatcttgttgtttgtttttggttttgttctataatgttgagctgttataatgagatatattgtaatctttttgttattgctttgttttatatttgcgccatttttatggctttggcgccttacaaggctatagcgcttattatatggctggcccctaattatttagggtagtttgtttaaaattttcacgacttcttgcattgaaagtataacaaaatgttggcacaataaaattgcaaagtaaacaagttatgcactgaaaaaattttactagttagaatataatggttatttaagttaaggtatgatgtaaagaaaattttaaattgatattttaaaaatattttcgagtgaaataaggtttaaagaggattaagtttaaacaataatagcttttagctatggttggttcatatttttaggaattattagcaaaaagggaaagtggtggaatttagt

SEQ ID NO: 240237 - DNA, 1441 bp, Cannabis indica
taatgtctgagctgtaactccatctccagtacgagaaccgttgagcttttgaagacatcacagatcgagagaagtttaaagatgggaagagatctgaatagtcgaatcaaagatgaaaagaatcctttgaagcagtatcgagatctcgatgctgagaaagaacgtcgccagagaagagaacacagcgatgagagataaagaattaggatcaatggaaagcattatttttccgctctaataccatatagagaaagaaataatgaattgtattaagcaaaattctctctaatacaaagtatgaaaggcgactatatataaggagctagtgagtacaagaaagataacaaccgaatcaagaaagctaacataagataagttgagaagataattaatcaactaacccaaaaccaacttaactaacaaacagagtaaacagttacaatagaaaagaccaacttactaactaacactaaagcctactgaaatctattatcagtccccttcacaagattctctcaaacttaatgtggatgttgtaatatactgacaatggtaaaattggtttaggaatggttgtacgggattttttggataaagttgtggtagggtgctttgattcatgtacccagtttgttaagctcaacttatgcagaagctttaggccttcacaatgctttggaatggtgcaaagtgacaaagttacttattcatgtaattaaagtggattaaaaaattgttatagacaaatcaatcaacaaagattggataactcctcattgtaagatctgttaagtttgatttttaattctatatcttattttcctaatgtaattcttaacaatgtaccaagaaattataatgtgttaggtcataatttatctaagggataattgcggtaaaagtccccaaaaacttagagttgatacagattaatccccaacctcaaaaattggcggtaatagtcctcaagctgacattttttgttagtccgttggtcccctttttaactgatccgttaaactcaaataaaatgccacatgtcaattttttattggtccaaacaataattttaattaaaaaaataaaaataaaaattaaaaaattaaaaaatatattttaaaaacataaatttattttattttattttattttttcttttattttcttctcttttctctttagagtcttcttcttcttctaaacctcctctaattgccagtgtacccagtcgaccccaaccacatccagagtaacagcattcacagccgaccccacgccctagccacctccactctagccccgatgttgtcaatcggcttagtccccactgtcgattccttcatgtttacccagatctaataaaacgaaaatttaaaaaactaagtgtttgggtagaaagaaaatgagaagagaaaatgggtatttgagaacaagctcaaaa

SEQ ID NO: 240238 - DNA, 830 bp, Cannabis indica
aagttccatagagatattggtaacaaaatagaagaattcttccatcttaagatggaaatcgaagacctaatacaatggggatactaaggaggatattgtagggaggatcaatgccccgaagaatggaggcagcgaacccaaatgaagctccagaggtattgagagaagtaaggtaagggaagtaataagtatgcacgggaggtgagacaacctccaatggttatgtgcttagaacaaaggccaccaaagaattttaatcgggaaagcaactttgagacgttcactgaggaagatgcacgagaagtccactttcctcaaaatgatcctcttgttttggtgatataattggctaatgcccgtgttcaccaagtgctagtggtgaacagaagttttattgacatcctctatcaaaacacgcttggacaaatgggattaggcttgaaggattcgaagccttgcacgatgcccatatatgaattcattaggcacttaatctagcccccaaggacgtttgaactcccactatttattgagatttttgaaagctaaataaacacagcattagaaataaacaaaaaagtaaatagtagacaagtgttttttacgtgggcattaataattcctagtccacaagtcagttgtattggccccttaggaaagtattttgataatatagtatgtttttatagtataacccctagctctgtactccttttgtttctcttgaagaagaaaaaagctctgtaagaatttttgcatagattaggctagtagaaattttgttcaccccttgtacataaaaaaagagggtatttatatgcttacgtgtg

SEQ ID NO: 240239 - DNA, 2078 bp, Cannabis indica
aatttttaaaaaatataaataatttataatgtcgaaagtagagtttctgatatttcagtttaccagtgttcagaaagcttcaaacatattttcggcactataaactattcaaaaaaaatttaaaatttacatggatgatgttataacaaataccaccatgaaaaaaaactgaaaaaaaaatccggcatgtgttctcgggtatggaagttgacggtagtactcctcgtttgaaaatggtaaaattgcaagttcattaaaaaatacttctaaatttaaaactgcaaactatatgtataaatttcagtttttagatattttattgggcttcaaaaaagggttctaaaggtcgaccccagccattataaacgttgctaatcgaactgggcctgcaagcccatgctttaaagtgttaatttcttttacgtggagcttacacaaatgaaatcgtgtatttcaagtaatgataccaaatcagaatcatgattagtttttcttttatcgccaattatttcatgatttgtttattagtaaaatattattagttttcttagccaataattaaatgaagtggagtggagggttggtgaagtcatagctcaaatgtaatttattttgaaattaaacattcttatcaactaaatgacatagtttaagtaatttagtttagcctcccctaatcattattcttttgttcaactctttatgtttctatatctttatatgaatgttgtgtttgtctaggaggaaaaaggtcaaccaattgactttatagaagttgttatatttaaacataaaaaccacataagttggacaaatgcataaattattaacaaatagaattgccaccattgattgctctatacttttgcttaaataaatacatgcatatttccccttttacgtttaaaactttaaattacattttgttctctcatgactaggtagcgtaaatcaaaaacttaaaaaaatgcctattattcattttttgattttccaaagggtaaaaaaaaaaaaagaggcctattagtgccgtcctacaaatacttccaaaatgtaatttcatttttatgtcatatcgtcatttaatataatttgtatttataagttttttttttctttttaaaatcacatcgaacataatattataagctatttgaaagtgacaatctgtcaagcaaaactaaataaataataattatttcttagtgacatcaaacatataaaatccaatttaaaatttattacaagatcgattttagtattatagatatacatggtacataattacaataacatttaccattattaagatgtccattttggcaatcttaattaatctcaagtagctgaacaaagttgctatttttatttaccatattttggtatgttattgtagccctcgttatgatgacctcaaagtattaagtagttttaatattgttttttaatcttcccaatcatatcaagtgatcaatgcaagagtcttgttgtaatttgctgatcaccaccaccaccctattaaatatatgccatagcctattgacattattttcccactatctttccaccttatgtggttcaataagggaaactataattttgtattaaaataacaaagtatatataaaatatatttattactattttatttttcttctgtataattaagtttatgtatatgtgaatgtgatgatcatgggcactgggcagtccccgacatttgaaagtatgaaagcttttttgtctattagatattagatataaatataacaggccgggactctattttgtttttaacatcaaattttctccaatcataggcaactttaaacacaaaatcacttggacaaaaattaatgtcatcagttattcgaaagctattttgattaatatatatagcttaattaaaaggtacatttatcttcctcctcacttggtggtctatatattcaagtcttggcaattcttgctttggtgtttttgctagcttgtggcgtttgttgtcttgagaagagagaaaagaacatatcatctataagactataaccccaatcctttttagcttatcctttatttat

SEQ ID NO: 240240 - DNA, 955 bp, Cannabis indica
gttaatatcatgctatagcttaacagaatactaaaaagagaccagcgtgcttaatcttatgtattttatttagtcaaattaatattgggtgtcgtataatttggattaataaattttaaggagtatagctaattagacacaaggagacatatcttaaagtgctagacactactggtatcaaatagcaatgctctataacgtaataaaaataaatccaacaaattattaggtccatgtttctaataattgttttaggacacatcatttattattttatatgtataaatttagtttatagtttgttcacgaatttattatatgttaaataggtttaaataatatgtactaaaataattagtggaacaattagataagaatcaagatgctggtgtctctgttaaaccattctaatataaatgttatatatgtttggtaattaaatattataaaaaaataataacaatgctcaatctttttataaggccaaatattttatacatatatgattttatctcaactatgtggcagccgtcaccggacaaggtttcgtggcggtgaacataacattccgaaacactgccggagcaagcaagcaccaagcggtagcagttcgaaacagtgccgatttatctgctttctatagctgcagcttcgaaggctaccaagacacactctacacccactccctccgccaattctaccgccaatgcgatatatatggcaccgtagatttcatcttcggcaacgccgccgtagttttccaaaactgcaacctattccctagacttccaatgaacggacaattcaacgccataaccgctcaaggccgaaccgacccgaaccagaacaccgggatttcgatccacaactgtacggtcagagccgcagatgacttggcggcttcgtctagtggcggaggcaatgcgaagacctatctgggtcggccatggaagga

SEQ ID NO: 240241 - DNA, 1779 bp, Cannabis indica
aaaaaaaaaaaaacaaatgtatcaatttactaaaacgagagattttgtgaatcttgattcttgagtatcaaaaaattattaaaatgatgtagcgatgacatgacatgcttcaccaaaagcctaccttagctcctgaaattgcctggcttttttcaatggttactgccgttacatcgttgctagatactttaacatcgttgccattcaaatcttgaatttcatgtccagtactcttgttagagcaccttgagctttccaaagatggatctccatgtttctccatttcttccgcattcaccaagccagacttgttatcatctaaactactagaaatatttgtcatgtttttctcatccatcaaactaaaactttttaaggactctatgccatctgtctgagaactcccagtatcagttgctagatccacttttacaaggtcttgtttaccaaaagaatttgctacattagatagttcattggagcttctatcaaactcacctgctgtcgtagtagcaggcttcagaggaaatgtctcaactgttacatctgcagctatacgtgtcactttagacctagaagctgttgattcttcagcattctctgcttcagaaagttcacttgaatgcagctctgctgcattctgttcctgagattctatatttctcacatcaacctgaatgccattgataacatgctcgctgtcaacttcctcctgtccaggacaagcataattcccatctgaaactaaatctgcttccttgttagattgatcatcaccattctgctctaattccataaatctctgcccttgcatctctacatctattggctcactcaatcctctctcaatagtaatattgacgacttggccattgtcaaacaccttgtcttcaagtacagcatgatgcccattaaccaaatttggttcttcattacttccatggtattcatccgttattatttgagatccatttgataattgtgtcaaatgatattgaggagctatagcaattgaacccagggggtattcttccaactgattggtgcttttaccatctccacttaacttagcaggacctagaaccctattttcttggattatatccatgacgatttttggtactgtgtagaaagacccacccacctccttgtgggtaagattaagtaatggaaaactccaattgtttaacgcttgatacctgaaaaatcaccaaaaacaaaatgagaaatgcagatttttagttagctacttccctttagaatatataattgattcaagataattaaggtattttaggccttctcaaatctagaatgtgtgaacaacaccacacactgatacaaccattaagcaaatttcaaaccagaccacacatgctttttccaatgaacagtaatactattatatttcctattcacgtcattgaaccggtgcagagcattgcattgtactgctgaaataggacttttaaacagcctgaatgcagtttcctgattgctggtaagacatcaaatgagataaactacacaaaaacatagcaaaatcttgatgtaaggtttgaagtaacacattttaccaaataagcccacgacgtttaagagcctagaatacgatatacaagatagatactatgaataacaaagtgataagatttaacacacagcaaggatcctcttccaaagtcaatcaccataaaggaaagacagtgtgctaatatgacaacttgcaaacgtgaaaataataaaaaacttgaaacaaataccatttggtgcagcata

SEQ ID NO: 240242 - DNA, 1290 bp, Cannabis indica
acataatcacgaggttgtgtggcgtgctctacaactctaactttacccatcgttgccactctagcaacatgagggtcatatgttggtgcactacgacacgattgttttgttcttgccgtgactatcagtccaaaatcacacaaagagagcaaggtgacagactaaatgctatatctttgaaatcacctgtatagaagagacaaggggaggtgagcaacttgacaaagctacagacaaagttatggttaattgtacccaagggtcttttccatgtaagccacattgtacaaggctaggtatcatccaagtaccatatcaagtacatctacttagaaaaatagttagttctaagttgtgcacttgaaaataatggactcactaccaagtcttatatagagttcccaaggggaaccatgcataagattatagttgtatatgcctacaaggttgtcataagaccctagccgaggtcaaaagaggacaaaagaatggtcgcctgcttagaaccttggccttggccggcagggttcccaagccttagagggtcggttaggtcccatgacccagcctagggtcgaccaggaattccagttccaggcataggtcggccaacctatagggtactccccctatgcttggccagaccccatggtgaacacctaagttttgaacaagactttcatggccggccagggtgtacaaaggatctgaacatgtattttttcaagaacctgaacacgttcttcgtgactcaaagagcgaagaatcacaatgaaggtcagaatctaatctttttcttctagaaatcacacattacacatcctaagactactatgcagatcaaaataccaaaaagattataatctaacgtgggaatcaaagaacattaaaagcaaagaaaaagattcatgcaatcatggaaaaatcaactaaatcaagtgaatagcgagaatagaaagcttacccactacaagaaacctttgatggagagaatgggaagcttggatcgtcaaaatagcgcaaaaatcccaagagatggagcaatgtgggttcggcctctagagaggaggagcttttcaaagctacattttctagtgaaagaatgaaaagtgaaaagtgaagaggattttccctctaaaaggcttatatagtttctgtggcaccacttcctcacttgctacgcagtgttcaactaaaaagcatatagaagtacaatgcgcttaacttactgcagcaaatgagattagaccgtcaagaaaaattattcaaagactaaaaatgcagcaacat

SEQ ID NO: 240243 - DNA, 1030 bp, Cannabis indica
gtgtaggtaagggcaaggccaaagttgaggaaccgtgaggacgagccgatgaagattgtacatgtcggggcggttagacctagagcgtacgatcctcaaaacaacaacactttcgtagttagtcgctgggcgacaagtattttgtaatagacaatgaacttttgtaaagtattttgtaatcaggatcccgaatattttgtatataatatataagttttaattaaaaagcaaaattttaattaatcacgttttccataaacctcgttgattagcaacgagctgcacagtacgtttaaaaatcacgtaacacgcctagtctagttacggtgttacactacacatcttaaaaaattgtgaaatttcacaaactggaagctaagactgttgtctaccacttttctattggtcacgttgagaaaaaaatgtaattttaaggcattaacaaatattttgatcaaaaaagtaaaaattttacttttttgatactggtattcctttgtgaaatatgattcaaaccaatctaagaatattttttcccacaagttgcaatgaattcgtattactaagatctgaatatgtgtataaatttcgtttaaatttggttaaaataccccctaattaaaaattgaaaatgtcattctttttagggtatattttgtcaaatattttcttactcttctactcttcattattcttttaaaatctcacctatgcatctcgaaaaatagttaaatttcacagggagaaagctaagaccactgtccatcacttttctattggtcacgtagagaaaacttagttttcaagcaccaacaatcattttatcgaaataatgaaagtcttacttttctcatagtgataacctttggtgaaatgtggctcggactcatatccgaatattttctccactagtcacaatgaattcgtactactaagacgtggatatgtataaatgttttcgcgtaaaatttggtgaaaatgacctcgtaattcaaaaattaaaaatgttcttcttttcagagtaaatttt

SEQ ID NO: 240244 - DNA, 1263 bp, Cannabis indica
gaaaattcaacaagacatgatctccacagggtgaagattggagaacaattaggagatattttcacaaaggctttgaatgtggtgcaagttgattatttttgtaacaagctggtataataagcatttatgcttcaacttaagggggagtgttaaaatatataatatattttacttagtttttaatttcttcctactttcccatttagtctccctaatcttgtatataaatactagttattctattgaataaaatacaattctatttaccattttctacaatatggatcggatattgattaacattaatccatcaaattcaatctacacctattttatatatatttaataaatatataattaatatttttaaaaaaaaaaatagtaattttaaaaattaataattatggttcatatgtttcaaaatttaatatatcatatgcatatatttttatagaagaaagttatgtgcaagacacgtatacttaattttatattaagtgttttataattaaattaaaatcatataaattcaaaaataattccctcaaaaataaagtttgaataaatcacttcaataattattattagaatggtaaatataacagtatttgtaaaactaataaaatgtttattgtgtggtaatttctaaattatatacataacacaaagaaaaaaaatagtaaagcagattctttcagaggaaagaggtttgctgaaagaatttccaactactgagatggtggcagaaagaaagagttaggagaattgtgagtggtgcataattgatttagtatatcgattaatttttatctgtgtaaccaaatctaattctaaattttagaataaaccaattgaaagaaggaatataaaaaaacaagaaatatgatagcttcgaaataatattatgttctacaatgcagcttttgttgtcacggaatatttagcaagaagatccaaatacctacaattatacatgttccaaatattgtctactatatatttgggtttgatatagtgatacatataaaaaaatagggatttttacaaaaatactagttttttggtaaaaatttacaattttactgttacaattttttttttacaaaaatactatctttttataaatcaacaaaaccgaacaattaaaacaacaatggaatatctaaaaaaaatatgtgaaacaaatgtgaaaacttaacacagtacacaatataaagcttacatagtatttttgaacaagctatatataaatgaaaatttgac

SEQ ID NO: 240245 - DNA, 1660 bp, Cannabis indica
aaaatcaaaaaccatcatacttaactcctttgacctttggaagatactctttgatgttggacggtgtcgccggcaacaggggggagttatttggtggctggtatgaggtgtgggaggggttgcaggcgtctggtaggggagaagagggtttaaggcgtctggtaggttgcaggagttatttgggatgaagaaatgaaattaattattagggctgataatcgagatatatggtatttttcttttttatttttttttataaataaaggggtacgatgacgcgcaacgcgtgtctccataggccattgttttttttttttaatttaatttttataaaattatatattttaggttttagtatttagtgacactccataatttttagtgacacacatttcgcgtaataaacactgaacatttagagtcgaatcttgtgtgtcactaaaaaccactcttaattttttagtgacccacacttttatgagtgtcactatatggtgtcactaaaagtctaatttctagtagtgataaagtcattcggaataagaccataactttggtgaaggtgctctggaaacattaaggtggaggaagccacctgggagttagagtccgacatgagggctcaatatccagagttgttcaggataaattttgaggataaaatacttttaacgggggataattataaagacatcttaattttaatatgaaattagcagatattaagggcttaattatgaaattagattattaattatgaaatatgaatttatggagatttaattgaattctaggtgtattatttatgctatatatgaaatttcatgtttttcatattttatgcccgactactttggaattaggcgtttggccaatataatcatattttagtatcttagtagtaatgtgacaatatagatagacattgggaatatcgagaatatttgaggttttagatttgaccaatatgtccctaggtggcatgtatgctttttggtgcgtgctagggtaaaatggtcttttgccatttagttagtttgtcctttagtgaaatttgatgggattagtttaattctgatttttgagtttaagttaattttagataaatactaagtatttattatcttatctctttatttcaaaaatagaaaaaaaaaatcaaaattcaacctttctttctctcttgctcgacccctccaagaaccagcaggaaatttgtggatttctttagcttattcactggtattctagctagattttcatagctcaacccaaggtatccatcaagatccctttaatttctttgtgatttcttaagttctaagctaactttcatgcatgattttagaattagggttctttgatgctgatagtgtttggttttgtattttgaagttatttaagttgatttgagttgagtttgtggctggttgtgaggtttgttcaaggtttgagctgaagagctcaaactttgctctcacatggtggactttgattctgtaagtaggttggttgtattgcttggtttcagtttattatggtataattaggtgttttggaggttcttgtgcaatttagggtcaaattgaattgtttagatggagtttgtgtttccaccggttcagtgggacttatatgaaccagaattccagttggtccc

SEQ ID NO: 240246 - DNA, 1382 bp, Cannabis indica
acacactgtgaaatgctgagagcagcttgtctcaatcttcaatttacaggtcaaggaagtaattatttcattcttcatattgatggaacaaggaaaagcaaccagacaggtaaagagctcttactttatttggaactttcgagtatcttgtctttcatcaaagtgttaaattttgagctcattttttttatcaataggatctggatcggtggtgtgaggaactaatcaaagaagagtttggtgaaagctgtaattttgatgtggatgatgctgttcaaaagttagaaaagttgggaatcgttgctcgggtgagtctacccacatatcatattgagataacagtacacccttttatagtaaaaatactatcaatttagacctgtgtttccctgaaatctgatatgagaaaggttttgagttcttcaggattctgttggaagattttactgtgttgggttgaaacgcgctaacgagatcatcggaacaaccaccgaggagctcgtcttgaagttcaaacatggcagtgctacatgaatcggagctgcttacggaactgaaaatgactaaaaattagttgagagatgttatgaagaaacaaaatcataattggttcaatgtggattattacaattgtgttatgttgtgtgtgttgtaaatgtttttagctttagtaattgtaattttaaacaatgaattttagattttttttttcaatctcttctatatgcatatatattgtttttcagtcaaattaagctaccactccgtttgtgtttaatggcaatgttataatattgtatatacagagttacaaatgtctcactaatgaattttaactggtggaaatatttcttttttattatttttggtaaaagaaatgacatcaataaaaaatttagaaattagaaaccatgggagtgttaaatagcacaaaatgtttggttgtgttttcagtttttagaattgtgtttttaaaagtgagaataaaaaatagtgttttgtcattttaaaaatttaatagtgtttgaaacaaattttttaaaattatttttagtttttttcttctaaaaaaagattaatattttaatactataccatgacatgaacctaattggattccggtagtatgtgagcaaaaatgtaaaatataatatgttagacaaagaaaattgtttttgaaaattgaaatcaacattttgatgttttctattttctaattttttaaaattcagtttttaaaaaaatttgccaaataactcctattagtttttaaaaactattttcaattttgctgaaaacagtttttaagttataagccaaacaagtattgtttctcaaattggttgaagccatagctctctaggttggacttaattggcctc

SEQ ID NO: 240247 - DNA, 1666 bp, Cannabis indica
aaaacaacaaaaaaattataaaaatatagtttcacagaatttttaaacatttttatgatttttttgattttatttacaaaaaatacggtcattttatgttgtactcttgttaatttattgttattttttattatctgcatgttattttttattgttgttttgatgttatttaaatgttattttcattacttttatgtagtttttttgttgtttccgtattgtttttatagaaaatcataaaaatgtaaaaaaaaaaaaaaaaatctgtacacctaataatgtaattttttttttaccaaaaatggtattttatgtaattatcctttagaaaaatacaaatttcttacaactttttaattccgataacaaataaaatttttaccaaaataattattttacaagaataacaatatctttgaagagaagtgtggtgtttaatattttaccaaataatattttagatacactctttcaaaaagaaatatatgtttttttttttgaaaaatgatgaattttattaaatcaaatcattcataaccaaagatgcaactaccataggtaaagcatccccagacaaagtacaatcagcttcaaaaagaaatatatgttttagatacactcaactcaacaaattatttgatttttttttttctttttgattttaggaaatgtgagataactaactactaaactatatctatctttggacacttcatttgatagacttatacattttcttaatatgatttttttttcttattaaataacgttatatgaacaaacccaaaaaagcaaaatgattagaggggaaaaataaaaaaattgagaaattaaagtttaagagcttaaaaaagtagggttactactataaccattaaaataatttgacacaactcctagatttattgagaagattgttttgataaaggataatacgtaatgattagagtagagattagagatgagattagcgacatgtggggatctataagcaattagttagtttaattgaatattctattctattctaaaatgtgtggcgttggtcaaacgtgtggaataaactatggtcaaccaatacaaaagaggtgaccaactgaccatagtcataaattttaataataataatagtgttgggggagctgaactgtgatagacccaactcccattttaacttcttaaaaatataaatgaacaaaacttgcggtttcagtcataataatatgcgcagccacacacgaaatctgcatgtgacacgcactgaacgtgcaccaccctcatttcatgtgcgtgtaaaccaacaccatcacattattcatcaccatcggccaagccacctgaactaagggtgagcaacaaattaaaaaaaaccgaccaaattaagtataccgaccgtccgaacatcgaaaatactaaaaatcgaaaaaactgtcttcggttaaaaccgctttaacatggtcgattttagtatcgatgacaaaccaacctattaaaccaaaaaccgaccaaatatatatactatatataatatatattatttttagaactttttacaccaaaaatacaatatacatattgaatatttttatacatatttaatataaaattttattaaactaattttacttatattttttttatttaaagtctcaattattcattattt

SEQ ID NO: 240248 - DNA, 1163 bp, Cannabis indica
ttgtaattaacactttcattaaaaaattatgtgataaatcaagaaatattattttttattgagtaatattttaaatatactaatctatatcctagccaattcaatcatttcaattaaaaatatataaacaaaatttatatgaaatgtttatgtaataattagaggtgatttttaaataataactaatttttttaataaatcatgcaattttattaatagccatcagttaaaataatagtatacaatccaatcgtaacatcttctcttagagacacgatcaaaattagaattagaaaaacgagccagataatcagctgtctaatttctaaatcgtttgacaaaaaaagttaaaaataaaataagatgaaaaagattgcaacatcacaattaatcttaagaacacctatattcaatttcatctactgctcagaagactcaatagtagaacttgttgcagtagattcattcaacctcatagcttgaacactcaattattgtgcaaagtaaataactgcactaataacaatccatttagtcgcagaaaacttattattctcaaccactaacaaatatttgataacgagctatcagagagcaaaaaaaaaccaacaacgaaacaaaacaaaacgaaatcatgtcatccagacaagactaaaatattcaaaaacatgtcacaaagacaaaactaaatactaaaaactatttcacagatacaagactaatcacaatatcaaataactacatttttattttttgtattctaatttccttacaatgtattttgtattctataagtgcttaattcgatctaactaaggaaattagatattgcagccttgcacttgcatatgggtcctactagtagctatagttagtagtcctcttccttggtggtataatatagatatttgactagtccattttatatattaattaatggacttttattttgtagccaaacgagtctatcaattgtcatattttgaaaatttgagaataagaaacaacgttgaatcgaatgttcacatcatcattagtacaaatcgaattctagctattataaatactaccttaaaaactacaacaaattatattcaatcttaaaacatatcaaaaatcaagaaagctagtttatatacaccattcttcacgtacgtgcacat

SEQ ID NO: 240249 - DNA, 1022 bp, Cannabis indica
atgcctaaccttcctgttcatatttttttttaatgagaaacatgtatccatttcaaataagccatagagtacaggatacagattacaaaatgagattgtgagctttccaacaagcttcctgatctaagcctaatgcaaactttgcaaggcgatgagcattctcattttcttgtcttgggatgtgcctgaaagtagcattagggagagaagatagcaagcttctaatatttgttgcaaacctattcagaagtaaatggtgtgtatcagccttacaaacataatccactaaatatctacaatcagaaagaacaagatctggagcaatattgtgtccttgacaccaagataaagcaaaatgtagtccatgcgcctccattaacagaggcggttgagtcccattccaaggtgacgctacagtcaaaatcgactcctccttgttgttgtagagagcaaagccaagtcctgttttgtttgctgtcacattctgggtagcatcaactgtgagtttcaaatgaaaacctgaggaagcatcgctgttcaccgtttcagccaccgaagaagtcttgaaagagctttgatgtctattgttttgctggtactgcaccaaaaaatctggtgtagtatgaatttgatggtgccacgacccttcctgtggtgaaggaactcattcctgcaatgccaaatcttccaaagcaaacaaagaaaaaattggaactcatttgccatgagctcagtgcccgccaagtgtagaatatccctgcaagttagtgtaatatattttgaaatgaaattataaagatttgttagcttccataccttctggacagttccacacctgaagagagcatgctctagggattcagtttgatttgagcatcggcagcaggtagatgtagttagggtcttccttttgtgcagatttaaactagttggcaagatgtcataataagctctccaaatgaaatgtttggtttttgagggaatcgattgtgaccacaagattttccaccaggtttgattgt

SEQ ID NO: 240250 - DNA, 2617 bp, Cannabis indica
ttttttttttgaaagaaaagcgttcatataaaaccaaaggttagaccataaggtctctattattcaacattccaagactgagacttttgtaagaattcatttcagagtaatttaaataacatacttcgaggataaaacccataaactcgaacaagtaaaaagaggatccgtcatctcttatagtgccccttcttggacaatacgaagtggcattttttatattaattcctccaacgtatgcatcaagtctatacaagacacatccaatgatcataagataaatcatttcgcaacagaaaattttcatctccttaaattctactaccaagcttttgcaagccttcctgaaatatatgaatgttttccaagagctctacagttaccacatactcgcacaaaaaataaataaagtctcaccaaacatatatgagggctaaaagttaaaaacagagagtagactcactggatccctgtatataggatacactggaatttcttcacggttgacaaacatagcttctgcaactacaggacctacagatgagagcataacaaaagtgcatagttaagacttgggcaagaatttagtgaaggaatagattattgagtttaaataatgttcttgatcaacaatcaaaatatttgagaggataccagatttgacgacatggcgattggtgaggataatcccgcgaagcttgtcaacgacgaagccggtagcgtagctggcaccagcagcctcagtgtcgaaggcgcggcatgccgttgtccggaggacgaccacggcaggaacaactttgctgagtgccttcctccaatcgtcggcggtggcggagttttcactaaacggaggatcgatatccatgcaaagctcgtccttgacgttggattcgagtccttcggcctccgaccccagactctgtagatgatcccccattaagaaagattaagctcactcactccgtcactcgccaccctcttatctatttatgagtcaatcagattaatttcccgagtgacactgtgagaataggattttctcgggaaagtgagggaaatggaaggaagaaaagtctaggttatagtgttatttggttgatttatgggagattctggttttcttctcgtttaataataaacaaaagtgatctatttcgtatgactagtctaggactcaaaagtcttttttaactttttttatttttggaatatttagctaaataacattaaaagagttttttaaaaaatattttgttttaacgaaacttttatatctcaataatacattttattattttatagcttgactcgccgaatcctatataatgtttgtttgaatgaatgaatttcgtttcaaaaaaaataatacattttattattttatatttatttttaattaaaaaaaaactcatgtcattaaaaaaataaataaataaccctctccccttaattggtgttttcaatttcatgctcttcttctatttttttaaaaatctcccaaaattttacgaaatctcttcaaatttatagaaaactaatttatattacacttacatataaataagattaatattgttgtcaagagagcgattacattcaaggtaagtgaatgaaccctaattttttaattttttattctgaatgtaaaaaaataataaaaattgtatttgtttagcttgattcttatttttttttcatatacatatatgtgatagaaacaacaataaaaatatcatactagccatattattactattttgtagtttttgagttgaaaatctcatttttgcgaagtgaacccgaggttgaagataaatcgcaaggggctcgactattagtggttgagcccgactatgtcagttgagatggtgattttagtagagctcgactatgttagttgagattacaattttagtagagctcgactgttatcagtcgagatgacagacgtaacagtagagctcaactagatttgatcctgatttatatttttaattgttaaacttttttcatagatgtttgctaaaagagtgatattcaatagatatgataattctaatagagctccactagctcgaccaaacatggtcaagatagtgttaatactcaattgttgttaaactctttgaaggacacaatgataacacttgaggtaataaaatataatggaaaggaaaggaaacaatctccattccattcctttgtttggttgcatattatagtgttagaatgtcattccaatggaatgacctttccaccattttggtggaatgacaattccattttaaaatggaaggaaagaccattccaatgcatgatgagaaaaaatttaataatttttttattaatttttttatgcattttaaattttattctattacattcttattctcattcccactctcatttccattcttatgttttcattcttcccaaccaaacgccaccataattgaatttagttgaaaattgaacttgttaattcaaaattcaacatcaatatattttaactatttttttaatatcaaccatttatttttcatacaagaatgactcgaatagtaatctatgttcaatacgatggggagtggaaggatgaacaggggtcatataagtg

SEQ ID NO: 240251 - DNA, 2014 bp, Cannabis indica
ttaaggaaggcattattaacatccaactgtcgaatatgccaaccatttgacaaagccaaggtcaaaacagcccgaatggtaacaggtttaacaacaggactaaaggtctcagtgaaatcaaatccatattcttgaaagccctttgcaacaagtcttgccttgtgtttaagaacagatccatcagggttttccttcttcttgtagacccacttgcagccaatagcttttccttcctggtggtagtctcacaagagtatatgttttatttctgaccaatgcaagaacttcatcactcattgccttgttccacactaattgactgagagcttcttgaaaagatgtgggttcccttgtagccaagaaggctttcggtttatgaatgcctgatttggatcttgttctcatgggatgaacattttgagaaccagcagattgatcacagccaactgcagatggtgcaggagcagtagcactgctaaaaattggtgttgcagcaactggagtaggtacaccagtagaaatcgagatgtcacttctgtttagatcagtaggaggatctagtgcaggcagacagtgttcaatagaagtgataactggtggagaatctggtaaattatgttctgtagaaggctaccctgcattgaaaccagaaggttgacttggaagccaactattagtaggaaaaatcagtggagatgagtcaaaatgtgcaattttatgtgggtcattctcaatattggaatgcatgaggtcagccattgtgtaagtacaaggagtatgggaacatgtaggtatgatggaagacacaatattagagagagggactttggtggctgatgttggactcactttggcaaaggggaaagcaaattcttcaaaaatgacatccctagaaatgtaaacccattcgaatcaagacacttataccctttatgattgaggctatatcccaaaaaggtgcaaggtgtagacctatattccagcttatgtttattataaggcctaatgttgggaaaacacctacaaccaaaagttctaaaggtggtgtaatcgggtttgatattgaacagaacttcaataggagatttgtgatgtagaagtggggttgggagtctattgtggatatagacagcagtcctaaaggcttcatcccagaacttaagtggtaaggatgcttgagcaagcaaagcaaggccattttcaacaatgtgcctatgttttctttcagctaggccattttgttggtgggttgttgggcaagggtgtctatgttggatgccatgatctgtaaggtacttagtaaaagacctatactcacccacccaatcagtttgaaggcactttaatttttttcctagttgcaattcagcttcagttgaaatttaggaagactttaagagcaacagacttgtttttcagtaaatacaaccatgtaaatctagaaaacacacatcaacaaaatgtatgtaatacttgtagttgtttaaagatggaatgtaggatggcccccacaaatcagacacaacaagttgcaagggttcagcaataacagtattagaggcttttggaaagggaaacttagaatcttgccaagacaacaagcttaacaaatagagaaatgagaaattttattgcttataggaatgttacatgaatgtaatacagtttgtacaactttttcagatggatgccctagtctattgtgccaaagagtaaaatcattttgcacttctgaattacattgaatgcatttagacacagccactttgacattattgagggtgaccatgcaggtagttttgacttctagggagtctgttactggtgtaagaaaactgctactggtgtgggattctttgctactggtactggcaggttgcttattcatgggagggacaatcttgacatgggtagaatcaaacaaatacaggccattcttgtgcttccccatcatcaatatagtatgagtcaaattgtccttaacacaacacatatcagcatgaaattcaaaaaa

SEQ ID NO: 240252 - DNA, 992 bp, Cannabis indica
tacagcccacttcgttaatcttccggacaacttcggcttatgtagtatggagcggagtagatactaggtgagtaccaccatagggtggcattggaagtacgatttgagcttttttcctgttgtaacaagtgccaaggcaagcttctctagtttgttgtacctagtttctgcatccaaaagagttttagacacataatagactagttgttggttaccatttttttctcttatgaaaacagcgctaacggctgcagctgatactacgaggtggatgtaaagcgtctctccatatttaggctttgccattaacggaggggatgaaagatacgccttgagctcatcgagtgctttctgacattcctcgctccataagaagtccttcgacttcctgagttttgaaaagaagatactacaacgttctgatgaatttgatatgaaccggcttagtgttgctatccttccatttatgcattgtatgtctttgatgttcttcggtggttgaatattttgaatcgatcttatttgtttagggtttgcttctattccatccttagttaccaagtagcctaagaattttcctaaagatacaacaaaggaacattttgcaggatttaatttcatattatatttttcaagtacctcaaaagcttgctgcaaatgatcaatatggtcttgggcaaccaaggattgactagcatatcatctatgtagacctccatattgtattacccaacatatctccgaatatctggtttggtacattgctcctgcattctttagcccaaagggcatgactttgtagctgaaggttcctcgttcggtgatgaatgctgtcttctcttggtcatctgggtgatgagtatctggttgtatcctgagaaggcgtttatgaaactaagtaactcgtgtccagctgttgcatccaccatcatgtttatgtgtggtaatgggaatgaatccttcaggcaggccttgtttagatcagtgaagtc

SEQ ID NO: 240253 - DNA, 1008 bp, Cannabis indica
caattgtatacttttgataatcagataaactaaaactgcttctgatttagagacctatggaagaagacttagttaatagtcttgcactatcaaattgtggtaattgccatgaatcaatgaggtacgcaaaattaatatctaattattatatatattatagtgtgtatacaatttttatacaatggtgactatttatagagttttcactcctatatgtacatgaatgatcaccataaagcccttggatgttacttatcataaagtggacgtttatggtattaattgggtaatttagagatattttgagttgttagaaaagatccaaatattcaagaaacgcacacaatgacatgctgaaaaaaaaaaatatctagttactagttactatttttttcaactttggtcaattcttcgtcaaagtgttcaaaacacttccacttgatttcgaaccatttatatactttataagtcaataaattaagtgctcaataactatattttcaatagttatcattcattcatatccaaatacaattagtactatttttcactaatttattaatagtgataatatggagaagagttacaaaatttatcattatcatctttcaagaatttgcaactccttttcatgatttatgctcaaactatgcaacttcctattatatgttactgtgtcacaactattattttatcacgcttaattatttaatctaaacattataaatttccctacattttcagttttgggcttcttatgtcacagcccaagagtctcatgtaagcccaatccttacttttaggcccagtcaatacatttcgcgcacatctaactaaaaagtccatctcattatttaaatgttctgccactttcatgtgtgtgtaatgatttataccaccctttttcattcatatcacttttctttataggattgtgttttttatacttgaatgattataattacaattttctatccaaaaaaagaaataaagaattaaattatgatt

SEQ ID NO: 240254 - DNA, 787 bp, Cannabis indica
ttacaataaaaatgtaaccattggaacctcctctatatatatttatatattaaattatattcataattgtattttaaaaaaagaaataagaaccaagaccatcttcaatgaaagatataaatattgtactaaatttagcacaaaaaagaataaatgttatatttagcatagtatttgaaattgtgttccaatgcacaataatatttaacagacaaatttgtctaaaaagcaaaatatcattaatgacaatcaataaattaaatatttaaaaaattaataatagtaatattgtagataaaatatatgtattcaagtgtctcattaatgattaatgaaaaaattataattaaaaaagtagtatttattgtgtgccaaatttgatacaatattatctcttgtattaaatttggcctaatttttagcgtggtcaaattatgcataacttagagcatctcaatggaaaatcaaactattgctcacttaagaaaaaaaaaatgtgctccaatggtgtggcaaaatataatgcaattttgacatgtagcaaatgttgtaccaaatttacaacatttactatgatgtaaaatatttaccgccataaatgtacaattttattattaatttttttgtcacttttattattttattattatatttagctataggggtgtttatctaatcaaatccgcactattttgctcatagtgcattcggtttgcagtaagtatgaatttcattttttttggatccaatccaattcacacaatagctcaaatctaatccaattcaa

SEQ ID NO: 240255 - DNA, 1505 bp, Cannabis indica
gtttgtatagccctatctttaggggatgttcatacagctttcttgttcagcttggccagccaaccttccttggttggccaggcctccttggttggatagaccttcttggttagacaaacctccttggccggccatctatggttaggccagggtctaaagacttcccttgtttgactctatcttgtgattatgacatcttgagagttcatgaactgtacaacgctacccttgctggttcatggtgagttatcttacacttttcttccacgggctgtaagttgtccgacatgctggtcatcctaccagagttttgtcaatacttgtggacctctatcttgttcttgacttttaagctgcatggagtgtacctgtctggttgttgaaaggttatattccatgtgtcttctgttttgactatgtggacatgccacatcaggtgggctaaaactaggataacattttcccccaagtccttatttggacgcctgaacggataggggccttttagctcttgtcttagatcttgaagcctttaccgttcagccttacttggccaagtattagattctttagatgacgtgcttttatgacaaaaagactttattgtcaatcaattatgggtgtgtgatggttgtacattttcccatgtttaaacctttgatcttctctctcccatgtgtgctttttactctcctcattttctcttctttgaaatttctctctttctttgaatctgtcattgatgagtttctagatttttaaagctttagaaaagttttttattctcacattttaggatagtctttatacgttgtaatccacttgatagcttttaggatgcataatgtatgactttttgatgaacaagatcgattcttggactagtactttgtgtctgttagagaccctatctggctcatagatcttgtcttggaactctacctagtacttaaatcatgtctaagaactctatccagtgcttaaatccttgctaggaaatctatctagcacttagatcctatgtaggaactttgtctagtacatctcgggccaaatcttcccttgccgatcaatggcctttgatacataggttgtttgattcacgagtattaattttatactttgtcgattaatagctttgtatttcaaggctatatggttaatacccttaggtttcggtcagttaacctattttttgtttaagtctttcatgttctctggttgttcacctccctctgcctttttgcatagatgaacccacacaacttttagggaggtgacaaatggattggcaaacacttacttagtctggacaactagtcattctaatacaactttgaaccctttatctcaagtttttattctaaagacaattcaggactttgttgtttgtttttatgcttttattttgcatacttttttgttcttgtatggccttaaggccctttactttcaaacaatgttcgtgtatggccttaaagccttgtacttttaaacagatgatc

SEQ ID NO: 240256 - DNA, 1290 bp, Cannabis indica
aaaaaaaaattaaataacaataataaacataaatggagtgtttaattgtagagtgagaccaaatgaggagaacaattaaataaataaaataaaataaaataaaaacttagtccattaaagagcccaaactctaaaaacttcaatttgggtttacaattgaagaatttttattattattattattattatatatgaacagactgccaagtataatttataagaaaatactaaaagaaaaaaataaaaatctgcagatctaaagaattaattatagaaaaaaattatatacagatctaagaaagataagaacaaacctgttggagataatgaagttggattgtctgaaattttgaagaatagttactactttttgtagagaaagaaagagagagaaaattggcccttggtgggtttgaaaatgatccacagagataaaaggtgtaaaggaatgaaaatatgggctgtatttataggaaagtatattaagttattcaactttggaaatggagattcaaacaacacaaacaacaaataaataaataaataaaaggtgggttttaggtatctcaattgttgaaacgtatttgtgtgttcgtgttaggtatcagtggtgtctaataccgttatgaaaataacgtggattcggttctgggttaagaccgaccgagtttgtattttggaagttgtagacttaaacataataaaatatgaaaatttttacaatgcacactgatgtatccttatctattttggtatttgaaaacaaaaaataatctatttttttctcatggtcttctacgctataaataataaagacagcaataaataaataaataaataaataaaaggtgggttttaggtgtcttaattgttgaaagagaagtgttgattgtaatctcttagtcaacttttatggttgaaattatatgttggaattttttttctgagcggtattcgttataattacaatattatctttgtaaatttttgaaaaattacgaatagtttacaatagcgaaaacagatttcatgatatttcagtctacgacgtgtgttcaaaattttttaaacatattttcagtattctaaactatttaaagttttttaagaaaatttacaaggatgatgttgtaactataacgaacacctctatgaaaaaaattgaaaaattaatatttcggtatgtattttgggtacggaagttgactaagagattgtaataagataactgttatgaaaatggcgtaagatcggttctaagctaagacgagtagaatttgtgttttggaa

SEQ ID NO: 240257 - DNA, 1608 bp, Cannabis indica
ctatagatttagaattacactctcaattatatagaacgttctatatgttccacgatatggatacactatgagttgtccatttgttataatcctaataatcaatgatactatatagatgatttacattgagtagggacaaatttaccgttacaccctttaatgtattttattcttaaaacacttagctacctgatatttcagtgaactaatagaatcactaaaatgagcactctatcatttatctctattaagccaagctcgaaggaaattattgtttcacttctatgtctaaatagaagctgtagatttcgtatctatgattagcgctctcactcaattgaactatcatgtccttaatctataggtcacgagaagattcattggccaactttgacgaacagattgaagaacacaaataatacaattgaactaaaacctattgtgtaagcactacgaagttctataaagatgatctcattgtttggtcaagtaattgatgagtgtaaacaattacttgttatgttgagaaatattttatttgctttgttaaactattagttaatataatagctcataactttattaaagcatctctactaactaggagacgttactgcgctttgtgcggtttttataaaaattataatttggataattttatatttttatagtgaaatttatgtacttttttagatatttcttaatttttttttagaggaattcacaaaaatataagacaaaaattactttatttttttatggatataaaacttataccacaaagtatggaaactttatagaaaaaaaaattaaaaaaatagaaaacccaacaaaataccctaataatttaacaaaaattttaagaacaaatttcgccaaaaaaaatcatcagagcagccatcgccacttaagaagtcattagagttgccatcgtctccaaaaaagtcacgaaattgtcgttgctaaaaaagtcaatgaagttgtcatcgttgtcgaaaaatttgtcgaaattgttcttgccattggaaaagttgtcggagttgttgtcgtcatcggagttagatgtcagagtcgttatcagagttggacgttggaatttgatacaaaaaaaaatcaattacgtttataagctagttaaaaatctaatttaaagaaactgtttttgtaaaatatccaaaataaaaattaattatacaggaaacacttaagtcagaattcgcaacggtcctaaaaatacttttttgggggaccgttgctaaaaaaattaactgttgaaaaccgtcaagaaaaatcaatactttagataaatataaacaaaaatgagtgaaatattatgctacatatgtaaaaatcaaagagtttgtatttgtcaatgttatttgacatatatataaaaagaaaaataatatcatatattacataaactttatataactacttcaatacaatatttatattgtttcaaaaaaaaatacaatatttattttatctattaaataaaatattttaataataaattgatttcttactaatgcatatcattaagttggtaaattaatgagtgacttttcatctttgaaattaatggtaattttttttttttttgta

SEQ ID NO: 240258 - DNA, 1117 bp, Cannabis indica
aagttttcctatcgataaagagtgtggcaataccctaaataccgagaaaatactaaaacaaatggaaaaattccccaaaacaggaggccatttctctaaaaatggtagacgtttttgtgggtctctgccagtaaaaatggtagactatttttttttagaagcagtctgccttttctgctataaaaatcctaaaaaaactcatttttaaaccaaagcaaacccaaatctcatacaagcttccagaacacctatttacaccatataaaacatattccaatagataaaaacacaatcaagccacaaaaaccaaacttgccattgttgagtaagctttgagttcaagaactcatgcttgctcaacaccaacaacagcatcccaactcaacaaaatccaacaaaaccaacctaaatgaagctcccaaaacaaaaagccaaatagagagactaaggcagaatgggtggttaaggaggataaaaggccaaaagcaagtttcgaggcttcaaagattgaaaatgagggtttccaataagtaacaaaaatagggaagttgaagaataaagttgtcgaagttgtaacacagatagggaattctttccaagcactagatgaggataaccaaggcaagactcttgctattatgcaaacagatgaagcactgggagaacatgttaagacaagagaggggggaggtccctctcttgtcaatggataaagtcccatgctggaatgtccgaggagccaacacgccctacaaaagacaaagtcattaattaaactaatttattatggctcaacatggtgggattggttgatctcctcgagacaagagtaaaggctaagaaacttggggccttatactctaacatattcacagggtggtgctttttctacaaatgttccctggcacaaaggaggaaggattgttttagcttgggacccgatgatcttcaggtaaacatattgagatgtactagtcaatctatgcatctatatgtttagagcacgggggacgatgtttactagttacattactattgtgtatgcctttaatgatagccaaggcaggaagctcttatggaaagagttgcaggaatgcaacaaaacaaacagatggat

SEQ ID NO: 240259 - DNA, 780 bp, Cannabis indica
ccgccttcctcctattattggtatagttaatgttatctcatcatattcctatggttatttagtatacatacaagtagttccattttatttattaattactaaacgttttggctttttcttttttaacttggattatctattaactttgtttaattttgctataattgttgaatcttattagaacatcaacctgctggttcatcgcctggtggtacgtatgcatatattatttgtagtgtatcatacctatgtatatttatgtattaatataatatgaccacattatttattggttaatctacatgcatgcagaggcagccaaaataatttggcgtagttaccgaagatgcagtggaatgcatcttactcttgctggtatgtatatatatatgttttttatatactagtttgaagttgtatatttagttatatattagttgaaagcttttattcaatgctagagaaggaagcaaagaggagaatttcttcaatatgcagtaacttaaaaaaattaaaaaaaaaaaagaaaaaaaaattattatgagtttaaataatcgacaattcaataaaatttaatataaaaaattgtgaaactaactatttttgtatcatcccaatacaaacatcatttcatcccaatacaacaatgcatcttactcccaaattgacaataccgatttcaaagaagctctattccaaataatgccacatgggaatagaaccaacttataaccctattaatttccctgtcttccccaactcaaaacccaaactttgtag

SEQ ID NO: 240260 - DNA, 1305 bp, Cannabis indica
ctcttagaaagtttatttatgtaaacaagtagtaattaacttttaatgatactctaatcaaattatctacataaaaaaatcataaacacattttgctcaaaaatacaaatattctaattccttcaaataaagtatataagtagccatagtaatactgtgaagcaagctacaaactcgttttgtattcaaccacaataacaaatccaggtaagactacccaaatggcattgccaagccaacactaaataacttgcaagagttacttggggaaaggtcactcatagaaaaaatgagtatgacagtcatctcacacattgggcagaatgtaaaagtaatagcgatatgatacctcttgtcatcagtattgatctcatgttaacaagttattatgggaggcttgtcgatcaaatgataaatttatgttttgatatggataagtgacacctaattattttacaattatcaaccttagcataaggaatgagaaaagaattataaagcttgcttactcgaaatttaccctttatctagtatccatgattgattcttatatgaaaacatctttaaggttgaggagtttaccccaatactaactcacatcccctttcttatcaacaacccaaaaatctcgatttttaagtatatggtattgatccttttaacccaaagaacatcttgctctgtagaaataacccaaatatactgagcaatattcgaggtattattccacttggttccttcacgaaaacccaaactaccatacttcttaggcttccaaacaagatcccacaaggctagatgtaattacgaaaatataaaacaacgcaagtgcactatcacaagtagtactcacagaagtgaggtcgaacccacagaaatagaagtcaattactaactaaattagacatatgtttctatttggtcgaaaaaaaaaattagaaacagaataatataaattgatcgaaaattaaagaaggtgattaaagctacttaaccatgaatgtgaaattaaagatataaattcaattgcttcaattacctaattataatgctattaactattcttcttttttaagtaatgacagtttacaatataacctaaactcttttcagatcatataatttgcaatgtattgagtaataatctaaagattacacaggctatataatactctcgtttcatatcaaaacatatgtttgttcaattaaagcattcctcgtattcactttttatatttcattttataggatcataattgtgcaaaatgtgatcaattttaaacatgtattaaaacaaatatgaac

SEQ ID NO: 240261 - DNA, 1092 bp, Cannabis indica
ttttgggcacaaaacccaacaaagataagataccaaacaaaattagtgttcgtgggaagtaacatcatgcatatggtaccatttatttgaaacacaattattacaaaacaatcaagaacaaaaacacaatccaaaacataatatattccgaaaaaaaatataatagaaatgcgagaacgtatatctatacactaaagaaaaaacaactgccgacgatgctcacttgtttgtatcattgtccactccatcaaccgtcgtcaaaaccgtgttattggatggtgcggtgctggacttggtcgatgggtagggtttggatttgttagggttcaggtggtgttgtggattggtgtttattaaggggttaatgagttgaaaccggccgttcaactacctattaatgagattggacttttaaccatctcattaatggcggttttaccaaaaaaaaaatatagtaccaattatgatagttttcaaccaattgcaaacaaaccaaatttggtaaaagaaaatattcctcatgtgtttgactaaagatattgtaaaagttttatctttaacaaataagaaagagaaattttatatacaccacaaaaaattgtaaaaattcactattttaataatttgtatcatctaaaaaatttatttgtttgattgtactaaattttaatatctttttcaatcgaattaattttgtcaaaaaaaaattcttatcaaataaaaataaattatattttaactttatgataaatattcatgattttgaaaaaaataatgaaaataaaattaaaataaatattccaattagcataataatgtacaaaaaaataggaaatattaagataattaatttttaagaattaattaaattttaatttttcaatagtaaatgctatgaccccaaaaaaaaaatatatgttttatttgaataattaaaaattagatagaaaatattgaaattaacacaatatagttacaacaatagagcataggtattaacacaacttagttagagcataggtattttattggtcttttttatttttaattaataaaattaatattaaaataaattaaattaggaaagagaaa

SEQ ID NO: 240262 - DNA, 1540 bp, Cannabis indica
agtcatttttttataaaaaaaaagaaaaaacaattgtgtataaagaaattaattttattttcttataaataagaatgaactatatacttaatttattaagttgtgaaatatatttttgttatatgtattagcttttaaaattattattttttatatttaaatattaattgtatatctatatatttttaaaatatatgtaaatttgtgtaatgtattgaattgattacttttacttgtcaattaatatctaattcgcacaagtatcgatatcctcattttgcagattgaattgaattagatattttataaacacccctctaatctcattctcatttattattcttattcctttactttttcattccccaacaaaagttagagcatctccaatggagagctataaatatagtgtattgctattttttaaaatattttgctaaaatttaattacaatgatgatgtaaaatgtatcctaaatttggtctaagctaaaaattgaaccaactttggcacaaaagatagcatgggccaaattttaagccacaataaatactacattttttaattacttctttgtcacttattaatactattcattgactttgaataagatatatttataggatattaaaataatataaataaaattaattattttgtatatttgaatgagtattaatggtaatattgacttttatagttaatttgcaccttgtgcattggagcactaatataaaaaataggccaaatataactttatgatatattttagaccaaatttaatccaaaatatagagaaaattactctacattctttttttaacttgatgtctttaatttttaccctcccttttaaaaaattttatgtttaccttttttttttcaattattctaccaatttcactcctatcacttcacgataattttcattcttctctaattaaaattttgtcccaactttctcacaaacctactattatgcttaaaattatgtcttatttatgtgagtgtgagaataatttgaatataatactcataaaagatgtatatttaaattaaatattatttggagataaatttagttaatgtataaaaatattcttcgacttctctcaaatatacagcatctattagagatagtcttacccatataaaaacagagattatgctaatttcctcatgatttgatatgatttactaaatctctaatgaaaatatcaaattcccctgccaaattcatctatcaatgctaaaaagaactctcacagaaccataaaatattcttaataaaaaaccgtgacacatctaacaactcactcagagctcgtttggtacggttgtattaggtcgtattgtattgcattatattgaatgtaattatacataatatttttatataatactatgttaaattttaatttatactaaaatattatatagttaggagcccataaaatttaataccacatataatttttacataaaaatattgcataaaatacaattcaatataatactatacaatacaatacgatgtaat

SEQ ID NO: 240263 - DNA, 1566 bp, Cannabis indica
tcttgagtaggcatacctcatatgagttccaattttcaaagccctcaggctattgcatatagattttgatccttttctaattccccatgtaagaaagttggccttacatcaatctgttcaatctctaagtccatgcttgctgtctttgcatcatggctcattgaagcttgcttgaccactagagagaaaatctcattataattgatgccttccttctaagtcaaccccttggcaactaaccttgccttgaatctggtaggttcattccctgaacattcttcatgcttcaaaagtattttacgtcctaccatcttgtaaaagtatggtttcttcacaacaatctagggtatattcttcctaagagactggaactcttcttagatgacatgcatccatactccatcacctttacttctcatagcttcttgaaagctagtgagttttgaactatcaacctcttttacaatcataagtgcatatgcaataaattcagcacacccaaaacaattagaggcctttctctgtcttctctctttatctctaactaactgagagcttctaacttccgattgatcttcattgtcttctccttctattaccttaggtttatctagaacaacattaattggtgtcataggagtaacctgctccacctcaatctagacattctcatctccaataacttctctacctttgggaatgctcttggttttcatggccattttatcttccttgaaaacaacatctctactaatcaaggacttcttgaatccatattctaagcaccacactctatatcccttaactccttcagggtaacctagaaagatgcatctcaatactctaggctacaacttttatcttgtctaacatgcacaaatgtagtcatccaaacactttcaagtgatataagtttcaggatttacttgtccataactcttctagggttttgaagttatttggcacagatggcgatctattgattaggtaacaggtcgtgttaagagtttctccccaaaaggttccatctaaaccagctcctattaacatgcacctaactctctctatcagtgttctattcatcctctcattaagaccattttgctgaggggcacagttctatatctcttgattcccattttagacacaatcccttgaactcatttgagcagtactcaaggccattgttagtctttagtaccttgagattgttcccagtcttgtttcctagcagcctcttccatgtatcaaaggttcatagagcctcatttttgcttttcaacaaataaacccagaatttcttgttgtaatcatcaactatactcataaactagtgtgctccacctttggttggaatcctagatggcccctaaaaggctgaatggacataagctaacctttctgttgtggtgtgttcttccttgttgaactttaatctgcaagccttctctaaaacacattcatcacttgattcaagtctttcttttagcttctctttgaatagtccttgcttgttcatttcctcaagtcccctctgacttacatgccccaatttgaggtgccata

SEQ ID NO: 240264 - DNA, 1027 bp, Cannabis indica
  modified_base (35)..(35): a, c, t, g, unknown or other
gtttataaataaaaaataatacacacttttgactnttaataaaaaaaaaaaaaaaaaaaaaaattaatttcatttttcatgagtttatttttattcaagtataatttttaatagattgtcatcttccaacgagaaatgtgattaaacatgcttacattaatcagaaaaataacaatttaaattaaagttaaatcactactggggcaatgtaaatctatttttcatatatttccaaattaccctcttatatcaaaaacctcacccactcactctacgtgccgtgggtcatcgaccacgcaccaaagagaaccagagagagagggtcgtgggtggtgttgcggtggtgtgattggtgaattttgaggtagtttgtggtggtcggttgggtgagaaagaaactgttagagcgagagggaaagagagtatagaaagagagtttctattttactctttgaaatgagaggaataatttaggagtaaactgaaaagttggcacacaaaatttatacaaattaactttaatttaagtggttaattttaatctaatagaggcatatttaatcaaatttcccatgttgttaaaaatgcacaatactaataaggatgcataatataagcatgcacttattattagcaaaaataagaggaaataagtgtaaaacacataatcttaagtaaccggcataaacccaaagatgcatagtactttacacttattatttgcaaaaataagagcaaaatacttttcccaaaattttatgacaaaaattaagagtttttggaaaaagtaaacttaattatgagtaaaactatggcataaaccaatatatgtgtcaaacaaattaaaaagaaccataaatcatgtaattatcaccataagtgaaccgcaaacaggccgctagttgctttggatttactttaatctacactcatacaacattgcacctaaaaaattaaacataaacaaaaaacaggattatggaatttaagatctcttacccacaaaaacgttcctaagcttagtgtc

SEQ ID NO: 240265 - DNA, 1458 bp, Cannabis indica
tccgcaaatgatggcattaccattgctctcgacgttccccatgctatctcgaaatactctttcctggttattcattttcaataataatgaaatcaacattgagatttcattattatgaatatggcattaccagccattttccctcaatttgaaaataaaaatgattttttatttaatacttaataaattacaaaaacagaaaaaggatgataattgaaagaggtagaacattaaagtaaatggtgagcggtttctatgttatttattaaataataatgtataagaaccgatattgaattggtccaataacgaaatatgcatgacttactggtcgataagaacgacgtcagcacaaaattggagagattgagcaacaatagaaccagctacaccgcctcctaccaccaccaccctccgcatctctgtacctgatttttccatataccaaacctcaaattgaagataataatgatagatatatatttttttggattgaaatggtgggaagagagaaatttggtcaggaggatttatatacaaaaatgcagaaagtatttgtctgaatataatatagagaaagagaatggtttttggcagcagaggaaatatgtggcatgcataatcatgggttatagtttttactatttatatataattatatgtatgtgctcatttcaaatttggattgttggtttctataatttccaacaacttctatttatacattgtttatttcattttcaacaaacattcagcagagaggagtggttctcaatatggtagtggttttttttttctttatttttatattgcataaatataaaaaaacaaaacaaaaaacaatattataattaactatatatattataccaaatttagtagtgtacgaaagtaatgggaaaattgaatgttggaacttaattaggtcgaatacatgctaagaactctatagtataaatttttcctttaaaaaaaaaaataaaatatttctaaacaaattgttaaggtgaagagaagagatatttgtttgttggtgtgtgtgttgtttttttttttgtttttttttttttgtggttatcattgttgttggatgtgtcttcatactttagagctaaaaatttaattcgagtttatgttatattattttataatataataataaagtagattaaaatgtgataaatatatgtgaataatatatatattaagtgtatggtaaataaatgtgtaacctatgatttttataacctacacttttgtaacctacatgttgtaacttggagaggagttacaatttgttgtcacttgtaactcatgtgttgatcacacattattagtgtaataaaagggttgttacacaatttgatgataggattcaaatggtttgaaatatagttgttacaaactatattaatgctcattatatgagagaaatgagatggtgagtttgaattctaa

SEQ ID NO: 240266 - DNA, 1157 bp, Cannabis indica
aaaaaaaaaatgaatcaattgatgacatggctcgtcctagttgatgactgagcagtaagctttgtcattaaaagcaatcaaaatctgccacgttttatgggccactaactcgtggctggggactcgtgtccgtgtattatttaagaatttgagatcgctgtgttgaaattgactattattacatgacattaatttaaaaaataaaaaagaaattttgtttaccatgtcttctaacaaatacaacatacaaatctatattatctaatgattttaagcaactatatacatatatattagtataattttattaaaggtaatttgcgactaaatttcctgtacatttgttacagtttaatttttttactcaaaaaattatagctatactctttagactgtttggtcagcaatccatctgttggactggctccgttatgtgctagatggctcctacatggtgccaagtcaactttgccatgtcacataaaatctgccacgtcaaatctggatagatgattaacaaactaaaataattgatgaaaactaattaaaaaatataaaaaacaaataaacaaaaatccacgttaattaatccagaactaaaattaaaaatgtagaaattaaaagcaaaaaaaaatagaatgaaagaaattaaaagaaataaattaccgaaaaaggtaacctgtttatccaaattttaacgacgatgacgtgtcaagagtagcaacacatggcacaaaaataccgagactaaattaatgaaaaatatgtaaagtcgtgattattaatcatgaagggtggtctgaccgttagaatgaaagtcagacagtcactcttacccctagcttgagtaaggtgggcatctccgggaaggaaaaacaatggactaacaccttggtaagcggaatgaacaatcaccacgcacccacatgccaagttagtctagggggtatatactactaccccttacctcccaaagggttgttctaggggtatacccctacctcctacaccttcatggtacgagtcatgcattttattatagatacaatgacattctcaaaggtatatggggacatcgacattgcaccatagctactgacaacgggcgaggggttactgttggaatttattttaccagtatcttagatctactcaca

SEQ ID NO: 240267 - DNA, 916 bp, Cannabis indica
gctggaatgagtaagaatactggggagagacattgaacactgcttgctactcataaatagaagtcctaagagaaagattgatgccaagacatgatagtcagcagacccgtgatcgtgtaaggggaaatgtgggtaagttgtgcaatccccaactcactaagacaaaggaaggctactctgatgtgcttgcagatacgatttgagccaaggaagctttggaacaatgccaaaactcactaagactagatcctttgaacacaaaattgcacaaggaaaagcatgatgcaaggaagtgttgctgcgaaaacaaaagactatcagtctatgctctaggaaaagtccaaggtcacttggatcgagcatggagatgataattctgtgatttttcatgccagtattaaagggagaagaagacagaatagggttttatctattgaccacgatgatggcacaagggtaaatgaccctagtaagatagctgatgcatttttggcatattacactgagcttttagggtccaatatgcataacagaaggcaagtcatggaaaatatcatggtcctagggcctacagtgactccacatcaagcaagtgctcttttaacaaaattcactagagaggaagtgaaacaggtaatatttgacatctttggccttaaagctccaggtgttgatgggtactccagtttcttctttcaggataactgggatgttgcagaaagtgtagtatgtgaagcagtgatttcatttctagaaactgggaacattttgaaagagataaattctacagtgctcactttggtccctaaggtaaaatgccctaatacaatgaaggatttcaaacccattgtctgctgcaatgtgatctacaaggtggtaacaaagctcatttactcaagacttaaacatatccttc

SEQ ID NO: 240268 - DNA, 657 bp, Cannabis indica
catcttccacattctgttccacttcatcataagataactctatttcttcctcatctgcaatcgtcacttgtgcacataagtcttctagttgtttgacagtaccactggaagaaagccctacgaacaaaacctccaaagtaaatcaatcagacaaaatcaagaaaaaaaaccaaaaaaattctctcagactatgtcattcgacataactgtataaagaaatttgttcaaaaacaaacaacattttaaaacctattatatattcacaaagctaatttatttaaattaaatatttattaatctaaaataaatataatttaaattaaattatatatattaacttaaattaatttcatgaatgcaattaaaaaaaataacaattatattacacaaatattttaaaattagtccatgtgttaacaagttaatatatctaatttagtaaacatataaaaattacaaattaacataaaaaaataagctacggaagaaaaattcttatacatttcagcatcaatcgtccaagtcttcgtgaattactaccaacaaatattctatccattatcgctgtaatggtaacaattcagtttttaaaaccgaaaacctttttttccccaaactgtaaaaagaagtaaacatttatattagtatatatatata

SEQ ID NO: 240269 - DNA, 1367 bp, Cannabis indica
gtcttttatttttgcttatagttagaagtataaaataaataagttgttcttatttttataattattatatgaagattttattttaataaaaagtcttttttaaagtatttagttaattaattaaaaaaaaaattagtgagtaaattaagaagtatgtattattattttaatttttaaaatagcttttcaaaaatttttttttggaagaaactataaatactagcttcttactcaaaaaaaacttttaaattaaaaaaaaaatgttttttattcaaacactagtagaaagattttttgaattttgaaagtgataaaagagcttataaaagctaaaatcaaataagactagcataataagtcttcaagcgagactcacacaaggggagtaacttcaatcaaaatagaactagttttgtgagtcaaaatataattggctaattcatgaataaccccattcatctccctataagcataatttcctaatcttttgtaattgtttgctggaatgataaatttatgttaaaaaaaaggtaacatatagaaaaaaatttacaatataccgatgtatttttaattgttttgatatttgaaataatattttggtaatttttttttttttatagtcatatacgttataattatttaacatcctctaaaattttaagaaatttgaaaaaatttaatacgtcgattttttttaaatatcttaaattacaacgtgtatatatatagaaaaaatgtaactaaaaattattacgaatgccgaaacatatggagagtaattagtgcatccttttaatgctcccgtaagtatatcaacttttttttatattattatgaggcaatcctaatagtaaccacttgtcttagactcttaaccgtttaagttttatcaaataatgaaataagggctcgtttggataggaatgtcaatggggctggtcggatctgatccgactctgatccgacctgatccagatcatatacggatctgccccgccccgctccgctggatcaaatactcggatcggatctgatccgacccgccttatacggatcggatctgatccgacccaactttagaaattcttatcaaattcttatcacataaaaatgtaatattactattgaaaaattaatttaccaaattttagaaattccactaatataatcatcaataataatgtagtatgatgattacatgaaataaatctcctctaaaaaaatacatgaaattaactataaactttttatatgctgttcttctagtcttcaagatttactgtgtacggctcctacaaaaaaataaatatgttaataataaaagtaagattttttatactgagtcacaacaaattgtaattttt

SEQ ID NO: 240270 - DNA, 1945 bp, Cannabis indica
ataataataaatatgattttattgataatatgaattttcttattgggatggaaaaacactcccaccatcaaatttacccaaacttgatgatacctttgatagagatgaatgattaatggttattaactaactcaaactcactaatgtatgtattagttaattcctatctcatataattaatcattatattcatgtgtgctaattgatatttattttaaatattaaagttttcaagttgattacattcctaataacaaagcaatttggagttcatttgctatctattgaagcagctcatgcagcagttgctgaatttaacaggcttatatgaaaagctttgtataatacataattttatataaattttataaactaatatactagtttatgttcacctacagccaataaagttattcatgaattagttgtgcatgcacttagagtgagattatctatcttttctaattgatatgtattaaccttttattcgtcttaataaaagtgtaatttttttaaaaaaaaaacttataaatatttatataaaataaagagaataataaaattgggtgccaaataaatagaatcctttttgagacattactttatcttccgtttccacaagaaaacatgaatatcctctagcaaacccaattaatcaaattgctgcaaattgtgcatgcaccagtgcatgtttaaactcaacacttttatctatatcttttaaatctacaaatatataatgcttaattaaatgagtatcaagtttttttttttttaaagggtatcaatgagtattaattaaaaatttagaatatcttatctaattgccacatacaaaagaagaaagaaattacatcgtttttagtcacactatcgtttatccttttaatgtcgttttaactgttttattgatattttaatcagtttttcttatacaaacttttctcaaattaatttttgaaattttagagggtatatttgtaaaattgtgttttgtgacattagattgtctctcattccctcagcctaatgcttcgttcgtctaattatcctctctttttttttatagcaaaaacaaaagcaaaactcattcatattttatgctccaaaatctcttagttgagctacaatgaattttaataatccaccaattcaaaactcaaccattattagttctccactcttcttattttttatacttcttcttcttctttattatgctctgattttttgatcaagtttattatgctcaaagaatcttaaacgtacaatcacttttcagttaattaggtatttttagtttctacttgaaatattgattttttctgctataatctatagtatacaaacattttgtttaaacaaacaaagtaagaatatagatgtactttttattctaatgtaaatatatttttatttatgtaatagccaaaatattcagttattaattttctattatattggtctagaaacctcaatgtgaaaatagtgattacataaaatatattactttatccagtaattctctaaacttagtactatattaataatagttttcaagagtttataatactttagtaagcatataataattttagataaagctcaaaattatagctctttattaagatgaagtgccttgatgaattacatatgatatatatttgagaattatttacgtggtcaaaggaatgaaaatttgtctatgttagttaatcattttttaaaatttgtatttaacctagtagtatttatcaagagaattgtgtcattcctataaataaaactttgctaagaaattatttgattaggaaagtgttttatcaatattattattgtcatgattattaattagccatttaataatgaagtgatatgtattattatactatgttagatagtaataattatagtagtagcagtagttaagtgatatatagctccg

SEQ ID NO: 240271 - DNA, 1142 bp, Cannabis indica
attaataaggaccgagaaagatacagaacagacacactccatcattagctttatatcttgttatcaaaccattgcctttgagaacttctctcagaaattccactcaaacctatcataggccttcaacatgtctagctttaaggccatagacctctttgcctttctcctttttatggtattaactagttcctgagtcagaatggacgattccgctatccatctccccagcacaaaagccgattggaatgggaaaattaacttgttaatgacctctcttagcttggtagcaagtatcttcgaaagtatcttgtatgcaaaattacacaagctaataggtctgaatttgtccaccgagcatgcattctcttcttttgggattaagcaaatgaatgtgtgattcagctggccttccatgcttcctgaagagaaaaatttttgcaccatgctaattacctcgttacccactatatcccagtaccttctaaaaaaaatatcccggcatcccatcgggccccggggccttgagaggatgcattgccgccaccacactccaaatttcctcattcgtgggaacttttttcaacctagcattctcctcctcagttaccagagggttaagaagttcgtagaaggactcatcaagctctgtatttgctgagctatactagttatggaagaattcattgaaaaccctcccaatgtttttatttaatgtaacccaattcccttgattgttcttcacagcattaatctcgtttcttctccttctaacgatcgtggaagcgtgaaaaaaacttagtatttctatctcccaactttagccaaacttctcttgatttttgccgccacattccctcttttcttatccaaagctcagctattcttttcattaaagtgtcctcttcttgttgaagcaaaggagagaggggttgaccttggatccaaccaatccgatcctccgcttctttaatgagtttttcacagtcaccgaaatactctcttttccacctttggagagcagttctcgtattgcctaaccgcgtgctaagactgctaccaccctgccccctaatcctctaagcattcttgatagtttccccacaagaaatttcccttccctaagctgttgggttttatgccct

SEQ ID NO: 240272 - DNA, 738 bp, Cannabis indica
aaagcaataatggtactattaaggcagctcaaatcagcattatggttcaatatattcagacatacctcaaccacattagagcggagttgatcccaaaacttgcgatagaacaatccaggtaatccatcttcaccaggtgccttattcgggttcatgtcattcacggcatgcacaacatcttcttccacaaactctaacagtagctgatcattaatagcctccgacactctcggccgaacaacccccaacacctcttccatctcctcaccgtaaacattcgaagcagtaaacaactgttgataataatcctccacaattttctgcaccataatcttatcatcttgccaaataccgccgctatcaacaaggcctttaatgtcattctttttccgtcttgtcgaggccttatgatgaaagtacttggtattttgatctccccatttcaaccacatagcacggctcctctgcttccaatacgtctcctctttgtcaagcaaaccattaagtgccttctccgtcctttgaatttcagtccacacacctggttgttgtaacaaagatagctctttcaaaatctttttcagcttattaatctcgccattcatcgtcttccttttcttttgttccaaaactaacggcaaatagattttttacactatgaattattttaagatgttctaaaatatatttagggaaattctacaatgcacccccttaaaatgaatatattgatgtacc

SEQ ID NO: 240273 - DNA, 933 bp, Cannabis indica
tgatcaaattgctatgattaacttgttgacagattcaatgatctgattttattcctcagcggaaccactcagtgttagcagaaagtatagacactttgcatcattgttgatcctcatgacagtcatcacctgggttaaacgagataagtggtcacttgggtccgagtctctggtatatgccgccatcttaggcatcttataatttttggggagcactgcatctaatatgtgccggacgcacggttctcggtcctcgcaatcagaatctgagtcgtcccctttctgcctctaggagaccctagcaatgtccttgcgtagtgttgctaactcagccagaattccttcatttagtgttcttgcggaaatcgctggtgcgtgtttctgtttgtttaggtggtctcgtagatctgttttcgttgattttttgtcttagatcgctggagggtacctccggtttttccaccctctccctccaggctcttggtgcacgaatacgcttatttagtcctctcggtcctaagggccaagactcgttttagggagcttcaccctctgcggacctttccctttcgggaaatttgagcggacttttcacggaacctgcacctttttctttttcccgaggattgaagttggatttttcccatggttttccttggaagggtaccgtatagggcttggttccctggtcctgggttttggagtgcttggtgaggactcgttcggtgtttcttcaagtcctgctggaatggccttagggtgtgggttgtacattttgacactacaaaaatcaataatcagaaatagagtattggttcaataaattcatacacaagttcagaaaataacaagtaaaccaaatatgtttgcaaaaattccaaaaactaaacatatgcattatttttcaagatttccaacataatgaaatacagt

SEQ ID NO: 240274 - DNA, 1179 bp, Cannabis indica
ttcattgagagctgaaggaagcctggtagtgttctatcattctttgatcatggtaaaaatgcgaaagactaccggtaaaggaactctattagacacgatcatggaggaaggtacctctcgtccagtcgacacacaggtggaaaatgatggagaaggtgtagctactactgaaaaccaagagaagaacaccactactgagaatcaagaaaggaacaccgagaacttcgcataaggtcatgatgagcaaagatggatattataaagatggtcattattatgagcatgaccctagtttggtgtgaggaaccacagagttggaggctacacaggcagccctagaaaagcaataaaggcttactgcccagatgaaagcaaccatggagcaacttcagagcaagtttgatggtttggttgggacagatgaagccatctatagaagcggtgactgaagggcgagcctgtgagcaaactaatgctggaacttcaaacccttgcatggacaagggttagggaaaagtgggtaaaccctcacaaaaactgctcccagacctcatcgaaaagatgcgccttcagtcgggcaaccctcgaggatgcagaaggccactagcgcttttgagcctagacgcccttctgacccttgagacagggttgcatcaaaaggaccgcctacgaaagtccctaagcctggaagatgagtagatcctcttagtgattccgtcaattaggatgggaagattcctatcagtcattgtggagatagttggtctacggcagacctgtggcaacggttggacgcaaaatacgaaagatacaagagcgagagggcgaggccacgtgggggtgacctaaggaatcatttgagtgacaagatgaggggacgtgatctcccaaaaaagtgatacgaagaggttggaagaaaaaattgctgccttgactaagttggtaaaaagcaaagtggggcattgtcagattatgaggatgaagatctggaaccctgtgttagggaaatcatggagactcctctcccaaaaaactgtaagatgcctcacatcaaattttatgagggtagaactgattcacgagcacatctagccaaatacaataagatgatggaagtcacccacgttagtgatgatggaagtcacccgcattagtaatgatgctaagtgtttatgcttt

SEQ ID NO: 240275 - DNA, 718 bp, Cannabis indica
ttgactaaaaaattatttcgagtgctaaaatagataagggtggatcaatgtatccattttaagagagtgcatggtcgaatttcccacacttatttatgtttaatggtataatattcttatattttactaaataaataatctacataaataagccttctctaaaatttaaatattgatacttttatgaacttcataaatgtttatagacaaaatttgctagtgtcgttcggcataaaatttaaaaattataaataaataataataatgggagagactgaagaacgtgggagatgatattgaataataataagtgataaaattttaatttattattaaaaagacaatcaatgctagctgcatgtggggaataatgtttggaagatgattagtttttttaaaagaaaataaataaataaataaataaattagtttgagatttaaaaataattttatgtttttgaaaacttaaaataatatttggaatattgttattcgacactaatatagtattataataagcaccaataacatcttgtaaatagttagtgatattccgtaatagtcataaaattaaattacgtaggattcgatacttaattataccaatagtaatatgacactttaggtggtgctagacaccacgggtatatcttttgacattgtaaggcattaacagtaacggtggtgtctagcaccacttaaagatgacgtcttacga

SEQ ID NO: 240276 - DNA, 1219 bp, Cannabis indica
agaatactcaccattccattgagtttgtttcctagtaacgacaggttgatttagcaccataataccaatggcatatacgctaatcaatcgggttaccactttgcttcaaaattggcagagcagacacattcatcgagctaaacaaatgacacaacttggtggaaattttgtttggtcactgcaattactagaaaaaattaaagtatttgcttggcgcgtcatccatgatgcactccccgttgctacaaccttggtcaaaaggaaaattataactgatgccacttgttccgtttgtcgaaaagcttgagaattaataggacatgcattttttggatgtcaatatgcaaaagctgtatggcgttttgcactttttgtctttgattggaataaagttgctgcaatatacaagggagattatttgaagcatctatcctctatatactcaaaggctgaaatggagcacatcatttgcactctttggtgcatttggacagagcgaaaccaggtggttcatggaaaatcagcaagatctgctgtctcacttgctgcattttcctccaattacctgaataatttttgtgcagctcaactgaaatataaacaacctgttgcaacttcctctctgccacctgcttcagctgctacccctacactatggcagccaccacttcgtggacacttgaaactcaatgttgatgctgctatcgatgaatctcgacatatcataggtgtgggggctgtagtcaggaattcctcaggacatgccattgctgtcttctcaatgcctactgttggccatttttcatcacacgaaatggaggccaaagctatgtttctcaacctaaattgggtccttcaattgcagctcccaatcatacttgtggaaacggatgctcttttggtctcaaatgcattaaattcaaatacggtggccacttcatctttcaaaaatttaatcataaacatctctagtctccttttttatttccctaacatatctgtaactcatgttaagcggactgctaatgtagtttctgatagtttggcataatatgccttagggttggatgagacttattcttggttggagaattttcctccttcgatttactctgttattgtaaatgactattctcattaatttataataacaaagttatcttttcgtaaaagaaaaaaaaatcacatgtgtacatatgtaaaaaaaaaaatcttttaa

SEQ ID NO: 240277 - DNA, 1115 bp, Cannabis indica
ttataaaatacagagtccaaaatcatatttactttactactccaatatcaatgtatataatcctagttatctcttttcctaggaaagcctattaatatttcaaatatgctcgttgaggactttgacgtatttgttatttcattttttttttaagaaaaaaataataataaaataataaaaataaatctatagtcctaaaaaattagaagcaaaagaaaaataaacttctttcttgcttatagattgatgttgagaacactatccacacaaagtctattatggctgcgagtaaagcgctacatctaactcggagtaacccaaattgaatacatagggcttactacaccaaacaaaacaccatttaataaaatctcggacctatatatataatttgagaaactaaagcacatacatcatctactaagatctccttcatctaaatttttacatttcttattgaaatttcaatggcttctcaagataaacagcttcactttctcatgtttccccttatggcacaaggccatatgattccaatggtggatatagccagaatgttagctgatcgtggtgccaagatcaccattgtcaccacaccagacaacgcagctcattctaatagagttcttgctcgagcagttgaagccgggctaaatatccacttaatgcaactgaagtttccttcaaaagaagcaggattacctgaacaatgtgagaattttgacacccatgccttctctcggtcgtaccacaaaactcttccacgcagcctctttgatgcaacagccagtggagaaaaggtttgaagagcttaagcctaggccaaattgcataatagctgatatgtgttttccttggacaataaacatagctcgaaagttcaacattccaaggatatctttccctggaataaactgcttctgcatgttatgcttgtacaatgtgcatggttccaaggttcttgatactataagttctgaaacagaatgctttcttctccctgatttgccagaccgaattgaggttacaaaatcacagttaccactttcagcaattagttcagagctgaaagattttcatgagcaaaggatgaaagctgaaatagagtcttatgg

SEQ ID NO: 240278 - DNA, 796 bp, Cannabis indica
ttggttgttttattgtttatttagttgcattatagttgtcatgaggttatttttggttgttttaagattgttgtgaggttgatttattttttagttattattttttttaactttttactgagtgttattcctgttcccagataagttctacacggaagtagcaaaagggtgccacatcaattcaaattggaatatctcgaattctcctttttcttttaatatgggatcagggtatctgggagagcgcatccgttgtgaaggaagaatcgattcttgaagctgtaacctgacgctttcggtacacgaaagcatatgcaaagcccatgccttcagggagctcttaggaattgggtatttcaagaggtcttgagtagcacttccaagaagccccttgtgacctaacctggagatacatttgacggttacacctcatttgacaccaagtcagatcttattccctgcgttagaccatagttgtgcgcgtacgtgtctctgtagtgcttattatccaacgacttgtctgggatattacttttaaaggaaaaacctttgaacgacacgtgcccatatcctcacgtgataacctgcgtccattaagcaccgcatgatggaagagctacttaccaaatcaacggtcagatggtcttgtagtattgcacaacctcatttgcgtgctaagtaaggaaccctagtgaggtaagagggtatgccctcgctcacctatgggcctataaatacctcccctttttatgtaaaaggggagaacaattttgacttacaaaaactctactaaaat

SEQ ID NO: 240279 - DNA, 2173 bp, Cannabis indica
  modified_base (1807)..(1807): a, c, t, g, unknown or other
taacttgcatactaagtaattacccatataacacgttacaatatactcaaataacatctattaaggatcttaaccctaattcatatattctctggattagtaatattaccatatatcatcgctttcttacctcaaaatattctagggtaataaccctagaccgcattaaaattaaactcaaggtactagtttactgagtttagcttaattatgctttagacacataatttcttattctaacatatttagcatggcataacatttaacatcttttaactactagggtaataactgtagaccatataactgctcattttagggtaataaccctaatctcggttattgattactcataaccacaatataaaacatgagtgtcaccgtgcttaactctacgtgcaatctactgtcttacctgatgtcctacaaaaggggaaattctaaatccccgggtgctcctgaccaagtgccggcaatcctagtcacaacttctgggatttacacatatagggctaatccctaattccacatttataaaatatatactttgcattcaaaacacagataatcaaatagagctcagaacgagctttcctacggtatgtagaactcccaaatcagagtccggatcacaaagttatgttattcgaagtttgcatttagatcttcacagaaacaaaagggggggccgcggcgcccaaatgctgggccgcgaccccttggttccaaacccagaaaatcctgctacaacttcgaatttcagccccaaaatcacatccaaatcataaccaaaacttaaaaccatcaaatagattttcaaccattatagagggagtttaaaacaccatttcaagcattaaaaatccaacaataataacccccaaaattcagattatacaacaatcacatacacacaatttcatgctccattcttgaacatttacccaacaaaattcatgttcaatagctagaactctcaagctagttccaaactttattttccagcaataaacatcaagcaaaaacataatttcaaatatgggaaacaccctaacatctcatcttgaactcaacaaacacaaccccactacaaagccaaacaatcaagcccaaattcaacaagattaacataaattcaagtcacatgcatctcaaaaaaataccacacaatttcttgcttttctacatgaaattttcagcaataaattcaactaaaaatcagcaagagaaagtacctcaagttccaaccaagatcaagctttaacaccctccaatttcaagcttgaacaccaagcaaatcatcaattttcaacaaaatacaaagagggttaaagagagagagaagggggcagttttgtggagaaagaaccagaaaaatcaattcccattttctcaaaattcctttcttttattgaatataatttaaaggtcaaaatgaccactttgcccctagggccataaagcataccaataaatatttaagggcatacatgacattccacacataattatactcaaataatttcggattaatcacacatattcaaatgccaataatttattctagaattatatttcggccccaaacccggttcggtccgaaatacccggttgtgactataccgcgccaacttgtcagaacacacctgaaaaagacaacacatgcataccatataataatatagttccataagcacgtttataaattaattttactgttttacccttctcaggtcaaaattattgaaatgcccctggctcaccaacggggttttaacatatcatatctcatataaaatctcatatntaaaattatatagtaatataattccataataatacacaattaactagtaagggcatggaagactgtgggatcattttggacaagattaaaagaaggctgcatacttgggagatgagacacttatcctatgacaggtgaaatgcaattaattcaatttgttctgttggggttgagaatattggatgaacattttcattcttcctcaaaagcatagttaaagagattgagaagcattgtaggttattcatgtgtggtcaatcggggaacagaagcaaagtccatctgggatcgtggaaaaaaatttgtagaccaagaaatttggtgggaagaagatataattatactaaggtgtgtttggaagtaact

SEQ ID NO: 240280 - DNA, 1229 bp, Cannabis indica
tcatttattcaaaaatagcacaagagggattatatcttttgaaaaaataaataaacagcttaaattagttgttaaaatttgctattaatatttaaaaaatatgtattttcacattatcttttcttaattttaataatttatttttgttatccgtgaaataggcgagacacgtgtgcttcccaatgtccaagaacaactgagatgggcccattcacaggcccaatgggtcagtcgacaacgaattcggactgcagcctcaagtccaattacaatctaatacgaatcatggtgaggtcggaccttttggtctcagaagggcgactagtccagagaaagacatgttcagccgagtatatccaaataccctcgtggggtgatctgggaagagtagctggagagttaatcgggagcaatcctacgtggtgctttactgatactagagcccacaaaataaggggttcatttcctgtgttagacctcggaaatgtacacagcactaaaagggacatgttggttttatgatacatcgtactgttacttatcattgtaccatattttaatggatctctaaatgtgtgtatattaaatcaaaacataaaatactagtttagaatataggtattctcgaaacttctcgtattttgtatcgcttaatccaaataatagaatttgaactcaaaatcaatcatcacacaatgaataatgttggctacaggataaagtgtatagatttgtttgtgttaagttctcaacacatgagcaagaacaattgagagaaaaatgttaacttccttttctctttatactttaaaaatacatatgtcaaagtaagtgttctgatttctcaaatcagacttctatttatagtagttaataacctttaattaaatcacatttgattatttaaataaataaatatcttataatcgaattcggttagtgatatttatgagagaatctctcaactatttgagataatatctcaacaattttgaaatatctataaccactttttaacttcgaatatttatctaatttaattaattaaataattaattaatctaaaaatatgttatatgttaggcacctaccctctatttaggacaaggttgatgtcttttgtcctgacaacttttgtctcaataaatcttgtcctgacaaattttgtcttaacaatttttatcttttccctaattaattaatttaaaaattacttatttattacaaaa

SEQ ID NO: 240281 - DNA, 1426 bp, Cannabis indica
tttttgacatgcagagtgggagtgagagtgaatctgaattctgggataaaccctagaaattgtttttcgtggtttagaagtaacacaagaccatttgatagagaggagagagttaccaccggtatcaatgacaccgtcaacaaaaaaatgaaaaagaaaaaggaaaagtaggaaagacgtgatttttctatcttatttatttcttttaggctatttaatttaagatatttaccctaaactattataactatgttctttatctttgtccaaacaaatttcactatggaaatttaccatttttgtaaacttttaaaatttttaaaaattatttagcaagaaaaaaaaatattaataaatatatcataggatttattataataataaataaatatcggatatttttacttgattttgtggttaaaatctatatactccacataacaatatctttcttttttctcttaaattggtcatcccttttaccttgaattttgtccccatttataggtatttgagtaattaaaataacaaacaagagatttttacgtggtttatgcgttaactattcttagtccacgagtctattttattaggctcgttggccagtaactgtttacacaaatacagctacaacggacttttactcctttctgtcgtgtttctcttgaagcaaagaaagcttagtaggaataatctggagttaataatagggttacagaaatgtgtttcttaatgaagagtaagtcttcaatcacaaggtgaaggtccgaagaagagaatcagaatccccaaaaaaagtccccccccctccttgtgttgtctctagagtatttataggccaatttcctcgcgtgggccatcttggatggatcttcttaaggacgaattctcaccgttggattggtaggtggcatatttcccatgtggcttttatgggtatcagatcgtaccgactgtactggctgggcttcggacgcgtatcacctcaaggtcatccttatttggatttctttcacagaggccttcctcgcgaggttagtgccttcatcctctcaggacgctaagtgaggcacacgggcagcctaatgactcatcgaccttccttaattaatatccatgtattatgcttgcaaaaatacggataacaataggtgtataggatgacaattcatgaaacatggacattctccacgtttcattttatgcatatggaataatatttaataactacccaaccgctcttttgtcattatccttaaatggttatgctaactatgctggttgtttctcgctgagtatgagttgtccttctttaccatctttgtaggaaaagtgttaagtataaatataagggataattacataagccactatttttttgaaaaaaattacatttttacgtttaaagaattttttttacaatttt

SEQ ID NO: 240282 - DNA, 940 bp, Cannabis indica
ataatgtgaaatctcctcgtcaagtaacctctttgatttttttgtttttttgttttttaaaaaaagtgacctctttgagggatgagcgcgtaggtactgcaaaataattagcaacaaattcagccatattgactgttaattattagtgtacatacttacattgcatacacataagatattatatatagaaaaattgtacggtgcactgctttggtgttttcaacctacaattaaaaaagatgtaataagtccgctgaaaacaagatttaagcagtactttttttttgttattaatttatactaatgtaggagatatggattatttgaatttctaaaaaaaactacattgtatactattgttattatgtgaaaagaaattaaaattagaactatatctgatgtcatcactcgatccatattgtatatataaataaatataaatataataacaaagtgagaatacaaattaacctgaaatttcttagaaaagaagctagtgagtttctttactatatggcgttatgcttatcttatcttaaatatgttgtgtgaaccacccaagaagctgcccctctatacatacatatatattgcaataagttcatataataataatgataagtcatcatcttacgaaattgtctttcattaatttattacattttaattgttttttgaaccaattatatatgctagctagctattgtttagtcatcatcttacgaaagtggctttcagctcaaacattacatgttataagaggcagacaatatatgacaactagtcactactttagtactgaatacacttttccaattatgatagtacgttatattatcaaaaaactaccatactacgtcaataattattttaggaggaaattacacatacagtcagattttaaaagtttttatgataaatatggtatatttaagtttga

SEQ ID NO: 240283 - DNA, 649 bp, Cannabis indica
ttcaaaatattagttaatgacattaataaatttagagataaagattattgaagagagatttggtatttgactaattgagagggagattcgatatcaatccacataaataaggtattgaaatgggacatttcataggtggaaattgatcgagaaaaacagaagaaagaaagggaaaggaagaaagaaaaagaaaaaaagccaacaagatgaattgatagcaacaatgacattaatacctcataaaaaaaaaaccattaataatcattaaaaggaaacaatcacattaataaaagtgtgcgtaaaatattaataaggttgtttagaaaaatatatataccaaatatgcaaatatatatatacatgtcagaaatacttttattgaattaaataaatttaattataaatattaattttaaatatattaaattattagattctaatccaatataaagaataacagaagaaattttttaatatttatgcttatagtttagctacttctaaaaaaaaaatatacttacatcaaaaaaaatatttacatacaaaatattaaagtaaagctcaacttttttttttgcctaaaaattttttttgttaattttttttttagccgatggaataaccgtaacccatataatataaaaatgag

SEQ ID NO: 240284 - DNA, 1585 bp, Cannabis indica
ttcagtaatggtccttgtctcgggtcttggcctggtcttggtctaggtcacagttcagttctcaggttccaggtctgagtatcgggtcctaggtcccagtcctggtcccaggtcccagtctgagttctagtcctagttcgagtttggatcccagtcctgatctcagtccgggtcctagtcctgggtttgagtacgagttatagtactagtccaggtttggttcggggtctatatctgggtttgggtctgagtccgggtttcagtctgtgtcttggtccgggtcttggtcatcaggataaagttccttaatatgttcaaaaccaagtaatttagcatcaagagtagagattaaggcatacttgcaagaaagggcatcggcaaccacattctccttacctagtttataccgaatcacatatggaaatgtttcaatgtactcaacccatcgtgcatgtctcctgtctcctgttgagcttgtgttgccccttcaaatatttaagggattcatgatctgtgtgaatcacaacctggacctgagacttgggcccccgaactgggaccaaaacctaagcctcggaacaagggttgggatccaggacctgaacccagacccaaacccagacttaggaccctgctcgagacacggcacccaaactgggattaggatctacactcgggatttgggactcgaggcttctacccgacctgtagtcggtctctagatttgggactcggaccaggacctgaacccaaacccaaactcaaactaggaccctgaaccatacctggacccacacccacactcgagactcaaaaccagaacctcaaccggaactatatcgggatcttagaacgggaccggggctaggacccagacccagccgctgacccaaatcaagatagaaatctcgactcggactgcaccccggacccaaattaggatcgaaacccggacctgaactgggaccaaacctagaccctgacccaaactcggaacaagacctaaatgcggacctaaacctagaaccagacatgaacccaaacccaaatccagactgggatcggatcctgggaatcgaactcggaaccaaaccgtaactcaaatttgggatagaaacccgagacttggacgcgaaccaaaacccaaaccaatagtcggacccagacttggatccgaacccggacccgaactcagacagtacttgaaccccgacctggacctaaacccgaaccccaacccagaatcgtaacgggaaccacaactggaccaggaccaggaccaagaccaggaacaagacccgaacccaatcccaaactagaaattggattgggatccaaacccagacaaaaactgggaccagaacctggaactgtgacaccagaactgggaatgggacataggattcagacctagatcggagatcaagacccggaacttgggccccgaacccgaacctggacgaatactgggaccaacggtccgtacttagatgggggacctggacccaagaatttggccctggaaccaggaccaagacccaaaatgtgatcctggacccattacctaggacttgactactgggac

SEQ ID NO: 240285 - DNA, 1733 bp, Cannabis indica
attggttaattaataatttctttatatactgaaaataggtaagtggaagagtgatgcccactacaaaaaactgttacttttagtgacaactctttagtcacaacataatttttttgtgactaaatatgacttttagtcacaacaaaatattacttatgactaaaacatagtatttaaatacaagttgtcactaatttagttttagttacaacaaattaattataattttgtgactaatactttttgttacggactttttagtcacaacataaaaataataatttataattagtcacaactttttcacttttagtcacaaattttgttgtgactaaaaataaaaaatattgtagtgcctatctaaaaaaaatttactacatatttgaatattatatatctttttgggtgctttaatgaatttttaaaatggatgcactgatacactcttgtatattttgatatttagaaaaaaagtttggtccgattttttttcataatcatgtacgttatacctattaaagagacatcttcaaaattttaagatattcgaaataacttacaatatgaaaaataatattcaaacagtctattttatacgcttacaacaaacatattaaactatattttcggcatattaaatttttaaatttacaaaatgtttcaaataattatacgtacataactataaaaaaaaattcactgaaaaattattttagataacaaaatatataagaataaaataatacattcttgagtgattgtaaatttttttaataataaaattaaaccaaaaatataataatttaattaattaattataatatataatccatttataatttataaaagtttcattttttatataaaatagttttgtcgtttccctttatagacggccaaatttataaggtgtgtatatatataatagtacaacttattagtaactttaaaaatactgacaatcattaatataagcagggtcagtttagatatgacttccctttaaagatcatacttgttttctcatgtaaaattaagtagcttggggaccatttgtatatatagcctttcagacaaatgctgaaatatataactgatacatataaaaaattaaagtatatattaatactttttataaaatataataataataataatattgagggatgtgaatgtgatagttctattacataatgacataaattggtagctctggcactattactatcccaagcacacatgtagggtcgtttgtcatatctataaagctatcactgttcataattataacttagtaatgtatacctcctcctcccttcttcttcttcttctttatattttatatactatgaaacatatgcatgagcgaacctacatgcaaactaaacgtataaaattggactaaattctaaattatttgaacttaaatttaaaatcaaatttaggcttttatatattaatattaatttagttaaatattatcaaattgtattatttcgttatattgataaatctatattaatcaaagtttatgtatctcatgttaggcgagattctaatcaagtcgctcatggtttggacaaaataagtttttagtgttggataataattgtgattagttagaaaattttccttgtactattttttcttttgttgtaaatgactttgtgtaatttataataaaagtcttttcctaaaaataaaaagaaagttataagtttaaaattctacat

SEQ ID NO: 240286 - DNA, 1242 bp, Cannabis indica
acataaatattcttaaatatttttcgaaaaattaatattattaaatattaatttttaattaaaatatttaaaatgtaataattaattacataaataatgatagaggaatatagatatacctcttttatcatttttgataaagtgaagattaattaggagcattaatttgttgtgtcacgccatattatttgcctatattggaagtattattggagtgtgacgagtcacctttttcaaattgattttgcaaaaacgtgatagaaaaacccaaatgtcataatatggaaatatgataaaatatggtttgaaagtgtagtgagtggacataaaattaagacaaatcacatctttttacccatacttgatatagaaatacacatttatcataggatatatctaacccaacattttcttcttttgttatattttctttgtttcttccttaatttcttgctacctcattttcaaaaatgttatttataacgttttaaatattacaaaagatatcatattattattagtggtgtattttaatattaagtattatatatttatttttatggaatcttatgatttcattagaatacaaaaaaggtgagatttactagagaaatctctctccaaaactagagaaagaatgactacgtagtctaacacaatcataaataatgagtaaaaattcatgcttaaaaactatcaaaaataaaatgaaatttaacatctacaatatcgtggaatacgttggcaacatgccaatgaggaattttatctaatgttaacgctcaaatcataataaaacaatctgagaatattgacattgtagcccaattgttatttatggtccttacatattttgatatagtataacaatacagaagttgctaactaattataaaattccatgttagtatgatgttaagccagagctggcctgaaataggatgggaagtaggaaaaaaaattactaaatcatttattgaaagatatttattattctaaaaaattactaaaaattatgtatatttttttaagctattgggtaggtgggccgtaattataaccgaaaatctcatgtgcttcagcccaagtctagctctgatatgaattgttggtctatcaacctttgtctcacattggaagaataggcatgagttgcctttgataaaagtgttccacctactctatttgtataaggcatttaggtgtctaaaaataaaaaatgtgagggcttaggctaaagat

SEQ ID NO: 240287 - DNA, 2111 bp, Cannabis indica
tcacgtctcgccgtacgatgggacttcagccccagtcgcccacctcaacaatttcaataccataatgcgagccagcaatgtctcgaataacttacgttgtatttcgtttcccacctccctgactggagcgacgagtagctagttaattacttcttgggaacagctatctaaggattttaagaaacaatttcagcttccgggaaggaaggctaaagctatataaaaattcaagcttatacttcacttgaaaggattaattagaatcgaggggtaggatagacttcaagcatccctttcgttcaaggaaggagggttgaagacgtatcgcacccccagtgatctttcttgaacgaacgtgcttacgagagtcatgttgtaatttttatgtaactaaactttggcttctaggaaaggaaagctgaagttgtatgaatattcaagcttagacttcgcttagaaaggatcaataggaaagtatcgtcgaggggtagggtagacttaaagcagcccttctgttccgggaaggagggtggaagacgtatcgtacccccgttgatctttcttgcacaaacatgcatgtaagagtcatgttgaatttttatgtaacaagcttcaacttctgggaaagaaggctgaagttgtataaaaattcaagctcagacttcacttgaaaagatcaatgggtggaagagtctttggcagtaaagcagacttcaagctgtccctcccttctgtgatagattgttgaagccacacgtcactcccaatgatattccacacttggagagcatgtcgatatgagtctcctgggcctagggaaagtctaggaggtgcatggttatacctttaggatctcttgggtagtcaatctccttcagtgaagtgcggtggcatttgaggatcactaaagcgagaactcagacttccagtaggataagcttatcacaaggactccctaactagtttataatgtctcgagttgcttccttcttatgtaaccccagggaggcaatcacaccaagcgacagggatggcgctgagcgaagtatgctaaaaatggcctattcctacaaacagtaccataaccaggcctcattggtaacctagcagacaccgatggtattgatggtctcctctcagcatgtgccattccaggatttgtttccaaacaacttcaccacctagagacaaggcgggagaagtggttgtcaaaaaacaaatccgacctccacggcggcaccagcgctgtagtctctagctagatagagtcgttacattcgatgaccctttctgagttagttggcgtaactgcattgagtcatagctccttattctggcccgagcgcctctcgtactactccgtatgtacatggtggcacgacgagggatctgagcctcgggacatcagtagtcgaccttgcccccatggagttcgctggccagatctgagcctctaaaggacaaatattagtgcatcacgtgtttcacgactacgtgcactcgtccttgtcactctttttgagtagattgaggcatcgagtctctttatgggcaacatgtcggctctgcacctttctggcctttggccggacctcaacaagctatcaagagatctaccttcttttcttgaacgaaccattttttagctctcaatgaaagtatcaaaatttttactgagtttttcggtaaccgaataattatagaacttaagaaagtaataaatgcataaataacaaaattatagacaatagatttttacgtggtttaggcgttaaatatccttagtccacgagtccattttattagactctttggccggtgactatttatacaaatacaaaaaggatggacttttactccgatccaccatgttcctcttgaagaagagaaagcttagtaggaatattctagagttaataatggagttacagtaatgtgttttacagagaatcaatctttacttttaaggtgaagagccaaaatggaggaaaggagagaagtcaagcttcgaaattggaaatcaaagtccccctgccttgtgtgtcttcgagagtatttattggtcgatcccctcgcatgggctgtcgttgatggatcttcataaggataaa

SEQ ID NO: 240288 - DNA, 812 bp, Cannabis indica
aagagaaataatttgatgtgattgattgatatacgaaatatatgggttccaccacattaatgcacgataataattaatgacactgtgattcacgtggttccaccaactcatctatattgtactttttttttttgtttgcttttatttttgtgatccgttccaatcgacgttttttgtcgtcatcttttataataattattattattactacttttctttgaacacgttaaaccacatattattattgttatgtaatacaaaaatgataaacattgttattgcactagtattgtgtaacttttagacatgctattttatgataggctaacgatactatttaaaatttattattttaaattatataaaactccatatttaatagactataataatattaaagtaataaggtcttttagcatttctcaaaaacatattttggtattagatatatataaaaaaaaaagtttaatttttttgttttcccttattttgtaagaatgtaagattatttgtaaattttttaaattttaaataatttatcaaaaataaaattcaaacaattactgtatcaaacttatgagaaaaatagtcacaaatacaataaaattacttaaattttatttttagaattataaattatttaaaattgtctaaaattttacaaatgacccttaataactataatataattatgatgtggagaaagatctttagaaacacttttttaaggatactataatatatatttaaataattaatacttttttttttctattcgaagacataaaaatattagtacactctcctaaaag

SEQ ID NO: 240289 - DNA, 1519 bp, Cannabis indica
gaagaaagctacaaaggaaaataacaaacacatttttttttatttaatctttcaattttcctttccaaattggcagacatcatcatcgctacatgtagacagtattaacttgcaagcatttaacagaaaccatgcaggagaaagataaagaaaataccctcaagagtttgcccgacagtttgcatagttgaacaagaaaatcgttgtcatcttccctgaaaatcaaataatgaaaaagttacatttttactagtaggtatagaaaaaaccagcaataatcttgagtaagtatatttattatctgtaacaataataagaaaaaaaaaattcttccagcaaaataaaaactgttgcaagcaaattggacattactttttctgccatcttggaaaacttgtagatgttgtaaactagaactgaagaaaattaatacagcagcctcttatatgtgaaaacaatttttttggaatttataaatagataagagccaatttagtagaggtgtagttcatttaacaattagttcaacaacggtggtaaaatattgctgtgataaattataatgtaaaaagtgctgtgattaaaaattagatatggtaaacaccaaagatagtataacacaccagtctttaatcttgtaagctctttccaggtgctctttcttaacacgagtcaaaacttctcctatgtgttctgaagcatcttccaagtttgtgacacggacctgacaatgaagtatcagcatagtctctctcgtgatcagtatgtattacatgacaaacatacagcaataaaatctacgaaagatttatgtatatcccaaaaaagaaaaagtactaagaaaaacaaaaagagcaacttaccactcccttcaacacaatatctgtttcagtgtcatggttgttttgataaacaactccaggacagtcaattaagaaaatcctctttgtaagtgtgatatattgccatactttagtttccccagggataggagcaaccttgcaaacctgtgataaaataaaacataaataaggtaaccaattaagaaacaaacgacataaattgcaattccatgactatacgaaaatcagaaaaaaaagaatatataaagaaaaaaaaaagtaataaagaggcaaccgagcataattctttgaagtacagtcaaagcattacgaacatattatttacaaggttgaatatgtgcatcaaaacatccgaactcaatgtcaacactacttaacatctctcgaacaaaatatcatgcatgttttttcagcatcaaaagtaaagcctaaaaatctgtaattagaaaaagcatggacagacaccttaaaaaatgaatctccttaattgcaaggaattgatacctcgtttgataaccaaaataaccatgaaatattttctacaaccacaataaatattttcattttatttttaaaaataagaattaattaatgttattatataaagaacacaagcaccatatatggtccaacacatttagttcttttaggacact

SEQ ID NO: 240290 - DNA, 664 bp, Cannabis indica
tcggggagggagtgctcctctctagccggccatggggacttctggagatgtttggtcggccacatgatggatagcaggggctgttattgagcctcaaatccctagccgacccccatgtcgttggttgctaggatctggctattctttccgttagacctttgagacaaggtttgtcctccctctgacaaggaaagatctttcctagcccctgaggggccaggttggtcagcttgttgatagaccctccctaatctatcaactagtcttcattgaagtggatcgctgatgagattctggcctcttacactagttctttgattaaaccgtattatcagatcttcagcctctttgttgcggtgatctaactctacctggcaagatcaaagtatgtactcttggtcatccatgcatgtcaggattccacgtctttgctgagctaattcatcgtaatcagaagtgcatgtttcttcaaggattcgcatctctactgagcaaatatattgcaattagcagtgggcgattcgtcaattagggtggcttggcagacgacctctctaagtttggctaacttgagatcttctcctaagtccacgtgtggctcgcgaattcttgttcttatctctcctgcataataccgaggacaaaacctggttgttgttcttag

SEQ ID NO: 240291 - DNA, 2609 bp, Cannabis indica
gatcccaatattatgtacatttatttatttataaagtttattagaatatcactatagtgtgcctcagcaagtagggcattaaaattttgatatcagagctgcgatattgtttacagaaaactgtcaagatatgtacaatcattgttagagacaagctcaactcatggttgattgagcttttacttattcattggttagaaaaacatcataggaagcatgttagtaacatgtcggttgattaatttgtttcctaaaattctatttatgcggtaaatttcattgtacgtgaacgctatctaacctacctgacttatgggttcgcaggctaactccaacaatatggacgcccaacgaaacacaaggagtcatggcaatatggttgagactggagatggtcagggatgttgaaatcctccaaatccccatggacgcggcagaagtcgtggtaggttccaaagaggatgttatgaaaatcaaccacatgctccttaagattaggagcaaatgtttgcagaaatgcatgccccaattaatcagcaagattaagagattcagagggtgagacaacagggttctcctgctatgcctcctcagccaatgccttactttggtgctagtggtgctagcagaataacttgttccttgtaatcgcacggagcctttataagtgcaattttgtaaaaaaaaaaaagcctccaaccattataagagatcctaatgtcatgaagttaaaacagtggctaacagttattgaaaggatccttaattttatgagtgccaccaaaaatgaacatgtgacctttgccatgtttcaatttcaggatgctgcccttatgtggtgggaaatggtgtcctttacttgggacatcactacaatggcctgggaagagtttcatgatctatttaatgctaaatagtataatgaggcaatgcacatcactaaaataaaagagttcactgacactactacaaaaagtataattcttgtcgtttctaagtgtcatatgaaaaatttacgttggtttaaaaaaccgacaaatacactatagatttaaaaaccgacacaaaatatacacactcttcttttttatcttctacgtcggtttagaaatgacgcaaaattatttgtggcatttcgaaattgtcacgaaaatcttataccgtcggttcaaaaatgacacataaattgttgaaatactttttttcacctattgcgttagttataaaatgaaacataaatgtaggtaaggaaaaattgcaaattttcatacaattttcccacctgcattaccaaattttaaaataattttgtataatagtaaatatataatacaaaaaaagttaaaataacgtttataaaacttatataaaattagaaatatacataccgaaaaaatgtgtataaaaaacacaagcaaaaagtgaaaagttagtacatgtgctttcaccttccatcaaatacattaatatgagtaaccatttcaatggttataattatatcaaaataatttcctttcgcatagaaataacatatcatgcatttgtatagttctccaaaaaaaaaaaacacttggatagggaacactggtacacatgagctcctttcgagtgaagtggctgccaaatgtgagcactggtataataaccagtccagactataaaatcttaagtaaaatcattgacaggagactatacttgggttgtattcataatagggagaagcgaaaacgattatcaggtgatactgactaagcggggaaaagccacttcaaagaccattagaaaggacagaataaaatctaaaagaaaataaaccgagcacatatttgaatatggtaccgtggacaaacttcctcgttgagcctccggaggaatctcaaattctatttcagggatctgcatttgacaaaaccaaaacaagaagctcactaataaatcatacactatgatggaactcaaggaaactgtttaaacattgaaatgataaaacatatatttcgaaaagagattaggaattaacccaaaatttgaactccttttacgatagcaagacattataaactacaaaaagaattgcagtgccataaacacaaacaagagcaaggtatagaaaaaaaaatgcccacttttcatgggatgcaaaaactcttacgctcttagagaatcaaaatttacttctctacaatatccttgactaagcaagaaaagtggcttgcccagtgcacattgaagccaaaaagaaaaactatcttatgctttcctctaatgctaagagaataaaagcttactttctgcaattccaaaactaaaaaagaacagcaacttgccataacagaatcccaaatttccttggatgattaaccacaaaggtgggaaagatattttctaggacaggctaagttccaaccaagtaactattctgatctcatggacctatactacatcctacgaagaaacatcatgtaagtttgcttttctgttcaaatcgattggcacacatttatcaaatggttcgcacaaactataaatcatttcagacttttctacctctgccatggcaacctgtaatcctgcccaggaacttatataaaacaacagtatgactaatc

SEQ ID NO: 240292 - DNA, 1217 bp, Cannabis indica
tctctctctctctctcaaatcaatctgatcgtttttttttttttttcccgaaatgataagtgttggttgtacttataggcttaggatcaagatcctaaagtcggtggttgcaagaagggaggttgttaagttagttaggaaataaccaacttaaccaactatccttagagtgaggtctccacgtcagcctaagtaagcgtgcatccaggggcgagtatgagggcttccggagtcacagttcagggcactccctgaaggaccttcctggatagaaaagtgccaactggagtggactatttgagactataccttctaggaggaatagctagccatccggaactctttcttttccggaggacaatcgtttcttgaaggacaagaaagtcttccaagacttacatccgcgactcaacaactttttacgaatgataacaactcttggagatctttttatctggaggaactataccccaaatactctatgttatataaccacaattaatataaaataaaaaatgtgtagtaaatttaaatttaaatatatagccacaatcatataacatattgaaaaaaaatctcaataaaaattatgtaattatattggtcctattaattaataattttatatctcaatttcattgtatccttgtattattctctctcacataattaatcacatttttcaaattttttttatcactttcataagaatacaaacattatttggggtgatgatcactatcaagacgaagatattattacagtatgtatatgcacacgtaaataaaaatatttaaaaggctgagattaatttgaagggtagggagaaaatcatgaagatagctcaatgcatgacccaccttacattataagataactgtatcatagaaaatatatatagaacagaagattcgacaagaaattcatggtatgtttatatatattccaaaagtaataagttcaaaggttttggattatatatcaacataattttgtggttgatctctgtctctgcacctaacaagattcctttgaaaatatgaaaaaggttggtatgcataatttaaataataataaggtcacatgaacttcgtgctttgatattagtatttttttttaggtttttctccattaataaaaattgctatacatgtataatataatattgcatttcaaaataattataataattgtttcaaataataatactaataata

SEQ ID NO: 240293 - DNA, 1800 bp, Cannabis indica
ctctcttcattgttctcacaacatactttgtagcttccaacaactttcccgccttaaccaaaccaccaacaaaaatcgtatcgaaattcacaagaggatccaatcctttccttcctctccttcccaaatgtccctgcactgcaataacattatatatgtatatgcataatttaaatacttaatgataaaacttgctcttttcaatctcacaaaaccccttaaccaaactatggtactcacgaatatctggttcctcaatatctttccacaaccttgtaagtcatactcaacttcagttgctcttgttacaatatttatggacacaaactagtcaattccaagcaattgtatggacaaaattttcaaaagaaagtaagaataacagagaaaatggataccatgatttatattgaggagagacaaacaaaggtagcaatggttgtttgttctctacactaatctgagtaaatggtagtacatacagaacattaacaatggtgtcaacctcttctacaatttcacaatagtagtctaatcactcactctatagtatagctattataattcaaaatcacacacaacactcaaactaaacataagaaaattaagtcatcgtaagtgtttatttggtggtagctgacttcttgcattcttcaactcaatccaaatcatttagaagcattcattccactacaaattgatggttggacttagatcctgcaaaaacataataattaatagcttgtgttgtgttttcatcagaacataccaaaatataaaatacaaaatacaaatagaaaaaaatatatataaaagaagaagaagaacaatcaaactatcatatatgggttttgaaacttaatcatatatgttgaaattaagatagtttagattgaaaagaaacagaatgagcaactgtattttaaatatttcaatgaaaacagaaaaattgattgtctcaaatagggtagaaagaaacctagcagattttatcaagtctactctcattttcttgtgttttcaaaatttgtcaataaaaacataaattcattgtgtcaaacatctcacaaccattatattattattattatttatttatttttagtcaaaatataagtaaataattaaaatgagcaaaacaagtataggagatagcttcttccaataaatctgctatacacaatacatacacataaataaagttacacatcacaaaataatataacccaaaaaaaaaaagaaaaaagaagtcaaactatcataccttatattttcttccgatcaagagtgatatttgggatgtgagcaataattggccagtcctcccctgtctccctcttcactcgtggtgttagcaatggacaataagtgatatgcagatcagaaagagaagtgggtagttcttttggcaaacattcgaggttaggacaatcatcaatgatcaactcctcaagggaggtgaggtgctgaaaggcctcctcgtctaagtgcctcaagttggcacaataactaaattcaatcttctttaaagtgatcaaaggggcctgcatgagttgagctcttggaagtattagttcctcacaattaactatttcaagatctgtcaatgacgggaaataatctgctaacaatgtcactttgagtctctcacacccccttaattgaagattcttaagacgaggaaaaactccaccttcgataaatgaccactcttcaaacttctccaaattatcaaatttcaaggtctccaaagatgtaaagaataagggctttgttgatattgcaacagaagaagaagaa

SEQ ID NO: 240294 - DNA, 1801 bp, Cannabis indica
tgtataaaagccattattccgtgggtgtaaggacctaatggaggcttgaagcggggacgttacagcgtcgacgtgttgtgttagcctggttcatatttttttggactttttaaaatatcagccgtgtcatactagatcattaaaaaagtatgtgtcatgtcgtattatgcaacaattttataggatatgcccgacacagctcacaaaccaagtaattaatttcgtggcgtgctcggattcttgtcgtcctttattcgggtcgggcttctttttttgttctattcataagagttatttctcactacaagaatgtacatttttgccggcaaaagtatacaattgtcggcgcaagttaacaaatgcgccgacaaaaggagtcaacaaaatggatccagctccctgatttttcggcaccttttctcgccggtaatagtaagttttgctggcaaagtaccctaaattcgtcggcaaatgttggcaatccaactgccaaaaagtgagaacttctggcggttcgagtcacctttcgccggcgaacttatacatgcgccggaaaaaggtaataaatattttttttatttttttgacgcgtaaatgcgtcagcaaaagtgttgaaaaaaaggcaatcaaattccctcgcagttcaaaaacatgcgcgcaaaagtaggtgaaaacttttaccgacagatttaattgcgtcggcaaaaatattgaccatttgaccaatcgacacgttgcatcaggatttggcaaacgtgggtagaaattttggtgagaacttttgccgtcgcactttagatgtgctaggacaaaagtttctcacattaatcaaacgcttgcgtttttatgtttaattgttcagcttcgacttttgtcggcgcgcctaagtaaggccaccggacaaaagttcaggctgaattatacaatacatgagaatgaactattctatatagtaattatggtagaaaagagattaatcagattaatcctctttaagtttatacgatataatttaaattaaaataaaataaagaaagatataatgaaattaattatttaaatttaaatcatttattaaatattatttaattttttaaataaataatataattgaattatgttatagatgtttatttcctataattaattgagagaatctcttaaactactcaaggaaaatcttaactaccttaaaagaatatcttaaccaaaaaaaatatcaataactattttttaaatttaaatttaaataaatatttatcttttgaattaattaattaacccaaaaataaatttagtgagaataattctatcttatatgcgttacctatgttcatggccggccctgaaatttaatactattaattcactaatgaaagtataatttagatttaatctaaatttgtgcacaacttttcagttttataattaacacttaaaaggaattgttaggctatttttagcctaagtttcgggtcgattttagagttgttttctttgttgatggtatcttttagaatggttttatcttattatttaatattttatttatatacttaattaacttttttacaatttaggacttgaatgttagggaccctcaggcgtactctttactcattttatctcaaggctaaccctaattctcaaagtgtcaactgtcaagtggctacaacatgagaagctgactacaatgaaatgtgacaagtcaactcctgaagattgagaattaatagcataacacacttggcttaatgtaataattctattaatgagatataatatgataataggttatttg

SEQ ID NO: 240295 - DNA, 1714 bp, Cannabis indica
agtttacaaaattttatgtttatggtttactgtgtagctatttttttgttattcattttatagtttatagtgtttgtttgttgtatatcatttgttgattcaagaatgagatttatatttcaagcctggtaaaatgattcagtgaaaattcatgttattccctaatcaagataacattgtggttaaaaatatcaattccaagttgactgaaggtcaacgtaatattttaggtttaatgatgagaatttttagttattttttttttttttttttttttttttttttttgaaggaatgagaattttagatttaatttagttgaatttgaaattgtgtctagtttactgtgtgttggtgattctgatttgagtaaataaacacacagaaataatacttttgttgatcaatatttttatgatcagacatatgtacaatgtatacatttaatgatttaatatatttatttattgtaattgtaataaattaatatgaaatacttacaaatttatataacataattttatcattatattaatttatagaaaaatcaacataaaataaatgtatttttataatttttattatttaatttattatatttgaccatttttctaaactttggagaaaaataacatttatttaacttatttatctatttggggtcattttccaccttatcctattgcataattggaacttagagtttgtagggcccaatttaatatttttttgttatttattttaataaaaaataattagttgtccttgaaagtatttttttcatatgtaatcaattgtataaactatttttaatatgaagtaactaaaatataaatgaaatcatttttatcttaaaaggagtaactcattcaaatcctattgatttcataaataactaaaatattatttgttttattcataaacgcaagaatatatcttttacaaaggtaactcattagtatcttatcaacataatatgcaactaattattaaattaatatgtttataattttttctaatgaattatgtggtaagtttcgtataagttatcttttattaatttatcaaagttattgaaccactttaacactactaaagaattgggttttcttgactattttaaatagttcgctaatgtattgccatccgtctctataaccgtcgcctattcaaccatacgcaaaaatttggtagaaaaatgtgactgtggaaaaattgccacgcaaaaaataattatcgaaaggttaaaatctgtgggtaaatagtagaaaactatagcctacggtttaaaagtcgttgactatactatagccgacatttttaaaatcgtaggctatagtgttataatacttcgtttattcctttgtgctctttactggttgattttgaagagtatatgtacatgtcaaaaaaagattacaaataataatgtgcctaatttaatagttggtaaaatatttttctatttccttttccaaactcttacaaaaactaaaatcaaaaatggacacattctcatcttccctgccataattatatgtaaacacccagatatatatatgtatgtatatgcatcttaaacgattccaaacaagggaaagatatttataattaaacaatcttgtatcatcatagatatataccataacatgagcatgcaccacatctaaaaatcattacctccatagattaagcgaacagaaacaaaaaaaaaa

SEQ ID NO: 240296 - DNA, 1256 bp, Cannabis indica
acatgggcctagctctagatgacgaagcttccatcaacacattttcttggtttctctccaagaacgggcctattccagtataacctaggaacactctcaagcccttgttgagtctcctattccctaagattaccataaatcctaaacttattaacatactggtctatttcccatggactgtcgtttaacatcacatgacctcctcttctagctcaacctcttcttgctagaccttcttcgacatgatttccgtgaacagaaagaaaaccaagcagttagctacccaaactacctaatatagaaagggagcaggagattcttcccccataaattgcttgaagaggtccccaccgaattcactatccaagaacgaaaaccttcaagggtcatccgttcaagataggaaattagaaacatcaagaggaagaaatggacaaagtacccagaactagaaggattctgagtgtggagaaattttgtcagtatttttgtaacaacacaactatttcctagaagttgctaagactaaaactcgaaagcaataaaattcttcatatttacaaactaccagcagtattggtcacaagcctaagaaatttaaaattcatttgaaggaaaaatatgcaaaccctaacttctacaatggatttaaaaacacattcgaaaggtgaaaaattgaataaacccatacctggtaatgaagtcaaaggcccccaattgatcttcgatggttctggatagtgcaagcaagcataccttttaggaagacggttggctagggaaatcaatgagtcgatttgagaattaaaattgatattcgccagttcactcctctgaagatgcataatcattgggggtggatggtttggaagaagaagatttctcaggcaaaaagcaattcgaagaaggtcaacgagggctaagttcattcactactgaaaattttcaccgtattttgctctcaagaaaatttgaatttgagcgaataaaataaaagggaaaacagtagtaaattgtatcttttaggggtacttatactcgagataattatccacgtgtagaaaaatgaaggatccaagattgtctctctaaaatgaacgatccaagaaaattgaatgatccaagattgtctttctaaaagcacaaacatatcaaatccaatggctcgaagtctaatagccaggcatgtcacacatttaatgctccctggaaccgaggttcaaattaatgatggaaatacttttcttaatttttgc

SEQ ID NO: 240297 - DNA, 1506 bp, Cannabis indica
ttcgtcttagctcagggccgaccctgtaaatgagttacacgagtcttgtcgtgtgtcaacccgtttataaatgagtcatgttcggattttattttttgacacgactaataaacaagttatgtttgggtcaagcatatatctgccggacatgaatcttaacacgacacgaatacgactcaaaaacataaattaccaccctatcaaacacccaactactccatcatatatatatatatatataaatttacattatttaaaaatataatattttattttatctctcttttacattatttttaatgttttatagaaatacaaacaagtgatacaaatgtaaaaaatatagttcattttattaaaaatctactccaataatgtgtcaaattgtgatacaaatatgccacataacaaaaagtaattcagatttaaatcataatattacatgatgcaaaatttaaattatcacaataaatattatatttttatatttactattatgtcattttaatattttattattaaattttaattaatatattattttatattaaatgatttgcattattactattaaattttatgtttacttttgtgttattattattttatactttttaataaattattaagtgagcattaaatgacatattaaattttcatcaagatttacaattatgtaatagagcataatataaaaattgatataaaaatatcacaagactacttgtactaactcaatttgtatatttctcgtttgaaaaggttttacttttaaaaaaatactacaataagcattattcaagaatattatcattatcttacatattattatttaatatattattgttttattttattataaatattgttaaaccaatttttttttaaagaaaattgcactaaatttaaaaaataacttctcaagtaacataattataattaaacaatctagcttaaattaaaaaaaaactcaataaaataacataattagtctatataagcatattatgacagaatttcgattgtacatggggggttagtagaataaaaaattaaaaaaaaattgggttgaattgctaatacaataaattagggttttgagagttagtatatgaaatttttttgagaattttgagaatttttgtaaatctattatttggtaaaagaaattgtaatattgaattgtacaagaagaattggtaatgaaaaataaataattctcaataataatatataaagaaaatagaaaaaaatattaaatttaaaaataaacttggtaaaaagaaattattggtgtaattaattttatatgaaataataatataataataataataaccaaattttgagtcattatcatcattaattatcagtaaatatagcatttattccccttgggttcgagggagagggggagatgtgtccacacatctaccatgcatgtatgtatttattagatatttattattattagaaaatgaaattaagtttgtggatgaaacacaa

SEQ ID NO: 240298 - DNA, 984 bp, Cannabis indica
cttctctctctctaaaattgtatccaacaatgtagatttttctttttcaacaaaatatggaatttttttcaactatttattgtgagctatatatatgtatatatatatttttggatggaactaattaaagttattgtgaactaatttctaaatgtggtgtttcaagtaaattcgaacaaatatcaagtagcatagaatgaaagtctacctttgaaaaaaaatattaatttataaaataatgttgagaatattttgtagaacattctgtataatgtgcaacactaatctagagttattgagccgttattttctttttaattcaactattactatttcataaatacatttttgagttacacaagattcaactacagaattcttatataggcaccctaataatcttttattgccacttgagctagcgtgaagtggtgagtgttgaaatactttgaattgaatttaaccttaactaatttatgagaatcaaataataaaattaaaaattaacagaagtgtatcggaatccattgaattaaaaaagtatgatcttttaattttacatcaaaaatttctctggaaccttatattgtcctgatgatggtgattcaagagtatgaaatgatatgatacgatgtaaaatggggaccaatacttatttattaatgactgtaaaaataataattaatcttttttgacaatttctaatttggcacttcatcaaatcaaaaaattatcttaatggtatttacatattaaaatcatgataattatgcccttaagttataaattttattctaaattagactacacatatttcactcatttatatgatgatccaacacatattttatatgtacaattataatcccaaataattatgccgtttatgttctcactagtcaagatatattatagggtaaatactattttggaccatgtattttgcaaaagttaccgattaaatcctctgttttgttaaatgac

SEQ ID NO: 240299 - DNA, 1761 bp, Cannabis indica
accctccccttgatacaaaactgtaggttgtctagaaattctaggacttcttgctaaactatccgcaaaaagattgaaattacgattaatgtattgaaacttacaaagattaaatctatgactataatctaaaatagacagagacttgttgagggatctccaatccttaggacactgattaatggctatagcttggactgcggtttgacagtctgagactaagagaatttgttgccttttttcttcagaagaccacactagagccataagaatggcactaagctctgcatctaaagcagaatttgccataatgaaatctgtttttgaagcccagccgcctgttactctgttaatcattactgcagctattcctgcctcccctctgtgtcaggacgcatcagtgaacaccacccattccacttccagggacccaatatcatggctcagagatccatcaacatagcaacaagttacctctgcatcatcaccattagaaaacctcgagtaatcctcaaaagccttccctactctcctaccgatttcttctatcttcaccaattcgccaagacgactgtgattgttccttatcatccaaatttgatccacaatgcagcccaaataagttagaatttccttcctttccactccagccgcctttacttcctgaaccaagttcttcacaaaatccaacatgctatccccaggaattttctccactctaagagggaatttgccttacttcctgaaccaagttctgcacaaaatccaacatgctatccccaggaattttctccactctaagagggattttgcctagaaaccagatggtttttgccaagctacagtctctgaagagatgtaagcaattttcctgttgaccactacatagaacacactccttgtctccaagaaaaggtaatctttccttaaccggaatcgcattgtttagaactcgccaaagtaaaattgcaattctaggatgaagatcagaatgccacaaccaattccaaactggctggttctcttggaacctgagtttttggtccacaaagtatgcacttttaactgagaagccgccatcttgtttttctttccaaattaatcgatccttgttaggaagagggagcctaggaatttctagaattttttcccccacttcctttccaaaaaattgtaatacaatttcctcattccaagcattacccaaagacaaatctgctaaagttctagcagtaaatccccttgatctgagacttcccatcaaacttttaaaatcattgaaatccaaccaaggaatcaaaggttggttccaaatatcaatggtttcccctccagccgatatagacaaagaccccttcaaaataatgtttcgaacatcaagaatacacttccacaaatacgaatcactactcttttttttcacagaccagaaattctcttgtttgcaatatttgcccagcaaacaatctatccaaggcttgttccttccctcggcaatactccaagtcaactttgccataaaagctctgttggcgtcttcaaaacgcctgatcccaaggccacctgatgatttcggctaacagattgaatcccacgctttaagagcaatgtaccttcccttgttaacttgaccttgccacccatactctcttaacaaggcatccaactccctgcaaattgaaattggagctctattcgtagacatcgcgtatattggcatagcagacgcaactgatttgattaaggtcagtctccctgcat

SEQ ID NO: 240300 - DNA, 610 bp, Cannabis indica
gattaagtatgacttaagcatatctcgatcacaggggtcggttctgagttgatttagtttataggaaaaataaatttttggggtctttattataaaaataaatagtcttttaattttaaaaaatatgtatatttataaaattgttattttttttatataggctctagacgtacgtttaacccactttaacttataggatcggtcctacttaataatattatttttgagtgcacatatcatttaattttttaacacatttaaattttacctatgtgtaatatttgtgtgtataattttaattgatattcaaatgatgtaaggttggccacctaatccaactatatgaatatatatttatatatattgggcaattttgaccacaatttatttttcaagttgtgttaatggggccatcttcaatatatccattattagagccaagtgttatctatcctttgcatgatcatgatgtgtgtattaagtttatataatataattaaaagtttgtaattatgaacactattatatgatttcaaatgttttaatatttttatatatataaatttaatttgagttacatactttgagggatattccaagctaggtctag

SEQ ID NO: 240301 - DNA, 1410 bp, Cannabis indica
caaatatgctactaaaaaaaaattagataataaaatttcatttacaaattatataaatagaaataaattagtgttgggattaaactcaattaatttgtcaaagtcaacagtttcatcttatcaaatgaatttgaaaaaaaaaactaatgttagttataagtgatggctttgtcattaacttaaagagagtcccaccaatatttataagggatattggcagctaaaccacctgaattttacgttttgtaacacttaaccacaaaaaccaaaattttggtggcaaaatctactgaactcccattctattttctctgtacccctccatccaaaaatcacagttaagtgctacggtggactgtccacgtgtacacacttgcacacgtagaaaatttttagcggtccacgtaatattaattttaaaatattttaaaataatataaaattaaaaaataaaaataattttttttctctttctctttttctttcttctcgtcagacaccaccactacccctccctaacccttattcccgaaaccaaaaaaaaattaggagctaaccagaagaagaagaagaacggtaacaatggcatcgttgtcgagcagtggactaatggtcaagctacaccccctcgttatagtcaacatatccaatcattacaccagggttaagtctcatatgcaaccaccacatctttcttgcgagtgtcacgccaacaacaacgccaatgcctcctctgatcgagcccctttttcatcgtcgcctccatcatctacaccccaagggtctacgactacgttattggagtccagagaggtcgtacgatcgagatcttcaacaactttgagcttctctacgtttccaccactaattccctcgaccgtgctttccttgagaagcaagaattctgctccgtgcctttcttcttttcccaaattcattgcctttttttggtttcatgaataagggttagggaggggtagtggtggtgtctgacgagaagaaagagaaagagaaagagaaaaaaaatattttttttataaattattttttaatttttaaattaatattacattaaccactaaaaatttgccacgtgtacaaatgtatacacatggacagtgcaccatgtcacttaactgtgatttttggacggaggggtacagagcaaaacagaatgggagtttagtaggttttgccaccaaaattttggtttttgttgttgagtgttacaaaacgtaaagtttaggtggtttatgttagagattttattaaaatggaagaaaaatcaagatatatacaactcaattgtaaaaataatagaaggacaataaaagagatgattaaatatatgttacacaatacacatatatacactatatatattgcaaatatatatgaaaggtagaagga

SEQ ID NO: 240302 - DNA, 594 bp, Cannabis indica
aaaaaatattttagtttgtagtcagagtagtcaaatactccatgacaaggacgaataacaaaggagagataggtccttaaaaattctagtaaacaaataaacgtagtcgaatcaagtaatataattataagtataatattgttttcacaaagactatagttaagtgccaaacattaaattcctaaattctacttggtgacaataataataacaaagaaagtttaaaatctaaatgataagaaaacaaataattaaaatccaattaacaatgatcagaggttagggtgataaatcttaatagaatctactttctatgttttaatataatttaatttcaaattttaattttcatgtgatatcgaatttactaaagaaatttatatttgggttagaacatataaatctcaatctatatgcaaactttctactttttttttgtgataaatttaaacatatagaagatattaaccataaaatcctaaatgctaaattgaccatagtactttcgtccaatatcgaaatttatgtctattttactatagaataatcaacattcacttttcaaattttgtattgaaatcataaacaattaat

SEQ ID NO: 240303 - DNA, 821 bp, Cannabis indica
gatcttaattcaatttctatacctctactatgaagtgtgaatctcaccaaatgaatgagcaatgttgcttttgtacttttagtttttttttttttttttttttttctgaaatcataatatatagttagattagatactacacttattaatattatgatttgctttctttgtgttaggtaaaactctagagttcggcgtgatataggcaattcatttcttatgccatcttatagagacctttcctaaactctctagtttctttttttatttattttattaaccatcataataattatataggataattttcacttatgtacaaaataagtaaatcatcaatcaataaatatttatatggaaaggttttaggaaattgatgtggcatgtctaagattcttattaccttccattcctttttttttttatttttgtttttaatattttaataattttgtatttttctatatgtagaccaaaagtcatatatgtatcatatcaatactatacttattgctaataatttttattttcacaacaatgacaaatcccttcatatatcatctttaatattatttattatcaatcataatatgtagttaagaaaaataaactatctattttttttatttcttttttatactaaaaaatcacaaaaatttcttcaaaaaaaaaaatcacaaaaattgacccgtgacattctaaaatcaaaaactatcatttctatcatttatatatattcattaattaatatcaatatcaatatatatatgggtgcactcttaatgggtattacccatgaatggtaaaattagaaaattttg

SEQ ID NO: 240304 - DNA, 1227 bp, Cannabis indica
acggttgggttcgatttttgggtggtttgctttactaaaaaaaaaacgcaaaagaagaaggaagaagaaaaagaaagaaaaagaagaagaacaacaaaaaattaattatttttaaatattttaaactatttttttaatatataaattattaatttttttttaatttttaattttttttaaatatatataattattttttaaaaataatactacgtggaccactaaaaatttgccacgtgtacaacggtttacacgtggacagtccaccgtggcacttaactgtgatttttggactaaggtgtgcagagcaaaacagaaccagggtttaggtagtttagtcgccgaaaatttagtttttgtagttaaatgttacaaactgtaaagttcgtttacccgccaatatccctattatttatatatatatatatattttagtggaagatagtggtattagtggaagatagtggtatcgcttaatgggcagtttttattggagaggggtctttgtgtaatgacttcgtatttcaaaatgatgttattaatgctctacaggagcttgcttcattgaagtattagagatttgctctttcgatccccttgttactcttcatcagtgttctacttctaattctaatggaccctgctagtgtatgtgatttatttgaggagtcagttcagatctcacaagatgatataacctttgccctcaacccaggagaggtggatgaaccccaggaagctaatcaagttctgctaggaaaaatcattagtcgccatagactcgagaaatcagctatacaaggttctctcaaactctcatggaatgccataaagggatggaaatggaaagaaattgagaatggcataatacaatttacgtttgcaaatagagaagatgctttgaatgtaatggctcgacgtccctggtttgtttgtggggcgttagtggtcataatgccatggccggcatggttatcccctgctgaagtaaggtttgacaaaaccccgatatgggtgcgcattgaaagtatccctcgtttctattggaacctttccaatctaaaagagttggcctccaaagcctcaccagtatatgaactccctccaggtgttgaagatgcggtggatatgagaaatctgcgattcagggcaacgatcgacatcaacaaaccgattttctctggttttttcctaagacgccaatgactcaaggatttgtggatacaa

SEQ ID NO: 240305 - DNA, 859 bp, Cannabis indica
tggtgttctggaagaagttttggaagttgcgtttacttccaaaggaaaaaaaattgtgtggtgggccatcaatgggtgcatcccaacgagagtctagttgaagtcaaagcatgtggaggtttcgttattgtgtccagtgggccacttggcaggtgagtctatcttgtattgtttggttacttgtcagtttgctcagaattgttggtgtgtgattggtttgacctttggtcccatggttgacggttcttttggggaatgggtcagatttttttttgctcgattggatgagggagagtttagtagggtgattatgttgtattggacgctttggtatatgcataattgacttttgtggaaggggaagaagaatgtgatggaggtttttgttagtttagctcgggtcactcttgatcaatggaggaaagctcataataaaaatctttttccatcaatggatacttggtgtcctgcagatggttctgagttgtggactacactagatgttgacaatttcaaggtgaataatgaagtatctatatttgaagaggaaggcaagtttgggctcggtggtggctggtattttgagattaatggagggtgttgtgcttcttgaggttgctgaagctatagctcaaatggaggtgttgtcgtggttgaaacgaaatttactaatggtcagtagcatcaagatcgattgtctcgcattagtccaagattttgtagtcctaaggtgatgttatctatgtttggaggtgttgtggaagattgcaaatatcttttgaattctttagtaatgtttcgttaaattttataaaatgatccactaatcgagttgctcatcaaattgcaagagcttctc

SEQ ID NO: 240306 - DNA, 1110 bp, Cannabis indica
atatagtatctatctttgatttatcaaaaacagtattggtagatgtactgcaattaaatgcagacttgaatggaacttcagtagttgactgctgagttcttgaagcagactgagatggaatgtggagttgatagagtccatcactgagggaacccttgagaagaacttggttcgtggtcttgtccttaatgagacaacaaagagagtcaaagaggagaaccacattattatctttagtgaactgagaaatacttagaaatttttagtgatgttgggacatggagaatgctttagctgtaaagatttggtggggatagtggtaggaaaactgttagaaccaacatgaaaaataggtatagtttggccattacctacagtcacctttgcctttcctttgtagtctgttgtgttttgtagctgttgcacatcggctgtgagatgattggttgcaccagtgtcaagataccaggtgccaggggactcttcagaaattgcagattctgtaatatgggcttgaggattgtcattagtcgaattagaacttgaagcaccagtagcttgtggtccagtgaaggtaatgtcaaatctgtggtagcacttttgtgctgtgtgacccgcacggccacagagttgacaaataggcctgtttccacgaccacctcgatttgtggattgacctctgcctccacggtatggtccacggtatcctcgaccccgagtagagccatttatagagagattagccatgttggcttggacagtttgtaaggccgatgtagagaactgttgaagacggacttcatggctatgtaacatgaattggatttcttgaagtgtcaatggttcagatctggaggtaagattcaccacgatcgactcgtactctgaaccaaggccaccaagaatgtaaagagcaagatcttcatctgagatttgttgtccagcggcagcaaggttgtctgcatatcctttcatcttaaggatatattcatcaattgtagaggaccctttcttggtggattgaagaagtccacggacttggaggagtcttgctcgagatgtagtagcaaacagttgagcaaaaacagtccagatctccgacgaagtgtt

SEQ ID NO: 240307 - DNA, 1968 bp, Cannabis indica
taatctggattacattgaaacagagttttatatagggcataaaacccaacaagatctggatttagtcagattcttccaaaaccaagagtccgaatcctttggttcacattctaggaagggcttacccttcaggtacttagcttcaaggatccgacaacaaagagattggttgccagttagaaggttccacccccatttagcaaggaatgcctgattcatttcttttgatttccggaagcccaatccccctaaagatttagggaggcaaactttgtcccaggctttcagataaagaccacggttacctttctcagaaccccaccagaaatcacgcaccaaaccatcaatcttagacgcgagccgattggataacatagtagcttgcatagcatacagcggaagagagagtcccacagactttattagcgtagctcgttccgctttcgaaagagttttggctttccaaccttgcagcttttcagagaggttgtccaggataaagttaaaatctgcatctttctgacgagatctgaacaggggtagccctagatatttaacatttccttccggcgagccaattcccagcatatccttgattctctgcttcataccatcaggagtgttcttgctgaaaaatattgaagtcttcattttatttaccttttgtcccgaccaaaaacaaaatttctcaaggcaatcccagaaacccctagcctcctctagattggctttaccgactaggataagatcatctgcaaagaatatatgagatataataggacctcccctactcagtcttatcccattaatattttcgacttttgggcgtcctcaagaattctagacaaaatttccgcagcccaaataaataagtaaggggataaagggtcaccttggcggaggcccctagtaggagcgagcttgccaatagatcccccattcaggcaaatattaagggaggtggtagaaatacactgagtaacccaagtacgaaactcaaggggaacaccaaaacaatccagcacatggtcaataaatccccaactcatcctgtcataggctttcatcaaatcaatcttaattgcaaacagaccttctctaccttttttccgattgaatgagtggacaatttcctgagttatcacgttattatcctgaatagcccttcctggcagaaaggctgcttgggtagggcatataagcttaggcagcagcggcttaatcctatttgcaatgattttagagatgaccttatacaccacattgcagagggagattggcctaaagtgatttggtctcttcggattctggaccttaggaatcaagactatattcgtggcattgactcctttatgcattcgccctgtttggaagaagtccgaaactgcatcacagaagtcgtaaccaacagaatcccaatagtgtttgaagaaaagaactgacattccatcaggacccggagctttgttactactcatggcaaacagggtagtctttatttcctcatgggagggcctttttataatctcagattgatcgtccaacgacaacctatcctggactagcccactacagtttagctcagggtcattttccgttccacagaagatgtcttggaagaactccataaattcttcccaatgagctcccttttggaaatccatatgttgtctttattgaggatgctctcaatggcattccttctacctttaattgaagctgacaggaagaagaatttggaacacttatccccctccttcagccaggaaattatagccctttgtttccaatacacctcttttctagctcgagcctcatttagagaggtacgaagatccttctccgttgcccacactctagatcccacaggcagtttctgcaagctatccaaccttctttcaagatcacgaatttggttgtcaaacttaccatattgagttctttgccaatgcataagagcaaccctag

SEQ ID NO: 240308 - DNA, 792 bp, Cannabis indica
gtgattagactaaactgatccctttgttgagtgaatggaacgctaaaaaattcctaaaccttttactttggtcttaaaataatctgcaactgacattctgttgtttcctcttgtacaatataggtaagtggaaattaggtgcagaattttttcgaaaggagtttaccttaaattacttgatagcaacgtacagtaaaccacaggttagtgagttttcagttgaagtagaatcttatcataagcctatagccattatttcctttgtaaatatatttgatcaagttatttccttaccatttaaatttaaggtttcaattctcaatggaattgtcatgggaggtggagctggagcttcaatacatggtagatttcgagttgcaactgaaacttcggtatgtctcagtctgacacacttatttgttctgcatcctatcctttcctgtatgtcatctagctggaattttcttagacaccatgtaaaatttttaaatgataatgtagatataaatatcttcaaagtgagggatctaaatttggtgaataatatgagaactttttgcgtggtgggaagctgatgcctttattttaatactatttctaagctttttggcttgtaggtttaaagaaacacattgagctatatgattctttgaaacaacttttcaaacagtctttgctttttttttatttgttattgggatttgcttttccattttcacaacataattaataagtgaagggaagaaaagaaacagttgtattcagaaattcaaaggtttatgagtattttag

SEQ ID NO: 240309 - DNA, 1054 bp, Cannabis indica
tttttattcttggatgattctttcgagtcatccttctttttcatgttggaaccactaggattgttaacttctatcgagactttgcttgttgttgccacggtactcgtgcggggtttacttcctgagccagttttcaacagcttcatttcatttcttgcttcctccttatgcacagatatgaatgctctttcatttaattcattaatgtttctcacagagggaccctggagatcaccccataatttaccttcagtcgtggacaagtcagttgtttcttgcttaaagtactctcaattgaatactatcatttaggtttctgacttttgtagaggctgtgctaaagcgacttaaataagccttaagtggctcgcctggttattgttttatattggttaaggatgatgcttctggtcgtcggtctcttgtagcttaaaattaaagtccctagacaattgttcccaggatgttatggaatgatgagtaaatttgtcgaatcagctgctcgcagctcctgttaaggaggttgggaataaaatgcaacgcaaattattcgagacattactggctcgcatgatagtgttaaagttgtttaagtgagcgactgggtctgtggtcccatcatactgcgaaacatgtgggttcctcattcatggggaaactcagatttaagatatcaggatggaatggctcggtttcctcatccgagtcatagcttggcaacttaccttgttctccctcttgatattttttgaatttatcctctagtttaactattcgtagttggatggggtccacttgttgttgatttgcattttgattaagttgatggcgcaaattatgtgtattttggttcagacgcttgcgaagatctggctgtctttgatttaggtgatcgcaaagatcgggttgccttcgctcataattacttacagatcttgtctccgagtaactctcggattgatagtttcatgaattgctcatgcttacttccttctcgcgtttacctacttaaccaactgtgccctcgagacattgagcgtccaaagctttaact

SEQ ID NO: 240310 - DNA, 1663 bp, Cannabis indica
tctgtaaacatctggctatcaaagagttttgccattatctgaaatgattttgtgcgggaagctgaaccgacatattattatgttcttcaccacaaattccaataatttttttagaagttgatcgttgctagaggctcgaattctgtccactttgtgaaatattcctatcgcaaccactgcatactgtacccctcccttgcccttgggcagttgtctgatcaggtctattccttaaagagcaaaaggccaaggactttgcatatgagttagcttattgggcagtgcatggggtatttttgaaaacttctagcatttatcacatttctttacataagcctttgaatcttccatcacgattggccaaaaatatccttgccttagtttttctttaataggctttgccctgctgtgtggttgccgcagaatccatcatatacctccgacaagagccgcacaacttcttcttttgttacacatctaagtaatggcatggagaaacctcttctatacataacaccttctactatgatataccgtgcagctttcctcatcactttttgagcttcgcttctttcatttagaagttctccagtatttaggtagggtgctatgggtgttgtccagtttggtgttgtctctatcatttcaatttcttctgcacagttgatgctgggctcttctaagaattgaatagggactagattggcctttctgttactatgctactcgcaagtcagggtaaagcgtcagcagttgtgttttcttctcttagaatttgcctgagggtgtaagccttgaattgtgccagcaagtcttgtatcttgcttagataagccatcaacttctctccctgggcctcgtactctcatgaaatgattcactaccaattgtgaataactacaggacctcgatataattagcatgcagctcccgagaaagttttaagccagtaatgagggcttcatactctgcttcattattggaggctttaaacccaaatttgacagctccgtgcatatgttgctacccaggtgtgacaagggcaattcctgcaccagaaagttcatttgtagccaacccgcctacgtgcaatttccaagtaagtctgtctttgttgttgtcaagcaggggttcttgtaccggctctgggttatcccttatgctgctttcttcttttcctgtgcactcaaccacaaagtctgctaaggcctatcctttacctactgttcagggttggatgattattttgtactgacccaactctattgcccatttaagtaaccgtccagaggcatcaactttttacaatatttggcacaatggttggtcgatgtatacccgaacaggatgagcatggaaataaggccttaacttcctcgttgctgagattaggtagtaagtgaggttctttatcaaatgataccatccctcagctttgaacgagccttttgctgatatagtagacttgatgatggatgttgttctcttctcttatcaacacgacacttatatcataatctgtaacgactaagtatattcctaactcttctccatccagtggtttggagagtacgagaggctttgaaagttgtctttttaactcttggaaagcgttctctcattcttccatccattcaatttttttgttacctcaaaggatgtt

SEQ ID NO: 240311 - DNA, 1464 bp, Cannabis indica
agacgcaccagccccaccacccaccacgcaccagccacgggaagaactcgccattttttttgggtcgtctccttcgaagcagttgctgaaaatcgaaggccaaaggtgagagttttggtatttattttgtgttatgtttatttctaagtttagtggagatctttcatatagtgctttcataataagtatatggagatctttgttcaggtagtgttttttgatctttgaacacccctaaatggggaggaagaagcaatatgttggaaggaagagttggcctattcctaagaatgatgagaatgaaattctattttatggtcatttttttttaaattcctttatgtctctatttagtttaaaatattgtttctttacactaaagagaggtgtttttggtcattttggtgatgttggtgtggtttaactttatctttttgtagtaattgcacatgtatctggtatggatgtgtgtgtttgagcctagctttagctttgttatttgattctttgtattgaattgaataagttaaaagttgtagggaccattgattgtttagttcatgacaaatgcttatattatattctattattgtctttgtagagcccactagcacctttttactctaaaagtgcatcacaaagggacaattgattacacacttaatattcctactagttacaatggtggggtagttgagtatgttcgttgggtagatttgaaacatatgactatgtttgagttagagctgatagcaagggatttagattatgtgaaagatactacttcaattactttttatttcaagtggccagaatgtgtgacattggagtgtgtgaccacagactttgtgttaactgagaacattgcagctgctttgaaggttaatgatcatgtgattgagtgcttttttagtcattcacaattaaatgaaaatgtagcttatgaaagtcaagcctcttttcctaatgtggttgagttgggtgatgtggctaaggatgctgggcctactttggatgatgaaaatgtgaccccaatagaagaagttggacctagtttgtagacatcccatctacaaagtgggctggaaaccggagagaattcacaagagaagaggtgtgtaaattactatattgtaatcttctcatatatatactaattataatatcactttcttaaattgataactaattttcttaattttataagaaaagtattttattcaattttgattgttgtaaagtttgtagtttgtagtgatgattcggctaaacattgattttgttccaagtggatatgtttgagatcatctttttttaggggtttttatttgatgcataatattcattgattagtatataacttacaaggcacacataatggttatgtcctataagttatattgtatggtttatatttgtgttgttgatattttaaatcaattaatgtaattgataataatgata

SEQ ID NO: 240312 - DNA, 1643 bp, Cannabis indica
tagaaaccatgaaattttgcagcatgatgtgagaaatgctagaaatcagcctgggacaggtcgaccccaaggcgtccacaaaggcctaattacaacgatagagatagtacagtcacttacaagagtaggggccggttgtgtgtcaaatctcttccgaaggagaaggccaatgcaagaagagtcacaagaaactggctcgagtacagatctaagtggatcaaggttgaggacccgcgggcacagcagatcaacccaaactgatgcccatgacaggcaaacgcgagatgaaggtggatcacgacattattatcacggtgatcgagagagtattagtaagtcttaagttaccaatctgaaagttacttgatgacaagatctgtgagtaattatgatcaaaggcatcgcgaccctgatctttgcgagaaactaaaccgaagacaacttgacttacacgagcacttaatcgtaatgcaccaggtttgcgatcaattaaatcaaaatacaggcgggcaacagctaataggacagtagcccgtggatatgagtaatacagttagaagataattatgttcagaaatatcagggtagagaatatggaaaattatcaggatacgactcagacgaagaaatagaaccattccatcctgatatttgaattcataatttcctcaaggattcaaaaacccacatgttgcatagtatgatggtacaaatgatcctgtggcacacatgaacaacttcgataccataatgtgagcaagcaatattttaaacaacttacaatacatattattcccaacctccctaacaagggttgcaagtagttggtttgacaaattcactaaccattcaattacttcctgaaaataattatcaaaggacttcgaatctacaagaattgtcatctttgatccttattggtgatgcaccttcaagtatttgtaattgtatttctagaatggtggcgatattattcatttccaaaaaattacaagttagtgttttaggatcttggtacgagaaatctcttggtattagtgtatttgtgacttcataatctgtgtataagcatttgtccacaaattttttattatagtaaagtaccaccaataaaggttccatgattctgttatatgtttatggttccatgatattattatagaacatattaataggcttagatagaagcaatcaaatattacattagttatatatttagtatctcatcaggtaggataacttactagttttttaatttgttactgtgtgaatgatattccaagaactgtcattaagtttcttcttcttcatcatcttctttatcttttatttttttctatgtacagagcttgaaggtaatatctcactaatttaatggtgaaaatacgaatgatcgaaggaaactttattggttaatagtttgaaagtttatttcatgagaaatgattggttgaatctcacggtcgaaggtttgtctcaatagcttcgagtgaaatttcaatgatgatttgcttcagttgtaagggtgcataaaatatgggtcaaatcatttaattcagacaacccaacctaatttttgtaataaagggttatgttaagagtaggctatgactcattggactaaaaagtgataggtcatataa

SEQ ID NO: 240313 - DNA, 1378 bp, Cannabis indica
aattttattaacaaagaattttacacatttttattgacaatattaaccaaaaaaaaattatttacaaaaatatatattatatataactgtagtagatagtagctaactaactattatattatattatataaaaattaattaaataatatatataatataaattataatcatgtagtgtactatgtatatataatttaataagaactaaacaaacacaacaaagtgaaagagatacctcggtactcattagagagcaagtgggcacgggcggacacgggcagggcacggccagacacgggcaggggctcgggcggggtacagacggttagatcttgaaaaaacagaagagagtagaggaagctttggatgttagggatgaggtagtacctcgtcagactgaaccgatcgctgaaatgagaccctaaccaaagaagaagcacccaatcgccgccgggagggaggagtttctatttgttagggtttttaccttttttaggagaatagtaaatataatattgttgtcttgtctgatagtgatatgagatgagtgaatagtgatacaatattcacttttttaagttttaagttttaattttattttaaagtattaaattttaatattatttttattgtaataacaaaaattattttgatttttttaactttttgggtatcgggttaaaacccgactaaagaaaccctatatttaaaaacccaaactcgacactcgtgtggagtattttcaggttggactcgactcgaccacatgggttttcaattttttggctttttttggtagcgggtcagggttggtggtcgggttttcaagtttgcgggtctgaatgttcagccctagtcccgcgggtaagctggtaacgaacaagtcaaagaactcgtgcaatacaattaagctaaagctcaaccatctcaggattgagatcaaatgatctatgatcaactaaatgacattgacttagaaaagatataatggtaaatttatgatatcttttctattgtcgatatcggctcagcccgatatatagttaatacatcttatcttagtttactttactaatgcccttgaaaagacatttcacttatccaagtgtaaatctagtatactgataaatcgatggactaaataaatttgaagcatataattacaaatattttctactgtgatgacatcactgtaattgtgaatatctatatattcataatttaataaaatttatatattaaacttataatcacgttagaaacatgtgaacaatgcatatgacaaggtcaagatatgatttatgatatttcttaaaagtaaataacattagggtaaatagcggcataagtacgcaaagtttcaagtttgtaagtgaca

SEQ ID NO: 240314 - DNA, 1020 bp, Cannabis indica
tagggttcaacttatgattagagccagtagatttttcattgtccccatcatagatatgattcctggtgcctctgttactggcactgtatctctggtgattcaccatagcattctaggtcttctattttgactaaccttttggacgggcttgtaatatttcacacccacttgtggttttcaaattggtggcgaaccgagtctaagaagtgtaaatatatgcgtgttgttttggcccgatcgatattttgaaacgtttgtaaaaatatagatcgtgttgtgctatgtcaataatttcataaaataattttgtgttttcatatcattctttactcgagccagtttgttttttggggtatttacataaacatgggaaaaataaagctagtttagataaaagtggtaagaaaatttaataggaaaaaatatggtatttaaaataaaaatttacatatataagattgaattaccataaaaaatattaaaattcccttcatatttctttttttaaaaaaagcaaatgaaactacagtgatcgccggagttatcactggtgctggaaaaggcgtcggagtttgttgttggcaccgaaaaaattgctggagtagctgtcggcgccaggaaagtcactggaattgctgtctgcactagaaaagtcatcagaattggcattgtcgccaaaaaaatgaccaaaaaagtgttagaaaagtcgtcgaaatagacattgctgccgaaaaaatcactaagaaactagtttcttcatcaagaacccgatttcttagtgatttttccggtgatttttcgacgataatgccaattctgacgacttttttggcatcagcggcaattccgacgattttttcggcaccggcagttactttagtgatttttccggtgccggcagcaaactccggcgaattttccagcatcagtgataaataaaattgcctaaacaaataaaaacattaaatataggatttgaaaaactaatttacatatatatgacttataaataccataaaa

SEQ ID NO: 240315 - DNA, 892 bp, Cannabis indica
caaaaaataaaaatctaatactaatatatctaaatccaaaaatagtaaaaaaaaaattgaaaagtgaaagtggccaaagtagcttctaaatccatgcggtatagaatttcattgattgacttccataacgattccattattgtttactcgttacaaaatctttaacttcttttaccttcatcttcaaatactcttcaatcttcgaagaaacactaacaaaaaaaaataataataataaattgatattcattttaatttaatgtaattcaattaaatttaaaaagacattccaaaataacaacataattaaaaatacttaaaattaagaacataccgtaatctatcaagataagttccctcaattgatttccagtaaactttttgatcgagttgatagaatctaatctcatacaatcctaagaaacttatagatgatacgacttgccactctaaatttcctttgaaaacagttagctttgcaccatgatcacaaacatcttcataagagaggtctaaatgagcatttggctcaattttaagtatgtcaatgtctttattttttcttctaattcttaagaaaagtgtaaaatcagagcaatcattgtaacacctaactgtctctgccatcatattccctgtaaacatgttcattgctctatttttaattagagaataataatagtaatatatagtgaaaatataatcaataataaaataaatagaagagataaatgacaagagaacaatatctagacaataatgctgaaattgctgaaattcgtatgtatgtatgtatttataacatgtataacaaatcctaatcctaattggaaacgaataatttcaatttaaatttaaaattatatatcgttttaattatcttttaaatata

SEQ ID NO: 240316 - DNA, 1390 bp, Cannabis indica
aataattaataaaaaaatatatcttgtatatcatctacggctacgtacagaacaaagcagagcattgtatttgttttgtattgtagttgaatttcgagtttcgagactaggggacccaactgtaaatgatgacatggcaacaattctatggacgggttaaagttatttgcatggtaatccaacactatcgttatcccacgtcagtggtagtgtctgacgtggcaccgacctttggcattggcattcgggagaggcatgccaagtgggtccttgtttttgaggactgtatccacttactttgttgattgggccacataagcacgtagaaacaaacgaacaagtagttgggtgggagttattttaaattaataatttctcggtataaatatttaaatttaatttttaattataaataaatagttaagtttaatttttaacaataataatatttaagttatatttttggaactttataaggaactcaagtcatcatccaagtattattttttattggtatatttaaattattttttttaaaaaaaataaaaattcatgatatgaactaatcaaggattgtcacatgacaatttacttaatatttacctacagagtttcagaaatataatttcagtattattaccgctaaaaattaaatttaggtatttatttgcaactgggagttaagtatttatatcgcaaattactcttttagaattgagaaaggctaattgtgggtgtaatatcgttattagtaaaatttaatatcgagtctcagtacttattttaatttaataaagactataaataagcgagcttggcacacttgggctaaaacaaactgctaacttatcaaagttgacaaattgacttgaagttgctccataacaacttatatcagatatcactaagtcagttgtttctactaatcctaactgtttctcctatttatcctcattcggttatttcagtttagatgtgtcagataggttagttaatttagttgagtcggttggttcttgtcctggtgctttgtatttgttaaattgggttgatgtgtcacccctgcttttcctcggtatatatagccttgtaagttgttcttttccattcattcaataatacaatttcattctgccttttctcttttcgcattatggtatcagagcgggaaaggaatgctttcccttgatcgagcatgtcctttcgcaacctctcgccgtgttcccatctccggcgacgcccttgttgctgtctctactctgctcttcttctccgagttgtcccctcggcgcaaccaatcttgctatcctgaaatttttccctgttgatgttttcactaagtcgaatgaagaccagaccccatccaaatctgaaatcggagattccactc

SEQ ID NO: 240317 - DNA, 1110 bp, Cannabis indica
cttgtcgtgctaaagatccttagccggccccctaagctgctagttgccagtgtctggctattctcacccccaaatcttcatggcaaggcttgtccgccttcaggtaggagaaggtttatcctagtcctagaagaacctgattggatcatttatctataaaccctgtctgatctgtcaacgagtcacccttggagaggatctttgatgagattctgacctcttttggaagttctttcattcaaccaccttattaggtcactagtttctctattacggcgatctagttctttctggtaagatcagaggatgtactcatggtcatccatcaatcttagaaatttgcatatctgttgtgtgaatgcatcgcaactaacaatgcatggttcttcagtttggccaactttgtagacggcctctctaagtctggccaactcgaggtcttctcccaagtctacatgaggctcactaatggttgagtcgccaaatcctagccccgtctttttaacataataccaggactagatccaattgtggtgcttaggggaaactccatgttggccattcctttagtatgagacgccagtggagggtcctcgcagggtggtaaaggttggacattgagactaacagggttgttcgtgtcaacctgactagttgtggtagccaagtttgcggtgtccgctaggttagcagggttggccacattcgtttgattcatggagattccagttgtggctagaacacgaacattaggattaacagccatagggttttgaggaagacttcatgaggcaaaatttgtagttggagttctccttgtgttaactttggtgttagatcagataaattgacaaagctctcaatgaaagcaccaaactattgatctcaaatttggctaactgatagcgaagtcataattattatttgatgctaccatgtgcacacaataagaacaggaaagtaaaagagaacataatattcttatagaggttcgacccccttagctagcgggcaatgaccgtaccccccttgtagttgtattaaatgccagaaataataccactcaggtcataagggttgtggattttgaagtggctatcttaagattat

SEQ ID NO: 240318 - DNA, 674 bp, Cannabis indica
tagcttaatgatttgaacaggacccattacaaaggaaagcacaccgagcagagcaaccatggttgtccaagttgcaatatcttttctttcacttgcaacaagcaattagtcactgtttgaatcaaaataagaacactctttctaggactttgactccactataaatgataccaaagccacaagataagaagctagtaaagtaacaaacaaatggaatgagagaggaaaagctagaactgagatcacttaccagataaaaagggtaagcaaacagtgaaacgatagagttgttgcatgacataaatacaaacaaacacacatatattgtatggatgccaagattcattgttttctaaattataaactctaaaattatgtcaaaacatgttaatttaaaatgcataatgtgtagagaaagatagttactgggtggcagaggcagaatgttcttcaagccagtttcttcttatgtgcttaagatagttaagaatcgcattatgagtgaaatctaaaggtgccattgcccaagatggaagctctcaaaacctcactatctacctaatggaattttaaataaacccatttatctaaattcttcatatacaattatatatgatatatattatcctgcctgtttatagaagcttcagagaaccatccttctgcaacattga

SEQ ID NO: 240319 - DNA, 1890 bp, Cannabis indica
taatcttcttctattttaaatctgaacaaataaaagataacaagcgtaaaaatactccaaacacgatttaaacaaaattaaaaatatactaaaattaatactaaaaataacctaacacatatcttcatgtgaccatgcaaatcaatctcgatgttttattaggaattgtatgagtctggctctgaagtctggagtaagttttgtgcctatttgtactttatgctccaagttatctgggttgatctgtatttcatcgaggtcctccatttgtggctcgtcaagtgtagggtgcaaaacttctggctgtagttgctacatggtcattgacttttccttgagtgtattctggtaacaatctcttgcaattttttgaactccctagatttctttgataccccattttgtcgggaacctgatgccttgatggtaagtgcatggtacaacatgcatggcatggattcaaggttgaccgaggattacattgtaggctgaagggtgtcgatcactaggaatctagttttctcattcacgccctcagcgtacacaggtagaatgatttccccaattgtgtacttttgctccccaatgaaaccaatgaaaactgtaggctttctaattattgaacttccgtcaagtcccatttccctgtggcatcaagaaataaaacgttagctgagctcccattatcaatgagaactcttttggtcacacaattggcaatatataatgaaataacaagtgcatcatggcgagggttaatcaaatttgaggctttattgttaacgaagctgacggtctgtgtcgttaagtgaaatttgactgattgtggattggctgcttctcaggtgtgtcttttggtcgttgagtatgtgactccacttatttctgatccccccgagattacgttgattattttcttgtgaaggtgtggctctggtggtgtaggaggtctattgtcaccccctttctcactttcagatgccatggtcacctttcctttttttgtcaaaagatcttttaggtggcctcttttgagaaatccttgtacttcgaaccttagagcaatgcatttcgatgtggtgtgaccgtagtttgaatggaagtcacaccattttgttgtatctcgcttgtttagtggtactttggttttttttggccatcgtataccatttcccatgttcttcattatggaattattttgagtaggttgaacatttagattgtagtctcgaatagcttgtttatttatacttgtaggctcgtgagaattgaaagacctttgtctttccgatccctaccttcctacgggatatggctctagcttatagtcatagtgccttctttcaaccctcttactccttgaatctcgacgatctgatgtgaatacatgggaaggtaggttggcttcatcttcttcccattttatttgaggccatgcctttgccaaaacatcttccatggtacgacacaggtacttagtgagctctttgtaaagatcagactccatatgaaatcctttgcggaaggctgtaatattagtatctacgttggaataaggaatggaaactttctctctgttaaatcttcccacgtagtctcgaagtgattcacctcgcttttgcttgatgcgatataggtcgtctaaaagtttctcgagtttcttgctgctagcaaattgttcaacaaacacatcaattagttgtgcaaatgaagatattgagttattttgtaaatcaatgtaccactatagggttaggctgacaaagctggacccaaaccctttacacatgcaagcttcatgcaagtcacgaggaattgccgtcgtgaacattctttatttatattgtgcgatgtgatcgttaggatcagtcgttccatcaaattgtttca

SEQ ID NO: 240320 - DNA, 1659 bp, Cannabis indica
gatagcaccaattaatactttctagggtgaatatcactcttaaccaatataatgtccttactgctgaatcgatacaatggttgtgtcgttatgatattacccaaacatatatatcataaacacaacatgcatatatatatatcacacatgcatacattcgcatatatataatatgttctatgctattcttaccttattttcgaattcaaatgagttggccgacctgaacggaatacctcgtgctggatggatgccctagtcacattcacgtatacgggtaaatgacacgtaaaaccctaatctgggaaacccaaacccctaactaagggttctgtgattaactactaataccatagtaccccaattaacaaggatttaaccgaccaaggctctgaaaatagcccgaattgatgaatccaacaattaagggaacctacacctgttctggctaaccggttttataggaccaatcaaactggttaatcagtttgcaccaggtaaccctagcaagtttgaaacttactcaattcgtgcccaaaattctccatactctccagaacacctatgataacctcaaacaatatattccaattggtacaagctacatacaacccacgaatcgaattctaccattaataagccaagtatgagctcacaagctcaaacttgctcattccacaaataaaccagcaaaaccaacaacaaatagttaattcaaacttaaaacaacctctggaaacatcctagagtaaaacctaacctaaacagccactatatcacaaagttgcataaccaagtcaaaattaaagctttaaactgcacaaagatttaaagctccaaggttacctttgattgagctaaagaattccagttgaaatcttgttgaatatgcagaactcaacaacaattcctagggtccttcttggttttgagagaaagaagaagaagaagagtagtattatctatttcttatttttttctttgattttcctatgttaaatcaaacctaattaattaattccccaagaaaatagttaatctaggctgaacataatagtagctaggtgtcacacaactaactagccacctatcacttaatgccaaattaccaaaatatccttttacttctacttaagccaaataaagcctaagggtaaaatggtcagaagccataaccctgctgaaacccgaattttatttgtcacaaatatttttccctctaagaaaaaggttctcgacttatctaagtgactcaaacgactatccatctcattttccgttatcgccgaacaaaatcataaaaattacataatgcatatataacttaaatagtacccctagagtttaataaaatctctaaaattgagaaattataactctaattctcatttctaaaaatgggacccaactcataataaaatcatgcataattataaaaataccaataataaatgcttattgcctttactaatccatattctaatatgcagtcattacactaattgtatgataatttctaaatgtgtatgaatttatattgaaccatgttgttttctgttattaatgttgtagtataattttgaatcttcattattggtctaacttaccttgttgttttaatgggacaaatcccaaaggattgccatccattagacaaac

SEQ ID NO: 240321 - DNA, 1341 bp, Cannabis indica
tttcaagttgttaaaaatttctctgaaatattgtaattattgaatttaaagactttttgtccagttttactaacagaagtctaacatgatcatgaatgaaacttcaaaaagcataatttggtacaatttaaagttcatgagacacgatttgatagatattaaagttcgaggggcacaatttagtacatggataattattgtattagtaaaattgatcggaattggattgaattcattgaatccaacaatctcaataatttaaagagaatatttgacagcctaaaaaatttataaaacataattgaatacataacaaaatttagtagcaaaaattctaaatagactttattttatcaagcatatgctttgtaaatttagtagtgattttattattttgttagagaaatctttcgttggagcttttagttgatgattgctattagtgtggaaacacttaacctacccacctacctaatgtcctcaattctcttttagagattacactattgtctacactttgactaaaaaacaaaatacaatttgctttagataagagactaacggtctgattaattgtgttttcaaaaaagtgtaactatgaaataaaaatctcaattagtgtgtgaaaatgtatttggatcaatgcaaaaatatttgtacatgcaaattaattacacataaatttaatacatatttatgagataaaaaaattaaattaattattcttatttgagatgagtcccacttaataaaaatattttgtgtgtggaattttatgtaatttatatctacatgtgtcatttttctttttcgtattgattattgtgatgttaagctaaaagaagagtattacctttaatttttgtgcccgaaaatacatgtcgcaatattttttaattttttttatagtggtgttcattatacttaaaatattatttttatgaatttttgaaaaattttaaatagttcacagtactgaaaataaatttgaagttttttaaacatgcgtaataagttaaaatattaaaaactttattttcgttactgtaaactatttataaattttcaaaaatttaccgggataataataatatttttcaaaaaataaatgaaaaaaaatgtctctattagaacactcctaaaagtttctctactctattttaaaaatacattattaaaattctattttctttattttacaacacacttatatattgccctatatatctacttttttaaatacatcattaaaattactatattttttaaattttattccttttaaatataatattaatgtatacacatatcctcatacaaaatatttttattaagtgggac

SEQ ID NO: 240322 - DNA, 1306 bp, Cannabis indica
gtggatacccgcactttgcgaatagaattgaattggattgtggggattggactagattggttattttatgagcacccctacttgcactcctcgttaaggttggacacttttgtttgggaaaaataaagggtgtgggaaatctgtcaaacaagcgtgtgattatgggtgttcataaaatagtcaatccaatctgtacaatctgatctaattcaatctacaaagtgcagatatctgctcttatgcggattaaatgttaattgacacgcaaaagtaactggtccaatatcatccaatctacatgtatttatataaatttaaacaaaattatatgtatacaattaacattttaatgtaaaaaaataacaatttaaaaatctaatacatataatacaaatatatttcaaaacttaatagatcaaatggataatctattcttacataaaaaaaaaaaaaatcgatacaatttaaaacaaaattataaatatttttttacatataatttttttcttcttcttttgaatttgttatttgttatttattttaatttgccgttggagatataaaatagcaataatttattttattttgttgtttgttacgtaaaaaaaaatatgttttcataaatattaaataataaaatataaaaaattaatcaatccaaaataatagatttaatccgcacttagtgcgaattagatgcactataaacaaaatagtacgaattggattggaagaacacccttatatgtattgtgagaaacctgcattttttagcttttagttcaaaaaaatgttgattttaaaattatacttacaaactgagaaatatcctctataccacaatgttcaaaggaacatcaagtcgttaatcacgtgataaagtgaatggaatactatttgaaaactaattattaatgaaagaagtatattcatcttatatatagtaatttattttcacacattagcaatgtgagactaacgatttattagtttataccaactattaagtcccattttacttgaattttataaaaaatatgttcaacttatattagaattagctggccaatatttgttattgctggcccactattttcggcccactttacttcatggactgccttctcctttgccttatatatacatctcaatgtaataacctaaaaacacttttggcatttctgccgttcatacaatgcagtaaaataaaagagtttttctcatctattatggtatcagacgataacaaccttccttagcccttgttcatcatcttctatggctccaagaacaaggaactctacca

SEQ ID NO: 240323 - DNA, 2145 bp, Cannabis indica
ctaacattgaggttaatttggctgttgaggtggatgcagagttggacataagagctgacttggatagagtcattttctaacacctcctctcaaacttagcgatgatcgagtcaccctaagtttgtctatgagaaaaagaaatcttgcattacaaaggctctttgtaaggcagtcgacaatttggtcacttgattgcacatatcggatttctaatgtttttttcagaaccttttttcgaacatagtgaacatctagttcaatatgcttggttctggcatggtagactggattcgaagcaagggcactagctcccatattatcacaccaagttataggtatcttaggcaaaggaaatttcaactcttgtaagtccatgatagttcgacagagatatgggcaagggccctatattcggactcggtgctggagcgagaaataacgacttgcatctttgaggaccatgagaccaaggtgtctccaaagtacacacagtagctttcaatggatcttctatcatcgggacaacacgcccaatctacatctgaattgccaattaaggtgagtctttcacaaggtttcacatgaagaccatgatgagatgttcccttaaggtatcgaagaactctcttgatagcactttagtgagtagtggttggtgccttgagaaattggctcaatttgttaatagtgaaactaatatcaggtcgcgtgtgtgtcaaatactgtagtgctcccactacaattctgtactctgttggattgtcgaatggctcaccattttttaaggataatgtctttccaacagacattggagttgggcaaggctttaagtgtgtcatgatgcttcgtttgaaaagatcattaacatattttgattgtgataggtacattctagtttcatcacgatccacttcaatgcccaagaagtaatgcagtgagtcgaggtctttcaatgagaactttgttcaaatctattctgaattagttgagtatttttgtgttgttccttgtaataataatatcatcgacataaatcaagatggaataatctaactttcagttttgtaaaagaatagtgaagaataagccatggaattcttaaaattctaaccgagaagtgtagactttaatttctcaaaccaggggtgaggggccttttttaaaccgtatagcaacttttgtaattttcacacatagttaggtttcttcttatcctcaaaactagcaggctggtacatataaacgtcttcttagagctatccattcaaaaaggcattgtttatgtcgattttccttacatcccaacttcttgctacgactatatagtgatcacaaatctcataatagaggctttgacaacagggctaaacgtttctccatagtctattctcggtttttgattgcacccctttgccaccaatccgtccttatacctttggaaagagctatttgagttcgatttatgtttgtaaacccatttgtttcccccaacgttcatatggggtgttttggggaccaaaccccacgttttatttttcaccaaggctgtattttcttcatccatagcacctctcaatccttcatgggccaatgcttcacttactgaacttagctcttcactgatgtgattccactttgcttgcccaacatacactttaggtttaaatataccagctcttgcccgagttatcataggatgagtaggagcaaggcttgttacagcattatcatttgttgccctttcttccacaacattatcaatcacctgttgctgagtattttcttgaggtggagaaccaacatcagtagtttcaatattaaaatcatcaaataagttattttcagcatgattattactactgttaggtgagttatgatcatattgtacctcgtgggcaccaagaagatgagttttattagcatcaatcgattgagatttgctatgggagtcagtgataaaaggattaagagtagcaaactagaatggaacctcaactattggattggtgtttcagacttatggatgttgaggaaattattcttgaaaggaaaatcagactcatgcaatatcacatttcttgatatgtagatccttctagtgctactaagacacttatagcctttgtgactatcactgtatcctag

SEQ ID NO: 240324 - DNA, 1673 bp, Cannabis indica
attaaaataaaaaactaaaatattaaataaaacgaacactacgtggcttgacacgtaacaatcacctagtatatatatacgcactaaattaattcgcacttcgcgggatgttatacaacaaatgtacaaattttagcataatatttatttgttttttttaattttaatttattttatgaatttttttagttatatatattggtagaaatttgtatcttgatttttatatgtaattaatattgttatcccaaattttattcacctgacgtggcatgttcaagtaagccaaagacaaaatatagatggagtatagccctgccagtagcataataggatctccatgtaagatatagtaaaatcgtcaagcagcaactgaaagtagtgaagcaagctctcaaggacttgtactaacatccctgtccagccaagagaagcctataggccggctagggtgagcttatagggcggttaggatctgtacacaagctggccgaccaaaaagtgagtttcggaccaagggagcttctgttcgaccaagggaacctggcatctacaagaaaacagtatacaaagctatcctccacttgcaaaagaccggcctccacatcctaaggttggcctcctatttgtaaggctaaggaacatgacctgtcagcccttggtaggagcatggtcggccaggattgacttggcaagagcatggccagctaggattgacctggcaggaccatggccgaccaggattgacttggcaggaccatggttggtcagacctcccctgtaggtctataggcggctaggattaacttggcaggactctatgtatagcttaaaacgtggacagtaagatacctgcgaattgggcccttaacatcctaacaaaccgatggaaaatatctactttcatggggcaatttagtcgtttgtatttaatcaatttaatatgtaaatatctaagggtttcattataaattaggcttttaggcttcctatataaaggccttaactctaacctagaaaacctaagtcactaagcctaattctagcctccaaaccactctaagtctgaaattctagtctcttctctctctctctctggtacacgcccaaaggactcctctcacttcatctctcacacacctctaaggctattcctctctcttatcaaagatcttccaacttgattcatgttttgtatccatatagagagttatattagatcccacctatagtgatctgaatagtatgatctctaggtattaatacaaccaaaaggagagtaggtcatcacctgggggtcgaacctctataaaaaatcttatctcatttactttattgttcttgttgtattacacgtggcaagtatcagatttatacaacttcgctatcggttgatcacttttcgaggtcaagagtttggtgctctcattgagagtgtgtatatcgtatctgatcaaacgccatggttaacacgagaaaaaccccagtcacaccatttgcatctttgggtctcccttaagacccatagactgtagatctcaatgttcatgttccagccgcaactagaatttctatggacgtagtagttgtggtcaatcctgccgctatagcaagcaccacgaatctggccaccacgattggccaggatggcataaactgttggaatttatttt

SEQ ID NO: 240325 - DNA, 1054 bp, Cannabis indica
gtcaaaaactgcaccacccacactgcgaacattcctacaactagttgtgttgaaagagactagtttatgaactgccatctgatctcatgacatccaaataatgcctcgtcccttgcgagaagaagttttctaccagctgcgagccatgagctagtaatactttgagtttttatttctcatgagatggtaattacagtaatagactaagtatcagaaactccaagctctgactttttgggtagttttctgaatgtaaaaaatgagctaagggagctctcattttataggtgaaggaggcccacaaatataggagaaaaatataaataaggtattttctatagttgatgatgatctaatggtgaaaattagcttcttgtggcgatggccaatttttggtgctcggcaggtcccgatacgggttacttggagcttatttttgtaactctcttagagtgaattatgatgaagataactttagaattacttttgtggtgtgagacatgattttatagagcgctttaatagcttcaaaatacaagttgaatcacatcaattagatacaaactgaaagcaatttagatctcagtgcccaggttgacatccaacaccgagattgacatctgacgttaacctagacattatataagtataaaaacgtccaagggtgtcctttgagatgcttaagtgatagtttaacaccacttagtccatttataggttccagcgaagctagtcactagttctcaggatgttgctgttttgcggaaacaaagactcgaaactgttaatttccgaatgagtcaatttgtcaaaaaattgaagttgtgaatttgattgttctaacttcatggatcattgtacttatgaaaatctagatagatggtcgaaacatcatcatattcaaataagcaaaacccaataaaccaggccatttgttgacctaggcgttgggccctttaaactgagcttttaggattctatttttgatactttcaagtcttttaaacttaaggacgaaggtctcttcccttcgtttttgaccatgccagattca

SEQ ID NO: 240326 - DNA, 2070 bp, Cannabis indica
ggctcgttggatagcacttagggcaatatgatgccttgtgtccgttcaacattgacctaccctcttgtctgggcttatcgaaaagcctccttcaactttatgaagccatcagctcactcaaggaactccttcatgtttctcgttgcgatccttctgatctatttttagaattcactcaacgacaagatgcctccaagtatggccgtatatcggccttcttagttcaagcctttgaccttggtggccttagccatgaacctttgaatgtagtctttcaaaggttcatcatatctttgctttattttaacaagatcctccaagtcatgaagatatttttcttgaagcagagaattgaatatagaactgtcgagagaattcttcctaagaattaaatcttcctagggcttacttgaaagactactttagggctatttcagctagggttgccagaaagattcaacatcgcacttctccagatactcgtttgagatctatttggatctcatagtactttaggtgtactacgggatcttctttcctcgagtatatcttccaagttggaatcttgaacttgggaaagggcatggcaatcatgtatgctgagaaaagtgaacccctagacctatccagtttaaggtctaatggtttcgagcctgccaagcccttgatcatgtctcttatttgatccaattgtgcttgcacaaaaggatctaatgttgtaggagccaggttgattggcccttcttgattgggctgcagccctagattggccagagggtatgttcaaggtcgaccagtcctaggcctggcagctagctttagcttgccaacccttggtaggggaactggccatggccggtcagacctactctaggtagttgttcttggccggtcaaccctatgctggggagggcctggccgcccattcttcaatgactatctggtgtaaactatgtgttgctagggggtagatcacaccaattgcttgagttaggtggatctaaatttctgaagtaattaaagtcatttctcaagttattgtcgtctgggatgtttctacccattctcgggcgtaacctgttaaagatttttctttgggttactcactcctaaatgtttcaggattggagttcaccttcttggccgaccaaaggtgcaccattagggggctggctggctggccaaaggttgatcaatcgagggtgttgttgtgctagagatccctgactggcccccaaaatcgctggttgtcgggatctggttgttctcaccaccaagtgtttatggcaaggattttcccccttcgggtaggggaaggtcagtcctggatccagaagaacctggttggataatttgtctgtagaccctccccaatctatcaaccagtcttccttaaagaggatcactaatgagatcttatcctcttccgacagtttttcattgaacaaccttattagggcgctagcttctctattacggctatctagctctgcctggtaagattgaatgatgtactccttgtcatccatccatcttagaaattcatgtatctcttatgcaaatgcatcacaacaaataatgtgtggttcttcagtgtgaccgacttgacagacaacctctctaagtctggctaactcgagattttctcccaattctatataaggctcgagtgatcaagtttgttgtgcttgtcaggttggcatgattggccacatctgtcgggttcgtggtgattccaattttggctggaacacgaacatcaggatcagacctcatatggtcttgaggaacactcgatgaggcataagttgtagtcagagttctccttgcattaaccacactgtttgattagataaattgccaactcactctcaatgaaagcaccaagttgttaaatctaaatttggccaatcgacaatgaagtcgtatttattactgatgcttgcaacgtgttacacaataagaactaaaagtaaattagacacaagatttatagaggttcgacccccttagtttgtgagtaatgacctactccccttttggttgtttaatactagagataataccact

SEQ ID NO: 240327 - DNA, 1863 bp, Cannabis indica
gagtttttcaagaattctttcgagcatcatctctatctttaaaaaatattgagagtaaactatttttggggaccaaacagaacttttgagggggaaaattgggtcccagcgcccaagttgacaagtggggctcggcccaacatccaaattgacattttgtcaacttgggttgtttccaattcagcttagcaaaaagtgcaatgtcactagatataacaaagattcaagtaaactcagggagaaaaccacaaacctgagtccctagaaatagggcccatggcccaggttgacaatcaacttgggatgctacctttaattgctcaaatgccaaatccgatgcgaccattgaatctagcatggtcaaaaacgggggatgggaccccgtccttaagttcaaaagccttagaagtatcaaaaatagaatcctaaaagctcgatttaaagggcccagtgcctaggtcaacaaatgacctggttcgttgggttctgcttatccgaatctgatgttgtttcaaccgtctatctagtttttcataagcacaatgatccatgaagtcagataaatcaaattcataacttcaatttttcagtaaattgactcacttagaaatcaaaagttttgagtcttccgtttcaacaaaacaacatctccaagaatatgtgaccaacatcaccaaagcatataaattggctaagtgatatcatattatcacttaggcatctcaaaggacaccccttgaaaatttttacacttatacatcatccaagttgacgtgatatgtcatcctgggcactgtgatgtcaacctgagggctagatgtcaacttgggcagttggacttgtacttccttcagtaaaacgaccataactcactcaatttttatccaattgacgtgcttcaacttgcattttgaagctatttaagctctctaagtcatgtctcacatgccagaggtaattttgaaggtatcattgtgaaaattcaccccaagagagttacaaaaattatcttcgagtaacccacagcgggaccccgccgagcactaaaaatttgccctcaccaccagaagctaattttcaccattagatcatcatcaatggtggaaaacaacttatttttatttttctcgtattttaatgggcttccttcacctataaaaggagggctcccttagctcatttttcacattcagaaaactacccacaaggtcagagcttctctctttagactctctctctctagagtttggagtttttgatacttagtctattactatagttattatctcgtgagaaataaaaacttgaagtagacatagccctattactatcgcgatatagagggtgaactactataaattattgggtctctcttattaattacttaacaaacttttcattcttgccaatttagcgagcggatgtggcttagaaatctagtccagatttttgagtcaatattttagtgcttttactgagaaccatagctcaagaaagtcactcatcaagattgttgcatcacgttctacaagtgttgacaaacaaactccaataactggccaagcaactgggggcatgctagtggacgaagttggaactaggactacttctctacgctaggcgccaagagtaggccttgaaccagctcctcaactcgccctccaaggccaccaccaactgctcctagggctggcaacaacgatcagatcccacccggggagccgcacatggagatagaagaccctgaggagaccaatccttaggtagctcagcttagctaaactgtggctaacttgcaacaacacttgggagactctctcgataagtaacatgaatggtttcaacactggttcatgaaaaact

SEQ ID NO: 240328 - DNA, 1234 bp, Cannabis indica
ctcttctgaaagtcctggaggcttgttgttccttcctgctgcagctcattccaaaaaggagttccggtccaaatcctggcttggagcagtacgagctattgtccatcgtcgacttttttgatttttgaagcctcctctttgaacctctttatgaatttcttaaaggtttccattagtagttgttttatgttggtcaggacacttacttcgaggttaatttttcttgctgccacaaactgtcgtcgaaagttgacttgcaacttgttctagcagttcacacggatcctggttctaacttcttgaatcattcttcagtggatccacccaatgttaatgggaaacataagcactttgcgtcattactgactctcatgactgtcattactctattgaatcgggacagatggtcgctggggtccatatctcctgtgtatattgccatttcgggcattttgaaatatttagggagttctgcctctaggatgttcctgacccagggctcccagtcatcacagtcggactccgagtcatatcccttttgccttcacgagaccctagcaatgtcttttcggaggattgctaattcagctaggatcccttcgcttagggcaccctccgacactggtattgtttgcttctttttctctaagtgcttcctaaggtcaccatgtttatcattaagcttttgtcttaggtcagcagggggtgcttgcaactttttctgcctctttccccaggctcttgatgcactgacacgcttttttggtcttctcggtcctaagagccagtgctctctctaggaagcctgcctctctgcagaccttttccttttcggaaatcagagtagacttttcgcggatcctgagcctttttattcttctcggggaaagacgcaggattttcttaggattcccttctgtgggatgtcgtatagggcttcgatccctatttgtatgcttttgggtacttggcaaggactcttcttgtgtttctcctagacccggaggcacgacctttggatgtacgtggattttggccgttttcatagctttctgcatgacaaccatcatctcttgcatcctccaattttgttccttttgtgcagctagctcgacctcatgatcaaccgccttttgctttagggctagtagtttggtataactgccatcgtcataagcatcatacccttcttgattttcttcgtattccttgtcatgtgtctcatcttgctctt

SEQ ID NO: 240329 - DNA, 1294 bp, Cannabis indica
gatgaaccctgctgagttttggggacgcaaacatcatatcaaccaggatctacttcaacttttatacgaggatcacccttgtctccatgctagcccatcttcgtctagtaataatcttttcaaattctagctttggcgattggcaggtaaatagcaaacatacaccctccctagagcccgaggtgcaacatcatttctatcccgaccaaattcaaggtgaaggatacgttcgtttcatctgggaactcaagaaagagtggaggtgttaccttcttactaactagacgtatatagtccatccaaacatggtcgacactctgcccgagggccgcccaaaccttgctgctataggcagacctgttgccaattttgccgtgatcattgtcagacacacctccaataaaattctgcccacacgtatgatgatggtgtggactaaacagactgtacgaaaatcttgactaactgacccaaataactcacttaatacggattcgattgactcaattaaacttcgatttgaaagttatttctatgatctatcaagtcatgtctcatattccaatcgcaattctgaagttattgactccaaccttcaccctcaagagagttatgaatttaagctacaacttacatgaagcaggtctcgcatacacaactcaaactttgaaaattgacgactgacgtttgaagtcaatttcaccattagatcattaccaatgattaaaaatagcctaaatgtacttttttcgtatttttttggaatattttataattattttaataagacctcataactccactaactcatttttaagttcagaaaagtgtccataaaatcaaggcatctctctctagtttccctttaagaaattagagtatcagaagttagacatttgtatgtaatccatcccgtgagaaataaaactcgtagtaggcgtagctcaattactttcacgatacaaggagtgaactactataaatcgtcaactatttaaaaaacgtgttttctattaaaaataataaatacaattttgtctagtaaacactctcatttggattatctattagagcatcactaatggtaatattttggagaatgcttggtaaggtggtaaaatttaggtggcaaaatatatggatgctatacaattagagataaaggaatgctattctttaaatttgctattgatgcctatattttttttattacaataaaaaattttaaaggtgaaagtatacataacatatatatatagtttaataaagtaaaaaatatagttgtatatataat

SEQ ID NO: 240330 - DNA, 1426 bp, Cannabis indica
gcttcattcgaatgatttgtttttatgggttttggttgaagtctacggtggtgtctaaagttataaactatcaaatgatatgtaatatcttaggtgtgttgttttataagagatgaagatgttgttataaaattagaaggggctttttttgacggtagtactgtttaatcaagaattgactaggtcaacctgccaacctggtcattcgaaacctgccaacccaccacccgtgccctattcgggtccgggttcggtttcatttttttgaacctgaaacccgataaacccgcccgatgttcaaccctaggagggatagagatgatatttgttctcatttatgttgtttggtgttaagagtatatgtggaaggaaggagagtaaaataaatattaaaattaccattttatcatttttaatacaattatacattatttttcaagggtagaaaagatattttgtatattttttttgtctttttcttgaattcccccatgttaagagggattaaaaatagtgtgtttggagggagaccctctccttccatctctcctctcccttcttctctctctcttgccaaacaaacggattctccaatccctctatccttccacccctccccctccctccttctctcccctctaccaaacatagtgttagggaatcatcatggacttctaagaaatcgccaatgagattgtcaatgactttagcatgagattcaaatttgctaaggaaaggcaacctgtgcacttgaacccaaaaggaggtagtggtgaaagagttaaaagaaacctttgacagaacacttgatggacatagaatcatatggttggttgtgaaaatgccatggttctttgaataagactctcttcatatcacactcgcaaccaaatgtaaccatatacgaattcgttttgtagtccgagatagtcacctgaaatcttccaatccaaggcttgagtatgaaaattttcaattgtttaggattgtatcctctgttcgagtaaatacgacatagtaaacggaaattagaaacattaaaggtagggacagatatgttggaaatgctaacaacagatttttctctttcagtaagtgcatttgaaacatctgagaagaaggattccattgtagcaatcgaaaggaaggcaatcgggaagtaagcaggagggaattaaaccgagaaaaaactagaaattagcagtttatcagtggaaaaatttgaaataacagaggcggaaacagttaggttcaaggatttaggataagaattgatcttttacagttaaaaagaaataactacattaactgccacagagcatacattaagggcagacaatgctcaggctaccatctaatcatagccataattaaacgaaacaaagaggttagacacctaaacccacactaattcaattaaataaca

SEQ ID NO: 240331 - DNA, 720 bp, Cannabis indica
tttgaggggattaacattaccatttatttaatttaaaaagtgagacttacttgaaaacacaaatcccttccattcaaatttaatttaaattttacattctctttcctatcaagtctaaaccttataccaaacactccgtaagtataatcttagatcttatgacttcagtagcaacttgtgctaacgctctatacttaaactaagtacttggccgagccacaacaattcactttttggagcttcaagataaacacaataggcttgcagagtgcctgtcattagggcgacttggcccattttgcatccgagaagccttgtagagtgagtgtcttgattgagctagttttgaagctaactccatgtgtggttgtgtgtttcaaatacttcaacacaccctttttgtaaaagactaaaaactaactcaacttagtgacaatgtaatgtatgttaggccgagtaatagttagatattgaagtgcctcacactatgagacaatgtttagcaaggagcagctagtgtggagtaacctagcaccttgcatttttttttttcttcaaaagaagcatacttatattaaagtaaacaaaataggcctaatggccattatagacaatgttatggtattgaggaagcctcaaaaataccagttacattttgcataaacatgttgcgaaaattataaatactacgcaagtatacgcagttaagtagtagctcac

SEQ ID NO: 240332 - DNA, 2337 bp, Cannabis indica
tttttcttttccacaatagtatcgatcaaatcaacaaagaaacagttatcacttgcctttgaaaaagtcatcgcctttagtaaattgaagaccacttcttccccttgcactcgcagcttcaattcacccttctgaacatcaatcaatgcttggccagttgccaagaatggtctcccaagaataattgggacatcgttatcttcttccatgtccagaacaatataatcagctgggaagatgaacttatcaacttttactaacacatcctcaatgactccccatggatgagctagtgatcgatcagccaatcgcaaggttactgtagttggccttgcctcaaccaactgcaatcttctaaaaaccgacagaggcattaagttaatggtggctcccaagtcacacaatgcatgtatcccttctattctcccaatggtgcaaggaatgatgaaactcccaagatctctgagtttgggagggagtttcttctgcaatatggcgctacaaccctcgatcaatgccgttgtttcatagtcttccatttttctcttctttgacaagatctccttcataaacttcacatatctaggcatttgttccaaggctttagcaaaaggaatgttgatgtgcaaccttttaaagtcctctagaaattttgaaaactacttgtctagattagtctttcagagactctccaggtacgggatcttcacatggtgatctatactgattggtggagatgcttattttggtgcgagactttcagtagtcttcttttctgttgatgtcggtgccagttgatcctgaatcttttcttccactggctgtcccccatcagacccttcatacttcttcctgcttctcaaggtgattgccttgcaattttcttttggattcccatctgttgtactaggaaagttttcctgaggacgggttgctatctgagtcgccaaccgccccatctgagtctctaaggctttaatggatgatctagtctctgtcataaactgtagcaataaatctgtctgaagactagaactcccactagagccttgttgctgtgattgttgttggttctgcgtttggttctgatttctttgcagatagaacccactagtcattcgaccacctccttgattgaacccaaagttgttgttttgagagtaattcccaatggcttttgcttcatccattggcaaactattcacatctaccaggcattcctcataggggtgagggcctccacaaagctcacaaacaacttgagcctgttttgcctacacagctatcagtattgtcagggactctacctaggctgtcacttttttatggcatcaaccgcatgcataccagccaccttctttgtctgacttcttttagttggccattgctgattattcagggccatctcttctagcagttcataggcctcatttgcacttttcctcataaatgccccgctagctgcggcatccataagtgttctagtattaccaatcagcctgttgtagaagttgtggaccaacatccacttctcaataccatgatgaggacacttcctagtgagatccttgaacctctcccaagccacatggagagattcattatccagctgacataaattattaatttctccttgaagcttaggagactatgctagaagaaagaactaatacagaaagttcgttgccaaattagtcaatgttactatagaattcggtgggaaggagatcaaacaactcttggctcgctctctcaacgagaatggaaaaattctcaagcggatggcatcatcactaactccattgaccttgaaagtctgacataactccatgaagtttaacaagtgcagattggggtctttaaatgggagtccaccaaactagactaaggattgcaccatttggagtatggcaggctttatttcaaagttgttagcatctatagcgggtggtcttatacaagattggaccctcgtaagagttggaagaatgtaatctctcaaactgaggccatttgcctgatcttcaacgacacatccattattatcattgttgcctccattgttatcgccattaggattctcagccatgatttcttctgtttcagcagttgctgaaactctttcttgtctcttgtttcttctgtttctcttacaagtcttctcaatttaagaatcaaccagcaaaatgacaccttgtccttgacgtcacatacaccttcaattactgaaatagacaaagacaatattgaaagaaactggttagcaattagcaagaaaaataaaccaaagtagaattttatgtaatcttatgcaatatcaatctttaaacaattccc

SEQ ID NO: 240333 - DNA, 1217 bp, Cannabis indica
gtataatagaatgagttttcacaataaaatatgagcatttgttttacaaaaagtatataaagtacaactatgacacttgagataggggtcacaagaggtacttagttttgtgcgaatgagagaggacacgcacacttgacccactacacacgtgtgcgcagtccgtctgactgtgccgggctatctggtgtggtgtgacactttattttttagagaaaaattatttattaaattattatttttattcaattaattaaaatttccttcttattttcagcatcattctcacgattccacttaacatgatcaacatatttctttccgttactaatacatctttctcacactggaaaaattatatatttacagtttattatttataattatattatataagtagttcgagtagtagtttttgggtgtagtgtttcgacggttctttatcgtgcagtagagctctaacatagggtattttgaatgggatgttttatcttggggatgaccgacaatttttgattgcttgcacatagttggatatttccgcgattgctttaaagaaagcgacctaattcgcgactcaattcaaaaaatttatttgaaaatattgttcttgttttatttttagtagtagtttaatcaataatataatattatgtattattattataactacgcatgtactacataactacgcatgtattataactacgcatatatgtgttttttttttttcgtttaatggaacatcatgttatagcaattaagtttacaaaaaagagttaaaaaaaattccaaaatatagaaaaatagtataagatcgagggttaacctaagaaagtaattgattatcttaaggaaataactagtaactcataactgttttttttttattaaaaattatatttttacacacattatataagaactcataaaataggtaatttttttttttaatttaattaaataatttatagaagatattgaaaatagaaatgctggaatggtataaagcttattgggcctatgtaggttgggtataataacattttgtcttcaatagtttatgttacacatttgactggacccatcacaattgttttgggctttactccttttgagttgaaagatagtttttgaaaggaaaattaaaaaatagggattatttcacaaatactcaaaaacaataaaaaaatcacaaaaatacgattgtacggaat

SEQ ID NO: 240334 - DNA, 1126 bp, Cannabis indica
aacttcttatttatttatgctaggattttcgtcctccaaactataaatttgttataaatattctttaaattatttgtagcattataaattaattattttgtcaaattttgtcacaattacttagtcaattgtcacattcacactattataaattgtactactttactcctacattctacttaaattagttagaatgtttattcgatttcatttacacaattttgtttataggacattcgattcgcattaagtataaattttattttttgatctaattcaatttgcagagtagctaaaatctaatctaatctataaaagtacaaattggatcaattgtttcaaattaatactttttaatattaattaaaatatatatcgtttttcacatcaccaatctcacttaaatatctattatgtgtggttatgtaacagatttctttgtttaacgaaatttattggatttttacgtcaacttaaacaaaatatcccaattagttaacataatattatttattaactttttttttttttttgaataaagataaacttcattaactcaagagcaatcgctcaaaagtacaacttcaagttccgaagggataacatccttcgtgaacatacgatcaacaaataatcgagactgacgtgcaaccacatgtgcagctcgattagcagaacgtttaacaaaccttaacgaaacattgttcaaagactctagcaaagacttacagtcttgaattattaaaccaaaacccgaatacatcactactgagctatgaatagcttgtaccgagattaaactatcactctccacgctcgcttggttaaacgacttgtccttcaaccaactcaacgcctcccgtatgcccatggcctcggcaacagcaggatcgggcttccctggccgatacagacccaccaccgacaacaactcagccacactgtcccgcaccacgaatccaattccaaaccggctgctgctgtcaaaaattgcagcgtccacattaagcttgatctcatttgtcacaggtttagtccaaagctcatcacccttgttgaaaaattgaggattcaacgaagggtaattttcatttaattgagcttttctccattgatcaagtgatct

SEQ ID NO: 240335 - DNA, 1503 bp, Cannabis indica
tatatatatatatataaatgcattagtaattaaatccatgttatccttttttatatttaacgtgtaattaattttccttataatttttatccattgattcattcaggtttgcttcgatgtggaaaaagctgccgattgagatggattaactatttgcgtccagaccttaaaagaggcaactttgctgaagatgaagaagatctcatcatcaaactccatgcactcctaggcaaccggtatctttctctggttttcgtatctacgaattaatctctctattatattaagccttttatttcttaatcgatctaacaagactaaacataaacaaaatgataaaatctgttattaatgggaattaatgtaactatgtaaactaaaatatattgatggactaataaatctaatttgaatttcaccataattttttttaagaaattaatgtatgttttattcctcctaaaaatgaaaattttgaaaacgaaaaaaaaaagtaatggtgtgtagtaatactagtcatatatgacgaaaacttttgattaattgatcatccactttttgtataataatattttggaaagcttcaaattatacagaatacattaaccatggaattaaatcagaaagaggaaaatatttagttatattgttgaagaaggttgcaaataacacaacacataattagtgttaggtgtagaggaaatcagctggaagaaaaaatcactcatatttggtgataatcttttcagtaagagagagagagtaattaatatatatatatatacacacacgtatttataagcttcaccaaatggagagtacctcaattaaaatacaaaaacccagcaaaagttatataatataatgtgcaactcgtacattttgttaattttgattatatatgaactttaaaaatgtacaagagcagtttccaaaagtaatcgatgtacttgttgtgcatatatgacattttttagtaatatttataaaattgaactctccaatgggatgattgtgtataatgtggttcaaaaattttgctaatgttaaaaattatggcaaatttcacacaaaatacaaaatataatttgagttaaatgagtaatttgcagtataaatatttaagtttaactccgagttgcaaataaatagctaactttaatatttggctgtaataatacgtaagttatattttttgaactctgtaggaattatcacatgtcattttcttattggtatatttaaattatttttttttaaaaaaataaaaatttgatgacttccaccaattagaaattgacacgtggcaatttacttaatatttaacatgtaggtacctacaaaagttccatatgtattattactgtcaaaaattaaacttacgtatttatttgcagttggtaattaaatttagttatttatgctgcaaatagttaaattttaaaccacaataaatattacttttttatttattttattaccacttattaatgtaattgatag

SEQ ID NO: 240336 - DNA, 1180 bp, Cannabis indica
acgagtttagggggttttactactaaaaatttaaaaccacttaaggaggttatgacacaaattatccttttttctttgtactcttttattttctttcaacttcaaatgtggtgatgattgtgtaccttatatattaaaaaaaaaaaaaaataggtcacaaacaattagggagtatgctgaatgaaagaaaaaaaagaggaaagctatagttaattaatgtagtgagttatatatgaagaataagaaaaaaaaataaaataattgatgttctgacttttttgtgttacctgcaagtcgaaaaggtaataattgaaaaagagaaaaccctaaacaatgtctaagttaaaatagaaaaggataaataaaataagtttctttttttttatatatatatatgtactgtacagcaagagaattgatttaaaatatttacaaaaaaaaaaaaaagagagagagaattgatttaaaagaataataataataataatatttaatagactctcatagaaatagaaggcttcgttgtataaattatttctttttaatttatataaaaaagtgacaatcatattgaattaacacattatgggacacagttttctgttgtgttttctaacagaggatcttcattctaatgatatgtccacacaattttcagatatatatgtgttatatttatgtgtacacatgttgtccctaaagttttttaacatagacgtagacatgaagacaaatgacctctcacttaaattttactactggtgaaatttaaatttaacattacctctcacttattttactatcatactttcatctcacttaccagtaatttaattgtagccggcaaaagacaaacttcaaagtcaacacttccctcttcagccccgggaaacggcgttagcttaccgtcaatcttattgcccagaccacttcgaaccgccactggtcttccccaaccaaaatcattaccgtagacattaaaccggtgcgaaccaccacttaacaataagtttggcggcagttttcctacacctgctaacgtaggcctctcaatccaatcctccaagtactttctcgcttcaatcgccgtaagggaacgaatcttttctctaatttgagccgctgcccaacccaatccacgatccaatagctcccctcctttgcactctacgttcacacc

SEQ ID NO: 240337 - DNA, 1803 bp, Cannabis indica
agaaaataaataaataaaaagtatgtttatcctttgcaatttacaaataaatgacagattatctaagctttttttctagttgtgtatgtcaacaaaaaaatggataggaaaggaaaacacttccttgtaagaatgtaaatcacatgaatattcacaatgcaaatcacatgtaagaatgtaaactaccgatagagtagcaaaccacaaaaggcaaaaccttcaatcacccagagcaaattaaacattaacaaaaccttaataataagtcggtggtgggtacattcctcctggaggaccccttggcaaaggagaagttcccgactggtgatggtgttgacctggataagaccttgaagatgacgataacccataatgaccactctctcgatacccacttgaaggtcctccacctgaatttggaggtaatctatacatagacgaagcagcaccaccaacaccacccggacctacgattggaatttctgttgtagggagtgtttaaagggtatatcaattgatgtggaatgggtaaaagttgtttgggattgggattgggagtgagattatggctagctttagggccatttgaaaaaaaaaattaaaagaaaaattaaaattgatgaccatctctatatctacagcaacaacaaaataatttcttacccatcttggagtaagaatgggcttgcatgctggaagttcttgttgagtaaatctcgaatctgacattgtttcaagtggaatcatttaagaaaaaaattataacaaaaagctttatagaagttagtcggtaacaataataaaataattcatactctagtacaatgttttagattaagtagactttttgctagtgcctaggctataatacatgatacctaaccctatcatcttttatcaaaacaaaagttgtgtgacttccatttgtttgtttagacaatttcttttctttgatgttgtaagatcaacaatactaaataaattaaacagcatgcattcaaacaacggaatcacatgccaatatcaaaatgacaatctgcagcaatcatgatgttgtttcgctcttcaaatagacattttaaaattatttcaaaagcataggcacgcccgagttgaaaattctcaatccatttaattccacatcaaacttaaacagacctcctaatcctcaacttacaacctaccaggctgcaaagtctagttccaaacaaacaacacagaaatcacagagtgcaaaggtttcaagtctaaaagttgttacagaacaaccgaagaagggaaactcaaagggacgggtatgtgatttcctcccacattattgtttgattttctacttctagtttcttctgagtagtaacatagcaattgatattgttttctggtaccacagttaccacagttttcctcagccataagtgagggtctacgataaacttaggtgggtcactctaaacaagtgacctctgtctcttttccaaaaaaaaaatatatagttttctggtacccaaatattgtatggttaagaaagggagcctggtttcaaaaattgttacaagagtcactttgatcgattatctcatgtgataaacagttattaatttcttcctgactctaatatgcagtcttatatatcaatttaaccctaacgttaaaacaataaaagtagaaactcaaacctaaataacatcccatatccatagtttgaatcaaatagtaaattataaccaatttgaccatcaaattcataaacgctaatcttttttcacttcacaagaaaacgccagagcccttctaaaacaagaa

SEQ ID NO: 240338 - DNA, 1361 bp, Cannabis indica
ctatttatagggctatgagcttacagaggaagtatttccgttctcattacaatagatatatgcagaaagattgcatagtaaatacggaatacactgatcgtgggatttggacagcttgccatatctctgtaatctgatccccaagttatagcgattttcttgatgactcacgatgcgaaagctgaattcgctaagtgtttgtcgctctgtgcggatcgctaattgctttgcctcgagcgtgcacatgaggtatcatgttcgaactgtatcttgcgggaaaatactcggagttgattccacgtgtcaccatcacgtcagagtgcaaaaattgggataacaaccttattagttgatcgcctaacaaaaaagacagaaacatgttgaagttctttcaataaagccttacaatcattaaccgcttgaccaaacatggaaatcatttcaattgaactacgcatggcttgaataaccactaagcaattggtttcaaggaaagcttggcaagatcaatttctcttgatccaacttaaagcttccttaacacccaatgcttccacaaattctagtgtagccgacccatgaaatagcttggtaactccttcaatgaacagcccttgtgcattacgaaccaaaaaaccaaccccaaactgatttgtgccaggaaacataacgtcgtcgacattaacctaaatgctatttcctagtggtggctaccactgctcagccccgtcacctagcacaaaacaaggactcgggtaaattacattagaactatgagcagcaagccattgattaaggtaagtttttgctaaaaaaaactatactttccacacttgacaatttgttgttccaaaccttatcattccttgcattccatattgaccaacaaagagcaatcaaacattttttttcgttatccgaatacagcaccagaaaattcgaaatgcaccagtccaagaagactacattatgttgcagcaccgtgcctattccctctctgttccagcagagttttgcagctggacaatcaacaagaacatggtaaattgattcctcatgactgttacaaactggacagattgttgacacatccaccctttgttcttagttgaattatagttggaagacaaccttgacaagctctccacaccagatttttcatttttggagggagtttcaatgcccaaaatttcttccaaaaagcttcaagtactgctgtatcctgagtattctccccattcatctctcggaccattctatatgcacttttcaccgtatagaaaccggatatctcaccaatcaaagtgattttgtcttgatcatgaccacgtttcacaagaatttgtaagatgagtctttga

SEQ ID NO: 240339 - DNA, 1264 bp, Cannabis indica
gagaatttttttttcattagtaaataatgaagatacaagtaaaacttagggagaaaacagaatcacgaagggccaagaattaagcccaacgcccaggttggcaatcaacctggtgtgctagtttctgtcactcagatgcaaattttgctcaaggcattctctctgacatggtcaaaaacaaagtaggagaccttatcctcaattttgaagaccttggaagcaccaaaactacatcctagacgccctgaaaaagggctcccatcgcctaggttaacgtatgacctggtgcgctgggttctatttactaatttttattttgtcttgagcgtccatctagtttttcatagtaaatgagagctatgaactcatgcaagtcaaattcacaacttcataatttcacttttttagcaaagtgacttagttgcaaattggggtgtttcgagtctcctgatttcgtgaaacaacatctctaagaagtagtgaacatcttcaccaaaataaacttaagcatcaaaaaatacatcatcaactcatttttccttgacccaatgttcaggttgacatcaaatgtcaacctgggtgttggtataagggcaacctttaataaaacgactatatctcactcaatattgattcgattgacgagattcaacttgcgttttgaagatatttcaatgatctatcaagtcatgtctcacactctaatcgcaattctaaagatattaggtccaaatttcatcctctaggatttacaaatttcaactataacttatgcgaaaaaggtcccgcagacatgatttaagttcccagaaattgacgaccaacctctagagtcaatttcaccgttatatcatcatcaacggtcaaaaatagcttaactgtattctttcacatgtttttgaatattttattattattataataggatctccttcaaagagctcctctagcttatttgacatatttataaaagtaataaggtgagagcacccctctctaatttctctttctaaaaattagagctttcgcacttagtcaattttcttataatgctcgtgagaaataaaaattcgaagtagatgtaactccattaccattgcgacacgggaaataaactactataaactctgttgtgtatctctctatttactctactcatattttattttaggataaatactattttggaccctgtgtcttacaaacgttactaattgaaccctctttcgttaaatgataaaatagactttgtatttttcaaaat

SEQ ID NO: 240340 - DNA, 1259 bp, Cannabis indica
gaaaatcaaatagagagtacacaaaactcaccaataatggattactggacatgtgaaggcgatggagggcaaattagaaatgggctgagagggcaaagagtgtgatgatgcacactcactcttcactgtgaatagaagaagagaatgttattcaatgattttggttaaagtgatttcggtagagacaaatggtgaagaccgtggttgtttctttttagctttgtagattttaaagttgaattgtatttgagtttagtttcacaaaacaaataactgcagttgttctttttcatttttcgggaagtaagtatgtatcataaaattttgtttcacaagtaaataaacacttggttataaaaaaatagtaaataaacatttgttcgaaaaaattcagccctaagaaaataaataggcatgcctattattgagtatcacatatgaatgagtagtgtggtatagttctttcaaataaaaaggtctccaaaagttattcttagaaagttatctgtctctcgaaaatatgttcttggacaactaacttgtctatctggaagaagtcttgtggaatgatagttaccatctggaagggagttcctgaatgactatcatgtccactttgggtctagtcctctgaaaaagagttttggatgactagttgttccttctgaaaggatgtcctaaatagtgactatcattatgttttgtttttcacttttgtaaagccaaattgactagtcttgtcttcaatttgttatttatttgttatttgattaggttaatttataatcgtttaatttattttgatgtcttttgaaaattatgttgtatcatgttattgatttatttttgtgtaagttgtagcttattttgtaccatttttagtagtatattatttagggtccctattatttatgtgctcaatgtagcttgtttggtatcatatatgatggtttgttttgaatttatcctaaaataatttgatagtagtattgatactcgattcgctccatatatatcaaagatgaatttttttctttacaaaataatattttaaaatatttttcaacatatagataaaacttatttttttaatttaatattaagttgtgtatttattaaattttatatatttatcttatatgtgtgtatttttatttcactcacttgatcatgctaagatacagggattttaaaagctatcaacaaatgaagtgtatttttttaatgagctgggagtgctgtttgaggatgttatagtt

SEQ ID NO: 240341 - DNA, 1133 bp, Cannabis indica
tttttttggggtaatttttgtcaactactctaagaaattcataaaaaatataaacgactgagctaagatattcgatttcaaaaataaaccgtaaagaaagaagaacaccaggatttatagtagttcattccctatatcgcgatgataacagagcaacgtctactttgacctttattatttaaactcaagcatgccatagttacgttctcaaaagaataagtaaattacaaagagatttctaagtgaaatctaataaggatagtgtctgtatataaattttagaaaataatcaccaaactatcctcaattatagtgagtgtgaaatcaaagttcatgggaacatagaccaaagatacgaaaaaaggtattatagtgtttgactatggtatcatatctttctacttgttgggaaataaacatagatcaatatggtgattatggagacttttaggtttctttgtgtagctcaaagaaatgtgtgagaaaagagatttagagcatctttttctttagtctcatcctttagtttatatcgacctaggaatggataagagtttttttaatgacaacttgagcatttacttcgtaccttgattctcttcttgaatcaaggtaataaattacgtaataaatatcttttagaagtgtatcttaaaacataagtctaatacgtgtcggtgagcttctccttttcgaggataaggatttgggcgagcaaaagaccatgggaactggtactgctcactcatgatgtatatgggggattttgtccactaggatagtagcacaattcacgtgtcaactccatgtggctcccctttggtgaaacttcgaggaaacctttcatttcacgagtcgaaacaagcaatctgtcttgtaatctaattttgaggctgaaaacgtcaaaattgtgatatgaacgatacaaactcagttccggcttggaaagatctttccaatgaaacttgaactacatcatttggataagaattaaatgagttatgactattttactaaaaggatatgagtgcagtaagagaattctcgctcctttcgagcagtgccatcttttctggacaaaaagaaggtgttgcttgcctttacttgttcttaaactcattgggttgtgtttt

SEQ ID NO: 240342 - DNA, 1180 bp, Cannabis indica
ctcaggaaaggggcttgtaaggtgatatcaaatcgggaagaaacaaatgtttggaaggacccgtgggtttttcatggcaaagagtactacccgaaacccatcacttcttgccctgagagggtgactaaggtggcgaatcttcttatgagtgatgggaattgggatatccctaagctcgagaccctctttgactctgaaacaatcaatgatatcctgaaagtgggcaagccttccgatcaagggaaagacaggtagatttggaccaatgaaggaaacgggaaattccccacgaagtctgcttatttgattcaagctttggaaagagcccccgcctgtttgatggctccaacacaatggaatagactatggaattccaaaattttggaaagacataaaatcctttggtggggtatcctttcgaatgctttaccggtccgtggtatcttggccaagagaatcaaaattgaagatgtgacttgccctttgcgtggggaggctgaggaatcaatggaacacctgttcctctaatgcaactttgtttaccatctctggaggtcttctcccttagaggtgttcacaatccatgactctggtggtcgggctttggattgggttaagtttctttggaacctaaaagcttctggtgtggactctgataagttattcctatatccttcagtcatcgtggacactatttagagaacctgaaatgacaaggtacataacttgaaatcgaataacattgtaacgacaattgactctatctctcattgttatacagattatgtggctttcttattttgtccgatcttatctgtggctcctcctgcttggacactgccgcctgaggactggatcaaaatcaattatgatgctagggttggtggaaactctatgtgcattgcagcccttgctagaaatcactcagggaaagttctgtgggctgttgtttccatgctcggctttagggacctgttgataggagaagcggctgcatgttgccttgccctcgactcgatgagactcaggggccacaactttgtcttggtggagagttattcataaattattatcaaagcgctaaaaggtctaaatcagttatggaatattgataattatgtctctttatgtaatcaactctctaaaaactttttatcgtgtaatttttcgttgtttcgcg

SEQ ID NO: 240343 - DNA, 842 bp, Cannabis indica
gaatcgcttgaggtagacttgttgtgtttcatactgctgcctcgaatactgactttcctgctgtgcctcctccactttcttctgtaaggccttatactgttccatagtaatagtctgtgaggcaggagaagttatggtatgtgctcttttgcccccaactgccttgagtctcgagagatggctaaaacctctcacatgtcgagattgctcaccgagtacttgcgtcataacaggcaagtctcgggagtactgggtgggatcaatattagtctcatcaggctgatcctcagtgggggttgattgattagcagccaattcatacattttgtcctaaaaaatcaaataaattaaatatttaatatgaatataaaacaaactaaaatgtttagaaattaatattaatgtaaatttacatgagcttgttctgcgtattcgttgcgccaagtgtcgcctttatggtggaacttccaaaaagtgtcgatagtagttggaagttcacctgtctcggagttagcctatatatttaagagaaaaaaatgtgtgattattatatatttttaaataaataaataaaataagacttatgaatgaaaactaaatgtataaaattatcccatcgacaatatatgcgacaataggctttgatctctagcctccttgaagttttattttaccccgattttttttttatttttgctgctcttgcctaaaatcaacatatttgggttacaatgaattatttattattgactataacgtaatgtattactaaaattaataattttattaagtaccttttgttttctgagttccagtaaaaaatgctagtaagaaatgcaatc

SEQ ID NO: 240344 - DNA, 685 bp, Cannabis indica
cagaagagatggaaggtagtctcggaggcttccttacatagaggacacgtatcttgtatattatgaagaatagtagccaatctgcctttcgtggtaaggatatccctataaacctgccatcacaagaacttcagtcgagagtgaattggagaactccaaatgagtttccaaacaccctcctcataattcggatcgtggcccttgatcatccgataagcagattttatagaaaacatcccattatgttcacccaaccacatccctgagtcgttaatcttgtcgttaggaaggtcaatattcaacatagcttgagcattgtctcttccaaaccactctttcaccattcgaacattccaagaattattcagatttaagaattgatgaacccatgccactccatgtgagacatccttctgaggaatgggggttcagttcacatatggaacccaaggatcgaaccaaatagatgttgattccccattcccaattttcctacaaatacctttctcaagcactccccgggagtccaagatagctttccacatccccgattcacctccttgtttttcaagattcaggaagtttcttccctttaagtacttagcttgtaccaccttgctccacgtattggtattatcagtcaaagctttccaagcccatttagtcatgaaagccttgttcaccg

SEQ ID NO: 240345 - DNA, 1198 bp, Cannabis indica
tttgttttgtttttatttttttgtttaggtatcaactttgatagatgttgttcttttttttttggttggattatgatgagctcaagagaatctcacatttcttaaagagatttttttttctataatgatttaggctctctttcagatgtttttaaagtttaatgtcaaattttcctaaagcgccccttattcatgtaaattattctgctaatatagttatgcatgaattaattgtacacgcacataaggtggatagtagtctagtatggatgaaatttttctatctcttcttatgatgtactcgatgctaaatttttttcaatgaaagtttgttcattattcaaaaaaaaaaaaatcttttagaaggaattatcttgcatcaaaaatataagaaggaaaaaaaaaagaaaaagaagaaattttttggaatttatatttcagcgatatgtacatgtgttacaattatatggtttgagtagagtaaaaatataagtatactaacatactaatattcttctaactcaataatgagaaagttttaccttctcataacatcaaaatttaaaagaacgttcactcaatatttcactcaataatagctagaacgccaaaaattaaaattgaatatagactcatgtatatagttatgtactcgtatacaagtgtgtatatatatactagaaaaaagctacgtgcaaggcacgtatatttagttttatgttaggtctttttactttatttaaaataatacaatagataattgaaaaaaatatttttagttattgtttgaaattatttttacgtatattccattaattaatgaaaataacgatgttgcaaattaaaagttaatactcttaatggttgagttttaatcttcttttgattcggcaaagaagacagtgtaatgttgatttaatatcaccatatatttggggaatagaatgattctctaaaggttcacccccaaagagtagctttgaacttggtatctgaagcaattgattaatgtgttccaaaattgctccaattgtgattaacatcatgatcatcattattagtagtgttattagttgtctaatctcacaaactcaatatcatcttcatcatcagaaattgtgttcttatgagttggattcaaggtctcaaagcatataattccttcaaaacagtcatctaatccaagcctcttcaaaat

SEQ ID NO: 240346 - DNA, 508 bp, Cannabis indica
ctttgttatttttacgaaataatgtgtcattcggacagtctgacactccaagcctccaatctcagcagtccgcatgtgttatatgtgaggttgttttacaagaaaccacatttttgccacaaaattttagctaccaagtatagttggtagttaattaatattagttactaaattttggtagcaaaatgattttgtagcaaattctaataaaaaattattatatgagttttctaccaaatattttagtagtaaatttatatttctagctactaattatctttggtagttaatattttgagcatcaaataaaaatttgctactaagttttagtaacaaaatgagttaatagagaattttaatcaaatgagactaaatatgcttactaccaaaagtttttgtggtatatgaatactattagctactaatatttttttgtagctaaaattatatgttggcttaaaatataaaattgatgcattttgtgtatatattggaatttattgctact

SEQ ID NO: 240347 - DNA, 981 bp, Cannabis indica
actctcaatctcaatctgaactgtgtaacttttcgttcttcacaaatgcttaagtgaatggattttatagacttaggatcaagatcccaaaagtcggtaactacaagaaataaaatgttaagtagttaggcagtaccacttaacaacttttctttgagcgagatatccatatcagtgtaagtcgtactgcattcgaaaacttatgtgagcttccgggatcacgaaccaaaaacattcgctgaagaagcttccaaataggataaggccagctggagtcgactatccgggtgcttgccaaataaacactttcagttttcttttgcttcaatttttcttcttcttgaacacaaaataaaatgagctcattaagactgaaaagattaatacaggaagaaatattttattactgaatcaatgaactatgtacaacttatatacaagctcaaagagatgttaagaacttgtaactgcagtacaatacagctatacacctgtatcaaactcctaacatacttctaatagccattactaacattaactgtcatataactaattgcctttacaaactacatctagaattttagtcagtttataacgtgattgcactaaatatatatatatttatatatatatatatatatattgcggtattggtgtgatgccataatagaacatcatctcttggtgttaggcaaggtatttctatcccactatctgtcatgtgtgatgtaatgcgacactctaagatatgaaatcccataagtacttcttatatatggggtataaataagaagttactattgttacacgtgtcattttcaaaacaataattcattaattaattactttaggaatatggggtataaataaggaagtactgaaaatgatatttaaagaaaaaaaataatagtcattacattactattattcaattttcaagccaaaagtcccaaacgatagtcaaaatcattactataaata

SEQ ID NO: 240348 - DNA, 678 bp, Cannabis indica
tttttatgcaaaaattccgtacgtaatatttaaataacaattataatattatcatataattccaaagtgcaagatgatatttgatattttcaaaaagtttcttaagcattcaacatgccactagaattcttcttgcattcagcaagcatatccatgtatatagtgggcagtcattatcttaattatcaagcatataagcctctaattatataatagttgaatgaaaggaataataagtaatatgtagagcacaaaaaggcagaacatcaccactaatcacggctggctccactctcacaaaatttaaagcaataataagttaaaaaaataggatacccccatttcagatcttatctcatactaaatcagtaaatggcttcatgaaaacgaaaagaaaaaaattagaagaaaacctggagaagagaattagagggaggaaaagagagatatctctagttctctaggaacccttgtctctgcaactctgaaatttcagatatcaagagttaatttttctaacaagaacttcatcaagcagggaagtatttcaaaaaccagctctcaaatttgaaaaaataaacaacccaacaaactaaattacaatgttcataaaaaaacaaaaaaaaaaagaaagaagaagaacattaccgttgcaagtagtttgctggaaattcgaga

SEQ ID NO: 240349 - DNA, 750 bp, Cannabis indica
aataaatgatttttaaaagaaaagggggcattccgagaatcgaactcgggacctctcgcacccaaagcgagaatcataccactagaccaaatgcccacttggtactcagtctcaacaagttaaatttattctaaacactacgacaacgtattgataaaatggagccaacaaaaactaattcacttcaataatttaggcatgtgtattaaaaggttcttggacctgattactactcttttatccaagcttagttggtccttgccctctactatatactccttgtggtgtaaggtttttcgagctaaatagtgcaagattgatgaaattttttagaacctttcactaccttccaatgcgccttttgtggcgcgagaaattattagcttcagagagttaattaggatcctagttgtttcttggtagggaatcaaaattcgattgacctatggctttcctaggagctttaccaggcttctttcaatccaagggttcaagagaagggaagagttattttgtcctcctccctattgttgaatgtcacatggagaagtgatgaatgttataattagtctgtgatgagtttgagtggatccataacctcaataaacgactttgcgtagagaacaatcatcttttgatttggaaggacattgtcgatgacaacttttttgtgaaacagacctatcgatccttggtctctattggagttggactttgtgatggctttcagaagtttctttggaaagcccc

SEQ ID NO: 240350 - DNA, 871 bp, Cannabis indica
ttactcaagctaggggtaaaggtctactttaatttatctataaacgtcaccatatttatttattttaattatataattttaatttatacacatatataaaacaaacaaaatacaagtaaaataaattttgagcaataaataatacttttctacataaaaacactattcattattaaactactaaagagaattaatggcatcatcaaacaatttcatttacaaagcaatgcatgcaaatttaaaatacctaattataaatgtttctttatttcagaaaattatagttccatcaaaaaaaaaaaacagaaaattatagtcatacaatactacaaatgtaataatattgttctcatatttcactaatagtatcttggttaaagcaaaaggcaggtgcttggacttctgaatcagctaaaactgcaccaacttcaaatgtcatcacgtagttataaatagctgcatatatataaatatatataatttcacaaattaattactcaaactataccttccaataaataaataccaaagccaaaattaatgtctagctacatcatatatatatacatataattagcaaaaattagacttaaataaggtctatctgaaagaatttctaatattactttctaagttacaaaccatttcatccaaaaataatttgtcttatgatgcataaattgattcaatctctaatgataactgatcgatccaattacaattaatcgtcaaatattagatattcaattgtgattgaataagattagatattatttttgaatatctaattggatcgaatcagattttaaataagatgtccaaaaatctaatacatctaaatatctaattaaactaattaatattttcattt

SEQ ID NO: 240351 - DNA, 1654 bp, Cannabis indica
tagggatttccatgaagctacttattcttggggaggtacattctacttgagcgaaggaagagcacttgaagaattgatgaagatgaaaatccaaagctctcaagaagggcttagggaagcagagaaaaagtgagaaaattttgagtgaaagctttcctatttatattgagctaaatcccttaatcctaagacaattaagaaatttttaatttttaagtttaaaagaaaacgataaataatacgaaaaagataataatcttttatcttttcctttaacttagtgaatttgaactccctatgagaataggagtaggaatacaaaatttaaaagataaaaccattcctaatgcattaaagattaagacaaatttaaagtttaaaaagaaaaagataaatgataagcaaaagattaacaatcttttctcttcttcctttttctttaaatttcgaatgagatgttctaaaaggagtaggatttaaattcaatcaatcctaatgccatgagaaatacatgagaattttaagtattcaaagaaaaagataaaacctaagtgaaaaatgataactttttcctctttttcttcacttaatttttttttgaaaattcccaaacacaagagtaagagaattcaaagttctaattcgattaggaacgctcaaaagaatacaaataattgtcaaagatttccaaaattgatgcccacctggtagtttcaagagaaacgggctcggctcacgtcatcaagtcaatcttacacaagtaaagttgacttgggggcaaatattaaccctaaaactttccctggtgacatggacataaatgtttgacacatggcaagaaagataaaatctcagagatgagtagtcctaagtcatagcaatcaacctagtcgggtccctagccttacaaacaagttgactctacgaactttagaatgggtgttcggattccattaagttgttttcaacttaccatcttccagtattttgtaccattaagacatggagatggagcatccaagtcaaggccccaggagcttaaaacacacgaaacaacacctcaaaagtcaactcgggcgcctagggtttcacccattggcaaggttgacaacccaactagggttttagtttttgggaccatcctagtgcaaatgggacaaaattttcattgaatcatcaaaatcagattcagagaactttgattttgagcactcgttgcctgggcacccagcctaggttgacaatttgccaacctgggccacttccaaggcatcagatcaacaatgactcttgcatcttcttcatcttcataaaaaataaggaaacaagtgctttcaaggaagaaacaagccaatctaggggccaaaataagggaccgacacctaggttcaggggacatttttaacgaccttaaaagttcagggggcataatttgatacatgtcaaagttcagggggcaaaaatcctaattagccttaaaaaaaatgcaaacacttattctataactttttatctcttttacatttttttactattcacactcaaactacttcatactattttctttaattactcacattttataaaagaatcttaattaatttattttaacctttactaaaataagattcttttactttcatacttttttttt

SEQ ID NO: 240352 - DNA, 2245 bp, Cannabis indica
atcaatatttgttgagtttaggagaaacaaaagtttggtttttcaatcactatattattaaaaacttgatttccatctatatttagtcatgtatttgtagaaacgaatgattaggagtttcgattttaggtctaaatgaggttaatttatttttgattttggtgtggagtcaggtagtactattgattagtaaaaattctaagatttattggaacaagtataaaaattggaacttgctcttctttttcactagatatatgtaaattaagaatatggatatattgaaatttttgactattataactagtgattccattaaagaattaacatatatagaaaactattttatattgttataaaatagaaaattttaattagttataaaatatttttaagaagttcatacacaacaaccatattaaacactattttatcttcgttttagcattagaaaaagaaaaggcttgcttgtttgagtatacattcttccttaggagtatcgtaattgcttctcaataaaaattaaagtttcttgtgtctccacaagtttggagtaaattgtgaacatgggctagctggtaacctttgcttcttttagcattgatttgatctcctctattgtcgccctttctcttattattgtgcctagagttattagtgatcggagggttggcagttgttgcatttggattggtggaagtcattgttgtagtggctgaagcaagttgtactgagggaagaggtagggtattgtctaacctggcttcctcaatgtttatatacttttgggccctcttcataaattcatcattaatagtgggagcacctctcccttggaggctatcccatagtaaagacccatgagttatgcctgctcccagtgccatgagtctcccactaacatcaacattctttactttggccgcctcgatgttgaacctattaatataggcctttagactctcaccaggttgctgttttacattggccaaggaagagcattcaggttttcgagacttggtggcacgaaattcttttttaaaaatcacataaaagtttgtcccaagaggtgattgaatgtttcttgaatttattgaactatatttttgctgctcctattaaggtcaccaggaacaacatgcacttcaaatcgccacttacttggcttgtcctcattaatgtgttaaaatcactaatgtgggctcttaggtcagtacttccatcatattttgtcattgtaagcatctttaacccttggggtatggcaatgccaggatgtgtggagaaaaaggcttaggttccttattagattcgtatcccctgacttttcctttggcgttcaataaatgttgaatttgttgttccaatgctataattcgtgggtcatttatcacgggagcaggagtattgggaccggctagtggaggagcgtttgcattacgttgggtgcatattctccttgctatggaggaatggcatactgtgctcgataaggagcctccctctgtgcatgccccctgttcaagtggtctctcaaatcaggtcatcgcctttggtttagatgatcccaaaggtctgggctcgtcatgtcacgtgggaggtgtcgagtatgttcctcataatacggaggaggtgcatcgtcttgaacgctcatagaccggctccttgagtcgaaatggtaactctcccccatgaaactaattgttctttattgttgaggccccagaggtgcaggtcgttgctgggcgtatgattgcattgctgtagttcgagatcttgacaagtaattattgtctcgaggtgaatgaggttgttcatcctgtggtcaagtctccttgagtgctggtcgtggaaggacataattatcacgggagatggtgtgtcatatttcccgtccatgtcccttaggttgaggtacccatctcgcccgttcgagggggtcgagtaaagtcttgacttggaagacaactgggaggtgcttccctttgtcgtgacctctctctcgagactggttgatgtggtgctggtgtattagtacgtggaggctcaggatgccttattggtgatgggaggaacctgattgatgaaggagggttccgaacatggtctcttcccccctcatcaacactaatatccctaggtgctggagatggttgagatggcgggactccattattgcgtgttgtgcccctttcttcatgggagcctcctcgtgggcgatgtgtagcattgtgatcatgtggga

SEQ ID NO: 240353 - DNA, 1095 bp, Cannabis indica
  modified_base (1046)..(1046): a, c, t, g, unknown or other
  modified_base (1051)..(1051): a, c, t, g, unknown or other
ggtctgcatagacgaggatgaaggaaccccactggaatgtaagaagaaggacttggtcgttgattctaggtcctcaaagaatcttaagttgtttagggcaccttcttagagtattgatgattcggagatcccttctgaagcaactgtttttccaggtgtcctgtccatccctttaactcctatccacccagatgatgctcacctgcaaccctagatagccaggcataattttgctgtagatgagcaaactaaaggaaacgccaaagcggaggctttgaggatatggttgatggataactgagatagtcctctccggggggagtatactggccaagtccgggacctaaacttagatcccatgatagactggttctttaacttctttgggttttccttagctccctttgcatcagaaatgatgagccactttgcttccaaattagtccatcttcctataaaaagatttgttgcctacgcctaatctaacccaatctaccaaattcaggatatgagtacggcttttaacctcagtgagtccttacacatcttgctacttgtttacttgctattggtggcgttcaaaatgaatttttttttttgctaaagctggccgcctatccaagactttaatagatcaaggatatgctattgcagctcaaggcgacattattgaggtgctctaggaagctcaaggaggccaacgagcaaatggtggtgcccagtgataaagtcttggcgaataaggtgttaagggaataagactagaaggctgcagatgaggccaagtctactattcgtgaagcttaaaattggcatgacatggacgtgcataatgcctagacagagatcgaggagcttaagtccaaactgagtaagcttgaggaactttatcgagttgatcttaatctatagccaaaatgtctgtggagcttaggaacttcacgaatatgggactcgggcctaaaacacggatgctaaagaggtcttccaaaagtccgctttgaccccagtgacatgcgagcactgtgtaaaatactatgaaagtnttagngttttttacgatggtgcgtgggtacggtccctaaccgtgtttta

SEQ ID NO: 240354 - DNA, 1395 bp, Cannabis indica
agtggtatttgtgtattttttttttatttgggctgtagatttgtttatttggccagtttgaagtatttttgtaatattattactttttttggttaaaactgaaaaaagccctaaaaaaattatttttttaataaaatttttaaaaaattaatatcatagtaattaactaaaatcatgacaatgcaactttctaaataaaagagtcgtgagtgcaacagacagtttaaactttattttcaacatattaaaattttttaattttttaaaattttacaagatatcttaaataactataatgtacacgaccatgaaaaaaaatagactaaaaatctcttgaattctaaaacaagtaggagtacattagagcacgacttttaaaaagttacattattttcgacgtgttaaatttttttgaatttctcaaaattttagaggatgttaaataattataatatgcatgactacagaaaaacatttaggctaaaaaaaatttttgggtgccgaaatagataggagtgcgttagtatgttacttttaaaaatctacattgtagaatttttttaaaattaaatacttaattaatttcataaatacatctaataatataaattttaattaatatgtataattaaaaaaaaatatgcagcgtctacaatgctctgaagcattaacttcaaaatagggtcttcaataatgcttcattggaacaaaattaagcgacatacatttaaaatattgccgctccttagagaagtatttactcatgaatatgtattattaagaaaatttatgttttatgtttaatttttcttataaaattagaaaaataatctcttatttttagatacatgtttcatagggttgaaaaaaaaaattaaaagaaaaagttgtttgataaaaaaatttgagtttaacttaaatatttttttatataatataatttttgatgtagtataaaaagagatattttttatatattttttaattaagtaactaaattaaacataaaaattaaaaaaaatacattaaaatttaatgatttatatttctaaaattaatatttataattatatagaatgtggttgtataacaagatgtatttttttaagtaaaaaacattgcaattcaaatttaaattcactatacacaaatctctctttatcttttattttctacatattaaatgtggctatatataacataaagtattttttctattttaacattgcaatttaaatttaaattatttgtaaatctaattatattaaactagattttatttagagcagacaatccaacaggaacttatgctaagtcctaccagaatcttatcctatatatatatattatctaattaagatgctattgtagggcttattgttgggttttatgccc

SEQ ID NO: 240355 - DNA, 939 bp, Cannabis indica
aaaaaaaaaaaaaaactccaaagccatacatcttctatagtttcgaaccaaaaaaaaaattaattattcattctctgaaaaagagaaaatcaaaacgtttgaaaccgttcattgaaggtacaaactctaattttgaacttgatgatgcagattttgagataccaatgttatttttccattgttttagcatttttttccttttttgttgtagatattttgggtttctttttcaattatttacgtcgactgctcattttaatttatttgttgttgttgttgttgttctgtatttggtattttttttgtttcttattttatgcatattatggttgttttgttgttatatggcttgttcttttgagtcattttttttaagaaaatagatgaatagatgttatcccaaacccatttcttattgatcttctcatttcatcatcttcaaaatgttcttcttcttaagtttgttttttcttcatttgtttgaaagattgatccacatttttctattgttgtttccattagttcttactcttctcatctccatcatcttcaaaaaaaaaaatcagttttttaagcttctttttttagttttttttttgttttgtgcatgttcagtctcagatatcaatttgagattttgttcatcactccctgattttgttaaatatatggtttgttatttcgtatgtactattcggtgtttagtattatatacttgatttttatattttttaatagttgttttttgttgttttgaattattttttttaatgtatttaggattaggaaaaaaatttcaaggtaaaggttccctctcgtgatgttatagtagtccctactggcaaaagagttttgaggtataatttttttttgtgattttatttggttattttgttttgtagttttattgttattttgcagttgttttagaaatttttt

SEQ ID NO: 240356 - DNA, 1085 bp, Cannabis indica
taaaaaaatataataaaaaaaaagaattaaaaatattatataaaataagtttttatacgattataataaactagattataatattatcactattattataatagatcttagcaactcattgaattcacattactttgaaatttataatttaccaaacactcagctcagtttttttccacaattcttttgcaactgatttttctcacagcacagtcacaactgcttttttccacagcacaattatgccaaactggccctaagttaattttccaatggattcttagctaaattattaaaaaaaaattagtgagttgtaatgaattttatgatgtttattttttgtatcgtccaacaattgttaatggggttgttcatgctttgtcaaacacgtgtttattgatttttataatctgaatcagaatagaaaacagaagcgatttaaaaaaaatatatttttggtttttcataatctgaaccacaagccttaagatctcaatatatttataagtattaatttacactacgagttgaagaataatacctcttgtagaacaatcagggtatttccgtattttttcgtataataattgaacatccaattcacgtgacaataatgatgatgatgatgatgatgatgatgatgatgatggacctcacaccaagattgttatcctgaaattcaaaatatacacatggcgttcagaaagttagctaggtgctacgttgggcccagcctaacaacacttaataataatcatctcctgtgaaaggtatgggtaacttcggctctcggagttgacgcccaaagaatttactcaaacaaaatataaagggaaaataacgtctgggagggtcaagacctctcaaatcccccctgatgggttggtcccaacttttgcagcgcataattatgaaaagcaatgtagcttgtctttctgcacaagcagtaaaatgagttttccacaaaggaaataaatttgagggttttccccattcctttttctgacatacgtcttccaagcagctctagtcttgattcttagaagctcccaatgacctcggtgcataaagagaagatgacatgg

SEQ ID NO: 240357 - DNA, 912 bp, Cannabis indica
ttcaatttttttttttttcaattttatatcgattttttaaaaactttatttaaaggaattttatttcaaaaaagagtataatgccagtggaagatgataatagagtgttctaatttagtcacttaataaaatagaaatactacttaataaatacttaataatcaacaattactaaaattggatcaaacttcatagcaatatacactaacacattttgatccaactacatggattatctagtagcatagttagtgattattgacgttgcatcaaatatatattttgattggaatgacatttgtaaattttaaaaaagaataaaacgggaaaaattgccaatcttaaaaattatcatctgccttttatctcaagatacaagctattattaagatatagaaaattcaatttcaaaaatcaaaagtaattagtaatataagtagtagaaagatttatactttaatgaatatattaatatattctcacttcttaatataaataaaaataagattttaagatagtggtttgattaagattaaaattttggttataggtgtaaataaggagtttgatctattgagctccagaatgagtagaaactagaaattctttacaacatatggaccctccaacacctaaaaagctatatagatcatcataccaaacttgaaaatcaatatccaaaaacaaaagtatgagatcatcaaacaagccgcatggattcaacaaccttattgtaaccatttttttcaactgcacgtgtcgtcttttatatacgcggtttaaatattaaaatttaggtgtcgtttggtaacacttttgttttttaattttttaatcacaaaatgaaagtaaaatttttgtttttaaaacttttgtttttaaaaaacaaaaatacgttctgtaaccactttt

SEQ ID NO: 240358 - DNA, 1288 bp, Cannabis indica
agatcaccttaaacaaacaaatattaaatccaaacaaacaaatcaagaataaaaccagcaagcgcatatcaaaccagagacataaacacagagataaatctagatagcttttagacacaataacacacgagatttatactggttcagatcctaagttcaatgtgaacttggtcctactctagtttgaaatcactgccaccaatctttattaaatgagattaagagacatcaatctcaagagctacagggaaataatcatagtaaatcttccatagtgtaatctctcaacactcactaactcactaacccaagccaacataatcatcaatgttgttcaatataatttctcaatcccagctctctcactctcggatatctcttttgctttctcactttaacttctctctctgcaatgttgtgtctttctccttttttttggttgagtcttctttttgttattatgaaatgagatgagtagttctctttataaaggtcaatagacctaatatgattgctttcacattttaattaatgaccaattaactaattaaccaagttttagttgagtttttaaggaataataccataggattaaatttctctagtattagtagaacttgtaatttttccgctcataatgtggttaagtgggcgtttacccataagaggtttagttttatcctgctatcttctattccggacaacctgtattgtaatgatcataaggtctaactttttctatttatataagcacaaattttcataaaatattaaattggataggaggagtaggagatgctcttacaatgttttgaaaaccaaaccaaacactaaaccaaaggtttccaaaatatctattgttttagaaaagatcagagtgtgaatgccaaaaatcttaattcactagacaacaaaatacatgagatgatgggttttggaagatttgctttcacaattttgatcaacctttttaatctcttcgtgcaaaattttagaaaaatgggaaatgttaattttatatgtagctactaaaatgtgattattggggtttatgttcatacattatgacataacatcccggcaaggatgccttctatcatatactagttttgtttttcttccctatttagaaattaaatctgcatttgttgcaagaaaaaagagaaaaaaattaaattctgcaagtaggggtgtttattggatcacatcgaatggatttggatccatccgactcaatccaattatttattggatattaaatttgtcatctgatccaatctaattgaat

SEQ ID NO: 240359 - DNA, 775 bp, Cannabis indica
atccaattttcttgtttttgggtgcttagttggttgttgattatttctcttatttcatgtgtcaataatagtgttatgtctcagtttttattgaaagatcacgaggtgattattattgataggtataatttatcagatattcatttgagttaaaaattcattttgcttcacactttttttatgcttgattgttagtggtttattggatatttcgttgaggttactgttaggattttgtttccttgttatgcataatattattgttgattttgctttataaattatatgttcttgtaatgaattttgtctgatttatctattaatgaaaatttttattttctaaaaaataataaaaaaaatagttttttaaaagacttttttggagaatctagaaatctcattaaaaaataattttttattatttatcattccaaaaaatattattttaatactaaaagttaaaattgaggttaaaaaaataatttaattagaaagttcaattaataattttttgtaaaatacaaaattcaaaataatatttatctgtatgtttggaagaaattgtgtaattacaggtagggtatattatattttaaaatacaaggtgtgtttggatatgaggtggtaattacatatgaattcctaatatcttgtttggcaaaatagttaataattatatgggaaaataatattttttagaggcttctttatttttacacttcaaaatatattttttttttccatttttacgaaattctatatagaaatctctatt

SEQ ID NO: 240360 - DNA, 637 bp, Cannabis indica
tctctctctctctctcttcaattatcgaaaattgaataaaatataatcagatcaaaattaaaacgtggtaagaaatgaatcaaaataaattccaagaaaaaaaaaagtacattgtgttcaaagcgagaatagatgatgagttaaagaaaaataataaatacatgagaataaaatagagctagaatacctgtaactgtaatgaggtaagatggaaattagggtttcgagctctgagactgagatggagaggcggccgagctctgagactgtgcgacgacgaagagaatgtccagccagcctagttgcagtaaatgcccttcatatgggctgataaattacacatgcactaggcccaaacaatgtgggctcggcccaatgtttacttcctagaacacggggtatgatctaagggaaatttacaaatagtctgaaaattacattaaatatggaatttcataaaaaattagaaaaatatgatatttataagtttaccactcttttatagtattttttcatatttaagattttttatggtatttgataggccatatttttagggaaatttacataatatacttatttttgctatttttttacatatatattgtgaggcagtaatgtttacatttttactgtg

SEQ ID NO: 240361 - DNA, 1401 bp, Cannabis indica
gctgggcttggctcacgggtgctctactgtacaggaaagggtaaatcagtttgtgatcagccataagtgcgagagcttggcggtgcttgtatatgtttgggccacactagactaagtgggttggggtctaccagtgatgtattttgtaactctgattttgccgcttaggtcggcacgtgaaatagacttgtatattttgtgaaaatatttgtgggatcccgaatcatgtaattttttgatttgtctataaagttaaacattattacaagttatatttttactttgttacacttaaagtttaaatttttccgctcttacccttatagtaattttgaataagcgggattagggtttcattatcggttgtcgcagcgtgcctaattgttagggcattacaattctaatatctgatattgagaagtctttagcccgactaggtaaagcttccttttcaggcttaaccaattccgaatctttcgtttgaacacttctaattctttctattattcttgtttccgataaaggacacatggaatttccataataaatacaacacaaatacttaaggtcaatagtgggcccacttgagataactgcgtcagatccataaatcatcattcctttcggatgaagaatgagcaactagcccaaatgagatcccatcctgtatggtcaatatctggtggacatgtaacaccgtatctaaaagaagccttcaacgtatattaagaagcctagtttagttttccattcactgccagatcacacaagatcatggcttgcctccaataattttaaatagaagatcgtatctataatatcttgaaaatctagttatgtttaattaagcatattatattaaatatgaaataatgtatatagattgtacataaattgataagattataatctgagtaagtttattatgtaataattacatattttaatagaaataaataaataagcataatttattaactatgaagattcaattagactatgttggtaaaataaatagtatttctgaaattaaacattttcgagttcgacaaccgtgaaaacccggtggattgcctaaagatttcaagacgataatagtgtgagatttagttatactaaaatgttttagtggttatttgtgttgtcggggtgttttagggtgattggttatgaccaaactacccctaaccttacaggttacttaggatctaagaaaagggtattatgctcattttattaggtgatattttagtgttttggcttttgtctttttgtggttttctaaagaaacattggctaagtttaggttggacaaaaaagaattattaaactaaataatttatttttttttaaaaataagatagattaattaaaacaaaataagactctctctctctctct

SEQ ID NO: 240362 - DNA, 1505 bp, Cannabis indica
gaagaagaacccaatcaatcaaaaatggtagacgtaagtttactctaaaccctttgaattattacgaataaagctatacctgacagaataaaattattcatatctattacaatacaatatatattgatgtaagaatgtatttttcatataatatatatacataaaaaggacaaaagtcttacatatctttacaatagtactatgtcatttcattacgtttttaggaaaaaaaaaaatgaaataagtaaataaaataattaaatgtgtcagccattataaatagtacgttatataaacaatcttttttttttttttttgaaaactaagtttctatagccttgagtggtattgataattgactgatattaatttgttgaacactcaattttacaatttgattgctatatctataatatattagcttcagtgttatatatatgttggacatttcacacattgactgtaacaaattgatactatatttaacacattgattgctattttttctacagtctttttataagttgagctgctacttccttcatcttcttttattcaaataattgttaatagttatttgattgatacctatgccatgagtcataaattgactccacgtatttatcaatctccttgagctcaacattaagagacaaacaatgaccgttatgagtcctatatattgattgtggcaatcaatatttcatctactttacaaatgaagacctatgtaaataccgcttagcttaaatttggaaattagcatataattagaatttaattatgaaaattagttactaattctaaattattaatttataatgatttattagaattcagaatgcattttatgtgtcatatatagaaatttcataattttgcatgttcaatgtccggcaattttggaacgcggtgtatggcttagttgaatcacatcttagtatttaagtttagtggggcggtatatttagacattgggaatgtcgggaattgtcaggattttagaatttcccaaattaccccttagtgatttttagtgttaaagggcaaaataatttttttagcaagaagtgctttgtcttttgtgggttatattaatctgatttttaaagtttaattaaatggatttaattgattaaaacaaatggggttatctcattttcaaggaaaaagtaaagtaaagacaaaaaattcacatttcactctaaattctctctctttttcgaaatccctagaatcagctagggtttgattttattcttcaatcttgcaagttttcagcagctctaagttttatccaagccaaggtaaacctctttgcaactttctttttagttccttgagttttaaatttgaaattttgcatgagatagtgtttttactgctgtgattgctgtagttacttagtattgtttttagaggtttggttatgctagattatgctgaattaagtttgtgttgtgggctgttattagatttgagcaagctttgagtttagaactcaa

SEQ ID NO: 240363 - DNA, 1126 bp, Cannabis indica
ttctcacttttaaaaacacaattttaaaaactgaaaactgaaaacacaaccaaacaagatcaaatttttagacctagctctcctttaaaatgaagattttttaaaaatttaaagaagagcaaaaacgccttccaataaataatgtaaacttcttatctattttaaagaatctttattttcttcatatgcttctcatataaaaaagtactattcatcctttaaacataatttaataatattttaactacattttattctatttttattaatatgtattatatattaaaaaatatatattatttaaatgatagtaagaaaatataaagaagctgatatatagtgtattataaaagtttggtgtaaaataaaaaagtaatttgataatgcattttaaagaatagagtagataagctgttagagtgctcattgttgtgaagattaatgcacgcaagtatacgcagtcacacaagtaataaagtgataagtaagatcggttccacaaggattgcaaacaaaatatattgtaaaactaactaattacaacttaaagtaaaaggaaaactatgagaatggttgagcaatgatttaaaattaaaatgactataattaaacttgcctaaaataatgctactttttctataaaaattgcttgcaagaaatgtaatatattaaaaagtggcttgaataactaattccccctagtcagtattttcccagttcttacagcattacttcatcattttcgcacagagatagtagaattttcttgttttatgagaatttttcaaacctcacaaattaagttctagcacttagctcaatatattcctgtatcaaaccatattgcagaacacatttaaacatcaattcttaagttatgcaaagtaaatgaaatattcctactccatttacaagaaaaacctaaatctaagaattctcttgcttcatccaagttataactactagatctagccccttcaaaaaaagatttagcttaacaaattgttactcagggccaagaaataacaattaaagaaaataacaagcttacttgaatgaacaaaggcaaagatgctaaaatattcttacatattaatcataccaaatataggggttcatagccatt

SEQ ID NO: 240364 - DNA, 987 bp, Cannabis indica
gagtatacttagtacaaagtttagtaaagtaaaaaaataaaaaaaaaaaaaaaaaaaattaaacataatacaaaatcctaactaaacaataaatcaggtaaatctggcttcggttagaaagatttgcactttctctcttggttattagaaattgagttagagaagttcttgtttctgcctcttggaaagttcttggaattgttcttcctgagttagtcgaggctctcgccatttgaaattagtatcgagttgaatgttgttgaggccaagagtaaggaattgttcataagtttaataattctcttattttggactcgtctttgagtttaattctagatgatattagattgttatgttcttatttgtgagctttaatttttgttttcgatctgttaatatattcacttattaagtttgttttttcagctcctgcaagtatagtttggtggcttgattatcatttaatttttagttttggatatgtttctcccaattggtttttattgttaatgatttgtaagactttatttgatgaattatatcatatttcaatgatttgcaaacaaagttaatgacttagttagagagttctgtttataatttattaagttttacgtaactttatcttctttgtttactatattattattatttaaaaaataaaaaataaaaaaataatgatattaatatatttttaaaacaaaattaaatgataataataattatatttttttacatctttatattagagcacaattgtaaatagtaagctaaatataacataaactcaaatattgtgctaaatttaacatcaactttacatcttatattagagatgatcttatgctatgtaaatttaacacatcttaaaagttaagctaaatttatcacaataaatattactttatttatttatatatcaccactccattaatgttttttttttaataatgattaaatttcattaaactaaatcatccaaaacta

SEQ ID NO: 240365 - DNA, 611 bp, Cannabis indica
acagtatttttgaaaatttttccgtgtaacagtatttttgttaaagttaacctaaattttaatatttttgtaaattttcttttaaaatatagcacagtgtatatggtgatccaagaatagcaacccaagattgaatcctacataatacacttgatccaagtccaacaaataacagggatatgaatacaaggatttttccctgctctggaacgttctagggtctttccttctggttcatccagtttcgtccccgtcgcttcaccttccgccttctctccctccctcttctcttgcctcattcaattctttctgccttcctcaccgtcatcattagcttctttaattacgcctccttttctcccttcccaatacctcaataaatgccatatcaggaaatctttccctgtcttattcttaatatatgctattaatgccctaacttgagatcgcccccttaatcattgttttctctttaattccagcccccattttcccgtttacgagaccccattaatgctccatcagaaaactcttggcccttcttcttccccccctcttttcatgcatttactaactgtcactctcttcaggtggaggcgaatcattgccct

SEQ ID NO: 240366 - DNA, 708 bp, Cannabis indica
gattatatttgaaagttttttcttatgtctttattttttattgtaaccctagtaatgctcttgttcattcgttaataactaaatttgttctttcattaaaacttctctttggtggccggatcttctacccaatggattttagacagtttatattgatctcaagatccttttggctttcaattttttttgatggaataattcatttttctcaaaagaaaaatatcttttaaagaaaagaaaatgaaattaattaacgataatagaattgaattaggtacgttcacataattgttgacacgttaatattattattgaaaataaaataataattaattaggatctatttgttattaacagatgacattaattatcaaaaaagacaatgattaatgggttaggatccaaattacatagttgacttgaagaataaagatatagattaaatttgtatataaattaattttaaaatattataataaataatattttcatcgtttgtatagtacgcagtcgttgtatgttcacattctaatatgtggcatctaataacaccatttagagatattatttgtcaaaaataaacattgagtactgtcttaactattttatttttcaatttttaaaaaaatattatattttctaatataatatttattttgtattggttaacttatatcgtcataaatttgaatttagtgtagtgttatg

SEQ ID NO: 240367 - DNA, 921 bp, Cannabis indica
ctctaacgaagcaaaatttcacttgagaccgttttaaataaataataaataataattcactaatctcatgaacaccctagcataatgttgatttaaacaagaataaaagatcgaaacatttaagcaaacttatttagacacaaattcataccacaatagtgaggtcatgaggtaataggtgtaaaacacttattatgaatactaaattaaactaaaagtaaactaaaactttgtatcacaaatagagacaaatcatgtctgaattcccatcatcgagagcccttctttccaacatacccaataccttagaacctcttctccttagacccttaagcttccacccagacccaccaaggctgagcccaggcgctcgtttcccccaactcccaccctattagaaaatgatatagttaccggttattaatttgtccaggtcaccaaatgatgttgtagcactgaattgaaccctattatgtgaactcttattttacagcttttaattgtaatcattaggcaatattattaatttgtccttctgtcttctttcaattagtgttgttaaagtatattcctttattgtttgtttctctctctctctcattagtgagatatccttgttctagcaccttttgtaattttgtttgttgacctcaaaaagtgatcaaccgatagcggggtcgtatggatctgatacttgccatgtatttgcacaactaagaataaaaagcaataaacaacaagatttgttataaagatttggcccccttgtgatagcgggtaattctatttgtttacctcaaaaagtgatcaaccgatagcgggatcgtatggatctgatgcttgccatgtgtttgcacaactaagaataaaaagcaatgaagaacaagatttgttatacagatttggcccccttgtgatagc

SEQ ID NO: 240368 - DNA, 1009 bp, Cannabis indica
tttttgttttgttatggcatatggattgaaaatgcatatataactatatataacacttatctaatggattaccttatgcagaggcatggaagatgacgatgataatacacctatagagaacgagacaccttcagaagataacacaactaaagaaaaaaaagttagaggtcaatcaatttgtaaaaaaatttggaagtcgaaaagtaagggatcaaaagttgctcttaaatggaatgattatggccaatcaatcggaaagcattgtggtatgcttcaaacttatcttggttatcttgcacgcacagagtccctatagatattggtaaaacaaaaaatattattgaacgagcaagattacttgcggaacacttaaatttagtagaaaaggggatgtttctattgacaccttaaaacttggggcttgtgattcatttttttattattatttataatgtcaaatgtttaaataataaaggatgacttaataatattgattacagacgacattggatggtcataatcatttatgctcatagccaagatgcatattttttcgatccagttggtaattatccaaaagaagacgccgtgagtgtagtcaaaacgttagattaattcaaagttttttcatataaatgttataaagtttataataaattatgcactattttacctaattgaaaatttattttattttttatgaagtgcatttgacttatataatacccgaaataataatttaagaagaaaaatccaaagtgtaacttggtatacaatttagatatgggtacttaaattgaactttaaaactttttctctttgaattatttttctattcaagaattacgacatatatataaatattttcagggtcctaaacaacttgacggtaaaatctgtggttttcatatcatgcgactaatgagagacttaactatgtcgaacaatccaagagattatcttgagaagcatgtaagtgcttgagttatcgtatctttataatataatt

SEQ ID NO: 240369 - DNA, 842 bp, Cannabis indica
tagttgattattggtgcaatttactatcagtcccacactttttattttaataaataatataggaaatcgttaactaaagtgtcacattgagatgatattaggcacattgcactatttatacatttttatattcgttataactattgtcaatgtcaccttatgtgttctatggtgtttgaaagagcaaacatcaaatcttaactcactttgcacttgattctatttttatattttagttgtattaattaattttaaaattactttatatatatataaatttatttatatttctttgattattaatattataattaataatataatctatctattcttattttacctacatatttttattatttatccataaatgtttcttccataaaaaaagaaatccataaatgttttaaaaataatgtttctattatactgaaagtaaaattgaaatagtaaataagcaaacaccaatatttatatttagggataactttatttcaattttatctaataaattattttattttatgtcactttttacttatttgaaattaatttttaaatattatttttcaattaattgttatatatagagtaataaataatactaattacttattatatatctcattaattcacaatttcatctgttatctattttattttttattaattactcattatcaatatgtatatatattcatttttgtggatattattatttacttggacaatgccatttttattttatttattatggataataatggaggtaagatgaaagtgagtaagatattataagtagtttttttgtattatttatatttggaaaaaaaaaataaaaa

SEQ ID NO: 240370 - DNA, 1049 bp, Cannabis indica
aatatttgatgtatgttttgttgagtatggtgcgaaaggtaaattttgatgaacttccgattgttgatcgtatttttgtgttcactgtttggttgatatgtcgaatggtagaatgagtgattgcttgttggttttgaaaattgaatgatcaaagttgtgatgtatgcgattgaagcttttttttgttcactaatggaatttttttttcttgagaaaatttcgatgtgtgcgattttgaatttatttacaatcgcagtgaacgatttcgcagatatgattgtagttttgaggaaggagttcgaggttgaatggttgatgagtcggtgatcgagcttttttgttgatcaatggtgtttttttttttgagaatggtttgaatagtgagaatcctttgagttatagttttataggtttccttgttagtcgattacacacgcgcggttgaaatgatgtgatcccgtagataatagaggagcacagcgcgtgatgggacggttttgcaagtttcatgtttgcaattctggtattgttttttttaattctcggtagggatgatgacatggagcgttaataaaaagctattaaattaattaacggtaatattaataatagattgtattttaggtatataaatgaaaatttccctataaaatatgtttaattgagtgacatgtcaaatacaaagtaaacaaatattatttctaaaaaatgaaattaataaaaaaaatcatttaaaagaaaaagagaagaaataggcatgtatatttacactttatgtgtgtattttttaaggctctttataatttagaaaatatagttgaagatcaaaattatacttcttgataattcaagagtgatcaaagttacaaaattgaattatctttcttttactcttttaagaaaaattgaattatcgtagagcactcccaataattttttttctctatcattaaaaatattattaaaatattattttatattttatagcaaatttttacattatattatccattattttttctattttttatatattttattctatttta

SEQ ID NO: 240371 - DNA, 808 bp, Cannabis indica
aaagcagcatagtaaggtctagaaagaagaaaaaaataaatggtttaaagctattttccaatttattttaataaaaaaggtactaaaagagaaaaaaaaaatgtctaagcctttttctgtttttggttaatttattttattggtcaaattgattccctcaatccaactttctcttttcttttcttccaagcattaagcataacttttaagatcactttttctagtttcttttcttttataaaacttccccaaatatgctaaaggagattcctttaagtattttattagagacaaaatcattgtgtgaggttttatttatttatttctttaattattgtcactaattaaataaatacatcgcaatcatgattaaaattgatgatattttccttgtaaaaaaattgatgatattttacaattgacaattctcaattcttaatcttagagcactcacaacaagtgagttataataactaaaagctaaaaaaaaaaaaaataactaagagcttaaaattaagctccaacaaatgctttaaattcttagctattataactcatccaaaactcttagttagtataaactccttcaaactaaagaatctttacaagaatatagctaattggtttaaataagcttccattatgtggtttatattgcatagctaatttacattagctacattatcttcatatatattttattatttttttggtgtactttcattttagttctttctctttctctctctctcatattaaatcatttaattaaataaataatgcttaaaatataatatctaaataatgt

SEQ ID NO: 240372 - DNA, 607 bp, Cannabis indica
tgccacgtgtattttagtatacttcaatagtccactgtggcacttaattgaaatttttagacgaatgggtaaaaatcataacagaagtaaggtttacgtagttttacccttaaaaaatgaattgattcagttaaactgttaaaaaaaataaagttcgagtggttttgtcgccaatatcctttatcaaaatgtagtgttttgccattgttgactaagaaataactgtaatatagcactgtgggaaatggagataggtcaaaggagacgagcaattttctttaataaaaaagggaaattgttagaagtaatttttttttatgttttatttataattttacggtttaaagtttttatttataaaaatacgtattttaaaattacaaaaatatactttgcttaggaaaaattaagaaaataactaaaaagaaatcaaccttcacaataactataaataaactataaaataataataaaaaaaaaaacaaatccataacaattataattgaagaagtataaataaattataaaacaactaaaaaatagtttattatttttaataaaaaagtatttttattactgactacttagtaatttttctcctgaactt

SEQ ID NO: 240373 - DNA, 842 bp, Cannabis indica
tcttactcctcgtgatgcattctctttttatctattcaagctttgcctaagctttaattatacgcaacttccacctaccttcttagaagtcgaatcttgatacataaaattcaataggactctcgcgtgcacttggtttttgtacaagaaagatcactaggagtgtgccaagttttcaaccctccttttgcagaatgcaaggattgcttgaattctgtcttactccctgtgattgcttctccttttgatttttccaagcaaagtctaatcttgaattttttagaaaattcagccttccttcctggatgccgaagcccgctacataaaaattcaatatgactctcgcgtgcatgttggtttttgtacaagaaagatcaatgggtgtatggcacatcttcaaccctccatcccagaatggaagaaatacttgaagtctatcttactctctgtgatgctttcttcctttgatctttccaagcaaaagtctaagcttgaattattatgcagcatcagccttccttcctggaagccgaagcttgctacttaaaaattgaacacgactctcgcctgcacgacatttttcgtgcaagaatgatcactgggggtatggcacatgttcaaccttccatctcgaaatggaaggacttcttaaagtctggcttactctctgtgatgctgtcttcctttcgtcttttcaagcgaagtctgagtttgaatttttatgcaactttgcttttctcctggaactgaagctttctacataaaattcaatagactcttgcatgcacgatgaatttcaagcaagaaagatcactagggatgtggcttttctttaaccgtcc

SEQ ID NO: 240374 - DNA, 1742 bp, Cannabis indica
agtcaattcttaaaccaaacataagattactttcaacataattcaatcttgttcaatcctttccagtctaattatgcgtaggtataatagatattggtgcaatgtaatattaaatctcacttattttaattgaataaaaattatataaggaattgctaattaattatagtaataaaatgttatgtcatagaagtgctaaataccttagcggtccataatataatttttaaaagtgtttagtttatgcatgaattaattttattatccttttccactaaataagaagatatttggttttgattcgaaatcctcaatagtgaaagcatgcaaaaggagttttttttttgagggggcctccaaagttcggctttgtgttaactcccacacccacttaataaagaggataaacacacttgaaaattcacaccccaaaagatcttgtgaacttctaactaataatatataaatgtagaaataattgggaataactataaaagagccaattgaacaaataaaaggttttttcatgaaatttttcccaagtatgcttttttattctcattacgaaattaactacagtcaaccaattttgatcttagaaaagacaagaaatatagcaatatatattcgttttaacaggagtgcgccattaaatcatttccacattatgtgtaagtgaaatttaatggagaaatagatatttgggagattttattggttaaagttatatacttttaggctataacttcataatataataaagtagaattgtctcatatggagactaagaccctataaactaaattatcaaaaaaaaaaaaacctataaactatgagcaaaatttctctatcacaaagacataaggacttggtattgacctatattagatatagtataatagcaatttggcagcatcttgacacttggtaccagattatttatttatttatttattatagaccatcaaatatgaaagagttaatcttttcaatagaattttttttccaatcaatgttgtgaattaataagtttttgtgttaccaattcttgtggtgtaatattattacttggtcaaagccaaagagaaagaaggtcaagagcatatttgagtgcaatcccatcaattattataaatatattcctcagtgggtgggaaactaagtttaataataataataataataataataataataataataataatgatgattttcatcaaaatggacttttattttaaatatatataaatatgtatattaagagaaggaagggttatgtgaaaggcaggcaggggtatgggttcttggtgagaggtcattcaatcaaccaaccataaatataaatgtattctatgatggtttgggtgaagaaaagcaattagacagaagatcctatttttttttttcttttaattttaaaataatataatataaaaagaaaaattgcccccactatcgatatgggtcctacaaaagggtttcaccacactgactatgtagcccagcccactcaaggccatcataattggtgtaacagaaagctccatatgttttattactcataataataataataatattattattataagtcgttttttttttttttttttttgttaccttttaagttttggttgttaattttttattggggtttctgtatgattttgtgttgtaatttaggttacagcgctagttgcaataagaatttttatgtaaaattacaaaaaaactatttt

SEQ ID NO: 240375 - DNA, 879 bp, Cannabis indica
ccatattgtacttaaaaataggcatgtaggctgaactggtgaatttttttttttaaaaaacatcagacaatgggagtctctggttctttgtacggatcagatgtatcttcagtggctggagtcttattctcttggttagtaggagggttggtataggctacttcgacattttctttggctttttgggcatcacaaaaaccaagataagcctcctttttctcattgaggtaattaaagttagcctctggattagccctccaaaactcatagaagacgtccagagcagttgtcttcaaactttccacctcctttggaaggacatcctattcaacattaaaagatgtccgctcaaaatcaaggatctcctacatgattctcttcttctcagttagatcattgactctggtctctagattggtgagaatagtatagagagtcccctctcatccttaagagaatttacatcctttggcaaagcctcattgtctgcctcaagctgaacgatggatggcatgtcactaatctccttcttcaagtctttaatgaatttgttagcctccaagagttgcttattgacttcacataattgaatactcttcagctcggcatccttcttggtctcctccatctcctttttcaagttgctagtggtggttgtaaatttcaaggctccaaactaggcacgagattaattgtatgccatcttcagattgagtttcacaataaaataagattaaagtctggacagtttaaagcatatgtgagaaaaacaaaagtgaagagacttactcgggtggcctcttttagtaagtcgtccatgaatagctccacgaacacatcctctccctcggccagctgatcatttacttcaggaagtac

SEQ ID NO: 240376 - DNA, 1878 bp, Cannabis indica
ataatgtagtactaaaattaataataataaaataataattttctctttgaactattttctctaatgatcactcataaacttgcagcgttaatagcggtataaatactaaaaattttatgtttataagcggcataaacttaatatttatttttagaagcataaacctagaattgaattttagggtaggcttacttatatatttaatataatccaaaataataaataactagctaaatttaagtgaaatgatagtttagcagcatcctcctattctagtggtcataagtttgatcatagtttgaaccttatacttcatttattttttaataaataaaatatagatacacgtagaaaaaaagcgcaagaaactttaaaacatggtctcccatgtaaatttaaaccaattgttcaatttaactactatgtatatatgaaaataacaattgtatattaatatatttttaaatttcagggtgggctttagccctccctcaacacccctaggtccgcctacgagcataagtacacactcaattttgaatttattaaaaaaatatttagaagtaattgatactacatatttctatctaaactcaatgattaataatttaggccttatatgtgccctatttaagacaataacagataaaattagagaaaaaatataattttacaaatattgagtacttatgtcgctaaaaatgaacattaagtttatgctgcttaaaaatataaaactttgaataattatgccgttagttaccctttaaacattgtaatatgtatgtcccaaattctctcttatataaccttacacattttgatagaacgtgtgttgaatgtttcacagagtagcaagctagatgttttcttttttcctcaattaatatagaaagctcaaaattaaagaatatggagactggtacgcatgatttgttgagttatttactgcatcccattatcatcatttggatatcaacgatggccttcaacttattattttcatgcaacaaaactcagcagcagcatcttccaccagggccaagacccttgcccatagtagggaacctcatgaaacttggtgacaaaccccatcaaccattagccaatctttctcataatcatggccccatcatgagtttaaaactaggcagaataaccacagctatggtttcttcagcagatttggccaaagaaattctccaaacacgcgaccatttcttctccaatcgaacccttcaggactcactacgagcatgccagtctctcctagttggagaaaccttagaaaattatgcaactctcacttgttttctgttaatggctgaagaaggggaggcagtggatattggcacagctagttttaaaacatcattgaatccagctcagctgacatggccagagagcttaaagaaattgtttggaatatgatgaaagatgctaagcctaacttggctgattatttcccggttgttaagatgtttgatccacaaggcataaggtctagcatggcttttcataaggactaatactctcatccaagaaaatgataatgacactatggatgctcttctcaatttttacaagacaagatcagattctttacaaaaattcagaagaacatgttttactggtatgagtttgattatgatagtctaaaatcccatcaaatgtgattctcaaagacgatggttataattatttaaggagaggagacattagttgaagattgtacaagaaatactgaaacagaacataacagattacacaaaacagctacacaataacagaaatatgagcttatcttcatccacatcctgagcttaaacatgtcattgataagggaaaccaagcgaaagattcagacataacaaggct

SEQ ID NO: 240377 - DNA, 1548 bp, Cannabis indica
ctttccatcccacttatatattatcatattcaccctcgtaacacatccccataataatgcttatgtatatatatatatattcttaataatatatattacttcgcatcaagaatctagtaacttgcacacataaacatacgatgtatataatattacacacgaaaaaattaattaatttaatatttgaagctgagagaattagaaaagaaaaaaaaaggcttcgaatctaaacaagatgagatcgataccaaaagaaatgtcgggattcttaatcaaagactgacaaaattcgagtcactatacaatctttataaagatcctatccatgaccatgagaaatggtcggatattcagacttaatttagacaacactactatataatatataatttaatttgttttcaaattatagtatatattttcgtatatacattatcatttatcaaaaaaagaaaatatatattacaacgtgattttagtcaaaggagtacttatatacgtaatgtatgtggattgtaaatcataaatatgatatatatatatatatatatatctacatggaaatggaagcattcatagatgttaaggtcctacactcctaccctgtctagaatctacatacagaaacggagggtacccaccactacaaagataggagaagatagtgggtgtcatttgttacttttttaatttttattttttataaatccaattatacacatttttagaaaatttaaaataatttatggtaataaggatttttttttatatacatacactattttgaattatgtaaattatttaaattttttcaataattgatttaacttcaataaaagcaaaattgatgctgcacctataaaaatttgtttttcttttttgatgaatataaaaatttgttattgattatataaatataatttaatgtgtaaagtttgagccataccatgtggtttgctagagtgatctttttcccctacatatatatctaatgcttattgtcccaaaaaaactagttttctacagcacacgatgcgaaattcctttgcttaagaagggaccactttcttcgctgttctagagatatctatacatgacatgagtacgtcgttgtctaaaaactcactaaaaaaataatcttatttttagaaaaagtcaatattttttagttattattattattaattaattaaaagaatttaattattttaatatgtgattgtaagctttttggcaaaattaaaatacaaggcaatgaaatttctgtgtatttattttgttattttttagtttataattattttttatctatcattatactcaaaaaggaggatagaaaaaaaaaattaaaagaataaaattgtaacaacaaatttcatgaaaaaaaaattaaattgtcaaaactaaataaaaaaaaaacaataatacaaaaatatattaggagttaatattattttatttattgcaattagatcaatattttattatttttctcttactttgtagttatatctttattgttttatagttgtttcatgttgtttgtta

SEQ ID NO: 240378 - DNA, 681 bp, Cannabis indica
tagaaactaagaacttcgattctgtaacacttttacatccaagaagttgaactaacactgaagcctcacaactaacaactcacatctcactcaccatacaaaactctcatctcacttaccatacaaatcattctaaactgtttcccaatccttttagtcagaactcctagaagtgttttcatgctgaacccattagcggactagagccgataggggccagtcgctccttagaaaaaaaatttggaaaagaaatgtacatgtaatttagttagtcacaacatatatttgtaattaaaaatgttatatactaacatagtattagcttttgtacgatgattaagctattttacatttatcttgaaagtgaagagaaatctgaataatagcacttttttttgttaatttttgaagtctacttttatacctttaccaaattttttttaagcaaatattttattgttattattttttatttaaactatatttaattgtataaaaaaatatgtttatatttttaacatgttatatcatgtagaaaataaaatataccctattttcttacttaaaaaaaaacacaccccctcaactaaaatcctcagtccgccactgagtgctactcctgaagtaaaactaataacctgaataaattggtgacatactgctctataaaagctaccagca

SEQ ID NO: 240379 - DNA, 629 bp, Cannabis indica
ctagtacgggttcagcatgttcccgcagcagaccaaattgcagacagtttcactaaagctacttctgcacctcgatttgttttgttcgaaaccaaacttggcattggcccttgcaccaaattccaagtttaagggggagtgtcaagacagttaattatgtcagttagttgttatggctttttgttcaattctgttacagtttctgcttggtttgttttgcttagttttagctcagtgagttttgtatataaattgtactcctcagctcaagtgggaatgagaataacaatctttccttcatactctttctctgttctttcctctcttctccttcctctcttttcttctctttcttctgtttcttattcttaatttgtttatttgtgtcaatggtgagaaaagcttccaacactaacaacttatatcatttataatgaaatacatccttagagctggatccctacattcgattgtataccatctcccattagaattattgtaagatcatagactcttgatcaaactccattattaaaatacattcttagagctgcatgctaattattcaccaaaaattgacatgtaaaaaaagtgagttgaattgtgttatttggaacaatcgttagaga

SEQ ID NO: 240380 - DNA, 1456 bp, Cannabis indica
tttcttttttttttttaaaaaaaaaaacatctttctattattttttttaattcattgcacatatttaaaaatatcttttttattattttttatatatctaaaaataatatttctattattattttttataaactcactgcacttatataaaaatatatttcttcattaatattttttttaaaattaaactcttaataacaacaatagagtatatatggaaaatccttaatccaggctaatttaccatcaactctaaatacatacacgctaatttatgagaacgaacatgaactagggaaatgccttaggaaaattggaaagtaaactagcaaaaatatctaataaaaaacctaacacattacaaaaggaagagcatttaaaaaaaataagaaccgagaatatagaggagagtgtacttatttcaacacaaggctcttcaagatctcgatagaattattagttgtcagtgtcgttctgctctagtagtgttggtaaatatctctctttccgtagatcgtcggcgttggagcttcttcgacctttagccatgacgctcttttggacctgaagaagggaattaaaccggcgtgtgcccattagtctatgtcctgccctatccaactatttggatagtcctgacgtgcgagcttactttcttccttgccctcttgagtaatgggaagtgggctagtccccgaaaatgcccgttcgcttgtcgttggggagaaaaatttctaactcttttccggtatgctgctccgcttcgaaaaagtcaaaacaataacttatgataccgaatccaggcagaatgagaatatacacctctggatgacagaagaaccaaaagagatgctggtataatatagggtctccctgtaaagaccgcatatgattaatactctggattattaaataataagggtttaggtatgagattttgttgttgataaaaatataaattttgggaatttaattgaattcatatatgttttttttatgctattttatgttaattacctgatttctgtgttgtgttcggaagctgtggaaagcggcgttgaggcctttagagagtcttatttcatatattttgatgtacgttatttgttcggggtattctgctaagtattgaattttcgggtttaatattgaccaatttgcccttggggggttgttattcattttaatttgtctaaggggtaaaaaggtattttcattaaaggttatttgtcttgtagtgatgagggggctggtgttatttgaataggttaatgttattttaaaagaaataaattaaggaaaaggaaaaaaaaaaagaaggaaaaacctagaaatgcttttgctcttcatttctctctctctctctccttcgaacctcactctttctcatccaagtttagatttttcctagctgaattcaggagcaatcaagggagttgaagcttgtatttaaggt

SEQ ID NO: 240381 - DNA, 1493 bp, Cannabis indica
ctctcttaatcgtatatatcaaacctcaaatctcaaatctcaaatcccaaataaagtatataaccctaacttacactcttctttctaaaccattttttctttaggcttagccaccttctctattttatttaatttttttaataaaccagacactgttctttattttgaggtttaggcatatgtatttttttattgagtgtgtgagccatcaattatggataagaaagtttcttgagcttacaacaaaattgtgagatttcaaatatgcaatcttagttttattttaattattgtagttttgatgaagtgcatgcattttcgttcgatttattataaacatctttctttttttttttttttgatcttcatatcatttactatgaaattataaaaaagagagtgtagtgttccatatgattgtgttttctaaaagagtgttttggaaacaaaaatttgaattttgtaagtgaaaaattattttaaaaatgtgattggttgtagtgtaattttgtgtttttgagttttaaaaaattagatttgtgattggttgggaatcccaaaataaaaaagtaagagagtatttgaagagtttttaaattcaatgatttaaaaacatagaaaacataaaattgatgttttcattttttgacttaaaactcaaaatcatattcaaatttagtttttgaaaacaccaaaccaatcaagtatttttaatgtgaacccccacattttaagcttttaaaaacataaaattgttttcaaattccaaaccaatcaagtattttttttggtaatccataataaatgagtttaaagatcatgttaattaatcgatgactcaaatattatttcatctttattttaataaaatatataattttagttagataaatatatattttgataatttttaatatggtatagttattagttttataaatttatttatctcaagcgttaatctctcatttcatatcctttcatagaaaaaaaatatcggcatgcaaagctttaacgacgtttttaaaacgtaattatattgagatttaatattattatacacatataacattaattctcataatttttttaattatatgtgcttaatttgcaataaatatatcaacttgatattattttttcgagtgataattatagtatgatatttatctattaaaaatatttaattaaatttaatgagaaatttaataagaaatctaaatatttgattaaatttaaatttaataagatattaataataaatccttccaaacttatttattaattttttcttttaatgaacttatcacattaatatttaaaaataaattaatataatgctaaatctatattttttggggggtaaatctataattttttttatctctacctaaatctaaattgttttattatttaaatttataaaaatatccttaataatctcatctaattaaatatctttatatattaaaagtgtctatctaacggcattt

SEQ ID NO: 240382 - DNA, 1051 bp, Cannabis indica
tagaaatagaaaaatatagaaaaggggggtaaaaattaaacacaacaacttaaaagaggtataccatctaatttcctctaaataaaattagggatcattaacataatgtaagtttataaatgtggaaaaatttacatctcatgcttttttttcatttttcttaattttactattgtaaggaaaaaattattggtttactatttttttatactgtatactttattttttacttttcgaaaacaactcacgttatatatatatgagcattgctattaggcaccagtggtttctagcaccttctcgacatgttgcgttgcgattaactagcgatactccttaaaagctattatattaaattatatggaatccgatacttaattggaccaatagcgatattgacacataggagggtgctagacaccactggtactcttcagcatttctctatatacatatacatgtatatacaaaagtttgaaaattgaagtgaagctcctctcacttttgtgacagttttttttttccttaaatatttgtttttttcatttattttttttgaaattcgtgcaagcccacgtgacctcccatttcaagagactttttatgcgtttatatatatagtctttttgagcaaataacaaataactctcctttttttcactctcttcttcctcaaattttctctatctttttccattaatatataagtttttatattttatttcttgttgagttcttcttcttcacatatttacctattgggaaggatattaaatgagatacaatgatgacatcaactttaaatacaataataactataaatgaaatacggtgataatagttatttttaaattatattataagttttctatagatttattgtcctctttctattttagatctctattttgtgtaaggattgttgagtttctaatttttctttattataacgtacattaaaaaatattatctgctttttatttatataagaaatgaaattgcatgtcgatttgtttttagaattctttagagttttctatataaatttatt

SEQ ID NO: 240383 - DNA, 869 bp, Cannabis indica
gatttttgcttggtacattgcatgtttatctgccctcttacatttatctagttttctttgggttgtttttagtttgtttcaattttttcaaaatggtggctatttcttttttggattatcatttcatctgcactcttacattacatttacctctcattttttgtgctgttacatttttttgggcgatctagaatatgttgtaaaagtgaacaggttggtggtgtaatctaataagattttacgcataaatttttgatggcattggatttagacatgtggcctttgggtatgtgttccagctttcaagtctattgaggtttttttttctcttttttctgaacaatgcagaagtatactcgagttagataaatttattttaaattttttagtgattagttctataagtactcatttttttctctttcaataatatatctattatatttaaaacttctatttacatttttcttatataattggtagtgaaattatgtatctttatgcagtgcacaccaacgcttatgaactcgtttgattctccatatagttcttctaattatttgtggttatggatctgacccattccttaatgctttattaatatcttaggtatatatttgtatctttgttttgtttccttgtaacattttatttgtgcagaacttgacaacctaggttcgttaacaaagtttggttggaccgtaggttgattgttctcagtaacaagttagatttttttttcctttttaacaatatcttaggtttatttcctggtagcttttgatgtgttgagcattagaacacctagttgtgacttggtttggtctctctatatttttcttgtcttggtgattttgggtgatttagaa

SEQ ID NO: 240384 - DNA, 1096 bp, Cannabis indica
gacaatggtctaagagctattaacgttgttttaacgacgaaggatgtcgccgtttacgaattctgtaagtaccgaacttgcagtactcatggtgtaaaacggtccttgaaggaaaaagctcgtgaggcttatatttgggtcgagaatttcgagacgcaatatcctggtcaatgcacatgaccctttcacccgcccatgtacgaacgagaaagaccgccgttagtggcacctaacggtgacgttggtattgacgacatatcattattctagctactctcttggcaggaatcatgaataacccttttaatattactactgattcaaatgagttaacaagaagtgcatgaaaagtcataagagtttgctcacttcaaaggccgaaagggtattggaaggaatcttataataatatctttgaccattttaatttttcttttatttataattaatgtggttttgacctaatctagtaggatgatttagtttttaaattaccaaattttatggaatttcaatggaattatttggtaagaatgaatttatgaggaaattaaattaggaaatatgttggtgtgtcttgttaagcattaatggggttgtgtaggtaatatgtacaaatatattaaggttttaagttggtaagtttagtggaatattttataaaatcacttttatttgattcttagtgatttgaagaaagtagtctaattggtattaatggaatggatgtgctttattttgttatgaatttcttgcttagtaagtctggtcgcaagaaagtaagtagtgggttacttcatttaattggttctggtgagtttaacagtttttcatggggtaaggttgcatatgatactactttgtatagtttgaggactgttttgaaggaaaaaaataagaagaaagttgttgatgagacgaagggtacagttgcttcgaaggcaaaagggaagaacattaagggtaaagaaaaggattacaatagtaagacgtacaagttgtgtggtttcccttttgcgtttcaggtttggctttttgaggttattcctctttttaagaagcaaggtttatgtacatatgattcttctccaaatta

SEQ ID NO: 240385 - DNA, 810 bp, Cannabis indica
aaaaaaaaaaaaaactaattaaattgatattaatgagtagaatgacgtacctgcttacgtgaattggcttagaaacaaacttactctacggacgatatttaatttcaataaaaaagtttttaaagttttgttgaggataatatttgtgtaaatggcttattctatttgctatcctacaaaaaagaatccatttcaaaaacaaaaaacaaaaaagacatgaaaataaaatcgatattgttgaacatatagaatggtttgacacttaagcgtccattcttcttcgaaactgtttcggcttataatattaagccagctggaatatatactacacttgacagagccagatctcatctcatactcatccaatctcacaatttgtttatatatattctagtatgttgttctttttctttagttgcactcgtgaataatatggattcgtaatgagttttcgggtagggacacatgccctcgttttcagcatttttgttttttggtatttgtatttgaacataacgaacaatgcaaaaatgaaaatttgtttttatataatatcatgagttgcactttaggcaataatcattcaaatcaagtgtgtgctggacaaataattgcgagtaaattgtattgggacctttttttttttttaaagaaaattttattgggactttaatacaagagatcagatcatcaggtctctgttgaagcacactacctaagaaaaacatgtccctatacaaaatctttaaagaggaaaacaatgatattcactatagagctttttaataaaatgaaaaaaagaaaaaaaaa

SEQ ID NO: 240386 - DNA, 1661 bp, Cannabis indica
atacattacacaagaaagtggtcgagttagtattgattgctaaagaggctgaataacatgtgatcgaagaacagcctgctaaggatgtcgtcacggtatcgaaccctagtgttggtggtagtgtaagtaaggggaccaatagtggcaacccagaccacaagcgaaaggctgaagcttttagaacaccgaggaataataggaagttttgtgggaactaaggtgaccatcagggtcagtgtcgagccagaacgtgtttccagtgcggtatggtgggccattttattagagactgtcaacaatccaagaaggaagaaccaaagaagaacaacaatcaaaatctaaggagtttgttcactatgacccaggctgacgctaatgctggtccatcagtggtaacaggtcagttgactataaacggttgttcttatttagtattatttgatttgggtgctactcattcttatgtatcaagtagagtaatagagagttttcataaactgtttaatatgtatgcttcgaggtttgggaccatgttaccttctggagacctaatcgtatctactcagtggattaagtccttgtcttttttggattgacagttgtgaattaattgccaacctaattgagttacaattatctgattttgatataatcctaggaatgaatttcttgtctaaatacggggcaacgatttattgcaaggggaagatggtagtgtttaaaccagatagtgccaatccagcagtgtttgtgggtaaggtacaaggatcacgcatatccagaattacaatcctgaaaggtagagatttgatgcgcagaggttgcatagaattcctagttataacagtggatactagccagcctatttcatctggacttgaaaatatgagattggtgtgtgagttcctagatgtatttccagaggatttacctggattatcaccttcctaagagattgaatttgttatagaattagttctaggagtgtaactagtatcaaaggcaccttatcgaatggtttcagtggaattagggaattaaaggttcaacttcaggaattacttagcttgggatttatcagatcgagtttttctctttgggtgccccagtgttatttgtaaaaaagaaagatgggtcccttcgcatgtgtatcgattaccaagactaaaaggctcactatcaagacaaatatcttctacccagaattgacaacctatttaaccagttgaagggtaagatggtcctttcaaagatcgaccttcgttctagttaccattagttcaaaattcgagaagaggatatcccgaagactgcattctatactaggtatggacattacaagtttctggtgatgttttatggactcaccagtgccccaactgcattcatggatcttatgaactgagtattcaaggattttttggacaagcatgtgatagtgttcattgacgacattctagtttatttagaattagaagaagaacatgagttacatctcaaattagtaattcaacgattacggaatcacaagctttatgctaaattcaaaaagtgtgagttttagttatcacatgtctctttcttagggcacatagttgacaaggatgggatcatggttgatctggccaaaatcgaagctgtttaggattggccaacaccaa

SEQ ID NO: 240387 - DNA, 1758 bp, Cannabis indica
caaaaaaaaaaagttgaaaaagttacataatgaaaacctagcaagatatattcttatttctaagaaaagtatgcattactaatgttattatatcatatattgtatttaaccaatactcacatgacagaaaataaaaccatgaaaaccatcctaaaatcactcaaaaatctatttgcatacaatatttgatactacgtcaaaaatgtcaaatatattcaatatccagattaagatgggtatgtatattgacatagatattattatgcttatttaatacatgtaattgtttaagactcattattttattccaaaaatgtacctgaacaactattcttgttttccaaatatttatgagcaagttgtttgccttcctcgagctatggaattcgatcaagtttcgaagttggacgccaaatgttgtggcaatttcagccacaacgtgactcttacttcacaagaatcaatcaagtgatccatgttatgaatggaattggctttattggatataataggaaaatgaatttatatttgaccaaaaactaaaagttaaaaatatgtaaagtaggtatctgtcatgggctgaattttattcaaatctatttgaccaaaaactaaaagttaaagaagcaaactagtgtaaagtacgtaatctacatgattaattcagacataaactacttggaatttttctgatcacagaaagctcagataacatagtgtgtgtcccaaataaaatagatgaaccaatgcttcaatttgatctcagaatagataaaatagagcataaaacaaactattctacaactagcagtgaaaattgatgacacttgaaacactcaagtaaactttttctagtcccaaaacaaaattgaaactcctcagttgatctgatggcatgattaaattcacttgaaccaatgtttaatattattaaaaattgatacacatttctacaatgctcaattaagtctagaattttctacacatttgtagaaaaacatgctctaaactttttagataattgtataatttagaattttctagacatgttaaaatacaatagaacatagggatttctagaaaactttagtctagaggtttctagttatgcatgcttaagaaatatgtagaaatgtatggataaaatccttcaactagaaagatctagagaaaacaattctagcctcaaatgcttgaaggctagcaactataaatacccatcaagggttccaaattgtaaccaagcttgagtaagccaaatcaagtcttttactactaacttactaccttgtctcctctcttactacacacaaaaaaattatacacataactcttccttgtcccacactaatcatccaacttatcaacttatcaacatcatcatactacactacctaatatccatcccatacaaatctaaaccaatacaaatctattctcaaaccatcaatggtatcagagctccgttcgagcatatatcactgggcgtaatcttttccactcatcaacatgagttcggagtacaatcgctcttcactacctcttccaatttttcatggagaaaactatgacttttggtccatcaaaatgaggacctattttcgatcacaaaatctatggaaaattgttgaagcaggaatcactattccgaaagatattacatctctttcagagaatcaaaagaaggcactcgagataatcaacaaaggattctcatgtattatactgcttgcacaagctatgcggacaatctttttc

SEQ ID NO: 240388 - DNA, 1207 bp, Cannabis indica
agtataaaaagattgcagtgtcacagttaaccttcacaacacctatattgagtttcatctacaactcaaaggatacaacagtagaaattgttgcagcaagttcatggaggttgaacactcaactattgtgcaaggtacgtaattggactactaacaacaccttcagtcgtagagaacttgttattctcaactactaacatcgatttgatgaactaataacgaaacaaaacaaatcaaaaccatgccacatagacaacactaaaacactcaaaatcatgtcacatagacaagactaatcgcaatagcaaaaatcgaatcaaaatagcaatacaaccccagccatatcattttcttattggtacatttaaattaatgttaactcttttgttttaagggccatgtattattagattgtatcctactaaatatctcattttcctttctgatccaactcatttttcaattttttaatagagtaatttgcggcataaatacttaaatttaattctcgattacaaacaaatactaaatttaatttttagtggtaataatacttaaattataattataaaacttttgtagatgactgattcttaagcgtcaagtaaattatcgcgtggtaatggtttaagttattaaattttatttttttatttaaaaattaatttaaatataccaataaaaaaataacacatgaataatgacttgacatttaacggctatgtacctacagaagttctaaaaatataacttgagtattattaccgtaaaaaattaaacttaaatacttatctgcaactgaaggttaatcttagatatttgcattcttaatattgtacaaaaacacaacacagttgttttctatgctcttgatcctaaaatctgaactcaaatgaaacagaagaatttaatcaaagacaaaagcaatttaagacaaacaaaggggattatgatttcttgcaccccatccaattttggaatcactattaagttaagcatcgaattatattaagttaaagtaactcatcatagaataacaattaacaaaaaatgaaaataatgccattcttaaattattccaagaccatttcttaggttgctcatggggtttgaaatgtccatttagaaaattagaagacaactcttattattaacacaaaagaaacaagtaaactatgattttgttatttctcaaatcatggaagat

SEQ ID NO: 240389 - DNA, 1315 bp, Cannabis indica
caagaacacataagcttccgaacagatgttggcttgattgttacaaggtcattccattcagcctgtcaaaagtgtgtgatcctccacaaatttcacacccaattgaagcttgtacaactttggcagctatagttgtctgttgtaactatttagtgaatgtagctacctgagctattaaagcattaagggcatccaattcatgaataccaattattttctttttcccaaatgctctttcattagaccattgatagttgttcatagccatgtcttcaagtaattcataagctcctgttgcatttttgctcatgaatgtgcctccagatgcagcatcaataatggttctagtagtaggacataaaccattataaaaattttgtaccagcatccactgctcaataccatggtgggggcactttctcaatagatttttaaaattctcccaagcttcatacaaagattcaccattattctgacaaaaattatttatttctcccctcagtttagcaacttttgaaggagggaagattttaaataagaacttttgagctagatccttccaagtaacaatagagtttggttgtagagaatttaactaatatttttctctttcccttaaagagaatgggaaaagcctcaatttaatagcatcatcactcactcaactgtattaaaaagtaccacacaatttcagaaaattagacaagtaagtgtgaggatctttagtaagaaacccactaaattggagagtggactgcaccatttgtaaaattgctggcttgatctcaaaattattggcttccattgctggtggtctgacacagatttgtacccgttttaaaataaggagtacatagtctctcaatctcctttcagtattattctaagcttgacctccttgttaactccaagaattagatcattcttttcattcccttcattatacgccatgattgtcgatttcttggctttcttcttgttcattctgttttacttacaaaacttctcaatctaaggattcaaaggaacaaggctatatgcacctcttctgttgtgcatataataaattcacctgagataggaaaaaatagtaactaaacaggttaaaaacaagggaaaacaaaataaaattagaataaaaattaatgagactagtattaattatgttcaattctcgacaatggtaccaaaaacttgttcgataaatttagtgtgcaagtatacacaatcgaataaagtaatagaatgataaagtagagtatcgtttctatgaggattttgattattaattaccaatatattaattctttatttt

SEQ ID NO: 240390 - DNA, 1202 bp, Cannabis indica
aacatagccttctggttgctccatatagatggttacttcaagaattccgttaaggaaagctgtcttgacatccattggccaaatttcataatcaaaagcgagagctatggagagaaaaattctaattgatttgagcatggcgactggactaaaagtatcctcatagtccacaagaatcttgacaacatgaataagagttttagactgttcccaaaccactatacggttacggagccttggcattttttggctgctaagccttttagtaattttggggggctagtttcacaagctatgaactttagacaatacattatggacaagataaagttaaagtccataggagttctagcaaggccatctaatttaaaaaaaaaatcgtatttttaaattttaagcaacattttaaaattttaaagaagggattcaggcaagtccttccctttccagggaattttggctaaaaacacttctattttcaaaatgtgcatttattttagccttaaaaagggattcaagtgttattccttctaaggaatttcgttgaaaatgtatcttatttgaagcttgaaatatgaattataaaaattgtatatgtctataaacaaaataatcaatcatggcgcattgtacattttttgggggcacatacggctaggcatgataccccctaagtgagttgaaaagtttggaaatttctaacttactggtcacttgtttaaaatatagcttgtggcccaataaaaatgtaaagtataaattcaattataaattattattttcctcatttcattatgcccgagggctgtttatacaaaggataattacatttatctttacagaaaacttataggatctcctcaaggtttgatcatctgcctattggtagtaccgatgcaaatggtttgcgttccaagcatgagggactcttgatcagtccatcctctgaagcttaaaagtaccctagcccaccttttcgagtattttttaggggccttcccagttcaggccgagcagccccattcccggttcttgcaaagctgggaatactctcctcaagacaagatctctaacgtcaaacatacaacttttcactttggaattaaagtgttgggcaatttttccttggtacatcttaagttggacttatgactattcttggagctctacaattaagtctaacaactcttgaagtaaggaat

SEQ ID NO: 240391 - DNA, 1402 bp, Cannabis indica
tcagtgcgcatttatagagtatagaagttatacttagttacccttttcctctaatggattgtttacaaataatatattactttgggcttatcaagtgaagcccagcccatgaggcagtgattgtatatatactgacttgacatgttaatcacggtcacagctgttactacttgccctattatattgtggataattaattatatattaattgcttgatctacaattatgtagttccctattttagcttgatattattctctgtctgagatttaaggagagtgacttctttattctgctcgaaacaataaatggaaaactacagctggcttccacgtatacattgataggttcttccagctacatagagctaagatctctctggatacagactagccttggcagagactcgtttgagcgagaagtgtttccaaaaggccagggtgttattgggctcgacctagttcatgtcgtttaggacccacaaatgggttttaaatagttttcttgaatccacgtatcccttgctagaaatacgaataatatttacccccaagcttccagaatattgaggattgtggaagtttgcttcagtctacataggtgtacatatgtggaggctaaaggtggaacctatacaattttccaaataaaactaaatgtgaaagatagtttttgtttattcgcttttaagatctgacgtggcattgtttatttggctcgcgaggcatcttattcaattgttgaggtgtgtgtggcaaaataagtaaactaacgactattaatttttgcacaaactttgaggagaatatcatagtgtgatttcacctcgattctaaataatgcactaaatgttaaacgaatggccttcctagatgttggatctattttgtgttttgggaggataacgcttgaccgttgacttagatttgcatggatcgtcttttatagatataaatacctttaaacaccacattttaatacttttacccaaaattttaaaattttctttctcaaacccataacctttgagagccaacaaccataattagaatcgtgcacaaatcgaaccactttggagcgtgatatatatttttgtattcaacttcttcttattcgaatcaaaacttgagaattttcaggcacaccacccccagtgatcttgactgcatcaccagaggaagttgaaaatctggatataaactctaaaatgacccccttatcgaccagaccaatgccattacagagaggcttgatcgactcgaagatcctctggttaagagaattctcatacaaccatccttcgacgtaagtgtgtgctcccctaggctatattttcacttgagatcctcttatttctaattttttttcaaactttgttgcatgtttgagattactgcttgag

SEQ ID NO: 240392 - DNA, 1143 bp, Cannabis indica
tttacaaacatgtcacacaatgattaaaaaatgaagtccaaatcgtctcgagaccaaactctccaaatcacaccatcttgacatgtataatctctcggagctctggactcactgtgattcatccttagcctttcctttgcctaaacatgaaaacaatatttgtgagtcaacagactcagtaagaaaagcatataacatataatatattatcgacttgtatttaggcgcccatacacctatccacaaggctaaatagatgatcaagaacgtttttaatagaaagtacgacctctgtaccacatgcttttagtactcgtctcgtactagtgttggtaggtttgaaccataccctgagtactactgagtattgtaccatatgcactgcgtacttaatcgtactagtgttggtaacaatggatcttaccctttgaacatgatttgttgtaggaatgcactcattatcactactgtactagtcttagtagcatacaaatcatataacacaacatgaaatttagatacatacacctacatatatacatattctatgctagtcttacctcatttctaaattcaagtgtgtcagtcgacttgaatggaaaatcatgtgttgaatggagactgtatgtcacaatcacataaacgggtaaacaacttactaaaaccttcttgcggcactaaattccaaactaaaagtttttctatcgataaaatagcatggtaataacctaaatatcaaggaaacattaaaactgaggctctaaaaattggccaaaccggtaatgaatttccaaacagcgaattggttcctagggctttgcttggagaaatagttaaccggttctttgtagaaaccctaaaaacttcaaatctcgttcaaatttcccccaaatttaaccaaactttccagaatacctaaaataacaccaataaacaatgtccaagcaataatagaagcaaacatacacagaaactcaaaccaccattattgagccaagcttgagttttcaaactcaaacttgctcaacttctcaccaaaccagcaaaacttgctaaaaataatctcaatcaacttaactataacccaaaaatcaaactaaaacaaagtctaactcaaacagaacctaaatttcaattatgcat

SEQ ID NO: 240393 - DNA, 1515 bp, Cannabis indica
catttgatgagtagtttgtaggtggtgtgggttgggagggaagtgaggagtttggttcagattggtaagagtaggtgttggtatagtggttgatacaggccttgagagttctggtgtggtggggcaggggtgtaatatgtggagagacactggtggtaccttgtagtggctcagtaggcattgttgcagctgtgtgttgctcaggaaaacaagaaacaccaggattaggtgcagtagtaaaagttgttgtagcaaaaattggagattgatttgagtttacctgaggtgttgctgcagcaagtaaggcagggaactcttgttcattgaacactacattgcgagtgatatagatttttccagaggagctctcacacatgtatcctttatgctggaatgaataccccacaactgtgcatttctcatatttcagagccattttgtgttgctgaaatggtctgagatatggaaagcagctgcaaccaaacacctttagaaaagtagagtcaggttgtttgtaaaacaaacatcgatatggggatatattgtcaagcactggagtgggaagtctgttaataacaaaggtggcatgttgaaaagcaaaccaccagtaggataggtccaaaccagcctgtgcaagaagtgtcatgcctgtttcattgatatgccgatgcttgcgttctgctcttccgttttgttcatgatcgtgagggcatgagtgttgaaactgaacaccattacctgtgagaaatgatgcaaaacttctgtactctcctccccaatctgattgcacctttttaatgggaagagaaaattgtttttccactaaagttttgaatgaaagaaaggtagagcctgcaattttaatgttagtggaaaaatccaagtgaacctaataaagtcatctaaaaaatgtatgtaatatctataaccctccttggagggaatatgggaaggacctcaaagatcggtgtgaaccaattctagtgggatagaggcacggcttgtggacattgggtaaggtgatttgtgattttcgcctatcttgcaagcatcacagaatttaagttgttttaaggtgcctttgtaatttatttttgacatgactttagcaagagtattggggccagggtgacccaactttgactgccagagattaatatcttggttgctagtgacagtaagagcagtaaaggagacattgttgttattgaaagtagattctttattgattaaaaaattggtacaaggattggagactgtattagtagtctctttattacaaacagagttacaatcaagaacagagagacatttagactccttacttgctagttggcactgaatctaaacatgtgttctggtattgggttgagtgagcagatatagaccatttttgactcttcctttaagtaagaccctccccgttttcttgtccttcacaaagcaacaagttgtgtgaaattcaaggaaaacactattatctttggtaagtttccagacactaacaaggttttt

SEQ ID NO: 240394 - DNA, 1259 bp, Cannabis indica
gacaatttttattagcgtttaggtagatgagaatgaatattttaaatttaaggttcttttctttaatatcacgtgttaaatgaatattaaaatcaatttaataaatattttttaaataaaaatatattaaatatgtaaaattataaaatgtattttaaaaaatatataaatataattggatgaccattgaatgataattggatcgatttggtcggttatccattggatcggttgtcccatccaataactgaaccgatccaatcggattttcaaaatttacatccaatatgatctaattatgattggatatctgattttattggatcgattcggtcgatcgtaattggattggatgactttttgcacatccctaactaagtgtacaaacaggccaaccaaacccgtatttacaaaattataatattcaagtattgattaatatgtaaaatcaataagtgaagagccaaaagtatatataattgaaaaaaaaaaaagttaaaatagtctttctgattcctttagaccttacttctacattgttgtgattcttctctcactcataaaatgagtcatcccttattgtgttatctttatatccaagtcgatgtacttgatgtaataataattaaaaataattatttaaaaaaactaatcaaaaattgatctttacctaaaaaaattaatgaccattatgaaagtaaatttataaatgtaaataaatataaccattcaaaaaaaatacttaattaaaccaaaagtaatcaaactaaattcaaataatcaaaaatatatataaataattagttggtgttatttgtattttcacctgcctaacccgcgaggaatgattacgaaaaaacgagaagtcattaagctacctacgggtctcactccgtgatcccagagggtaaagactttaactctaaggaccagccctcacagagctccgcgagcgtagtcctcacgaatgtggaacatgagggagacgtccgcatctctccccctgtagaaggcaagatcctttttgctccctaagatcatggaccttctgtcaagatgtatcgcagtccagggtacacctttgaccctcgaaggctcagtcagcacgcgtcaggccaagggcccaccactcgctcctttcatatgtacaatgttagaggttgtccctcataccacatagagtgtgcatttccttgtatactgtgcaaaacgatccaatggctgggaacaatggtaattcaaatgaggaaggccctaga

SEQ ID NO: 240395 - DNA, 911 bp, Cannabis indica
ggtgttagatcatacaggttgtactggctaggcctcggatttagtgccacgtggtagtacagctcgcccacaagaaggccaagttagtacctcaacaaacagggaccccaacactcaaatatgtatcaaacgggagaccagcttcctcacataagctggtcagccacctttgcctcgccctatgcctagccagcctctagacagcaccatggccggctagtctgctccctgtaggtgtctggccagccgagagaaggcctatagtgtttccggtgcaactcaacacatggacttaatgattgggttgtgaattgggccctaaaagcccaatagaatagttgaataatatctatgtttaagggcattttggtctttggtaattaactaattaaatataaaaatatctagggtctcaagttgtaaattaggttttaggcttcctatatgaaggccttaactctaacctagaaaacctaagtgagaactaagccactaagtcattaagcctaatactagccctccaagctctaagcataagtttgataactctcttcctcactctctctaacacgcccatacaagcttcctcatcacttgagattttcaaatttagattcctactttgaatccttcagggtgctatatcagatcccacctttagtgatatgaatagtattaagccttagtatcattacaactaaaagaggagtatgtcattacccgctatctaatggggccaaacctctataacaattatttgtgtgttttactttctcattataattgcgtaacatgtggcaaacatcatatctatacgaccttgctatcagttgatcaatttttaggttcaacaaagacctagaggcttcccttctagggaaggaccagactatatctgagatggaggctct

SEQ ID NO: 240396 - DNA, 1052 bp, Cannabis indica
aactttaaatttaacacaaaaaagaatgaacaaaattctcaatttatattctatttgttttacactaattgaagcagagaatgatgctcatgaatatgtatatgttatgtgggtatatatacatatataatatgatatatttatataaattgaaaaatatatataataaaacttacgggaatggtgaagggttgaggggtgcggtgtgtaggtgggtattttggtcatttactttatttgtttaaaaaataaaattattttataagaagattatttagcaaaagtgatttcataagaagattatttagctcaattttcctatattttaaggaacatattaagtattgtcaaaaatttaaggaataaaattactagttattcttagataaatgctatgttcagtgtaattttatcaaaaaaaaaaaatgctgattcagatcaagacaaaaagatgctgattttaactttatcctggaaaacctgactaagaaactccatggttggaaggccaagacgctatcgaaagcggggcgagctactctaataaagtcagtgggtttatctttacctctgtacgctatgaaaactacaaagttatccaatcgccttgcgtctaagattgatggtttggtgcgtgatttctggtggggctcggacaaggggaaccacgggttgtacctaaaagcctgggataaactttgccttcccaagtcgttaggaggcttaggattccgaaaatccaaagaaatgaatcaggctttccttgctaaatgggggtggaacctcctaactggtaatcaatctttatgctgtcgtattctcgaagccaaatacctgaagggtaagtcctttttagattgtgaaccgaaggcctcagactcatggttttggaaaaatgtaactaagtccagaactattattcgaaagggtgcttgtaagcgtgtggctgatggtcaggagacgaacatctggtctgacccttggattgcacacctaaaaggatttactcccacgccgattgggcgggcactgaatagggagtcaaaggttgc

SEQ ID NO: 240397 - DNA, 987 bp, Cannabis indica
tgttcaaaatttatttattcgattgccaaatagaaacaagaatttaattgattggtacttaactgcagtcctcgtgggaacgatctcacttacctgagtattacttgttaaaacgatacgtatacttgcgtgttggatttatcacaacaccaagaaaataaaagcttggggactaatttgtcaaaaaataaaatttgaagaccaatttacctaaacttatatagtttggggaccaatttgctaaaaaataaaatttagggattaacttgctaaaatatgtatactttaaggacctactgtataaataaaccttaattaattgtatggtacttattaaattaattgtataaataatcttgatatatgggaactttgtattgaaagagaataagtgttaatttttgtgttttctccttaatgcttatgattattctatgttgtaaagatgttgcactgtgagatatttggtgctttactttggtttttgggattcatttttaatttcacatttaatctttgaaaacaagattagaaatttgagaatttggagttagatacgttggtctgatttgggttagtgccaatggttgtattttctccatagttaataaaaccattggtaacataaagttaagaacactttcttttaggattttagaaagatttgttgagaggtgatgcagcgagttcgattgtcctcagaaggagaagtagtgtttaatatataatgatgttattctaatcgaagggaatagtaccttcgattccaatttaaattttccacttatattgttacatccttttaaaatatatataacaattataacatctgtgatttcttttggattataaagattaaaaattatgttttcctatcatgtataagaatattttttatttaaggaaatatatttctatttaaagaaataaatttctatttaaggaaataaataaataattgattttctgataaatgaatattttata

SEQ ID NO: 240398 - DNA, 3447 bp, Cannabis indica
tttcaattaatcaactaactgactctagatgaaacaaaactaatataacgtgggaaaatagtataaatgacatttataaatcgatggaaaaagctaattttatagtagtgaactaatcttaataattttaattggccctctcaagatggagtgtagaaattttcaacactcatcttgtatcatcttggatacaagttcatggaaataagtaggaaatagaccgactttgtgaggatgtctaatatgtttgattcagaggaaacattattcgttttgatagtgtcattgtcttttttcagataagatgacagtcaattttcatatgcttggtttggtcattgtatactagattttcaaagatgtgaatagttgtactattgtcacaaaagagtgtttagtgaagtttgaattttatgccaaagtcattaaaaatggagtgtataaccaaataaaattttaaattttatatttgagaaaggtaatctaaaatcagatttagaattgcttggatcaccttattattgcttgattgattaatattgaatagagagctgtcagaaggaatgaaaaatgtattgctattccttgaaaaaataatacacagtacaagcaaatatatagtaaagtaaagacccattaaggggcacatgtcacctacacaaataaagtaagaaaagatataaggaaataacataggaaatattatattgtttaacatcccccctcaaactcacagggctgggaagcacagtgagtttggttcgaagcttctgaaaccgagaggcagcgagaggcttagttaaacaatcagcaacttggtcttcggagggagtgaaacgaagctgtagaagaccactcttgactcgttcacaaacaaagtggtagtcaatttcaacatgcttagtccgagcatggagaaccgtattggaggcaagatggacagtactaatgttttcacaatgaagagtaggagggacgggtagtggaaagccgagttcttggagaagtgattgaagccatgaaacttcggaggctccattggcaagagcgcgatactccgatttggtactcgatcgagatactaccttctgtttagccgaggaccaagagatgagattgaaaccgaagtagacacagtatgcactagtgctgcggcgatcatcgggacaggaagcccaatcggcatccgtaaagcaatgaagctccggtgaagggtcgggttggaggagaattccaaggtgagccgtgccattgagatatcgaagaacacgtttggcagcttgatagtgagttgtggtgggtgcatgaagaaattggcataatttgtttaccgtaaaggagacatccgaccgagttaaggtgcaatattacaatgcacctacaaggctgtgataggctgtagcatcattaaggggttcaccatcatacatggacaaaggtgtaagagccatcagcgtgtggacgagcttggtatcaaggaaaccggtttttgtaagaagatctaggatatatttggtttgagacaagtgaataccagccggagaacgatggacttgaataccgagaaaaaaatgcaagggtccaaggtctttgacaggaaatcgtgtgttgaggaatgcaaggagtgcattaattgttgaagaagatgaccctgccactataatatcatccacgtatatcaataggataatgacatcagaaccagatctgtagatgaagagtgatgcatcggcttgggaggcaacaaaactccaatcaaggattgctgtactaagcttgaaaaaccatgcccgtggagattgtttcaaaccttaaagtgacttagtgagcttgcaaacatgatgaggatggtcgggatcaacaaaaccttcgggttgagtcatgtacatagtctcggtgagatcaccatgaaggaaagcattttggatatcaatttgtttaacaacccaatttaatgaaaccgccaaggaaagaaccaaccgaatggaattcggtttaacaaccggactaaatgtttcatggtagtcaagactttgagtttgatggaaacctttggccactaagcaagccttataacattccacggacccatccgcgtgaagtttaatgcgatacacccacttgcagccaatgaccttgaaaccgtgaggagggggaactagaatccaagtttccttgagactttaaggccacaacttcggtgtccattgccgccaaccatttgggatctttgctagcctcccgaaaattagatggttccaccggaatacttgctgcaacactaaaaaacaaacggggcttatgaatgcccgatttagcacgagtaatcataggatgcacattattatgggcaagaggaagttcacatggaccatgtaaatctaccatcaagggaatggtgggaggagaggatgtagatgatgaagttgaagaagtatgggacataggagtaggaagaataacactaggaggcgaaaaatgagatggtgaaggagtgagttggagcggttcaggatgggagagacatgttgagaaacaggggttgatgggatattttggggctgcggttggataggagaatcaggtggagatggttgatggaaatgtatattggggacatgtgtggatgtgagaatagagagaggaagtgaagtgataaccgaatgaggtttatgagaggggagtgaaggagccgaaggagttgcaaaaggaaaacacgattcattaaaaattacatgacgagtgacaaaaagacgcccagaagtaggatgaagacacaagtatcctttatgtttactgctgtagccaagaaaggtgcaaggagatgaacgaaactcaagtgggcataaaacccaacaggaggaagggaaagcattggcagccaaacacgcagagtagagaatagtttggaactttttgatatagtaagtggtaggggctgctataacggagaacacgagtggggagacggttgattaagtatacagcagtagagaaagcataaggccaaaaatgaagagggagatgagcatgagctaacagtgtgaggcccgtttcaaccacatgtcgattcttgcgttcaactcgaccattttgttggggcgtatgaggacacgagagatcatgacggatgccatgttgagtaaaaaattgagagagagaccattattcaccaccccaatcggtgcgaaccaattgaatagtgctttgaaactgagttaaaaccaaatttttgaaggtgagaaaagtattgaatgcttcatcttttgtattaagtagataaaaccatgaaaaatgactataatcatcaataaagagcaagaaatatttaacaccagttatggcagtaacgggagtcggtccccaaatattggagtgtattaattcaaaaggcttggaagcccaagatacagaatttgaaaaactaagcctatgagatttgcctaa

SEQ ID NO: 240399 - DNA, 926 bp, Cannabis indica
cagcacaataatctaaatatgtcacattttttttttttatcaaatataacacaatattttatacatttctcagatatggtcctagagtttacttctataaaaatgaggtaaaatttacatatacaccatatttaatgggtgttcatcaaaacacctacaccgcacaaatcgcttaagccacaccacactccataaaaaatgtagtttaaaatcttttgtagtgcggttttgccaaaacgcgaagtgtagtgcggtttgcggttttaaatttaataattatagttcaaacggcaccatattatataataaaaagtaatatgatttttattttattttttcatatatttgcaatatatgtgtatattatattattttctagagacaattcaatataaggacttgataaatagaatatatgttaaaattttgataatatatttttttttgtattgttaaaacttaattagattgcttttaaaatttttattataatatttgataataatgatagtgtaaatcgcttaaattgcactgcgttacactatattattacagtataattttgtaattttaagatgtcgtggtgcggttgtaacttaaaaaaagtataaaaattatatatgcggttttggtttgaaaaaaatataactacctgcattatatataaattttttttcttttaaagaggttgaatactgaataatagtttattccttaaaaccatttatgatattaatttttaattaataataatcagttgaatgaagaaaccgaatctaagtaaaatatgaacctacgagtagaatgaatgtaatatttttattagtgtaatttatatcttttatattatattttaataaaaattagggtaaattgcggcataaatacttaatgtttacgattttatacacttaaatacttaatgt

SEQ ID NO: 240400 - DNA, 1419 bp, Cannabis indica
tttgtgattaaaaaattagaaaacaaaagtgttaccaaacgacacctttgactctttgtataattattttgtttttttgtttttaatttaagcatttacatattacaacaatgcataaattgagactcgaactcagaaccttcacacacacgcacactcgtataacgactggaactaacctcaagtggtgtgtaattattttgttagaacacgtcaaattaatatttgcatcaactccaccaacacctacaaaccaaccaaattgattttcaagtcacctacaacaattattttcgataatttgaaaaaaaaaatttactttatttcctctattctagtatgtactgatttttcctttttcccactaaatactattgaaagaacccattctaatggggtggggtttaagaatttattctagatgagagtacttgaaattaacttccatttcagtataagaaatttatattggggtggctaccattaactttgcttaaagttcattatgtattgcataccaactttgctttcaatttccataaatgttacctattaaattatatgattaagaaagagaattccatacaagtaacttattttcttctatatgcaataattgctcatttatatatttacttcctttatgtatctgtttttttttaactttccttgaagaaaaggcaatttcaataaattcttgtttgtcattgaatttaatttttatcaatttcgacacttaatatttgtaatagcactatgattattttgtttatttatttttatgttgttaggcttaacaactttatatttttggtatagtaatttattatattgagtattattattagatactagtagtggtttggactattactaagtgatattttactaataaataatttacttgaagtcacaataaaacttgtgattaaaagtaaaaatgttgtgactaatattataaattattattcctacgctgtgactaaaaagtccgtgactaaaagtattagtcacaaaaatcaaattttgttgtgactaaatgtgtttttagttacaatatttgttgtgactaaaactaaattagtgacaacttgtatctaaatactatgtttagttacaagtaacttttttgttgtatctaaaagtcacatttagtcacaaattttttttattgtgactacaaggttgttattaaaagtggtatttttttgtagtgttttgtgaatagttaatatttaataataattattaaattaaaatatataagacttttttaaaaaaaatatatataacacataatacttaattatatcaataataatataaagctattatatattggtgttctttgatatttctctattctattagcttttggttgctttctagtttaatctatcccaaggtagaatttaggag

SEQ ID NO: 240401 - DNA, 601 bp, Cannabis indica
aactgtccttgcctcaaacaacaattgttcctcatcctcatcttctatggtaaaagtcgcatattgttcctccatgctcacgaaacaacgacacaaactctcagcaaacaacaaataaacaatataaacgaaacaacaaccaccactataccaccatgtcaatatagacaagacaaaatctttttttttcatgtatattatattcaaggagataattaggaatattagtcgtacactttatatagatttatatataattaaacttttgttgatatatagtctcctatctaactaagcaaacaaggaaggcaaagaaccattctacaacaactctttatcaaatcataaacccaactttgctaaattgtgagcatgagtattaaaatccctgctaacaaatacaactttagggctaggactgaaggacaaagagtttttaacatctaccaacaaatcatcacaaacactattgttctaattacaattattaagcttatctacaatactcttacaatcagtatgaaaggattggacaggtagcttaattaatttagaccacgtgaccacaagagaaacagccttggcttcagctactacaggg

SEQ ID NO: 240402 - DNA, 1125 bp, Cannabis indica
ttattagtgggggctatagccccacattattgtgaatgggtatattggcccccctactatcttattctggctccgtccgcggaggtggaggtggaggctacggaggtggtggtggctacagccgcgaaggcggtggccgccgtcatgagggaggtggatccggaggcgagagtagtggtggatacggaggctgacgtgaaggtggtggttcccatcagaggaagtggtggtggcgccgctgaaggcaactggagaagttagattttaagggtttgatagataatactcgttgctttacgatttggttggttcgtaatgtgttttggttctgtttggttggttaatgattgattaggatgaagctcaatgttatccaacacttgatctgaaatactttagtatcgattgaggtcactggagttgcttctgaatcatttaatcgtatttgctttttatattaatttttatcttcaatgtagatctgggattttaatctcttgatttatgttatatggatgaatttgtttttgatatttttttcctttcaatggtattgaaaccaccatgatgaaatttggaataattttaagacaccttcctacacagtttgccaaagctgtggatgagaacaagaatccattcttatgttgatgttatgataattttagctttaatttatttttcattgcaaattgattgaagctatatattttcttttatgtattaaatgatgattatggatgtcaattctcaagatggtcatctgagaacagtttggttagttctatttttgatctatggggtctgtgatgcttgctctagtgaaaatagatgttctatctcgttactttttcttgaaatattaacgaacttttcctaaaaaaaaaaaaaaaaacgtctaactataccctataaacccagccttgcaatcatagtgtattttatttgaccaatatttaccagaaaatatctattaataaataccaaaaaacttataaataaaatagtacaatagaaggtaatttttctttttatataaaatgtaattcttttttcttgtaaattgtgttattactatattataaaaaaaaattgtaactattatatatgttaaatgtattttac

SEQ ID NO: 240403 - DNA, 1124 bp, Cannabis indica
gaagtgggaagacatcacaatggacattgtggttgggttacctagaaccacaggtttatttgattcaatttgggttgtggcagaccggtttatgaagtcagctcattttctacctattaaaataaccttttcagtggatcagtacgcgtacttgtatgttaaagagatagtaagattgcacggtgtgcaaaactccatagtttcggatagacagccaaagttcacttcaaaatttcggtagagtttacatcaggctatgggtaccaaactgaaattcagtatagttttccatcttagattgatggacagtacgaaaggacaattcaaatactagaagatatgttacgagcctatgttagggattttgagggctcctagagtaagtacctaccgttggtagagtttttgttcaataacagttatcaaagtacgataggggtggctccctatgaaatgttatatggcagaaagtgtagatctcccattcactcggatcaaacatgagagaagaaataattaggtccctagtcaatacaacggactaatgaatcaattgagaagattaaagccaaaatgcttgcctcttagagtaggcaaaagagttatgcagatccgaaacacagaaatgtacgtttcaagtaagggatcatgtgttcctacgggtgtctccaatgaaaagaatcaagcgtttcgggaaaagaggcaagttatgtcctagattcacaggttgtttcgaaattctcgagaaggttggacaagtggcatatcgtttagctttgcctccagctctttcagcagttcacaatgtatttcaagttctgtgttatagaagtacgtttcagatctactcatgtcttatgaagaacagccagttcaaatccttgacaaaaaagataaggtccttcggaacaagaccatagctttggtcaaagtactctggagaaatagcaaggttgaggaagccacctgtgcgttaaaatcagacatgagaactcaatatcaagagttgtttaggttagatttcgaggacgaaatactttaagggggggtaggggtaagttataaagaccgcttagctttaatttggaaattaacagatagataggacttaattatgaaaatta

SEQ ID NO: 240404 - DNA, 1926 bp, Cannabis indica
aaggcccaagcttctttgatatgcaatcctcctgatctctctatgatgatcgtgcaactgctgggatcaaaaaaacgtaagccacatacctggtaccacccgtggcctgctgtcactagttttgaaattcctcgctgtccgtcggtggaggaaggggaggagaatgaaaagccacagaatgatgctgttatcaccccaaagttcagccttgggtctaacgatggaggagagaaaccaagacgaaagagttcccgtcgaagtgagcaaggatcggtcttgtttaacagaggctccggagtcaaaacacgacgtgggaggaagaaggctgaggcacaacaatacgagattaaggagttcgaaggtaacttagaagttgttttggataattgtattgataatacttgtcaattggattttggaaatggcgaggaggcggcctcaagcatgcccccaccatccctatgaggtgcctatcgtggaattgtcgtgggattcgtagacccacgacggagagaactcttcggagtttaatccttgaaaacaatgtggatgtgatttttttagcggagactaaggtaggagaagaggatgtgaggatggttatgaatcgattgggatttcctaatgtggttggcattccttcggtgggtattggtggaggattttgtctggcgtggagacaagttggtttaattgaaataaaggaagtgtttgcggctgggtttcatgcttatgttcctgcaagtcatggaaatgtgggctggcacttgatgtgtttatatgggactccctatgctgaggagaaagttgagttttggaagtgggctactgaaatggtttcaggtttgagggagtcatgggttgtcttgggtgatctgaatgtaattctggaaggttcagaaaaatctgggggaagggaattccatagacgggagggggcttttctgagggagtttttggatgaaacgggaggtgttgatttgggttttcatggggtccggtgtacttggcacaatgctagaaagggaatgaaaaatgttcggaagcgacttgaccggggtttggcggaggcatcttggtgtactcattttcctaatgctaaagtgataaatttgccaattctagcttcggatcattctcctattgtgctatcgaccactgaagaacaccgaagacttaactatccctttcggtttctggaagtctggacttcgagtcctggttgtgagaaggtgattgatcgggcttggaaatgtgattataaggggaggaaggatgaagtccttttacagaaactgggcaagacaaaatgtgatttgaagaaatggaatcaagagtctttcggcttctgtgatcagaatttgcgaaactttaaaagggagctagtggaaattcaaaataaggcaccaactaaggaaaatttggaaagggaagcgtcggtgcagttgagtatcatggaaatggaagcaaatttggaaagagtttggaaacaaaagtcgcgggagctttggactcggaaaggggatgggaacacaaaattttttcacgcctcaacggtaattaggaggcgtagaaacaagattgaaagtgtggagagcgatggtacttggttacatggccgtgaagacattggaaattttatgagaaaccggtttatgcaagtctttgaatctcagaatactgttattgatgacgatctggattccttattttctgagatggtttcggaggaggaaaatgatagcatttgtagaacgccttcggaggacgagattaagcagattgtgtacgctcttcaccctttgaaatcgccggggcctgatgggttctcgggtattttttacagaaaatattggaggatagtgggggtaaagtgtgtgagatggttcaaggattcttgtaagatggctcggtttgtgctaaact

SEQ ID NO: 240405 - DNA, 1319 bp, Cannabis indica
aaaaaaaaaatgaaaaagttaaacaaagtcataattaaagaaaaattatagtttgcacaaacttcgtagatagcactaataaaaagcatttctaatttctaattattttgtctttcaatatatttgttgatcatgttgttgttgttgtgtcgtaaacgtaaacgacgactcttgcattaaaaaaaaaacaaatcattgacgatgtcgatctgtttagctaatcattttctatttatcattgcctaaaatataagaccaacacgtgtacgacttcaccagcaaaataactcatttaacagtattttatttttaaaatgcacaagtattttcatataatattaattagttcctctccaaaaaaatatattaattagtgttcattatagtttataattaattagctgctcttatattaaacaaagattatatatatatatataattataaataaaatgtgtattattattattattattattattattatatgatgagttaagattcagaagtaaaaggacgaagtccaataaaactcccatcaattaatattgagaaatactaaagtaaggggcaagttaaggtgtcaaataaatggcatattgatacattttaatataggtaaatgctaatttagatcatgtgttttacaaaagttatcgattggactctctactttgttaaatagtaaaaataggaacttaagttcaattttcgataattcttttttaaaatataaccaacttgaaggtaatttttaatacgaacaaatgcagaaaatgtatccatttttgttatcggatattattattaagttttattttaaaaaaaataaataaattaagggtgttatttgtactattttggaacatacagggttcattttgtcatttaacaaaacagatggtcttattggtaacttttacaaaatacaaggtccaagatggtatttactctttgaatgttaaagtttatacaatttgatttaataaataagataaaaaatcgctaatcaattataatgtatcattggtgtggcgttagatatcataaagtgtcaaataacaatgctcattaatattaacaatgtaacgtccccgcttcaagcctctattgagccttccctacaaactgtagttctagtgtgtgtttcctcactcgcacgctcttggggaaaattttctaagaggtcacctaccctaaaattatcctaagtcaagcacgcttaattgtggagttctttcgtaatgggctaccagaaaataagatgctccttgttgatatatatagtaccaatcaatccatttaagccctcttcaact

SEQ ID NO: 240406 - DNA, 1498 bp, Cannabis indica
cgtagctgtgacattatttgttttggtttttttgactttttggtatgagttgaatttaaagactggttgaagcttgaaggatccaccaccatcgttttagcacttttcagtactaaactagtgactaaatcaccaacaattttccaataattagagtaaaacatgatctacatgccatcaagtccaagactaccatctgaattcatcgattttaaagcctcatagacatcagcagcagtaaaagggcgagtaatgtctctgttatcagcagctatgatggaacatgggactttggagaggacaaattgcatagcttcattatctacaccatcattagtgtatatgccacaaaaataggtctgtacaacattggaaatagcagcttgtgaagtatgctcaacaccaagatcgccaattagttttttaatggtgttattcttctttcggttgttagccttttgatgaaaaaactttgtattagagtcacccgatttcagccaatttatacgtgatctttgtttccaataatcctcttcttgtgccaagagttcatcaaggatattttcacaatgtttgagttcctcaaaatgctcaaaagtggtatcgtttgagttttggaagtgcaaaaacatagtcttgggtgttgtttatcttccttggcaactctccaaactttcttctatgccatgattgaagatgaaaggagcaggaggagagattatttgtaatttgcagtatgggatcaacatttgagttggtccattttttgttgataatgtccaaagcttcatcttcattcagccatattttttcaaagcgaaatcgtgatctgaactgtgtgcgagtgtctggtgcaaacaggttaaagaaactatcagagctcgatgatcagatttaaagaaatctaggtgtgaaacctcattagctccaaactgatgaggccatgcattattaacgaaggcatagttcaatctctctttaacattcattccattgacacatttgttatgccaggtgaatcgggcaccagtaaaaggtagatcatgtaaaccacaatagtctatggtattacgaaagttatcaatttttgtatcacaacgtaattggataggacaatcgagttaaaataatagaattgtcaaataccaatccaaattgagcaccatcagacatttgttcctaactaaataaagtttagggaatttttgtagaagaaccttaaagggtcgttcttatctgtttcgaatttacaaaatttttttagtatatttttttccatgatcgcgtacgctgttcctatttaggcctccttgtaaatttttagaaattctgaatagtttataatgtcgaaaataaggtttaaacagttacttatcatgcgtataaagaaaatagtcgctcgtacaacataatatgtaaattttgtttttggcatggtaaactactcgatttttttaaaaaaatttacatgtgtttctaaataactataacatacatg

SEQ ID NO: 240407 - DNA, 1442 bp, Cannabis indica
  modified_base (19)..(19): a, c, t, g, unknown or other
aaaggaattgtaaaaaagntgatatgaataacaacatgatttttctttgcatagctggtgtaatttggtttctatgagttaactttgggtggggaaagccaatttgggcgtggagaccgagtagttccattgaaaatgtcttgaagttgatggacaccaagaatggtggtgtggaggtttcgttagactcttagcaaagaaaatatggctttatttgagagggatcctcacattcttgctttttgctaatccatcccattcaatcatctaaagaattgtaattaataatagtgtattaataatcaataattgtatatttaatttgtcacgagctagtcttaagttatgacaaatatgtaatatccattatttgatcagtagtcaaatatcccttgttataaattaataattaaaaaaaaacctttaatttataacaaaaatttataaaataaataattaaaataatacaataacttctataataaaaagaaaataattaaaataaaatagaatcacttatcaatatatatataaaaaataataatatcaccacagttatgtagtcacaaaataaatagatttaataagtcaatcaacaccaaaatagtatctaacatctatcattcctcattcctaacttgtaaatagataattaagtcattcaaacaattccattcaagtttaaatacaaaatcaattttcaaacaaaatttaataactagaatataactaaactaataacggtattttcctcaacgaaaacattctcatctactagcatcaaattgaattcatgaaataaaagaaaataggaggtgggcttataaagcctaattagaaaacaactaatatcaaaagatccttaatttatataaaaccctgatgataagctttagaaatcaaaagttattatcatgatgatgtataaacaaaatagagacaccaaaactcaagcttcaaatacatattacaccatccactagaaccttagctctcaacaaatcataaaaatgacatcctattgggtaatcaagcttgataaccactaaaatagtggggctcaaattcaattcacttcatgtgtagattctaggcctcacacctatcgctgagtgcgcacagagactaggtcgtgaaacaacaatattcacaaaaaaatgataaatatggctctcagcagtaaaatcaaatacaagcatctagaatagcaaaagtacatattctctttattttaaaaattttgcctgcaaaacggttaaaatttggtaaaataaaaaaaatcataaactgcatagataattgtacaaaaatatagttggcactcagtgcctcctagaacagtcatgaaaacatgtatattaaagttttaaatctttctaaacattttataaatcaataatattggaatatgtcaaattttattcatcacaataaaatcaagt

SEQ ID NO: 240408 - DNA, 1884 bp, Cannabis indica
tttagacacgtgtcatctcagagccattcttatttgaatttctatcatccatagccgttagatcacctaacatggtatgcgagggcaagcatgctctgcatggtagcgtggcataggagacaaactttaacatcgtacatggaaaaaaggcatggtcaattggcctgttgccttgcatgcgcggattgaacctccgtctgttgaaggtgtatctcagactgacgcaccctggtggaagactcatacccttcatgggaacgaaaaggggtcttgtcttctagaataaagaatgtctctggttcgtggtcatctcttttgtggtctcctccgggaaggcatctctcgttgggacatgttctacgagttttatgctactatcttctcaaagcacatggtaaggaacttaagtggctcaatgactccttatccttcattaattagtatatacgtgtcgtatcaatgaaaatgcatataacacttattattacatatcattaattatattaactttgtcattactaatcattacttatatttattttatcattactcatcgttacttataagcaatgataaatatgtttatttttaattaccatgaaccctaaactgtaaatcttaatgcttgaaccttaaaccctaaatcctaaaccctaaaccttaacccctaaactctaaattacaccctaaccctaaacactaaacactaaactcttaaaccctaaaccctaagtcctaaacactaaacccttaacctgaatccctcatctctataccctaaaccctaaacccaggccaaaaaaaagaattgggactggaacctagacctaacacaaaaactgaataaggaccgggatagaaacctggatctggtctaggacccaaatacggaagggacctagacctggacccaaactcggaccttgacccagacccaggacccaaactcacaccgggattccgacccatacccagaccccgacctagactaagaccccaacctgaacccaagacccaaaattgaaaccaaaaccgaaaccgaaccaggacccgaacctgggacaagaaaaaacaaccaaatccaaacccaaactgggacctggacccaaaccaagacctgtaacccatgacttggacctaaattgggaccgagacccaaatggagacccacacccaaatcgagacccaaacctagacttagaccgggacttgagacccaagacatggtatcagacccggactcagaccttaacccagacttggacctggacacttccgggacctgaaccagaacccagacctggaatcaaactaggacctaggacccaaacctagactaggaaccgatattgggacctaaaactcgagcctagactcagatcagttccaaggaccctactagaatcggatcgggacataagatttagacgcttgggccttggacccgacccatggttggtgtttggatctaggacctagacccagacctaaacccaaatccagacctagaccaagactaggacccaaacccagaccttaagatgtaccccgtgaccctaagccctaaaccctaaacactaaatccctaaaccccaaaccctttagacttacccctaaaaccctaagccgtaaaccctaaaccctaaatttctaaacactaaacccaaaaccctaaaccctaacacaaacatagacctagacccaaacccatatggagatcggaacttggcacatagactcggactcggacccacactcgaacctagacccaagtctgggactctaaccgagaccgagacccggactcgtaccacgatcgggatgaggacccaaacttgggacaagaactggacccaaacccaaactacagaacagaacctaaat

SEQ ID NO: 240409 - DNA, 1086 bp, Cannabis indica
tgagatcgagtttgatgggaagaacaattttagtatctggcagagcacagtgaaagatgtgttggtacaacaagggctcttaaagacactctagggaaagaaacctaagagtatgactgatgaagtttgggaggagttgcaagcaaaagtagtttgtactatttgcttaattttggctcctaaatcaaagtatagtgtattgaatgaagcatgtccatctaagttatggaaaaaagttataaaacctttatatgtcaaaatacctaataaattgactatatttaaagaaataattatatgagttgaagatgattgaaggagatgatgttagggatcatattaatagatttaataagtgcataactcaattgttaattgtagagggaaaaattgatgaagaacatagagttattattttgttcgcttctttaccaaaattatatgagatactagtgactacacgaaatactactttaaatgtggatgaggtgtcaattttttttttgggaaacagatagtatcaagcaaccaagtggtatgtctcacattgatcaagatcttgtgatgaggtctaaatcaagtcgtggtaggagtacatcgagaggaagatatgataacaaaagaggcaatcgcgctcattcacacacttagagggaagtaaagtgctactattgtcacaatagggacatgttaggtagaattgtgaagagtttgaccaagcatcttgaagcaatgaggaaccaagaatgcatagacacattatattccacaaatattgctggtgaaagctttgaaagtgactctgatgttctctccatcatagttgatcaaagcttttcttactcttgaattttggaatctagttgttcgttccacatgtgcctgtataaggaatgttgtgatatttgacagttgcactgttttgatgagcaataattctagctctaaagttattggagtaggaattgttaaggtaaagatgtttgatggtgttatgagaacactaactgatgtgagacatgttccaacattcaggaggagcttaatctctttaggagctttggatactcttggttatggctattc

SEQ ID NO: 240410 - DNA, 920 bp, Cannabis indica
tcttatatatcctaccacagcaaagactttgaggtccattgccattgacttgctatcacaaattctccaccaatttcaaagccctcttgctgaaaaaatggcctctgatttactttttttaaaagaaatatatatatatatgtatagtaactgcagagacattgaggacggcagagatatgtctgagcatggatggagtagaggaaacggggatgagttgggcttgggtggcggtggctgttgattaaaattttcaatatgggctcatatatattggtatgttaatatttgaagtttgacccaaataaagtgattattttattgagtattaaagtgtcattgactaaatgtgtagatatttctaatttatcaaggggctaaatagaaatattcaaaattaataacctagctatgaggtcatatataggtagtgagatctccaagaaacaagaatcactcgattctcatctttccccatcaagagagaaaactatagaacactaagttttgtattcttagaagatcattaccctaaatcaccacaaagatcatctctattagatagattaagatcatcactatctatagattaaggtacgcttccactatttaagttttttttttttaaaatcaataaatgtattctttagatctatagttatacacttataataatatgtaatatgtttatctatgaaattgaatcttgctattgcatattttatgagtgaagaattctaacggcagcatcttgggcgtggtcgacggaagaagagagggcgatttatgatattgagcaactgagagagacgacggagctttggttgcaggccaaaggagagagggatgacacgtaaggtggagagagaagtcactggggcttgggcggcaatcgggaatgcactacaagaaaaatgttc

SEQ ID NO: 240411 - DNA, 893 bp, Cannabis indica
tggtaaaataattccaacattgatttcattctttactaattccaacaatctgtttaggttacaattggttggtatttgtagtccagtcattatggagttttcatattttttttcctctttccattgccctccttattgaaccacgcacattattgagtcaattcctataaaataatgtaaataaatagttaaaaattatgatttattaggaaaccgattactttttttgtttattttgcaaattatatgtctttatttcaccatatctgtaagaaactggtttctaataagtcttctctttgtttatgttctatatataaattatagtaaccgattttgattcatattattcagtgactttttgattacgtgtgtatatgtttaaaaataaaagtttcataatgttacatttttagtgtaacatgtagttagtttgtgaaacttcttagtctcaataaatatttattaattcacgtctcattatcaagaaatgcaaaatgatatagtttttgtctaaaattcatctttaatttatatatatttatattattatgagcaatttacaaatgcacatatgtagtgtatctttttttctcattttttttatttatatatatatatgtatatatatttacctaacattgctatcaccaatgttaacagggatgattggagagttttttttaattattgacggtgtctcagtggcaacccgcttctcctaggttgagtcccaggatttctctcgttaccatgagggattttctgttccctagttcggggttgtcttctgctcgcatttctacgagaagactctggcaaatcattgttctcattcccctgggttgtgaatccctggggtcttcgaggcacttcttgacgaggtgcctgat

SEQ ID NO: 240412 - DNA, 844 bp, Cannabis indica
tattttttttttctctttgtcttccttttagaaatcataggaaaccatgttaataaaattattttaaagatctttaccttatactttgtcacattaatatatttttttccaatataataatcaattttattgctagagtcaaacaatacattggttattaaacaatgaggaatttcttccaaccccgaaaccttgttttttatctgtagtgcatatcataaacaccatgttacgatattaccattttgcataacatgttgaagacttacacccggaaagatagataacaagaacctaaaagatctaacaacaaccctactcggagacaccctcagaaaaagaatagatagaaatcacaacatcttcataatcactctctaaacaagaaacaaaatcctatcgacgaacaattcaagacgggccaaaggggattgtccaatcagcatgaaggtgaggagcttgtgctcatgagaattgactccctcgaagagaaaaatgttaactgtaaataatcaaaatatacgttagtgaaggaaaaaaataaaataataatcataataaataaataaatataattaaaaaatttacaatatattttcactacaaattaatcatattaaaaattattaacaatattctatctatacaaaaagagaaaacttatcttgtcataacgagttgatgtcgtcatttaatcctggacaccacagagtactacttcaaacaatttaataacttgaataactcaataactttacaactttacaactctattaataactaagaataaaattctctaataactaataccattgatagtcataataaaatctagggacttttt

SEQ ID NO: 240413 - DNA, 1504 bp, Cannabis indica
ttttattaccagttgaaatgagctatcttaaaataaaaaaagaaaataggtcctttctgttatattgtttgctctgttctgtggttgataagggtatgattcacgattgagaatggcttctatttatattctttatgatctcaaaccaagctaaataagttaacttggtacggaatttgggcaagttcattcttgctaagctaagctaagttacgaagtatttgaaggcaattttagtgttggttgggcgattggttgtgtttactttgatattgaatacgggtaaatggtgttgtttctgttactaaaaaatagtaatttttgtagtaatatgtatattttattaaggctccaccattgttggtggtacgatttgtagccaatgtgattagagatgtggcgagcccccatcgctgtgggggggttcatgctccatgtgcaatgatgggacctctagtgggggtcagtaatgtgcataatgggttgtttgtggccattccatgtcccaataaactaaaaaatctatactgtttgtgtggttttaatcttttctatctggagtcctttcatttctgcatgtgattttcatgtggatattttgcttgaattttacattgcatttggtgtgtccttaaatgaccataggtccaaatagcctatttttctatttcagactcttgcctctatttcgtttaaggactagagtattgtagttttcatatatttggataggtttgtggattggttttcttttttcttttccttctagtgaagcttaaccatattcgtttattgggtttatagtttatttttggttgtttttgtggtgtctattatggaattgagttcctaaaaattaatggaattaaagtttctctattgcgttatgtttgctaaataatgttagaatttaaaacgaaaagaacttgattcccacttgagctttagcttattaagtagtggaatatagaataaaaaacataacttgttggccttataatatgataacggattcgaggaattaaaaaaaattgacttgcacatctgctggtcttatggtgtggcatgcacaatttatagatttctttagaaagaactgtcttgtcttgtagtgttgccactctaaatttcatgcaaaaccaaaagatttgggcataacgatctcaaaagcaaatctaccaaattagaccaaaataaacataacgatcccaagtcagatacatcacactaataaatcagaattaatttacaccaaatcattataatgatctatatttgtaagctaaccatgtcttatgcttctacctatcaatcgattcaatcctaatgaatattgcagtattgcacaagcaaatacttacttactagaataaattgccgcaaattctcaaatagtttcacctaattagcaattaatcttcaaaatttaaattttgacagcaaaatctcaaaattagtattttttttaggtgttaactactatgttgaactttgttgtgaaaat

SEQ ID NO: 240414 - DNA, 1490 bp, Cannabis indica
tatatatatatatatacaatagattttgagggtatattatcacaaaggatagtgtatgtaaaaatctaattttcatttggaattagctaagttattatttatgatttatcattttatagagatttatttgaatttaaggtgtataatttatgccatatatgaaattttatgttttgtgctcggtaatattagaacgcgacgtttggccaatagaatcacattttaatattttagtagtagcgtggcaatataattagacattgagaatgtcgggaatagtcgagattttaggaatgaccaaattacccataggtgtcctgttgactcatgttgtgtactagggataaaaaggtcttttgccacttgaatttttgtcattttgtgggattaattttagagatttattctgatattagttgattaattaagttagtaaaacatttactatattcattttattcaaaaagaaaaacactctttctctctccaaattctctatctcgagctccctagaaccaactagggtttgtgatttcttcagttcaattcagggaatttctggcaggattgtcgtgttcccatccaaggtgtaccttcctttgttcttcctctttgatttcttatgttctatgttgggttttatgcatgttttgagttctaggttgttgtagttagtgtttgtttgtgtttaagtcttttgtagtttaattgaaggtatttggattgttttggagttatttcaaggcttggttttgtgtttggataaggtttgagctttagagctcaaactttggtctttaatggtgaattgagtttcaggggttgtttttggtttttgttgcatgaattctcttcattatgatgttattaggtattctggaagtttgggtgagatttggggtcgaattggggttgttgtgtggttttgtttgtttcctacactgaatcggaattccagttcagagggacctgtaggaaccaaaattctggttggtctccaaaaaaccctgcagaaccaaaattctagttggggaaccggtctatcggttgggactttttagggaaccctagtttttatcatttttgcaatatttagggtattgacatgttatccatcgatagagaaattttcattttcaagtctaagtcctcgaaatgtgatttagcgtgtcactcatcagttttacaaataatgtgatttagggacctgtaaatcgtcgagcaattgttccactcaagttggctggcacacctaaattcagaaacgaggtaagattagtataatgatatgcatatgtatttacatgtttagcgtgcatatttatgaatgcttattagataacatattataatagcaatattagtgtacatagagatgcactgaatatcgacagtatatgtttggctaagtattgattgacactattacatcggtacgactagagtatgactagcgtaccaggtataggctgatattatagtcaatagta

SEQ ID NO: 240415 - DNA, 670 bp, Cannabis indica
gactaatgtaaaaaaaaatggtcattaacacttttacatcaggttattagtaagttttattttgataaaattgagcttaatgttttaatttgtactgttttaaaaatagataatctgaattattataataaaaagtcccatcaataacttttatatttacctaaattaatatatatgtgtttagggttttggagtcaacatcaaagttgaagaactatttgggaggagtatatacaagtgcagcacaatataatagtccaccaacctatccagttaatatggtgtgtggaggaattgatagtaatagcaatagcaatgctaccattcttgacaaaatattttcaggtcttaaaacttacttctccaataccaataccacttgttatgtcaaacaaacccacaaaccttactagaaactgatgagggttggtcttggcaggtattattactttaattaatctctcttaattaattatattctaaataaattacacaagcctcacttaataattttatcggatagttacacgcatttcagcctgtgaaacaaaatttaatttattatagaaaatttttacaatactttcgtatgatcacgtacgttgtagttatttaagacatcctgtaaaattttaaaaaattcgaaaaaaatttaacacaccgaaaacag

SEQ ID NO: 240416 - DNA, 1285 bp, Cannabis indica
agtttctgtaaataaaatcataacaattgtaaaaatatttaaaattccatacaattgtatatttgtaatttttattaatttcgcgtatttatgaaataatcccttttatttaattatttatttatttatctactcgctaataaaattgttattattaagataataacagttttattagagagtacataaataaataaattttaaaattgttcttcaaatttttttactcataattttgtcaaaatggctctcttcagttattttgcgaaagtttggtagtcaaatttacttcattttgtgttagtcttcttgatattttttgagattgacctgatgaagatttattttcattcaaacaaaataaaactgttattatcacaataaattaaagttgaatgaaaatgagcacttacgattaaagctactttgtgttgtatcacattaagtagcttttaaaaaaggaagcaagaaaacacaattgaaaatgagagttttaagagaaggtgtttcacgtgtgcacctcaatttacctattatagaatattgaaaattcaggtttttggctcaatatatggacaaaaataataatgcttccattccaaaaaaaaaaccatttttattttgtaatgtaattaatgtgagtaggaaaatacaccatatattattgtgagtaactccaagtgcacaaacacatttatatattatatgtacatttaagtatgagaatgattggatagtgattgtttttaattattattcataaatatttttagatttttttttttacttgtgcttaagtacaaattttaataataaaatcatctaaattataaaaccatgaaccaaatttaattaaccacttgaggctagctcaagtagccataggagggtgcgtgtgtgttggaggtcctgggttcgagtcccagattatgtattgtgtaatatataaacgcttgaaataaaaaaaaaaaaaataaataaataaataaaccaaatttaattgctaacttagattacttatttatacatttttacacacgtgatatatttatattgatacatataatattattattatttaaaaaattataatatgtatattttattttttaaattattttatttgaataattttatttaattttaaaataataatattaggtttacgaatataaacttgttatgtgtaaaaaaaatgtacatataaagtccatgatgacagttaaccggatgacactttaaatttgtcaatagtttagtagtttgaaagattttactgtcaaaa

SEQ ID NO: 240417 - DNA, 748 bp, Cannabis indica
taatttcataattaaacgtgattaaccgctaatttccaaattaaactaagcggtctttacaaaaactctctatataattataaacggaaagaattgtgagaatatagtacctcaaaatagaaatatataaagcatcaataaataaaaaatcaaatttaacatattgttttaataagcttatagagacagtaatattataaaattagaataaaaaataaaattaataatagttaaaaaaagacactgagttatatatattggaaacttgggtgattaatatttatatgagataaaaataaatataggaaagagaaaaaaacgcatctaataataattgatgcattatgtgattttttttttactactttaaaaaaaaaacatgagtatgtataagcattaataatatcaaaaactttttctttgggaacttataaataataaaataaaaaagaaaaagaaaaaataaataatatgtataagatataataagatataattagttaatgtataagatggtttataaattattatgattatttagatataatatgtagtttatatagaggtttttttttttaagaaaataaataattagttaatgttagatattttataaaaatttattaaaataatagtaaactattaatgtatagatttaaacactaataaaatattaaaaaaaaatgagagaatgaaggagagaagagattgatacatttagagtgatattatagtgtcatgtcaccgc

SEQ ID NO: 240418 - DNA, 1574 bp, Cannabis indica
aaaaaaaaaaaaaaaaaagaaaaaagaagatatgcagtgactatagacaaaaacctcaaaatgctgcaagaaatgcagtctcgttggagcaaatatgcatggtatatatgatatataccggctccttggtgttgctcttagtgactaaaatagtatttagtcactaaaacaatggcgccaaattataatagtagcgagactaaaaaattttcgtgactaaaattatttagtcactaaaaatttgaaatttgtgacgaaatagttagtcagtaaaagttaatgattttttacaactaaaatattagtctgaaaataatttatttttattagtatatttatttggttgtacttttttttacttttgttaataatttttaataataaaataactaatataataaaatttaattaaaatgagttcacagcgtggcattgaattatattttacctattacatttattcatatatatatggacaatatataaatattaattttttacctagatatattaatgttagtttgctatattattttgaatataataaaatataatatatttatatttttattaaaatattaaataatatataaaaataataaataatataattattttttttgagagaaatataattattcattactaaaaataaattagacacacaatatttatttccttttattttaggcggtaaattcctaaattttccctctatattttcaattcctataccttaattatcacttattcagttgagccttcattagcatattagcaatctctatcgtcttcatccccatatcaacctctctatttcactctctaaaactccattatccaaactgcctggtaatctcacgaactccctctccgtcaatgatgaagagagaacgaacaggaaagtagcaggttcatgtattactttgggtttttctcttcctcctttttataattttcttttccacttttttcctccaattcttctttcccctttatatttttgaggcttttctgttctcaatttgtcttgttttcctattttgtgatttggatccttcttatttttatttatttaggatttttactaatatgaactttgttatctaagtttacatgtaatttagagtagcttattgtttgtgataaatctcttcagaattgattttaaatctgccatggagattcatgaatgaaataaatcaccatttattttttcttaagaaagtctctttcaagaaattgtgtttttacctattacacaaagctagatgattattttttggaatcagattttttattaacacaataattaaagttattgtttttgcttgtaaacgtcaatatgataatggataaaatttgtagattaatgtttctctttttgctatcctaaaatctcttgtgatgcttttaactatagttataaatttgattttagtgttgaatttctgtctacccagtgttgacatgaacatgattcatactttgtttgctttattttctatgacattcccaaaatctcattagaaacaacatgtgaagtagctccaattttaaggagtttgtagata

SEQ ID NO: 240419 - DNA, 1018 bp, Cannabis indica
ggttgtaaagttgcgaatggagcaccctcggatctcacacatgttgtttgcagatgaaagctacttatactgtaaaagcgacaccagaggaagcaacaagaattcaggaagtattgagtacttttgaagaagcttcaggacagaaggttaattttttcaaaaatcttctatattttttcagtaccaatacaaccttggctatgcgtaacaacattagtcaaaggcttggcatgatcattgcgggaactaatagtctatatctgggccttccaagtactatatctcgcaacaagacttcggtttttggctatttaaaagaaagagtccgcaaaagagttgaaggatgggaaaccaaatatctctcacgtgctgggaaggaaatattaatcaaaacggtggcccaaactcttccatcttatgctatgagtgtgttcttgttaccaattgacactacccgagagatggaaaaaataatgacaaagttttggtggcaatcttctaacaagcctgggaagggaatccattggctttcatgggatcgattgtgtaaccataagaagaagggaggaatgggttttagacatctcagagatttcaacttgtcactactagggaagcaaggctggcgactcatctctcaaccgaattcattagtagcaaggatctttaaggctcgttactaccctcatacttcctatttggatgcttcattagggaacaatcctagctatgtttggcggagtgtttgggaagcacaacaacttgttagaaaaggcctccgttggtgcgtaggaaacggaacaagaatcagcatccttaatgaaccttggttaccttgtctcgagaatccttatgtcactacctctcatcccagtctacttcaggcgaaagtgaacaatctcatgaccatggatggcacgggttgggacttggaaatcttggaagatcttttcgaagaaagagataggaagctcattgagaagatccttgcaaccatcggttagtgatgatactttga

SEQ ID NO: 240420 - DNA, 1167 bp, Cannabis indica
ttcattttgctaagttcgttattacaaacagtacctacaaagactaaaggaatttctagtgtttttgaagcagtttttgggacatcctgtgtggaaactattttgtgtttatggcacaccctattgtgcttctaaaggagaatattggagttggctcacggagaaagtgaacgagtgcagtgatccctgggctcttgtgggagacctcaatgtcattcatgaccatacggagaaggtaggggcaggaattttgatgctaaagaaggagaattattgagaaaatttctgtttaattgtggtggagttgatctgggaagcgatggtggtgtgttcacttggcagaactcgaggatggcccctaatcgaattcggaaacaacttgatagaataattgcagatgtgaaatggtgcactgaattctctaatgctcgggtgtagaattaccctataatcggttcggatcatgctcctattctcctggacacttggggggataatttgaggttgaagtatccttttcattttcttgaggtgtggacatcgagagatgattgtaggcaggttgttgaaaattcttggaaggaagagatggagatggggctccctcgaaagctcagcagaaccaaaagagacttgaaggtttggaaccaaaatgtatttgatttctgtgatagaaaactgaggcaacttcgtgtccaactggagagaacgcaaaaattgcccattactcatgctacataggctaaggaagcggagattcagatggatatccttgatatggaggagaaaatgggcagaatttggggtcaaaagtctcgtgagaattggctaaggttcgacgatggaaatacaaagttctttcacgcgtccaccttgatcaggagaagacataattatattggtgcagttagtggcgagttgaggcagtggataagaggaagggatgatattggggattattttcaagatcggttcaaggctattttcaattcctctaatcctcagatagacgctgatctggatactctgatttctgagaaagtgacggagagggagaatgaagagatttgtcgaatccctggtaatggcgagatcaaagatgtggtgtttaaactacaccccctcaaagcccccagggccagacggattttcaggtatcttctttag

SEQ ID NO: 240421 - DNA, 1223 bp, Cannabis indica
cgatctaattataaccgattaatcaattacgactcatctaataaaattcgatatccaattataatttggatcggattagatttagattctaaaaatacaattggatcaaattggttgttggataggacatccaatactatagacaatcaaaccgaacctattcaattattaacgagttgtcatccaattatatttatatgtttttaaattctaatatatgcctacacataagattacataaaaaaaattcaaatataaaatatcacatatttataacattaatgaatatattttaaaaacatataaacaaataaatatttattatttttatgtatttctttgtatgttttttaattttttttttcaacgaattaaaatgtatttattaattttttttacatatttgtattttattatgatgaaaattaaattttgtataaatatatttttctttttagtgaagttggctaaaaataaataaatgggtccactccaatctaatagaaaacgagtcactacatctaatagttagaactgatttaatccaatgcatggattggatcggatgggatcagttgactcaatttaattggattagatcagctgacaaaatccaacatctaataaataagagcattgctatgaagtaccaaagtgtagcacttttataaaatgacgtcttataattagttaacagttttgtataatttttattaagttaaaataaataagactcaaattaaattgtactaatagcgatataacgcttcataaagtgctaggcactacttagtttagcatttctcaaagattaaatcggttgggttgaaatccaactcctaactatttatatattttaaattgcattcataggtttgtaatgactaaacacaacctccataattgtcctctaatataataaagtatcaaaataaatataaatacacgggattctagtatattgagaacaaaaatttttaattacaaaattttatttataaatacacgggattctagtatgttttatttataatttgcttaaaaattttaattacaaaattattcttataaagttttaaaattataaatatacactttgttcagtaaaaagtaaaaaaaaaagtaaaaaataacctaaccttacgacaaccataaataaactataaaacaactaaaaaaatcttgtaagaagtataaataaactaggttaattagcaattttt

SEQ ID NO: 240422 - DNA, 851 bp, Cannabis indica
gcttctaatttagagatctaggaggaagacttagttgataatattacactatcaaatcatggtaattattatggatcaatcaggtacacgtacctaattcttgtataattattattgtgtattagattatatacaaatttttatcttgtattgttaattttctaacaattcaatatttgacagccggttctaattagatcactcagttgtaattggattgaattaatttatgcacagctctatttgataccttaaccaattggtatctcaaactttcaactaaaataaaatttaccaaatatttcatttttattatttcatatttaaaagtacttagattttattttacatatctttatttaatttataaaacacttttgaaaggtttctaaaataacttacaaagagatttaattgtatcttaaacaacatcataacttgtaaaatgagacagtattgtaaacatcatatgagatagtattgtaaacatcatagaaagaaataaaaaataaacaatactaattttactaataaactatatgataatattttgtactttttagattttactgcaacttactttctaacatatgttttcaattaacataaaagttattaaaatagaagtaacgtacgtcaaagtattacaaagaacgataaaataatataatatatataatttaaaaattaaaaactaaaaaataaaacaaaacttataattttaaagttaactaatcaaactaaataattaaatatgcatgagatacaattattttttaaataagtttttagataaaagtaaccattttgatattttatttgtattaaaaactctattttttttaaaaaaa

SEQ ID NO: 240423 - DNA, 1072 bp, Cannabis indica
aatttttaatatttttacgaatttttttgattatttacagaaaatacgtatttttttaatgttgtattcatgttaatttgttgttgattttttgttatttgtaagttattttttgttgttattttgatgttatttagatgttattttcatgttacttttatgtagttttttgttgttttcgtgttattttgacgggaaactagtaaaaatgtaaaaaacaaaattcattaaacgtaaaaatataattttttttacaaaaaatagtaccttatgtaattaacccaattttctttagttaaataaataaaagcttttttagtgaaaaaatcgtaaagtaaattatttttgctgccttttttttattataatcatatgtgtaataaatgtaaatgctaagaaaattttatcgcgaatatctcatttaataaagtatttctaaaatatttatcacttaaatttataatatatagtttgagcccttaattttttatcctggttctgcccctgatttgtacacataccactagatctagagaactctagaactaggagaaaactattttggaagtaaagacaacggtggttatacctccacatatttgattgtttgtcatgtctatacgtttttatttttgtcgagcattgctattaggcaatagtgatgcctagcaccttcttgacatgtcgcgttgtaattggctagcgatactccctaaaaactattatattaaactatatgggacccgatacttagttgaaccaatagtgatactgacacataggaggatgctaggcactactggtgccctttagcatttctcattttcgcccgtagaaactcaacatgtaattaattgttcaaacttttatattaaatgtgtgtgtaaaaaggaggcatagtgtcccacaagtttaatcaacatttatatatgtaaatctataactatataaaaatgaatgtaggtttgggtttactacattaaattacaaaattgtctttatttttttttattaattactattaaatcctcacagcatttaatcaaaagaaaaaattataatttagaggact

SEQ ID NO: 240424 - DNA, 1065 bp, Cannabis indica
gtgaattgtgtatttgtttatctttgtagtttaatacattagtttaaaactgatactaacttatgcatgattaatgatacctaataataaaagtttagaaaaagtgaatataacgaatgacttttaaataatgaacataagttagtaatatgaaatgaaagtatttatatatagtttatgcgatttttagattattgcttaatgcgaattttatatattgtactatttcaaaaatgcaatagttgacatgcaatttaagatttttatgatctaaaaagagtgtaggtgaatttgtaatttgtcatcacataggagaaaatggttaaaacaattaggtacgtaattgcattaattgaaatcatattcctaatttcgcatccattattaaattcttttatttgcctattttaattttcagctttgcttcattgttatttctaaattttattatcactaaatagaaatataagtacaatttagtaagtattcggttacaatttacattgggttcgacctccttatgtgagtattgtttcatacatacacttgcaacaaatactctaattaatttttaatcgagagactttttttccaaaaaaaaaaaaaatcaagcaaattttattaatagcaataagctaatataataagttgcaactcaaatattggaacatctctctattggaaagacaaccatgattataattagaaaaataagcaatcaattgtcacctcattcttgaatcatttgacaaatgaaattaaaataataacagatgaaaatgattgtattaccttaattaaccttattaagaagacatattgaaacaaatagaacagaggagaacagagaggaaattgagaagcaaagcttgtctcttacacgagactttattgatgtttatatagcccaattaggcagcaaactaatacaaagcaattagttataacagaattgctagaaagattacaagtggcttttaacagaatctgaacagaaaataacagacccaagcacaaaccaactaatcttgactttggttatcatcccccctccaaacgaaaaac

SEQ ID NO: 240425 - DNA, 1523 bp, Cannabis indica
tttttttttttttaaaaaagaatgaaaatagtgaagaagatgaaaatgaattttaaaataaaaaaaaatggtgtatgattgtaaatgtaggaatctaagagaaaataaattaaaaaaaaaaaggaaatatcgagccactaagaggctgtttggctatatttttagttttcagttttcagaattgtatttttaaaagtgagaacagaaaaaagttttttgtcattttaaaaattcaatagtatttggctcaagtttttcaaaattatttttagattttttcttactaaaaaattcaatattttacaacataccacgatattaacccatcctacctcggacccagacccaaatccagatcccaaacccggggctaggtccaaagtgtttagttgggttcgagtatgggcttcgggtccgagtcgggatctgggattcgagtcgggatccggggtctaggtctagattcaggtctgggtccggggtccaggtccaggtccaggtccaggtctgagttcctagtttggggtcggggtccgaatatggtgttcgggtttgagtcgggatccaagtctgagtcagggtctgggtctgggccggtcttggatctagatcggggtttggggtctagggtttgggatccaggcttgggtactgggtttcgggttttgggttttgggtttggggtatggggttagggttgggttcagggtccgggtctgggctgggatctggggtcctagtcggggttcggggtctggggtccgagtctgagtttgggtcagggtcagggcgtggttccgggtctagttccgagtctaaagtttgagtatgtgagcaaaaatataaaatataaaatgttagacaaaaaatatttttaaaaattgaaaacaacattttaattttttctattttctagttttttaaatttcattaaaaactgtttttaaaatttttgaccaaacgactcctattaattttaaaaattattttctattttttaaaactaaaaataatttttaagttatgaaccaaacaacccttaaatattcacaaatgaagactttccataaggaaaaactaaaaaactaaaagacagtacgtataaaaatacatacactaacaattaagcaataatggaattaataaaaaatataaaaagaattaaaaaaaaacctaatcgatgcacaatattaacttatcaaaactattacaaaatcatgtattaatgttatgtatacaaaaagtaaagtaaaaaagaaaaataacagaacattatttttgaaaaaacattataaaatatatagactaataatattaacattagtagtattaatttagtaatattaaatattaatgtaatgggaaatataaataaatttttcatatatttatgttgaaatttttttattcagatttaattataatcttttttttaaaaaaagaaaatagtatttgtggcataaaagaagaagaaacaatcagtggagtaccaaaaactatggaaaagatggcatttttagaaa

SEQ ID NO: 240426 - DNA, 1370 bp, Cannabis indica
tattattatttttttaaaaaaaagatctttcaataattagcaatgataatataaaataaatatgattatattatttaacgtttgatgacagttttaaaataaaaaattaaaataaggactagtaatttggttataaatatatttaaataatcacatgataaatgagctttaaattattaattaactaaatctaaaatacacgaatctcagtctccctattcatcgtgtaagttcaagataatcataattgtcaaatattttataatcattttggattttcttcatatactgtatttattctttaaatttttaaaacaaagaaaatcttttagagaaaatctcttctaatataaaacaatgtaataaaatattttaaatgaatgtctaaattatttaaattaattattaccataaatattacgaaactttttatttgaaaactttacttgtaattaaattaaaaaaatatggtatatagtgctgatgtgttacacggtatagattaatagaaagcatattattaagcaatggtttttatgtaattttaatatatacattgtatattaataaaaattttcccaaatataaatgtatttttctttaattagttgaattaattctcattattttagaataaactacttaaaaaattctcattcattttctcgtatttcttatcctatttttttctctattatatatttatttcataacattattaacacgaatatctaagtaatgataaaaattaatcataaatatatattgctgaactgagatatttcaatattgctgaagaatatttataaaagaaaaatactaattacagcttcgaaaaatatatgctaacagttatttacagctcaccaaatcaaaccctgcttcatattttaatatatagacagttatttacaattattctcatatcacatatatttaattgtatataaaacataagtatttactcccactcaatgtaacttctcactaatattgattgatatgaatgacggccaaaattacaaaaatgtacctaactcataaacgggattttaaatgcgataaatttcaaataatttcatataattaattatataataatataattactcatttattcttaattaattttaattaaaattactaatttatttattaatcccagaatattacataagctgttcaaacaaagagtacgagcgatgtaatatcgcaatcttctcttcttccttgggcactgagatttattgtcatgttggatacttggaatccttaaaatccatagtgcattggttcgttctgagaagaccgtaggtttttaagttatagttgtaaataagaaagtccgccgctcgcaaaccataaggcaa

SEQ ID NO: 240427 - DNA, 1030 bp, Cannabis indica
taggaagtggttgattttctcatatctcaattttaggcatagtcagcatccacgaatccattcaactccatttctcctttttctttctcataggtaagaccataatcccaagtgccctttaagtactttaataaccatttgagggccttccaatattcactgcccatattggacatggaccgactcaggatgcttatcagagcataggttatggccgacctggtgctcaccatcacatacattaagcatcctaattccactgcatatggtacatccttcatttcttatttctctttcgcagtgtttggacattgttccttcaaaaagacaaactatttgcctaacagaacagatgtactctttgcatcttccatgttaaaatgttgaataacattcttgatgtacacggactactttaagtggattgtcctttccagcgtattccttggaacttcaataccaagtatcttttgaactggtccaaaatcattcatctctaactctatcttgagcttggctttgatacttttgatcactgattgggcttttctcattatgagcatgtcatcaacatagatcaataagaacacaattgtagattgctccagattcttgaaatataagcagtgatcatatgcagatgtttgaacctgattcattgcatataagtatcaaatcttttattccaccgtcttggagtttgtttaaaaccatatagagacctgttgagcttgaaaagtaacttaaatcccttcccttccacctgaaacccaggtggttgcttcttatagatctcttcattgaagaatccattcagaaaggcagtcttaacatcaagttgtttaacttcaaactctatttgagctgccaagggcagcatcaatcttatcgtcttttgttttgccgcaactgagaagatttcagtgtagtctattccttctacctgattaaaacccttagtcactaagctggctttggactgcactggttcattctcattaattctctctttcaccttaagaatccattt

SEQ ID NO: 240428 - DNA, 795 bp, Cannabis indica
catgcatttcttgcatgagattgggtcaatggaaaatcctcactgtttcgagaaagccaactagtcctaacatgcgaagaaaagaaaaaggcaagaaaagagaaagctggctgtatgtcgcaaatggttgggtgtgtcgcagtgacttaaggaacatacgaacacacgcatgaacatcaagttacagaaacacacccaccatttgaaggatctaaccagtattcccaacaaaaaacatgtatgaaacataaggcaataataaaccctaagttctaaacaagggttggggtggctaaatccctagattttctaaaaatataaatgcgagtattcgagatgatcatctcaatactcgcgagtatttaagacggtaaacaagaaagatgtgaatactcgaggtgttcttcctgaaactcgcgattatgcaaatttcaggcctattttctctagaaaactacccagttttaagtagaaaaataaggctctatgcatattccctattatatcatgcatcttctaccccctaaaacatagaataaaacaaattgcaaacagttttgaactaaccttgagattgtcgatttctttttgatcaaatccgttagtctctgaaactagtgaggattgagtttctagaggaaaaggggaagaaatttggaaacggtttaaaatttcaaaagttcagagcaaataagaagagaagagcaaaaatgagagggaaaaatgtggaatcggttcgtatcagggggcttaaataccattatccctcattaattgggattatgacacgtggca

SEQ ID NO: 240429 - DNA, 878 bp, Cannabis indica
acacgtggcaaaataatagaagacattaatccaatgatcaccgactaagtctccttaatcacagtaaggtctaatctgtggaagacatagagatttaccacaaggcaaatgaccatttgagatccaaaagccttatcattgctccgggatttgaagaagatcaacttatctataagtgcaggcagatgtcagagagtcatgaaaagagtctaagatggatgtcgattgcacaaggagaatcggaagccacatgcgaggcaaaagtcgaatagctttatgacagttattcttgtctgacattgaaggagatcttgtctcccgtgttagaccatgatagtgcgcccacaccctctaaatactctacttcgtccgatggttcctctgagcattttgtccactaagtgcaagccttttcccaatgtgcccaacaccaacaatggtccccactatatggaaaggtcgtcacacaagaaagaaccatcttaagggcccaatagttagatttttaatgtattttaccctaatagtgggcctttttacagaaaccgtagatgggtcatgagtatgcccatgacagtactttagcctacaaatgcccttttatttcgccacaattgggagatcaaaaaaataataacagaaactctatcaaaagctctctcactttcttcttcttcaagagaaaccaagagaataaaattagggttttctactgtaaacaccactgtaacatattatacaagccttctaaggccaatatattgactcgtagattatggatcattaatgccgcaaaaatcatggtctattttatttattgcttcttttatttcttaagtacttatttaattcatttttcaaaatctcggtaaatattt

SEQ ID NO: 240430 - DNA, 1487 bp, Cannabis indica
gctcgaccactaatcagaaacgaaaggcattatttgcacccggtggcttaggttagaataagtggttctgagggaaccactgtcgaggcaaccgtcagggtggtttcaaaacctgatgcacttactcagagtgtcccagttgtaagaagcatcatctgggtgagtgtagagggcaagggtgttttcagtgtgggttaccaggacaatattaaagagattgcccgcagcttaagaaagaagaacagaagatagctacacaactctctctaacaagggtgtttgctttaactcaagcaaatgcagaagctagaccctgagttgtaacacgccagctttgagtcaacaactcttacttctctatattgtttgacgctggggtcacttactcttatgtgacaaccatgattttatagtaaattggataaaccacatgataattatgataaagggtttggaaccctactgcctgatggagaattagatatctctaaaagaagaattaggtctatgccgatcataattgaggatagggagttgagtgccgacttaatagaattgggtttagcggattttgacattacacttggaatggatttcttatcctagtactcagctagtattgactgtaaatgaaagatggtgatcttccaacccgagggcgagggaccacttgtttttgtgggatctgtttagggatcccggattctagtgatttcaatattgacaactagagatttattacaagacgaatgtttatggtttgtggccatggtaaaagataccacaaggcctgatatagttcgacctgaggatatcagggtggttcaggaacttttagattttttctgatgaacttccaagtttaccactgcagaaagagaaatcgatttcattatcgatttagcacctggagcagaaccggtttttaaggaaccttaaagaatggctctagcagaactaaaagaattgaaaattcagcttcaagagttgcttgacctagggttttcatggcctactgtgtcaccctggggagctcccgtattgtttgttaagaagaaagattgatctttccgcatgtgtattgactattgggaattaaataaactgaatattaagagaaaatatccgttaccctaggatcgatgacttattcaatcaacttcaggggaaaacggtcttctcaaagattaatctccgatcaggctatcatcagttgagaatccgagaggaggacattcgaaagactacttttcgcactaggtatgtgcagtacgaatttctggttatgtcttttggactaaccaatgctcccgcaacttttatggatcaaatgaatagggtattcaaggatgcctcgatatctatgttattgtttttatcgatgatatccttgtgcactctcaatcagaagaggagcacaagaaacaccttcggatggttcttcaacgactacgagaacataatctgtatgccaaattcaagaagtg

SEQ ID NO: 240431 - DNA, 1051 bp, Cannabis indica
caagctctctctctctttcgaaccccataggaccaactagggtttgattggttttgctgctcaatctaaggaataataagcagggttgtagttgtttcaagtcaaggtatgattctaagcttgttcatgttgagttcttagaatttaagtttgatattcacgacttctctttgattagttgtcgttagtgttgttggtgtttaattttgttttctatagttaaattaagattattcaggttgttttgagatagatttaagggctattttaatgtttgagaaagctttgagtttcagaactcaagatttgctctttaatggtggattttgattttgagcatgttatgttgttctattgcttagaatatgtttattggggtatcttaagcaagtgtagaaggtttggtttgatttggaaatgaattgggaaagatttcaaatttttggggttacctggtgtaaactggttaaccggttttacaggccctgtaaaactggttaaccggatcagcagctaggtttccaaaaaatttgtgttgtcgattcgtgttaattttagagttttggttgggtaattcttggttagtttcgagtatttccatgttaactttcagtaggaaacttttgttttaaaacctaggtccctggatgtggtttagcgtgtcacgtacttgtgttatgaacgatgtgatttaggggcctgcaattcaccgagtagttgttccactcaggttggccagcacacctgaattcggaaacaaggtaatattagtataatgttatccatatgtatacatgtttagcatacatgttgtttatgcctgttagagtacattgatcgcagtattagtatacatagagttttagtagatactgataaatgtatgtttggctaaaatgttgatcgatgctatcacatcaatatggatagagtacgactggcatattgagtataggctgatattatggtcgatagtattgttgtatgacgttctagtctcagtatcgtgtgcgacactgggatagggatatggttgggtgtacaggcgcct

SEQ ID NO: 240432 - DNA, 1350 bp, Cannabis indica
ataaaaaaaaaacttaaaaactcgtatataaatttacttctatataatcaaaactagtttcttaatgaaaaatgttaatttttagaatacgatatctttggcttctctggtttatgattcaaacaaaaagaaataagctttttattttgaaataaactttattaactggaagcaaaggttaaaaaggagagggcaagtcagccaagattcctgagttgccacacaggggattctatcttccaaataggtaaagctttaaactctaaagttgatctagaaagtaaatgagccacattgtgtgattccctaccagcaaaattaatcaaattacatctagagaaagacaacaagagtttaatatatgtgataatgggatcaaggtcagagcaaccaacaccaagactattaataatacccactgcttgtttgcaacttgatacgatagtgaagttttcgaaccccatctcatgtccgagattaaggccgatcttgatcttaacaagctttgttgccaaggggtttgagacaagagggacggacctctaaagggaagccaattggtaatcgttgtgatctcaggcaatagcacacaactctacactagtagcatgcttctgaatgctagtgtcgacatttgtcttgaccatgtgaatagaggaggggttccacttagtatgcttattgtgtctatctttgtgatgatctttctttctttgattttcttggtactcatgaaggaagttgtggcaccaattgatcaaaaaggcttgattgggagaagattcaccatgggtaaccgaattcctgacataccaaagttgttaggtggtcactatgaagaattcaaaattgtctttaaactcttgttgcactctcattaggaaattaatgggatccttgggccaacaagtttgatcatcttccaaagacccgccaatttctagaacttgacaaattgttgggcaatgccacaaggtttgatttttattctccttagtccatgggttacatctggagcaatctttctcaagtttaatacccttgtaggaaagagcaagattgggtggggagccaatgatggcaaagcttccagataaatattttcaactagagaggtagtttcatcttccacatactattccaccaagcttctattttttccatagtcgaggcttcaataactttcttttcagaaatggcaactcgatacccactcttaatattctattcaccatttcttgaatagtgccaaaggatttatcctcaatatgggagtcaccgcaagggatttggaggatgagatcggcatcctctatgttaaaattttgtctaattaagtcctcgtcccat

SEQ ID NO: 240433 - DNA, 1133 bp, Cannabis indica
attagagtcatgcaccctcaagtatgactgagctcgcgaaaaaagtgattagtggattaagctcagagtagtgattgtaaagtaggcccgtggacgttggctccaaatgggggtgtattgttaggatcccacatttatcaagtgtggaattgatcagtagtatataactacttgggcaccctcctttcttaggttaacttttaagagttctacctaagtggttgtatcaagtggtactttggtacaactagactagttttacttattttgataactattaaagaaaaataataattataaaatacgatataatagctaatttgagactaattccactattgacttaaaaaaatactttttaataaatattaaataatttaatattagaaagtaatcaattcaaaataatcgattcaatttacatctattgaattagattgaatttaagttattatgtagattggattagatccaaaatatgaaatttacacttactacggatcagatgtacttaataagcaaaataatgtaaattagataagatgaacactcctactctcctctccgtgaaaataaccttgtcctcaaggttttgcttaaacataggtggccaaggattgtcttcaataatccccacttcttcatctgcatcactttcattaaaatatgcttgaatcatgaataattgtttgcaagtataatcattttctcctcttttcaactatctcatcggttgttaatttcttaattgttgttagattattttaaacctctccataagttgatgaaaccttggacggaagtgagatctttcacttaatataatcaggccaatccaatagcagatgacaaagttagtggtttgttggctctaatattggcgcggatagaatcttgaagatctccaatgaaaaaactcacttgagcctgttctaatgctccagttttagataataacttcttgaacttgtcttggtattcttggttgatcccattcgttgcaaaggtgtaagctctccaaagaaatcaagatattgatttcgcccatatttcgtgttcatcccttcagtgaactcttcccataaaactattgtaatctcttgttgtagcaattggtatcataggtgtgtgtc

SEQ ID NO: 240434 - DNA, 1012 bp, Cannabis indica
tttttttaaaaaaaaagagtgtatattgaatgtgtgttttttcaatgaaaatttaatattgtatttgagtttatgatattgtttttgagtatatgccagtgagtaatttgaattaaaattaaaattaaaaaatttatcatctaaatataataaactaataaatataatattcaaattatttttttagtaaaaaaaataaattttcatgtccagaaaggtagatgagaaattagtatctcaaattttatccacatgacgtggcatgtcaacgtacggccaaaacagagtacagtcctgccagtagcagagcagggtctatatgcaagatatagtaaagccgtcaagcaacaaccgaaatgagtgaatcaagctctcaagggactgtacctacatccctggtcggccaagagaagcttataggttggccacgatgatttgataggccggccagcatctgtgcacaagctggccagccaaaaagtgacttctagaccaagggagcctctgttcgaccaaagaaatctggcctctacaaggaaatggtgtatgaagatgtcctcagcttgcaaatggctggcctcctcttggtaaagctatagtgacctgtaggatgctggcaaacacatgacctgccaggtccaagcagcagcatggccgccagacctcaacctgcaagcctttcccaaccagatctcaccctgcaagccttggctggccagacatcccctgtttgtctacgggtggccaaaattaacctggcagggctgtatgtacagcctaaaatgtgtatagcaagctacatatgaattggacccttaacaacgcaatagactgatggaaaatatatactttaaaggggtaatttagtcttttgtgtttaatcaatttgatatgtaaatatcttagggttttattgtaaattagggttttatgcctcctatataaaggccttaaccctaaccaagaaaacctaagtcattcagcctagttctagcctccaaaccactctaag

SEQ ID NO: 240435 - DNA, 891 bp, Cannabis indica
tttttatttttttaattttactttaaatatcaaacaataggaaagaaagtctccacctcttttactctccatccatcctccacttctccattcctaccaaacatagctttagtttttcttcttttttcgtctcctactaaacaaatattattttcttcctctcttagttttttcttccctttcacatttttctactctaccaaacataaactggaagctgatgataccctctgactctgagcttttgcccttttgccttgtttgtgtttcagagaaaaaaaaataaacgaaaaactgttcaaccatggcttcttcttcttctcatacccatattgccgagggtcacacagaaattcctcctaccgctcaccattttttcaatactattcttgaacaaactcctgggaacaccaagttagtaagtaaattattactactctctctctctctgcatcaacttcagttgattatttttcgatgatttattatgcatttacagtacaccagatattataagttgatagccctgattttgtggttaaattcgtctgaatttgaggaaataatattgtatatacattttttcctttacttttttctacatgagttgtcaaagattatatatttaattataggtttttttttttttggtcaattctttttacccttaacgtttgttctaataatttgttctactttggttttggtaaatacttgttcaatgtgccaaaacttaagtggagtgacatgttaaagtaaagtctcttttgtatatgttgtaatttctaagtactatatataatacttaatcatagtctctgcaacatgaaaataggtgcttctttgtattgttatgatgaggagaatatatgtatataatacatgtattta

SEQ ID NO: 240436 - DNA, 963 bp, Cannabis indica
cattttcatctgacattactcttatccaccccttgtgttttagagcttcaacaacagagattggttctcctccattgttttcccactgtgtttactcaggtaagtcatgggtttaaaaaacacctgctttcgaccttgtgatcatgtgatggccaagctgttgacttttctcagtgtcagcttgatcttgatctgtagtggcctgttagggaccaatttgattctcttggctatccaacacagcagcgttagtggtatcaatattcagatcaacaaagaggtgtccagtgagatctacctgagttttcttgtgaggactcttggtccttgtttgatgagggtgcaagggtagcttctggagtgcctgtatcagatgagggttcatttatcaagggatctgcatgtgttattttctcagtttgaacctgaaacattgacaaggtaaaccagttactaggaatagtgagattgacattttatccctgttgatgagtgttgagaaacccaattttaaatgggaactcatcttcattgaagattacatttctataaatgtataatctgccagtggagcttaagcatttgtatcccttgtgatgttcactatatagcctaggttgacacatttagttgaatgaaatttgaacttgtgattttgatacagccttagacagggataacatgctataccaaagctttttaggaatgtgtagtcaggtttctttgagtacaaaacctcacagggagaccttccattcagcacaggtgtgggaagtctgttaatgagatagattgaggtttgaaaagcatcaacccagtattttaatggcattctggcttgtgcaagaagggtcatccccatttctactatgtgcttgtgctttctttcagcacaaccattttgagcagaagtataggggcaaggataattaaaacttatgccacactctttcacaagattag

SEQ ID NO: 240437 - DNA, 1553 bp, Cannabis indica
ttgtgcaatcataacatttttttgacacagagcatatactttgacaagagattctcaatggtttgttgaaggtgttaaatcaagaggagactaagctaattgttatcattatctttttgtcatcctcaaaaagtatcacatttattttatgcttagagaaactgctgatcattaaactgtagaacaaaaatattgtactgcttgagaagatattgcctctcaaatgggcacgtggaatgcacgtgctcctctaactagtatataaataagaacctcattttgtgtgtaaacgaaatcgatcccaactgaacaggagcagcgtttgtcctctccataattttttatagaataaaacgtccactattctatcaatcaataaagcataaaaaagaagcaacaaccggaaagaatgagttgaaaattaaacataagagcaatgatattgattcctacctatcttttccatttacaatagggttctcatgggaacaaaatattctggcctagcttgtatgaattgccctccgagaacagcacaaaaacactgcgaacccaagatcgttggagtagggttgtacatcagtcggtttagtcggtttatactacatattttccaacccaacgtaaagatcgggttgtaaaattctgcatgcaaatacataatattccaaatctaaagtcaattgtcctaatccaaattcacatcaccataataaaacacaaaagtttaaaatccaaacattcaaaataagaaatacaagagtccaaattagaaataaacattaatccaaaagttaaaaaaaaaaaaaaacataacaaaacaagacatcatgcatagttcaaaatatcataaactagtccagtaaaacaatttcatgggactaactatgaagcgccactagtagttgtctctgttcctgtgcttgtaatacatgattcctctagaagaaaaataaaattaaaatatattagaaacaaattatttgtaagataagaatattaaactatatatatatatatatgtatatgaaatgataaatttattttaccaaatttaactagttcagagatctctaaatcttcaacttcattcatgtattgtctcaacacaacaggagcagcatactcacaagtcaaccaattctttgagcaaattaatgcttcaactgtctttggagacaaagaacttctaaatggattaagtatccatcctccagttgaaaaagctgattcagaagcaacactagatatttgaacagccaaaacatctttagcaatgtcagaaataatcatccaaatcattactggctacttcacttgacaaaaacctaagcttgataaagaatgatgtgctacttgagcttgcattggatttgaaagtggcattttcagttgtttgttgatcattggaggaattaggaagcacaacaatcttttgataaaaagcatataagttagtcatcatatttttaacttttttaattattatttcagctgtaattgcatcatagagataactaacaagtaatcaaatagaaacattaaacaatgta

SEQ ID NO: 240438 - DNA, 1073 bp, Cannabis indica
tgatgcaatgtacaattttcgaatattattttactattttttattggaaaagaattgaaatgattgagggttctaactaatgttaatttctaaaagtaagtaatttgacgttataatcaatgttcgttatatcaatatgtataaataaaaatatttagttgtgattagttatcctaatatatacgtattagtgacgatgacacactcattagaaacataattatttaaataaacttttttttttctaacaaataaagtctttattttcatctcatatgagacccaatttcgtagaaattcataattttttattatagtatagattcaacaaagataattgatagtaatgatcacttcaattcaagtcatcaaacttttattattgaaattttttattgctataaatatttttttcacatcaataaatagaaaacgtaagtcaacaaaatcatacaaaattttggttttgtttgatttacatttgcattaatgtcctgtaatttaataaaaactaatataaaaacttaaatttacaaaattatggtgtttttgtaaagaaaataaaacagattattattgtaaaaactttgtagaactgttattacagttagtttttgggcctcaatgtaagaaagagcccaaaatctttagtagagggcctagcaagcccatatagtttttctttgcttgtaagcccatatagcaagcccatgtagttgatggtcgtttccttttcaggggaattttgatttttatggttttttaaagtataagtttgttcttttcaaaaaaaaaaaaaagtataagtttgtaaaaatattttcaaaaaagttattttatggaaaatttttagaaaaatgtttaaaaaatatggaaaaataacataaagtacctggttacttccttagggcccgtttggtacgcaggactggattggattatttatcccaccctgctggaagggataaataatcccagacagatgaggttagctagattaattaaactaaacttctaacatgcccaaacactggattggaaaaattaacatgtctaatccaatccagtcctgc

SEQ ID NO: 240439 - DNA, 1680 bp, Cannabis indica
cgacacgggcagcctcagacgtcgttaatggaatcgaaacatagcgaagatgaagagggcaccaaagcagctctcacagagcgactccccacccatttctacacaccacggttttgcgttttagggaaaagttataattgattgattatcaacttgttttatagatcaaataataactactactaccaaatgttgaataatgcctatatattagcaatagcagctagggtcgtcgggccgtcttatttgaatatatattaacaagattcaaaggtggatatcatatattacattaatatttttacaaattgcaataaatgtatctgtgttactgtgtatatatttataattagtttgaccattttcatttcaagaatcttttgatatttaattactttgttttcacatctccgattaattacgccattgtggtaataatgcactacaaagaagaaaaataataatgttttctgatactttacagatttataagtaattagttttttttttttggtgagaacatgtcatctgtacgtatattgcaagtgtttattataatatttcttgagtgcggtcaaaatatagtacacgctttaacaagtgattaattagttcactaattcctcgatctagttttacaaattggtaactaattataactaatagaaatgttatttttgctggaaattaattaatgcatgcttgcctggtctccccatgttccatgagagagaacttgggttgatttattaattaattaggaaaaatgaggggagctagcgtacgcatgataacctcttgaaatgaaagagagaggtaatgaatcaatcttcacccgtgaattctgccaaagcttttactttttgtagcatatagcacacgtaatatatagttgaccttgatgaatataaacatatcctcatcctaatatgttgactagatcagtagatccacaaattcacgtataaacgtatgcttagtattttttatccacatttgaccagtcgactcgttcctaggatttttcaaagggttccgaaaacttcctattcccttcataaaaattacatattttacaagtttttataatgtgtgtaaaaatacatatatttgtttctttacaaaattattttatagaaaaaatagttatccatctacacaagtaactaattgtactgtttttcaccttattttttcaaaattttcccataaaatttacacaatacattttttttttccatttttaaggatttttttcaatttatatttttactatttaacagcaacaccaaaacagcattatttgaaacaacaaaaaaataatacttcgtattattgtaaaaaaaaattgcgttgtattttcctataaagcaacgtcaaaataacgaaataaacacttcatatttgttttaaaaaaaattataaaattgtaagaaaaaataacataggagacttctacagtggacaccctaaaaagggtcacactgatgcaaccttatttttaccagttttcattaggtgttaaatgaagcacatcgtattatgttgtacactcccatagataattgtatactatttgagatatttactaacagcaaagtacaaatttttctaaaggtctcaggcgagagcttcaattgccgacccgaatgatccactcattccaaccatactcccaac

SEQ ID NO: 240440 - DNA, 863 bp, Cannabis indica
ggttatggtactgttggtagaagcgggccattttcggcacactttgcttagttccatccttgtcgcccggtgtagcaatgcccccaatgttacatcaaaaggaagaaactataaggcattaaaacaaagttaaggagtccttgcgacatgcatatcctgctcgaagtctaaatcctcgcttcagcaaccctcaaattccctcgcacttcactggaggagacaaattgcttgggagatctggaaggtgtaaccatgcacctcttagactttcctcgggctcggggaacgcacatcaacctgctcctcacgtgtggaaaatccttgggaatgtctcatgtctttaaccatctttcttggaagggaaagaccacttgaagtcagctttgttcccaaagatttggccagccattcatcttttccagcgaagtccaagcttgaattcttatacaacatcagccatccttcccaaaagccaacctagtaacataaaaattcaacatgactcttgcatgcacgtttgtgcaagaaatatcactaggggtgcgatacatctacgaccctccttctaagatactgcttgaagtctatcctattcctcgtgatgcttttccattgatcttttcaagcaaggtctaagcttgaatttttatacaacttctgccttccttcctagaagtcgaagcttgttacataaaaactcaacatcattctcgcatgcatggttgtgcaagaaagatcactaggggtgcgatacgtcttcaaccctccttcccatattggaaggactgcttgaagtctatcctactcctcgtgatgctttcccattgatctttaaggcaaagtctaagcttgaattttataca

SEQ ID NO: 240441 - DNA, 1657 bp, Cannabis indica
aattattgaataataaattttgggttggatgcttttcacatggtttgtgggttcaggtaatctgtctgatcagattgaacaaataatattgttaaaaattaaaacgaataaatattaaaattaaaaaaaactaatacatataatatatactaaataattaatatgatttaaggtctcaatcaaactttaaactattgcatctcatgcttgttataatttatttatattataatataatttgtcgaaaatgacttatgaaaataattggtatagggtttcacatgcacacatatataagtatatttatatgttgtattgtagctaattaagatggaaatgatcaaattggcttttggttgtgaatttgcatggaatgtatttggaaatatatttgacaagaattattgatgtgagtataggataggcaccatataatatcaatttggtttaacttatttgagttttgtttttatcccaaaatataataatgtacttagatttttctattataaaataattaatcgacggttggtattggattctatataagaaagagtttcgtattcctctaacatacgcatgtgccaattaaagcaaattttactttggtaaccacaatatactcaccttttaacattctacttatttaaagttttacatatatatatatatatatatatatatataagaaggagcatgcttattagacgtatatagagtactatactgatatagcgcgttatgattagttaatagtttttttataaaaaccaactcatcaacaaagagaaaatatctaaaaaagactccctattagggatgcatacggggcgggaaattagcagggagtgctctccccgtcttcatccccattaaggattttaattctcatctccgcttattccccatcggggacggggcggggaatcctctaataggacgaggacgggacaccatccccatgggaaaaatatgcatcaatcaacttgacttgttcttatgggtataacatttatagttttgttatatacatctttaattttattaatagtagaaacaattgttgaaactttaccctaatgagtcacgtttctaactctttgaaagcttgtttggtgtacaatgttgtattgtatagcattgtattagattgtattgtattatattagtattacttaatacatactatgtttagtgttgacttatattaatagattgtgtaaaattataatacatatatttacaataaactcgaccccaactctaatattgacctggacttggactcgaaccccatccccagacctcgacctcagacccggaccgcaacctcaaacctagaccttaacctagtccgggtctagggtctggggtccgaggtctactcccgggtttgagttttgggtcctgagtaggcgttcgagtctgggtctcgagtcgaggtctaggttcaggtcctaggctggggttcgggtccaaatcccgagtccagggtttgagtcgagatcggggtcagggtctagggtcggggtcgaatctagatccgggaacctggtccgagtttaggattcaggttcaaggtccgagaccaggattgacctcgaactttttgtaaatattataatacaagctaatacaaataatttgttatgtatta

SEQ ID NO: 240442 - DNA, 821 bp, Cannabis indica
tttaaaatattgaaagaattattaaactataaatatactatatcaaatgctctaaattctctttctattttttttaaagataattcttctatattttaaattttttttaaaattcattattcatgctctatatttataaaatactatttattactctaaacatattttcttaattgtttgagattttaattttttttatatggttaatcaaaataaaaaaaaatgatgtgtgtaaatattaatattatttatttaaaataaataaaatatattaaaatttagaaaaagaaatgtagaatttttgtgatgtatttaaaaaaaaaaaattaaatgtatggtctagtctaaaattttgaaataaaataaaaaataataaaattttaattatgtagtttgaagaatagagtagaaaccacttcttgtctccaagtccaaatgtcactccccatcctaactagcattacttgagcaagaactttgtttatttatttaaaagaaagatttcattaaagtaaaaaaatcaatttttacatgagaacataaaatcaaggataagcatcaagccaaatagcattattattgaatattggtaataccccaatttacatttatcacaaagtgatatttaaaaaataattagcaataattattaaattaaaatatattgtatctaatactaatatgagaggtgatgatagctcaatactatgatataacatttcatgtgtagtattaaagagaataaaatgctttatactatagagggggccttctgatggatatagatgaaagaaattttaaagtataggctatgtttgaga

SEQ ID NO: 240443 - DNA, 1049 bp, Cannabis indica
atattcaatttatagcataggagccataccttaaagatggacctcttaacatagagacaacttcattgtatctccttagtttaagaggtaatcgattaaggtaaagggaatctcattgtgaagcgagttattttgaagatagttacttttattggtagtaccgtcgtagaggcacccttgttccagtaccttggtactcgtattagattcaagttgtatgcatagcgtgccaacttgtatgtcttgggttctaatgctttagtgatgacatattttccttcccaattatgcctaagtactcatgttgacgtgtctttcatgctcaggaatactcgttgttacaccatatctccaggcttaaatttcctatctttaacgtttgagctgtagtgttttgtgaccttatgttgatatgtcgccttccttagctcatacctttctctagtctcttcaatcccatccaaagattcggccaacaattaatggttggtttgttggtcttatgttagtctttgatgtgatgttggtctaagctctacgtgtatcttagctttgtaaccataggttagagcaaagggagtgtggctagttgctatttttttgtgggaaaataagcccatagtacttcgggcagttctttaggccaattccctttggcttactccatgcatttttttgatgtatccttaatacttcggttgatcatttccccttgttcattttcttgtggataaatgactgctaaaaaactcttaatgattccatgcctggtgtagaattcaataaagaggtcgctgtcaaactgtgttccattgtttgtcacactatcttctgtgagagtccaaagcggcaaacggtgttcttgaccacaaaatcaagaaccttctttgatgtgatagtggctaagggcttaaccttgtcccacttggtaaagtaatctaccccactactacatattgaactctgtctttccccttacggttagtgaacatatgaggtcaattctccatatagtgaatggtcagggagtttgcataatcttaagtttg

SEQ ID NO: 240444 - DNA, 1555 bp, Cannabis indica
atatatactaatatataaattatttcaaaaaccctaattagaataaacatataccacgcacagttgcacctcacaaatctcaaacttctcagtctttctctcagtcgcaggggacacgggaagtgggatgaggtttttccaccatcgccacactactcagttcgactggacggggctggtacgtgaacgacagggacgggatcgccacagaaggaatagaactccacgacgaggcttcttaagatctgatgacgcctctgcatcttcttcttattcagggagagatagagatctggcgaggcttccgaagatctaatgacgcctctacatcttcttgatattcttctcgattcttggttgaagtaggaacttctcaatcttttgcagagcctcaacgatgacctcctccttaatgggtatctctccatttacataaatgtttaatgtttaggaaataaaaaagaaaaaaattaaatttgataaaaaaaaatgttgttttgagattcttaaaggtacgccaccactgagatttggatcggatttggttctcttcctttcatccttttgatttgtgaaaatatcaaattattgtttaattttggcaggaccccacattcgatccggagctttcgagcacttatcaagcagtgaagtgcaatatcgactgtaattgtgacaatgatcaaacacaatgcatttgtgttcttggtgatgaggatatattattcttgggtaactacagagtttttggctttgaagaagtgagagatttggattgtagaccaagcgaaccaacaacaaccaaaaataaataaaaaaaaataaataaaaaaattataatatttaaaaatgcagcccaaaaaataattagattataaaaataaataaaaaaaatatattaaaaaataatttaatttaatctacataatatttttgcccacggttacaaacagtcatttaaagtgattttttacaacagttgtaaatcgtcatttaaagtgactttttccaacagttataaaccgtcttttaaagttccgcatttttatgacacccacatagtcaacggttttaggaaccgatggaaatagtatcaaagacagttataaaccgttgggaaaagccatatttgtagtagtgtgcatctattcttaggtggggctgccataatttttgagagcatttggcgcgaaaggaataacctatcccatggaggctctcccactcccatcgggtctatacttcagcatataaacttaagaattcaggagatctccgaggattctaagccccaagttgctgagttgaaggcttggctccctcctcttcctggttgggtgatgtgcaatacagacgtctccattggtaagttgcaggcagcaggggctgcagtgtttagaaatgaaactggagctatcaccaattgcttcactttcaggctggctgtcagtgagccgctccttggaaagacaatgaccctatgcaaaggaacggaagaagcagccaagcaaggttttaggaaggtaatcttccaaaatgactgtgctaacgcaat

SEQ ID NO: 240445 - DNA, 656 bp, Cannabis indica
tacaataaaatatttttttcatataaatgttagtagttaataattacaataaatatattgatattgaaataataaatacaataaatataaattattgttatacactattctattcttttacaaagttgcaagcaaaattcaatagtcaaagtcatataccgatttccaaaaacagcagaacaatctagtgagaaaactatataaaatcacctaaactttaaccaattagtctttaaccagatcaaagagtcttacattgagactcagagtttgtaattctataccaaccaacatacatgggttgagctatggtggcttggcaccctaattacatagatgttaggtgccaagccacgtatgcatagtttgaagttttgttttttattttattttttttagaaaattatcatatgtaatttcaaaataaataaaattattttcattgagtattgataatgatcgaaagcatgatattttgataaaacaaaaataagtaatattttaaaaggcaataatgaattatttgaatttgaaagttaataaaaatgagttaggtgttgatattttttaaaataaaatctatatcttaagtttcgattaaagagaaaaagaacgaagttaaaattaaaaaggcatataccactttgaatgaaaga

SEQ ID NO: 240446 - DNA, 823 bp, Cannabis indica
ttcattgttgccaaatatgtttagtggccactgttttccttatccatgcagagggtgaaagtttctcacttacactaaaagtgtggtatgcttgataagataggaccccacatcttcttaattccctctttttgtaaaactattgtttaggtgatgttccattaatttgtttttctttcttcccatgaatcaaatatcatcatccaatatgttattataaaaaaaatagaagtgagtttgtaattgacgttgttctcatcctaaataatatagcagtcaacaaaaaggtaactgaagaagaataaaacccgtgttggcatcacaatgattcaaatttcaatatcatcactgtctacaatagtcacagggagtcataccactacaacactaaaatctttttttttttttacttttttgctgggtacctaaatcctaatttgtgacatttctagatgccacttttatcactatttagtgacattttggcaaagataagctattataaagttaactgtgactaaattgaatttttaatgacaatttaagatagagcaaattacattgtactattttactttatttgttttaatttttacttttatttttatatttttaaagatataacagatatcctcattaagtccccactcaaaaaggtatgtatatttaaataaaatataatatgatggtattttagatatggtattttagattaataaatacaaaaaaaagatattttttaattgggaaattggcggaactttacggtttgtaacacttaaccacaaaaactaaatttttggcagctaaactacctaaaccc

SEQ ID NO: 240447 - DNA, 1548 bp, Cannabis indica
gtgagcagatccgccaccttaacaccctctcatggcacgaagaaatgggcttgatacacttatatttagtatattaattttattctaatataggtatataaaatcaaacttctctactcataatcttactaataaatcaactgttccatcattcacgtgaaccacctttcacttttaccacatcaaaatagtaaatttattatttattattatcattttttaactagaaattgcaacgtattattatattatagtatcaaaattttttagttccaatttaaggtaaaaatttgaatcaattccaattacatataaagatattcaatgatattcacataattacatataaattcgttatatactaattaatatattttttttttttgaaacaatactaattaatattcggatcttcacatttttttttctgtaaggttcaaattgtttatgaaaccacttatctatgaaccagctctatggtgaaacttcagctccaacacaccccatagctatagtcttcttattagttaccatatattcatagcaatagtagagtagtcttgattttgagaccatatattgttcttgtttctataaatctgtatatacctgatttttatttaaaagttatttacaaacttatagttggtatttttaattaatattttaagttttcgggtatttttgaaaattcctcaaaatttatcactccaccatgagaaatagcccaagctaaagtaggccattcaattcaaatatatatatttttttggatttttacaaaaatactagatttttggtaaaagtttacaattttactatcatacgaatttttttacaaaaatattatttttttataaaacaaccataaaattacaaaacaaaacaattaaaacaacagtgaaaatactaaaaaacaaccttggaataatagtaaaagcttaacacagtacataatataaaatttatacagtatttttgaaaaaaaatctattaaaagataaaaaaaattgaaattttagtatgtagtgtaaaatctctaaatttaacctttaaaaaaaaaattagtaattataaaagcgacatcattaaaaaaatccatcttttcaaaaaaggacctatagtactaataattagaggttcaaagtattgaggggagataatcaagatcaattcacacgaattccacagtatatataaatatatatttacatataaagttcagtccaataaaaatatatagttcagttctgcaaaatatatatatatttatatagttcagaaagggtataaatttgaaacattgaaaattcaaggtcaaaattgcattaaaaaagaaggaattttgaagaaagtataaacggcgtgtcgtttttagttaaactatctgtatttgtccattgtgtatcagaatttacttaaaaacaaattgtgctattacaattacttatttaaaattaacacaaattaattcacgaaaaaagaaacttattatttctcaaattggcaagttttaattactttgaatcgaccaacatattatatata

SEQ ID NO: 240448 - DNA, 1110 bp, Cannabis indica
aaaaaaaactttacatgtttattgtatttttctttaatattttgagagattttgttatgtgttacgttaatgttaatgtgaggtatttcttattaaattgtttatttagtgaagagctttccctttttattatttttttattttacttttatataactttaaagtgactattttgatattttgtcacttgaagaagagcaatattaaatcctcctgggaagacggcaggactgctgaggacttttgtcctacagcggtgattttggagtcggattgtcttgtgttggtgaatgctatcaatagcaagagccatattctttctcctcttggtcttattatttcggattgtattcatcttatacgatccttgtcttattttcatggttcagttcagtttgttaaacgatctgagaaccaagcggctaactggttagttcgttcttctggttcatgtcctgatcgtatttccagtagggggtctgtccctgctggtttggaagctattttattagctgatttgctttaatgaaagttgcaatctttgtttaaaaaaaatagataaccaattagtttataatatatttagttaattaaaatgcaaacttaaatcaatcatactaattaaatttatagtttataaaaagtatttttcttatttatattataaatcaaaagttatattttcattaaaaaatttatagaacaaataaatttaatagatttctaaaataacttaaagaaatccttaaaaataattctaggtatgccattactcgtttgagctcaaaagtagtgccattacgatctttcttcttttttcaagataatcatttagatatgtgataaatatataagtttttttcgactgttgtttgataaaatatttggaatcaaaagtaaccttatagttccttttatgttttgttaacgaaaaaagaagtaactaataacataaacgaaattcaatatgtcaactaatttataagttactaaaagttatgtataatttcatatctaaaaagttatcgtatggtatatattttatatgaacttattttatagagttattttcaataacatcatacaatgattatttaaaatatatatata

SEQ ID NO: 240449 - DNA, 1218 bp, Cannabis indica
ctattatatccatcttacctcatgaattttgctttagagacaacttagtttgttccttaaatttattgattgagcaggccttgctaagtggaatcgtaaagcgtgtaaaaggatttagaaagttgagaagtgctttaggtgctcttcatgcagcgcttccagatgcaacgcccgaagagctccgagcatatgatgatgaatgtgccatatgtagggtatgtttattatcattattattatttcacttattgtttaccttctttgtatctttaaataatggaactggggaattggacaggaacctatggctaaggcgaaaaaactacactgcagccacctttttcatcttgcatgtttgagatcttggtatgatgttactttttattttttggtttcttctctttctaccttttttttcggtctttgggaggtgattattgaagaatttatgcgctagtgctgaaattacataacattggcaggttggatcaaggattaaatgagatttatgcatgtccaacttgtcgaaagccactttttgtctttagatctgaagaaagatctcaagatgatgcaaatccacgcaatgcagacattttgagtgatgaacagcttgctcgtcaaataagttcaggacttgatacacaaaataatgctggcaatagcctgcctacaggagtaatacccaatcagatacagaatcatacagaaggcggtccttggaggttcattttcttactttacaccagtgtagtttttagctacaaaagctgcgaaaattggtgctccaatttagtcaccctcttatttttctggcagtagcctgctggcgctaacattctagtgaggtcgtagtgatggttgtctgttcgtttagagatcatcctatttacttcaccatttgaagagcttaactgtttcattattttcctctcttattctaaattttttgaggttgtggcagaatagtaaacttgattgggcacataagtcccattaacttgagacttctattaggagagataccaaatatggtttttaaaaaatataatgaaatctttttagataggctaatgattcttatagtttatgtaaaaacaaaatctaaaatagccgtataagcttttccaggaactcatattttgagaagttgtcaaattaagggattcccttcatatatgttgtagctttttttctttttcttcaaatataaataat

SEQ ID NO: 240450 - DNA, 668 bp, Cannabis indica
caagaaccaccaccaacagcagcttagagagatacaatctcctcaacaattggtttgtacagaaaaatagaattcgggaaagtaatccaagaattaacaacaaaagaatctgtctccactttcaccaactcatagcccaacatggacgcccaccgcaacccaacacgcatagtcaaaagctcgaccaccgccacctgaaactccccaacaccacccactgcccaggccgcccacacctcaccatgccctccccgaatgactcccccgaacccagcaaacccctactcggagtaaccgccgcatcaacagacaacacaaactcgccccgcaaaagaggccaccatctacgtcgcacgaccgaactagcaagcccacacctcactacagccccccatcatccataccagccccttgaaactcaaccaaagcctcctttgcaagctcgacaaccccacacaacctcaattgttttttcccgaacaagacagaattcctatcataccacacccaccaccacaccattgaaagcaactcaaactcatcctttctaagcacatcaaataaataaacaagcaactccaccaaggaacccactcgaccttggtataaatgatgccaaacccgaagcttagtccaaagaggaagtaaagatgagcaatacactaaag

SEQ ID NO: 240451 - DNA, 725 bp, Cannabis indica
agggacattttcaatgttacaacaagtactaaactcactagcactaccactaatgatcttccattctccaaaccactaggcctaatccctcccaaagatggagtacgtgtcccctcaaccgaatcgttccctcaaatgcttagttttcctggcttatccttccctatggctagagctaccctccaagagttggagtttgggacagtgacccctatcgaggagggcatatacaactctgatcactctcatcatcacgatgatagtccgcgagtagtgattggcaaggcacaagggatttatgttgcaacctctgaaggagggattagtagccacatgatggccttaacggcgagttttggcgatggtgatgaggctaatagtttgaggttctttggggttagaaaaaagggtgttactgagtctcatattgctgttattggtggtgttggtaagtaccaaggtgccaatggttatgccactttgaagagagtaaatattaactcacaaaagaataatggagtttctaaactttttaagtttagtgtgtatctcagttagttattaatccctcaaaacaaatatataagaaattatcatcttgttattaagtactctttcatatcatataatatttatgtaccatctttgcttcttgctctagtttattatatatacatatagttatgctaagtattttgttatgttttattttcgtatgttaatgg

SEQ ID NO: 240452 - DNA, 1461 bp, Cannabis indica
ttacaccttgaacacaaagctgaatcaatcactttacgcttgtgcaaacccgtggcaactggtagtgcattttggacaactttccaagcaaaaattttcactttggggaatttgtagtgcccaaaaatatttccaccacgtcttataatcatccgaggacgattcttggtctttctcagagatagagcttgcaaggtggaaaccagatttaacactaaagataccatttgtgttatgatgccaaattagcctatcacttgactgataaaagctcaaaggaatagtaagaatccgttcaatatctatttgagcaaaatcatcttgtagatgaggcacattccattccatagtatccagtatgtaagatgacacaggcgtagatgattctcccgaatagcagattggcttgaactcatcatgccctgggatccaaggatcaattccacatcttacattgaaaccattaccgatcatcatgccctgggatccaaggggattgcgtgtggcgatcgatgatcaaggtaatgaggtttcacttctatttcaatacgaacatttacccgacttttgttttgactgtggaatcatcgggcataaggcattggattgtcctttgcgggactttggtggggttaatcctaattttgatagtgggaggtatggttcgtggatgtgtgctccgagttctccaccacgtgatcggactaggtaccaaaaaaagagagagacttccccctccaataggccaattatgactatgggagaagcctcaaagatagtttcggctgttgagagaagccgagttcgttactctggccccacacctgaggagttagctcctacctcagttttagaggctcgggaacgtgatgaggaaatggcgtccatggccaatacgaaagcaaaggatcccatggttgctgggggtcaatcagaggtgaccgagactgagttgggtaagctgaagtggtgatcctatggtgtctgaggaggtgctcttgccttcttttgcaccttcggttagtgagccggttgtgggtgaggtgatggccgagaaggctagtgggaaggagcaggtaggaaaggtgatttcgtcggatgtggctgggggttcaactagtggtaagatagatggtgtgggagaagtgactgaccaccgagtgctaaaggtcactaaagaccataagggaaagggtgtgattgttcattcggatcaagatgagctctcgtttcgtcaagcactccaacaaacatttgagccgataattcaagcacaaaaatcgaagacttggaagcgtcttaattctgtaaagggccgtggccctcatggggtatctaaggcggccacttttcctattagtcccaagttgtctcatgtcattgttgcaaatgccaaatgtaaggtgagtcctaaggttggtgggtgtaacaccctaactaacataggcgtattacgtgatt

SEQ ID NO: 240453 - DNA, 902 bp, Cannabis indica
attttgcgaaaaccgacgctgaagtgcttaaaaaccgcctctaagggtttttgtagtagtgtgatcagtgcagctcttttggtggagtagcattaagcgttgctgataaatattatctctcaaaatttaacacatttgggatattatttgtcgagccattagagcctataaaaccacccatctcagatgtcaaagtgggttagaaaatcatttggtggaactcaaatattgaattcaatatagagaggaatattcagacatcttttcacctttatctttatcttatctttatcatatttctgagcaactttgcattttctgaccgctaacttagtctacgagttctcactatcaacaagtatactaaataaaactatttcatatctatgcttatttgttatactaaataaaaactaattagtttctactgtaaatttaaaaggtaactaaaaatataatttcaaaataactaattagcaatttaaatatttagcaattttaccaataagttatgtgagttttttttttccttttgaattttattgtgacttattagtttattaaataaactaagtaacataaatatttttacaaaagtaaaataaaaaagtaacgtaaaagtatttaaaatagtaaattaatttaataaaatttaaaaataaacacataagttttaaagttacaaaatatatataaaatagctggtaaagtagcttattatattatatgacaactcattagtttcaaaaataaattttaaggttacccaaatgtattttaaataaggaataattacataaggcacaattttttataaaatatttacatttttacgttcaaagaatatttttttacatttttacggttttctaaaaaataacacgaaagcaacataaaatcaa

SEQ ID NO: 240454 - DNA, 1690 bp, Cannabis indica
actacaaatttagatgctattaaacttgttaaatttgtcccattatggattagattacatgatttaggcaataattattgggggaacaagagcctaagtgctttagttagcactgtaggaaagcccatcatggttgataaggtgacaaaagagaggtctttgatgaaatttgcaagggttctagttgaaatagatattacggagtcacctcttaacattatccattattttaatgaacatgggagacttgtggaacaaggagtggactatgaatggctctcgttgaagtgtaaaaattgtgggggatttaggcataatatgagtgagtgcaggaagaatgaaaaagggcagtggattaaaaaaataaaaaggagaagtaggaaaagacactaaggacatgggaaagaattatgttgagaataagggagatataggaagggatatagtagctgaatctaaaactaaagctacaggggttgtagttgaggaggataatggaaggaaagggtcaaatgggtctaaaaagagtgtttcagaggaaaaacaagggggcagggagtaagtagtgtagctggaagaaaagacatgattggcctactccaaagaaatccttaaaagctactcaacaggatggggggaaaaaggtagtagttcaagaacataacttgtttgaagtgttgcaaggcaaggagggggtctcaaatgctggtaatcaacccgattgcttgcataaattgcagtaatattttgtgttggaatgtgaggggcctcaataaaagtcataaataagaggcggtgatggagatttgtcaaattaaggaagtgggaattggtgctcttttggaaacaaaaatgaaatggaataaagttcaaaagatggtggagaataactttaggggttgggatgcctatactagccctacaataaaagggagattattagttatttggaaaaaagtgtttgctagggtcattgttatagctgaaacttctcaactagttcactgctatattaaacttgcaaaccaaacataagatttttgtgctacctttatttatggattgaataagcttgaagatcgaaaaagagctttgaagagacctaggtaatttaaagttcccagctaaaccttggattatcctaggggacttcaatgctctttttcattttaaggataaggttggggggaagccggttgctagtatagagcttgaggactctaatgcttggttgatgacaggaaaagtagacatgttgaaaagagtggggtcagagtacacatggactaacaatcaagacggaggtgataaaatctattctaaaatagatcatgtgttcaagaatgaggattggcttgacttgttcccaacttctcaagctaattttcaatgggagatgatttcagatcattgtttaattttagtttctttggctatcatgggtgacataggagtcaaaactttcaagttctacaattactgggctgaacacaaagattttaaaaatctggttatggagagttggaaaaaaacaagtgaacttttcaggtttattggggctttacttgaagttttgccaagtaaaacatgttttaaaagtgtttaataaacaccaaatgggcatcgtgtaggtggacttttgttgggttttatgccctaaataaaactctttacaatctgattagttatc

SEQ ID NO: 240455 - DNA, 988 bp, Cannabis indica
aacagggcctagcgcccaggttgagctagtgctgagcctagcacccaggttgcaatcaacctgggacgttgccttcagttgctcaaatgccaaatctgatttaaacaatgagtctaaaatagtcaaaatggggtagaatacctagtcctcaagttcagaagccttggaagtatcaaataggagatctcaggagctcgagagtaagtacctagcgcccaagttgacaaatagcctaatgcgttgggttctgcttatccgattctgatgccatttagactatccgtctagtttttctcaataacaaatatccataaagttatagaagtcaaattcataacttttcatttcttatttccaactcactcggaaatgaagagtttcaagtatcccattttcgcataacaacaacatctccgagaactggtgagcagaaaattgtcatttatattatttattaattagactccttaaagtctcttaattaacaaataaaccctaaaattctatttcttcccaatcaagccatgtcttagtgaaaattcataaactagacaaagtctaactttagaattataattgattgattaaaatcaattaaccgagtcttacaagcagtttgtctcaactagtatggggaccatggatctatatatctgagcttccaattagttttaattattaaataaatatttttggcatttatacgattgaaattggaaaagtggtatttgtaaaaaatagataaataattgagaaaaagggtaaaaatctaactagttatggacccacataaagggcggccacttaaccctatatttgctctatttttatcattattttattccaaataattcaatcctagccctagtagaattagtataaaaagaagaataaggtctcactatccaaactaatgcttctacagctttaaacctagatttaattctgacagacaactacaattttgacacttcttcttcttcttctt

SEQ ID NO: 240456 - DNA, 2475 bp, Cannabis indica
agaggcccaaccacaactacgggttctttggagcttggagccagatgcatttcatagccgaggccatgctccctctccaagacctatttcattaattttcttgtatttgtcggccttgcaccatatcaaattattcctcaagcttaccgcctgctttcaggcttgttcattttttatgctgcccggagcaggggctctcctagtccgactgaaattttgtatttttacgaacttgtttccatccctaaaaagggagataaacttaaagacggtttttatggcctccgggcccatcctttgaatgagggcctggtcccttacaactagtagaagcacgtgaaggaatatcgtcaccgcttcttcttctcctctggtttccaggtcatggatcatccagagcttctcacggagtgggttaggatccccccttacatgcggaccgaacccactcaaatatttcttcaatgggccaagaccttcgccacgttcgacaagaaggcccttgatgtcggggagttggtcacgacggagcactgtcggaaggccaagctcatcctagggcatcagtcagtggatgactacaatctctccaaagtcatctgcccgaacgtaagggctccatccgcagagaaggtgttccgggatgacatcattgccatggcggaggacaagtaccagaagtacctcttcaagagggaacaatagctggcttagattaaggcccaggcgactgccggaagggcccttcgtattggagctccgttggagtggaggaccccctaatctaagcccattgtcccggtaccaaatactggggctcccgatgccagcacttcgggctctggtaagtcccccttaataatacactatgttcctcccgtccgagagtatacctgccttaggcctgtagggttcgatgaacgtctccgtaggtttagggtgccttccacccggtgggggaatcatgccaaggagtattatttctcccacttaggccattatttaggtaggtctcggatgggttcagtccggcgcccattcccttggaccattaagcccatttatcttctagttggttccgtccctcggacagctagggctgaattagagagtcagggtaggactagcttgattgctttttgttaagtgtatgctgctctcacggatgttctaacacttgacctattttcttgttgcagcagccaggcccatggatgaacttttggccactcttgctggagccaatagtcctgatgcttccccgcctcctgctgcttctcagttggtcactcccgcgaggtcctccagtgccccttcaggcactaatgtcttggtggacgaggatgaggttcttgaggaagttgaagaaggtgaaaaagagcagtcggccgccctcgagtgcaagcgcaagggcaagatggtagaggagccttctaagcggccacggagggtggacactccagccccgagccatgactctaggattccctccaaggcggtggaatacacagtgcctcacgacatagtgttgactctggtccctggtgacgaggagaggcagaaccttcggatagccaaatacaactacgccctcaacgagtacaaccgggagcatgttgaggtggaggccctgaagagaatcttacgggaggagaagtaaaataccctcaacgaggaggccttccggaatccgtgggacctgaacatggacctgctgacggactggttcaatcgtttccttgggcccaccttggctccctttgcctcggagatgaccagcgaatttgtctcccatctgactcagttctcgccaaaacggtatgccgcttgtgcctccttgaactacgtctaccaggttcaagatatcaccaacgccatggccgcggtaggtacttgtggcttatttctttcctcgatattttgcctaaggcatttgatctcactcttgtctccttttttagattactgtgcagaccagccgtctttccaagaccttaattaatcatggcttcgtcatgtccgaatttgggggcatagacgaggccggaggatcctgcgggacctgtctgctgaaaggcgggcgatccaggaggaggctgatcgaaaggaggccctcgtcaaggtgaagctcgaggaggaggctaagcagagggaagcccaggcggaggcaaagctccgagaggaggtcaggcagagggaggctgagctggaggcgaggcattgggaggcgctgaaggcggagggtgaggctatcgcccaggctaggcgtgagcttcgagaggctagggtggccatggacgaaatgtctgccaaggtgaagtccttagaggagttgcaccaggcggacttgcaatccaaggccaacctagctgtggagttcaaggagctgaaggactttagagaccaggccttgaagaaggctaaaagagatgagctcctgacccccatctcctgcaagcactgcgtcaagcgctt

SEQ ID NO: 240457 - DNA, 1016 bp, Cannabis indica
ccaaaaaataatggaacactcgtccaatatacttttaggtaaaactatcagcaaccagggtctacaaagaaaaaaaaaatatataaatatataagaatataaaagacacacaggcctggaaaggaaatatataatctgttaatttgataaaatcaaaaacttacacttcaatgacaatgaccaattattatacaaactcttctaaactattgggaacgggaaaaaggggacaaaatgagttcctataatcccaaagaataatactaagagaaaaagggtcaattgactgtgctaccatggcttcaagtcaccaacaggtccagctgtccaattcaagactttctcacctggcttaaggaaaatgcttcgatcgtgcgacaactttcttgccagtccattcaaaacttgatggaaggaatctcctgattgaacaggctgtgggaataaattagcttgtttcattgaaaggttggcaagtaatctctgctttcttaaaatcggatccagtgggattgaagggttggcaagtaatcgcaccttggcttccaacaccttgacttgctccctggcattgacagaacaagtttgaagcagcccttttgaagatctcccatggtcattgcagtatgaagaagtcattttgatcttgtgaatgagaacctcggtctgtcttgtctgtcaacggtagaaatagcttcgtcggagctagtcgtggtcgtacgagggactagatcggtcactggagctagcaaagattagtcactggaaagagaagaaaatgagagaggcagccgactagagagaaagaagttgaaaaaaattagtggaaattagactctataccttttttataatgttgtcttttatttttaccctctttttttaaagtctatcatctttacctctttttttaaacactttgccaattctgcccctgttacttcagtatactctctatgtgactcctttatgttagggtatttttgtgtaaaatacatattaaaagagctatgttt

SEQ ID NO: 240458 - DNA, 2403 bp, Cannabis indica
gatgccacgtcagagtgcaaaaattgggtaacatttacccccaagtctgtaagggacttctgaagttgcgtgtagacttcatccgagcagtttttgcctttggatgggtgacatgtgtcaggcgcatctgttcgcgatttgatgtgaggctgactaggcgtctcttcagttttcgactaataaatgctctaacgcaataaatgctttaaacctaattttctctcaccacgtttgacgattacacttgattatgtttgattttcaatatttgcttttaggggtaaccaaagcatctaaggcttttgaaatgattacccttttcgttcttctacctataaatatgactgagcattgttcacaaattcatttttaccaactcctccattaagcaagctcagagcaaaaagacaggttttcacttcaagtctgccgtgaaattttcacaagaaccatccaagcaaatttgcttagagtgaatccaaacgtcgatcagtgaggaagtttccaattccttctccatttactttgcacatttagtttctaagtgcgttcttaactttgctgtagaagatatgtagaaaaccctaggttaagaaactttgtgatttttctttacaatgatttgtgcgacttcatgattcatgacacttgccttttgattgcacaatttctgtctttcaccttgcttattcaaagcttcgtgaaattttgccctaaatcctaaaaatttcaaacttttggtttttaacttatcgtcaaatatttccattctttaatctgttgagtactcctggtcggcatattttccagtttattgttcgatatcccgaccaaacactcatctcgtgtattgtcttttgtagatgaaccctggtgagttttggggaagcgaacaccgaattgaccaggatttgcttcaacttttgtacgaggataaccctcgtctttgttccagttttccctcttcaagcgacggacattccaacttaatcttcatgtccagccacaagatgatggctcgaacaaaatagacaatgcgtaaggtcaacgcaactgaccctcacgtggcccagcatgctactttacccaacgccgaacaggatccgcccatccaagaggagggggatcatgaaggggacgttaaagtccaagagatagaggaacagggcgatgtccgtcctggcagccctttcgaggcggaggaagaggaggaagctgcacctccaaattttgggggatataacgaggctggggagccagtagatacggacgacgatgtcctggttgaaggagtggactacgtcactgaggagcttactgctacagttcctcataagaggcaaggtgccttgggtgccaggtgggtgagccctccgtccaaggtcacttaggcacgcctaagggatctagaccagtccggcgacgcgagctggattatgttcctacctcaaacaaccgagccacaaacctgaagaaggggatgtgtgcctggtaaggtgctcattccaaacaaggagatgttatgttcttccgtctctgtctgacccagtttactcccaagggcctcaagtatatgtatgccctgatcgacatacttctatttttcttagccaaatttcaagtggttgacaggcactgaggacaaggctgtgagcaaaattgggaatttgttgacgagtattacatggtggatggcatgggcaccacctatactcagttccagcagatccctatatattaccgtccacccttcacgctagctcttagggatagagctcaaaggatcactcagctgccgaatgatgcccgaaatatcacattgttgatctcgaaagccaacttcgtggagtacgggctttatccaaaggatttcattccccagcctgtgaaggagacgaagaggaaatccagtgctggtcgggctgagggagctcatcaggagaatgaatccattcaactgaaacgtgaagctaagtttaagggaggtgcgggagccaagcaatatgcacaggtgcattttgagcaggaagatgaggttgaggaagagcaggaaactccgctcaaaagtaagaaaaaaactttcgactgagcacaaggctatcaaacatacgattcagatcaaggagcctagttcacctgctaggtcgtccactcttgtagtaggaaaggggaaagctgtcctgaaggagcgagaagactcgtcagatgatgatgccccatcaggtcttgcctggggagaggcttctgccgatgtgcaagatactccatcttgcctttaacattcctgattattatgctttcatatttctcatggtttttcctaaccatgttgcttttcattttgtacagacatgtctcagaaaatgctcgaagctttgaagaagagagtgttgggttttatgc

SEQ ID NO: 240459 - DNA, 823 bp, Cannabis indica
tgttgtagaggagagcaatgcacactgtttttttgagtgcatcttatcgcaacaagttatggcccaagtctgcaactggttgaagatttgctgctggccgactggttttttaaattggcagcaatggttaagtttgaacagcaaggacaagcgacaaagagtgcatgtaacaatcctggcagtcatgatttatagcttatggagcaatagaaacaattgcatattcaactacttctcaaacacagctgttaagatcacgaaggacatcaaaaaaatagtatatcttagacttcaaatagtaaagaaaggtagtctaaaagactatgaaaaaagatacatagagagattgtatatgtaaagcagtttttttcccttgatttgggctgttttgatgtaatttgtttgtgattcatgaagtttgttccttcttgataaaaaaaaataatatataatatttttatagtttttaaataataacatcaaaccgaaagaaatcttttaagaaatttttctaaaaaaaaaaaaaagaaatctttaagaaataaaagaacaaagttatttttcacgtcttatctaacgaccaaagttatcgaaatcatgccgcttggtatgtgtgaaaagtccctttttggagtattatgttcgtttgcttttgtctcatctgtagtgcttttggtattggtctattgtttgatctgaatcattctagtcttttgtcgaatatcttgttgtttttctctggtgttttcttgttggtttgtcaatggatatgcaagagttggaagaccactgggcatcgctggcagtagaggaagaggatgag

SEQ ID NO: 240460 - DNA, 1238 bp, Cannabis indica
atattatatatatttgttcttatatgaaaaaaaaagaataaaaaacatattgtaaaaattatgagtttgtaatatatagtgcggtgcagtttaaaccacaattattaaatttaaaaccacaaaccgcatcgtaccgcgcagtttgacaaaaatacaaattgcaaccgcaccgcaaaatatatcaaactgcattttttatgtggtgcggtgcggtacggtgcgaacggtttgtgcggtttaggcgatttgatgaacacccctaagagcatctccaatggagagctataaatgtggtgtattaaactccaatggtgatgtaaaatgagtgccaaatttggctcaagctaaaaattgtgccaaatttggcacaaaaaataacatgagccaaattttagcccacaataaatactacttttttaattacttctttgccactagttaataatattcattgattttcaataagatatcactacaaaaaatcttacttttagtcacaaaaaaatttgtgattaaaagtaaaaaaattatgactaattataaaacatcattcttatgttgtgattaaaaggtccgtggctaaatgtattagtcacaaaaattacaatttgttgtgactaaatgtatttttaatcacaatacttgttgtgactaaaactaaattagtaacaacttataattaaatgctatattttagtcacaagtaatattttgttgtgactaaaagtcacatttgaagaggtctcttgtcctctctgtggggagggtgaggagacgatagaacaactttttctctattgcaatttcacttatcatctttggcggtcctccccttggggggtcatgccagttttggaattaggtgcttgtgtttggaattgggttaactttttgtgtaacctaagacataaacgggtggatggtgataagttgttcctctacgcttcgattgtggttgattcgatttggagggcgcgtaatgacaagaatcacaataatcttatggctaacattaagcattttattgagtccatctccttttgttacgcaaattacgagtcctgtttatttgcctcttccgagggtgttacaatgtaaagaccgcttagtttaatttggaaatcagtagttaattatgattaattatggaaattatttatagatatttaaataattgtttatgctgttattattgaattctgaaatgcattttatgtcatatagtgaatttcataatt

SEQ ID NO: 240461 - DNA, 568 bp, Cannabis indica
aagatcctggataaatataattccaacaccactttgatcccttttgcactcgattggctttgcccccaacatgattgtcgtagagccttttttcactccaatcaataactattcaacttttttcttggtcacacttcttagaggtggtattgggtaccacatctgtgcgttatgctcggaaggattgtacaccaagtagctatcctccgtactcatgctttttggcaaggtctttgtttggaggtatgttgctgtaggtgtacccatgttggctgtccaacatgtctatttcttttcaaatagggatgcttagttcattgaaagattgaacgggtactaggttggccttggttgtcaaggcagaactggctagtagagtgagtgtgtcggatgttgcatcatctttggggattttcctttcggtacagcctttgcgttgacttaacaagtcttggatcttgttagaagcccacaatcagagcttcatattctacttcattgttacaagctttgagtctgacctttgttttctcattcaaccactacccctatgtgttttgagggtcat

SEQ ID NO: 240462 - DNA, 718 bp, Cannabis indica
gtcacgattaaattagtgccaacaaactcaatttttagtgttcatggatatcatgatttctcgtacccttttcgttgtgcctaaaaacattaacagacactataaataacatcgtaccaatttattgatctaatagcacgacacatgtagtgtccatttaaaatcataaacactatcagccatgctattaggcacgacattatcatgccctaaaggtttttttatttttttttaaataattttgtaatttaatattaatttatatttaaaatacaattatcaaaaaccaataaaaattaatttataaagatgttttctactatataaattagaaatccaaactacaataaaagcatttaaataattaaagacaataatcaaaataagtgttcaaataaacaatacttatattgtcacattcatacaacaactaaaataagtgttcaaataaaaaatatttatatagtcacaaataacaatactataatcccaattagtgtggactcctcctcctcctcatcatcatcaccattctctcgagactgctgttgtggaatttgcggcatttgtggatagtaaggctactgcaatacttttggcatttgcaggtagtacaactactgtgtgtgtggcatttgctgcattgatgtcatcgatgacgattgctacatctaagacgctggtggcatatgatgcatcgatggcgtagaaggcatct

SEQ ID NO: 240463 - DNA, 1372 bp, Cannabis indica
aatgaaataggccgcaactcagaaataacctcaggattctttttcttgggaattagaacaacattagtgtcattgagattaagaggaagagtacctgaagcaaagaaatccttgacagtggagacaatatcgacaccaacaatgtgccaaaatttctgataaaaagcagggctcatgccatcgggtcccggggacttgtcgggatgcatttggaaaagagcagtctttacttcaaggtcagaaatgggctttaataattcagagttctgttgctcagtgattgaaggctcaatagaatcaactatctcagaccaattggaagccgtagaggtgaacaggtttgtgaaatatcctttaataaaatcagcaaggccattatcccaatcaatggactgacctgagttattttttaggcagaggatatggtttgttcgacgcctagttgaagcagccttgtgaaaaaactttgtattcttgtcacccgcactgagccacatttgcttggaacgtggcttccaatatatttctttctggttgagaatttgattaagtttgctctgctcttcagaataaagtcggactccatcagcatctcgccgccttttaagattcttcaaattagctttacaagcctttatacgcgaactaaaattcccagtaatttcagaaccccattgttgaagaagctgcccacaacgattcaacttggcttggagatcaagatgtggagaagaggtccaagtgtcacggatgatttgttcacacataggttcccctatccaggcattttcgaacctgaaacgatgagagtgccgcacctggttcttgaaaaaaggctcgagaaaaattggtgtgtggtctgaagtggatatctcagtgtttgtcaaccttgcaagagagaagttgtgtagccatgaatcattagccagtgcacggtcgattctaacttcgatccaattcgaagtccctcgtcctctttcccaagtgaattggtagccgaagagattcaaatcaaaaagagcacagtcggagaggaccttttgaaagccttcaatgagccaattgggataagggttacccccttttttatcagcttggctagtgacattattgaagtcgccaataaggcaccaaggagaggagttcgaagcatggagagtgcgaaggagttgccaagtattcttgcgaagagccctgttgggttctccatagatgcccgtgagcctgtattttagaggcaatttttaagaacattgagcatcagttttgataacaatcgctactaatattgttccaagcggcgctggaggaaataaaaagctaacctgtaaggaaaaaaacaagcgacgatagtgtcaattattataaaata

SEQ ID NO: 240464 - DNA, 2066 bp, Cannabis indica
acatatatatacaaagtattttatattattagtatgtttattataagcaggtttagtccaatgctcaaagttgtttccatctcctatcaaagaagaggataacaaacttgttttatcttgagcttttaaccagtgatcaagagtagtccacgctgaagaagcttttttgtcccaaactaaagaatttcttgccttccagatcgaccaacatagcatcacaacacggcaagagatgtcttcatcaaagccgttgaacacatcatgaagaaattgtccaatggttccaacaaagttagcatgggtaactatatcagccttttgccagcagcttattgcaaagggacaactaagtaatatatgcgaagcagattcagcagcatgattgcaaacagggcgtacatagaagagacacttacccccttagagatgagttgaagacaggtaggaagtacattagagactgcccaccacataaagttcttcactttaggaggtatcttgagatgccacagcttacgccaaaagcctgaattgttttccccaaaacggttgttcttctgactttgcagcagattgtaggtcgatttgacagaataatggcctaatttctcgccaacccaggcccaatgatcatcagtagcagagaaactgagaggaattcccagaataaagttcgcatctctgacattaaacatatctcgcacaagagagacatcgcaacttctatcatccacatgaaaaagagagttgaccgtataatggtcgagacacggagtagtggtggatacaaaagagttatcattatcagggagccaaggatgagccagaatgcttgtagcagtaccagtgccaatgatcctcctagtagcagaccgtaccaagtgttggccattccaaatgctacgccaaaaaaaactggggttacttctgagttcagcattaataaaatcccgaacgggggtagtacttggctttaaagacttgactaacaagggatgagtcagagcataacaaccgccacccttgcttggcaagcattgcaaggttaaaatcatggagatgacgaaaacccatacctcccacgtccttgtgaacagccaaccgatcctaagacatccaaataatgccttgtccactagcactctttgttttccaccaaaagctagccataagcttctcaatatcattgcagattttcagagggatcagaaacacactcatggcatatgttggaagagattggatgacagtctttagcagaatttccttaccagcacgagaaagaaacttaccatcccaactatttatgcggttaatgatcttattcttgagaaagccaaggataacagtcttctttcttccaatgatgttcggcagtcctaagtagaaagagccttcagtagcttcaggcatgccaagggttgagcatatttgagttttgaccacaccatcagagttaggactgaagaatatcgaagacttggatgcattgacgcgctgaccagatgcaagctcaaaagagtgaaggagtctattcatacatcagcagcacttggggtggcttgggaaaaaaaaataactgtcatcagcgaagagcatatgagtgatagagggggccccgtttgccacatgacacccatggatgatcctatctatttcatacttcttaataagagctgaaaacccctcagcacagataataaacagatatgtggacaaaagatcgccctgacgaatgcctcgcgaaggaataataggacccatgatatgaccactatggataacagagtatttaaccgaggtaacacattttaggatgagattaatccatttgctggcaaagcccatttggcacattacagcttgcaagtagccccattcaactctattataagccttgctcatatcaagcttcaaggccatatagccttttttgcctcttcttttctgcttgagtttatgcatgatctcaaacgccaccataatgttatcagagatgagcctaccaaggataaaagcaatttgagttggagaaataacctgatcaatcatgcttcgcattctat

SEQ ID NO: 240465 - DNA, 1117 bp, Cannabis indica
tggagtatggcaaacaggacactgtgaagaaatttgtacatgtttcatgacaaggttcacaaaggttgggtaagaacttgttatagcacgccacaaaaaattcaagactttgggaggtatcttcaaatgccagaacttacgccaaaaaccaaaattatttggccgtaaaccgactggttttttatgcagtaggtgataggcactttgcacaataaaattccttttgtgatcctctatccaagaccaacaatcaggtctaccagtgttgctaagtggaatgccaagaattaaatatgcttcttgaggagaaaataagtcacggactacatcagcatcccaacagatcatgtttggttgaaatagggaacttatagtgtgagtgcttagaccaggatgagtagaagagacatatttgttacttgttgatggtagccaaggagtacccagaattctagtatttctaccatcaccaataacccgagcagccccaagccgaaccaagtccttagcaccccagataatacgccacacaaagcttggattatttccaagatcggatgaaataaagtcagaattagggaaatactttgctttgtagactctgccagcaagagagtcagtcttacacaataattgccaaccttgtttggcaagcatggcaagattaaagtcatggaggtgcctaaaacccattccaccttcttcttttggagttgctaaacgatcccacgacatccagataatacctcgccctaaactggagtttgtcttccaccagaaactagccattaatttttcaatctcattacaagttccaatcgagagaagaaagacactcatagcatatgtgggcaaggattgtatgaccgttttgagtaaaatttccttccctacacgagacaggaactttccatcccagctgttgatgcgagcaatgactttgttcttaagaaagccaagcacaacattcttattgcggccgattatattcaaaaggcctagataaaggctgccttcaagagcttcagacatatggagtgtagagcaaatctatacacgggtagtagcatcaatgttgggactaaagaagatcaaagactttgagtaattaactttc

SEQ ID NO: 240466 - DNA, 825 bp, Cannabis indica
gttgattgtcgagtattgcaatagtgattcatccatcaactttggccaattgcaccgaagctgatgatgtgtacaagttggggatggccttgtttattatgggcgtcctcattggtaaggaggagaagactgttgttcctccatttgtgatacgaatggttgataacctggaattcttctatgagatccgtgggtaaagatctccttcaaaaagttgatggaaacttgcaacaaagattttgtagaggttaagaatcggatgcacaagaagattgagaagggagtttctcagaaggaggaaaactactcatcatacgactatactgcagcgttgcagtattgggcctatgaggccatcttagagttgggcaatgaatatgcagtgaggaaatcgcatcgttttccaagaatggttaattgggagagtaaggagaagaccattgtaacgccctaacaattaggcacgccacgacaactgattatgaaacccaaatcccctaatttgagattactagaaaggtaagcgagagaagtttaaactaaatttgaaacagaatgaaaataaaacttgtgataattttttttcttaaactttacaaagaaccaaaagatacatgtttcaggatcccgcaaatattttcataaaatattacaagtctatttcacgtgccgacctaagcggaaaaattagagttacaaaatacatcactagtagaccccaacccgcttggtctaatgtgggccaaacatgtacaagcacctccaagatctctcacttattgctgatcacagattgatttaccctttcctgcacagtagagcacc

SEQ ID NO: 240467 - DNA, 1892 bp, Cannabis indica
tcctctgacgcgaaatattttcttgttaatacgtgaatcaagagttcgtacatccttgtttcgctgaagactatgcagtctacgagttatgaatatatcttattgattctgcatttaatgagttattctatttaatatccttttaatataattgtcattatatttattgatttgtattccccaagattgacgtgtgtcatcttctgaagtactagccaaattttgggtataacaattaccccttagaaagttcttttcagtgaaaagtgctttttaaatgattaccgagggtaatgttgtcataattcattttggaaaaaatgcatgccctttgattttgacaattttgtggttttgaggcacatcatgagcattaaataaccatcttttccacttcttctttatttctacctgttggatcattcactcgttcatctgatggagatcaacccaatggtataaaacgaaaaaggaaccaccttttcatcatcttagccatttcaaaaaatttcttgagatttttctatgaaaaaccccacccagatatttcgaagctttgcatgccatctttgtctttgacatacctcttgtgagtttcatcagatttgtttttcgaccgcaagcattcagagagattaccacgccattcgctgcatcgtcgattgcagaaccgtttattgcaccaaaacccgacttcaaatagtaagtaattcatctttctttgttttcttaaatgctttttatttcacatttctgggtttaatcactactttcttagcttgcacctttatcactttatttggttttagcgattttaggttgaattttctctgggtaaatcttagggtttaggcagaccgtagacttttgggtttctcaaatttataagcttctagtttgataaattttattcaggaattgggattgctttctttttgtgacaatgtcccaatctagttcagaagtttatcgtctagaaattttagaatcagagtgccccagtgaacttgccatcctgtataaacccagagtttcaaaacccaaatccaaaatagagataaatgatgcaaaaattagggaccacttagtaaaaacacaccaagatgatattgctagtcgccacaggcgcttcttgcaagaaataacagaaggcaaatgtcgttgtttgcgagatgctgctaggcctgaacctcccagtttatcatctattcctttggctaggcctttatttttacctagagtcacgattgcttttgaattaggtgacctggatttcgaaatcatgactcccaagcctcgtaaatcaaagactccccaggatcctaatgttaccttcgaggccgaacttatcgattcgaaggtactagccatcggagattatgtaggtggcatcttacggacctgtggtattgaccaaaagcgtaaatgccgggttagatcagtagccgttggcgagtttagatgctacccaccagaacgactcactcgcgaagcacctgaggggaccagtggcgaggcgagtacgagtggctcgacagggataggcgcttggagcctcgaacacatcagggctggggcaattatgtaacgtccccgcttcaagcctctattgggcccttacacctacggaataatgactcttatatacgagtacgccactctagctgcttcctagattgacgactgaccctacagaccaacacgagtgtttccagcgtgctttgtcctcgctcgcacacttcttgggaaaacttctcaagaggtcacccatcctagattaccccaagtcaagcacgcttaactatggagttctttcgtgatgggctcctgaaaaacaagatgaactttgttgatataggtagtaccaatcaatccatttaagccctcttcaa

SEQ ID NO: 240468 - DNA, 809 bp, Cannabis indica
aagctaaactcaagaaaagaagaaaaaaaaaaaaaccaaaattggtaaaaaaaaatcttctgcatggtctgcagacgcccatgtgtgcatagggtcgtgacatccaccgagtctacagacaacaaataactgtggtttgcatggtcacataggatttgtttgaattaaaacaaaatgttaaactcatgaaaactagaaaacaaaactaatcaaagtcaaaattgaaaaaaaaaaaaaaaactcttctagatggtatgcaggcgcccatatgtgcacaggtgcccactcacacactgagtgcacaagcaacagaaaactatggcttgtataactacataggatttgtttggatgaaaactaaaagttaaactcaagaaaataagaaaacaaaataaaacaaagccaatcttggttaaaaaaaatattttgcatggtttgcaggcgcccatgtgtgcatagggttatagcttccactgagtgcacaagcaacaaaaccgtggcttgcatggccacatagaattattttgatgaaaaccaaaagttaaactcaagaaactaagaaaacaaaacaaaataaagtcaaacttggtaaaaaaatcggttgcatcgtgcgcaggcgcccatgtgtgcacaggtgccaacgtacacaccgagtgcacaagcaacggaaaactgtgtcttgtatggccatataagatttgtttggataaaaaccaaaagttaaactcaattaaacaagaaaataaaacaaaacaaagccaaactttgtcagaaaaatcttttgcatggtttgcaagcacccttgtgtg

SEQ ID NO: 240469 - DNA, 838 bp, Cannabis indica
cttgaaccaatataatttttggtgttaattttacaattttcttgcattgtttatttataattttatcgtttctattatattttgctattctttcaattcttgaattttgtttagttgattttgtcattactaattatttgttaatttatttgaagctaatttgtttctgcacatatttgaaatttcccgcatgtacgtgtggtcaattacttaattttgacaaattgaatcagaaccatgacaaatttcattaattcattgatttatcacaaagtcttggtcttcccaatattaaatctaaatcctaaaagtaaactcaacaaaattctctgatatttgatattgagaaatgttaaggggttaagagccactttaaggtaccaacggatatggtatattatcattcgtgtattctaatatcagattttatatattttaatttaataaataatatgaagaatcatatattaattaaaaaaatattatatcggtatagtattgaacactttatatttaatcttaaaatagggtggtagttgtaagatcatatatatacattctactttttttttaataatttttaactaaaatcgttaaaatatcaaaataaatagctattttacaatccatacgtcactaaaaacatgcattgagtcatgggaagaagaaaaaaaaatgcaatgcaatgcaatgagtcgataaaacatgtatagagttaaaaaaggtcaacttaaggctagctcaagtggccataaaagggtacgtgtgtgttggaggccttgggttcgagtccgagattatacattgtaatatataaacccttaattaaaaaaaaaaa

SEQ ID NO: 240470 - DNA, 737 bp, Cannabis indica
agctttcaaagttaccgcaaccatcacaggccaccgacggatattgtcggcttactactctttgggaaactctaatggtgatgactctctgaacttaaagatgagatcaaaagaaaagggaaacagatttgtaacaacatatatcaaagcttttaataaccaaactttaacgataacacaaaaataatcacatcgaaacaaaaaacaagagaaactctttataaaaaaaaattaaataatcagaataagaatataaatataaaaatatattatataaaacttacctgtgtatcatactcaaaggagggaggtaagagggaagaccgaccagcgtttccaaaaacagaatcaagaaatttaattgtggatcaagaaaatggctttttaaatataaccgtcgccgacactaatttaggtgcatgcatccattaatatcgagctgacacccaaggccatctacgaggcgtttgaccagagcttctccaaccagatctgaacatcttcggtgtcggtgtcggcgtcgactagagcgagggggagagagaaaagagaatcgttgaggagcttatggtttgagagattttaagtgtcagggaccttgattatggggtacgtttggaccatcggcggcggagactttctacttaagatttaaatatctttgaaacatataaatctatacttttgtagaaatataatttatgtgagtaatcattaaaaaagagatgcaaaatttg

SEQ ID NO: 240471 - DNA, 1096 bp, Cannabis indica
ttctttgagtttttatttggattttatatgttttctctaaatgtatagatattaaaagtcaaaaaatgattttgtgattaattgagattttttagccaatttttgatcatgttcccataattttttttgaagagattacaaaattaataataatagtgccccttctttaacttttcaaaatatattaaattatttcatttagaggcaggaagcgaaatatatgcatgatttactgggtaagattaaaatcaaaattagtaaagtgacaaaccaccgcctctaatatgacaacacatcaccacttaccgtacaaatatcaagatttttatattttaaacgtgtttttgaatctgattcaactatgagtcatttttggacctataaaaagcctaaaactggctagaggggagagacaaccagagagaaagaaaatacaactttaaagaggtaaacaagtttgaaagatcaagaaagcaatttgaagcatttaagagttttcatgcattcttcttcttctttcttctttatttctcaatattattcagattataagtaatattttgagatgataaaccacactatgtgtggctagttttcttagttattaatagggttagatagatctctaattataactttaattttatgatttaatagaaaatttagtttaatccaatatgcttcatgtgattctacattgtttaattgcttccatgattatgatttatatatggttctactttatgtgattttaatcaagactattatctagattgtgagatatattactcgagaagaaaatttttaaacaatcaaacatcgattagatcaacttatgtagtgtaagattgagagataagtattcacttaggtaaccaaaataatttaaaattgtaacatcgagaggtagaatatttaggttgttgaaaaaatatattataaatttagcccgaattaattcacgagaaattaacaatagaataaaaaattagctaaagcgtaccagaatccatagaattgattttggaaaggtctgattttctaattttgcagtgaaatctttctttagaacctttgtcttttgatcatggggttt

SEQ ID NO: 240472 - DNA, 1620 bp, Cannabis indica
ggtgtttgatgactatggatagtaatatttgagcactgtatgacccatattatacacgttcatgaaagtaattatgtttcttattattctatgattaattaaaaggaaaaaaagtttttttttgaataaaaaagtgtagggttgctctatattctaacttaggtttgtaataatcttttcgaataaataggatttatcctttcgaactatgactcttatagagttttgttccataaactataaaaatcgttgcaaatgtctccctctagttgtataatggtcatttatttaaataatttgttaatctaaaactaacataacatttttgttggataaattcccatactattgtcccataaataaagttacaaggaaaataaattagatctatttacaaagcctcaacagaccattataactcatagagttgtcggttctgttgtcataggcctagatctttatttctctttacaatataaagaagcaaacaaaatatctcaagactctaacaaactttcagctttacaaggaaaatatcacaacagaatataactatttctcagatcaaacaacacagccagcaacaacaacaacattataaataagtggttcaaccttccactttgagcaacagagaccatttcggccagcagagagaaaaatacaaggcagcccttgtttgttttgtaaccaacctcagaaacaagagagaaaaatatagagagttagtgagagatattgtaagaaaaaccaagagaaataaagagaaagaatagagattacctactgaactttgtggctaggaatctctcatccttgtaatcggtttggactttgatagtgaagaatcaagcgtctttgagggaagcttgacggagatgtactcttgatttcaaggggaactccgaaatcaaattttgttgtgttcttcatttatttttctgtggtgtttcggtttatatctcttgtaaccaacaaagatcattttgatctttgttgttactgtttcgggttgtatttttgtggttgtgttgcaggtttttgaagagataaaagggctgccatgaaagctacaaccgtagcttgaaggagaagaagaataaagctcggttggggagtatcacagcaagaaagaaaggaagaaaagaagaggtctcggctgggctatagcaagaagaaaagaaggaaaggaaggggacttggctgctgcattttgcagaaactcagctgggatttttggttgctgttcaaagaaaatagaagaaggagaggagaaggataatagggccggctgtggaaagtaattgtggcactagggttttctttgaacaaagaaaataagcttttatatggtcattaatggcagaggtgtaaataaaagcaaatctggtttttcaaaagggcatcagattttgaaaaaggggcatattctgattggtaaagggaatattccctttgtgatccgcaccaagcaaaaggacggaattgcccctctgttttgaacgttaggtgtttgggtgtaggggctgttgggaactgcagcaaatttcctacagtggtatcagagctcggggaagcaagaagatttaacaacacctggaaacaacatcaagaaacaag

SEQ ID NO: 240473 - DNA, 1985 bp, Cannabis indica
tgtatggattctttggccaaggtattacacccatggggtacatcagattgcccctcactattggagaaaattcaactaccagaactctgatggcgtagctcttcataatcgacgttccctcaatctttaacaccatcataggtcaaccaaccttgtatgacctaaaggcggtgacatcaatctaccatctatgcctaaaattcccaacaaggcatgggataggatgtttgagaagagaccaacaatctgcccatcattgctacaacttggccctgtccaaagccaagaaagagaagatgcccactaagagctctaaagaagagcccaacaaagggtaacaaagtccaacccaaagcggggacacatacatagatcctcgctttggggattctgcaaacagctttggacctgtagaagagctagaggaattggaggttgatcccacttctctagctagaagattgaagattgggaagggtttagcaccagaaataaaatcagtgctgataaaatttctaagggaaaacctagacctttttgtatgatcacatggagacatggtcagaatagacccctccatgatgacccatgccctcaacattgatccaaacttctgatctgtataacagaaaaggaggttgttggataaacaatgtgcccaagctcttaaagataaagttgagaggctacaggcccatgacttcatcaccgaggtattctacccactttgggtatccaagcctgtgctggtgcccaaaccaaacaaaaagtggagagtgtgcatagactttaccaacctaaacaaagcatgtccgcaagactactttcctcttccaagaattcactagctggtggacgccacagctggccatgatttttctaaatttcatagacgcgtacttaggttataaccaaatcaagatgaacccgtcagatcaggagcccacaagcttcataatagacgtaggcctgtactgctacaaagtcatgcccttcatgctaaaaaatgtaggggccacctactagaggcttgtgaacaaaatgttcaaagatctcattgggcacaatatggaggtgtatgtggacaacatgctaatatagtccaaaaaggttgggggcatgtggaggatctagacaaatgcttcaaggtcttctacaagtataacataaagctcaactccctcaaatgttctttcgtagtaagctcaggcaaattccttggcttcatagtcaatgccaggggaatagaagcaaacctaaataagatctaagcccttttggagatgaagtcgcccacaactattacagaagtacaaagcttgataagacgtatttctgcactaagtagatttatgtccaagtctatggacaagtgtgtacccttcaacattttcagaggcaacaaaaaatttgagtggacaaaggagtgtgaaaaggcattccaagagttaaaaaaataattggctcaaccacccgtgctatcaaaacccctagaaaatcaagagctaggcatgtacctagctatcacagtacttgtagtgaatgcggtcctaacaagagaagaagatggtgtataacatcctgtatactacatcactaagagactaatcgacattgaaaattggtacccactcatggagaagctgacttacagcttgctcttggccttcaaaaaactgaggtcatacttccaagcgcacccaataaaggtgtactccgaccaaccattgcggtaagttttacaaaaacctaaagcatttggccaactactcaagtgggccattgaacttggccaatttgatatcacatatcaactgagaataaccataaagggtcaagcctttgaagacttcatggccaagtgtaaaaacacatctcttgaaatctctcaagattcgggagaaaagcaatagccaaaaatgaaggagagcaagagcagcaaaaaaaacctaaagaattaatatggaaactccatgttgatggaa

SEQ ID NO: 240474 - DNA, 1686 bp, Cannabis indica
ctcatgtgttgatcacacattattagtgtaataaaagagatgttacacaatttgatgataggattcaaatggtttgaaatatagttgttacaaactatattaatgctcattttatgagagaaatgagatggtgtgtttgaattctaagagtgatcacctaaacactatataaaggagtctaatgtgctcattgagagatgaagttttctatcaagaaagcactttgctagaaaaccctaaggcttgataattcccaaagctatttcctagagagttcccttagtgcttagagatagggggaaataagcttttggacaaaggtgtaataccttgttcaagtcatggtgatccccactaatctacactcaaggttgtgagtgagtgtatatatattattctcttgttatatatatacatattttatattacatgtgttcttatcttcttctacatttcttatatataatatatatagtgtatatatattgtatattatgttgttgtaacatttatttaatctctttgttggtccttgtattgtattacaatagagttgtaatatcttgattttcttccattgtaataaaatctctaaacaatttttatattacttcacccctttccacgctccccttttcctaattttgattaataatagagttacgtctattagatttattaaatcaaacaacactgagagtagtgttgtctgccaagagcgttacaaggctgacctagagcataaagtcttaagtcaaaagagagagcttgagaactcatattctagagagaaaagctcctagcctaaacaaagaagctttgaagtgaaaatgataatgtaaagtaaagaaaatgaacttgaagggtctcctatttttaggaatggagatctcttaaaataataaaatattataaatgtcagtaatatgttgggaagattctttctgagttgatctaagaccattgagtgatgccatgcctcaaatgtagggctgatatttctcatcatgacttcgaatgatgattatcgatctaggagattgcatctagaccattggatcatttattaatactaaaaaatggtactttgagttgtgagccaatttttgataggaaataagaaaaattcgatattattatgatacatgcatttaaagagttttgaaaggattttacaacacacttagaatcatgtcaatccaagtcgcaatgaatgagatggccaaaacactgggagctgatctaatactagcacccaaattaatgtcttaacgctcaagttgacattagatgtcaacttgtacacatataactcccttaagcttgttcttagcatattttgagatgtcaaggtgatattggtgcatcatcaagctaattttatgacttgcttatgatattttagagaaaaatgtgatcgacgcacttggtgatctaaagctcagttgtgcaccaagtgacgatcggaggccacctgggcgcaagtatgtcacccccctcaaattcatgggattgtcacccccaaaccttgaatttttatttttaccttaatttaattattttttctaattatacgaaattaaaaaaaatccaaataaatatattgttgaccttatttttggtcaacgacgaagagttaataaagtgacaatttaagtgtttgaataataattataataataataa

SEQ ID NO: 240475 - DNA, 1127 bp, Cannabis indica
tctctttgcaacgtcctttataaagtgatacctaaagtaattgctaatcgtttaaaggttgtgcttaatcatattatttctgagaaccagtcggcctttatccccggtcgcctcatctcagataacattatgatcgcctttgaggttatgcattacttgaagcgcaaacgaaaaggtaaagagggctttatggcgttgaagcttgatttaagtaaagcttatgaccgagttgagtggggctttcttcgtgctatgatgcttcgtatgggatttgctagcaactttgttgatttaatcttggaaacaatcagtacggtagagtataatgtggttcatggtggtaggcttcttggcccaatttgtccaaaccgtggcatacgccaaggcgacccactttcttcatatctatttttaatttgcgccgaaggtttctcatcactgctgaaacgttttgagactaacggacttattaaaggttgtaaagtggcaaacggggctccaaccatctctcacatgttgttcgctgatgatagctacatttactgtcgagctaatgaaagagaagcaactaatgttatgagattactccagctctttgagaaggcatcggggcaacaagtcaacttcggcaaatcgtctatcttctttagtgctaacactaatgttgcagttaaagatcgaatttgctctcttctccatatggagattgcacctgacaatagtacctacctcggacttccgtgtacaatggggagaaacaagaaagccattttgggattccttaaagataaaatgcaaaaacggattcagagttgggagggtagacttctttccaaagccggtcgagaagttcttctcaaaacagttgctcaggctcttcctagctacgctatgtcagtgttcttgctgcctttagacacttgctctgctttggaaagcatgatgtctaaatattggtggaataccaactcccaagattcccgtggcatcacatggatgagttggaagaggcttacaaaaggtaaaaatgatggaggaatgggatttcgcagtcttcatgattataatctttcattactcggcaaaacaaggctggcgccttctctttttgtaaaatactctcgtgg

SEQ ID NO: 240476 - DNA, 673 bp, Cannabis indica
taatccatttaaatctttattttctgggcgtatcaaacagtatccatctcgaatgttgtagtgctctatctaacgatgatgttgctccattaaatatcgaaaaacatccttgacaaccactacttttttccagtaccaactactctgcataggtgcagagtagtcccaccaatcttcattttttatgtacacattatgtatccattcaacccataaatcatcttttttagaggcagtgacctaaacatattttttcatggcagctgtattctaagctacaatatttctcagaccaagaccacccgcctttttgttttgcaaaccaattcccaagctatacttccagcatttgaactaaatgcttgtccttgccactataaagatcaacaaattatagccttcacaatttttttcgaaataaaaaaaatttgactccaataagtgtgtatcaagataaggactgaattcatcaatgtgattctccctgcaaagaagagattccttgtaccccactgtcttattcttcccaccattttgtctattagaatctcacactctttagccgaaattctagatgagcaaatcggtactccaaggtacctaaaaagcaatgtacttcgttgaaatctagaaaccatcaaggccctctgcacatcatgctcaaccacatacc

SEQ ID NO: 240477 - DNA, 1036 bp, Cannabis indica
acaagatttttagtaatagaggggacttgaataacagattgtaagtttaaaggacagttattagatgatggtaaagaagctgaaccaatatgagaaatgagaagtctcttaccatctccaatagctagagtgtcttggccagagtagggaatagcagaatccatggtgctgagagaagaagtaacatgatccgtggctcccgtatcagcaaaccagatggaatcatcaccaaagtcaggcagaatggtggtggatgaagtgaggggatcacattccgattcatgttcagcaagaaaggcacgaggattagatgctggaatcttgggagtaacccaatttatatcgaatctatagtggcacacagctgccgtatgcccagattttaaacaaacttgacagataagacgagagggaggaaaagagccacggcctctgccttgcatacgggttgattgatcagtagtagaaccacgaccaggtggttgataagatcgtgaagaaccagatcttgagttgttatatgcaagattagcttgcattttgagagtgagatcggttaaagaattatgatgttcaagccgactttcatgagcaagaagtagagcttgaacctcctcaagacatagttgatcacttcttgaagtgatactagaaacaaccgagtcataatccgggcccaatccattaagaagttgcaagattacatcttgttcatcaatagttgaaccagcaatgccaagagaatcggtgatggtctgcactttatcaacatagtcagaaatggataaagatcctttacgaatgttagaaaactgacctttgagttgcaacaaacgagctctagattgactggaaaaatgttgttccaaagatctccacacagaataggagctggtgaattgagcaacagatccaaggactccttcagtcatggaggatcggagccatgacaggaggagctgatcacggcgtttccactgctgatatgctgggtttggagctccggtaaccaaagtctggggaggggaaataccag

SEQ ID NO: 240478 - DNA, 836 bp, Cannabis indica
attacagaagagaagcacatcatttgcaaaagcaagataatttaatttgattccagcacacctatgatggtatttaaagtcatgtttctctccaacttttctcataattcttgaaagatattccatgcctaagacaaaaagtaagggagacatggggtctccttgtcttaggcctctccttgcttcaaaaaacccatgcaatgtcccactaaacatgagtgagaatttaggagtgcgaacacaattcatcaccagagtaatgaaatattgaggaaactgaaattcttgaagtatttcttctataaagtcccactcaatagtgtcataggccttctgaagatcaagttgataatacaactagccttgtttgatttcctactataatgcctaacaagatcttgacatatcattatgttatgtccaataaaccttcctttaatgaagcctccctggttttgggaaactaaatcaggaagaatcactttaagcctagagcacaatagctttgttgcaattttgtacacaacattacaaaaagctattggtctaaagtctttaacagtgtttggacatttcatttgaggcactatagtaacaattgtagaatttatctctctaagtattctacctgtttcaaagaaggatgtaacaacctgaaagacttcctctccaaccacctctcaattatgttggaaaaaaaaaacttgagtaaccattcgtacctggtgctttgtttcaagggattccaaacacagcttctttcacctcctctgtaaagaccgctcagtttaatttggaaattagcagttaatcatgttttattatgaaaattattt

SEQ ID NO: 240479 - DNA, 1333 bp, Cannabis indica
gatttattccattgaactccatctttaaaacccaaaccccaaacgcttttggaagacacactttctcccaactagctaaatgaatctttggccgattatcttttaaaccccaaagaaagccacggcataatctctcaacctcctttatcacactttttgggagaagaaatattctcatccaataattcctcaggctcaataaggttgaatgaattaattgaaccctccccgcaaaagaaaggtgctttgttgcccaagaaattaagttgaccttcatttttttcaagattgtaccacagtcttcaagcttccatttagttggtctaaggggaataccaagatatttgaaaggaaaactccctacctgtaaattgatgagttgagccaatttacctggttgagagactcctccaaaatatatgtgagacttcccaagattaatagagagacctgaagttttaccaaaatcttccaacacttccctaatcacctggatagagtcttcattccccttacaaaagacaactagatcatcagcaaaacataagttggtcagtttcagctttttacacaaaggatgatacctaaatctcttatctttagcagcaagttggaatcttcgagataagtactccataatcagaacaaagagtaaaggagatattggatcaccttgtctcaaaccctgttctcctttaaaagaaccctgtaaccttccattcataactaaagtataggaagtgtttctcacacaaagcatgatccaagttatgaatttagaaggaaaacaataaagattcagcaacttctcaagaaagtcccagttaaccgtatcataggccttacttatatcaatcttaaccgtgcacctgggggagcaattcttcctcttatagttcttcaaaagatgctggagaatgagaatgttgtaagctattgaacgaccttttacaaaagcaccttggttctgattaactaaattaggaagcactttagctaatcgagaacacaataatttggagatgcatttgtaaagggtcgtgcaacaagctataggtctataatcaacagctccagaagggttttccacttttggaattaaagagagggctgtattatgaagatcagcagggaactgatttgtttgaaagaaatgaatgatagccctgtgtatctccttccccacttctggccacacagatttaaagaaccccgaaccaaatccatcaagcccaggagatttagtacttggaatactaaacatcgtagacctgacttctttaagagagaaaggtttcagtagatgtacatgttggtccaaagtgagaattga

SEQ ID NO: 240480 - DNA, 1158 bp, Cannabis indica
atggttcacaaatgtggtaatattcacatcagcaacaatctagttttaaaaaaggttctttatgtccctactttccaatataacattgtgtctgttagttttttgacaaaagacaataactatgtcctcaaattctttgctaatgagtttcacatacaggaaacacacaccaagaagatgattcgcaaaagtgaatcggctaatggtctctaccttttggacaccacaaccgtttctatcaatgccttcgcatccgctgaaatttggcatagaaaattaggtcatttgtcaaataaatgtctagattttcttagtgattctttacattgtaaaacaaaagatttacataatgttgaaccttgctatatctgtcctctagcaaagcaaagaaagcttcattttcttaataataaaagctttactactcgttgctttggtcttatacattgcgatatatgggggccttatcatgttacttcccactctaatcacaaatattttcttaccttagtcgatgatcattcaagatttacttggatttatcttcttaaacaaaaatcaaatgttctctttattatacctaagtttatttcttatatacaaactcaatacaattgtgttttcaaacgtttcagatccgacaatgcacctgaactttctttcaaagatttgttctctaaacatggtattttacatgacttttcttgcattgaaactcctgaaaaaaaaatgtcgttgctgaaagaaattatcaacacattttaaatgttgctagatccttgctttttcagtctaaagtttccatacaatattggagaaaatgtcttcttactgctgtttttttgatcaatcgcacacctacaccgaatctcaaaaacaaaacaccttatgagattttatttggtaaacaacctgattatgatggcttaagatgttttggatgccttgcctttgcctctaccattacttctcatagaactaagttcgagcctcgggcaaggcatgcgtgtttttgggatatccaaggggagttaaaggctatcggttatatgatctaaattcaaaacagatttttattctagaaatgttgtttttcatgaacatgtatttccttttcacaaacttaacacaactagtcatatattgatccattttttg

SEQ ID NO: 240481 - DNA, 666 bp, Cannabis indica
gattgatttatatacaaccctaaatttgattagtttatataaaatgagcatggaattaagtatattaataatttttttttgggtaaatactattttggactttgtgttttataaaagttacatattagactctctattttgttaaaatgacaaaataagccatgtattttctgaaatggtacaaataagacactaaattaattttttgtcaaaataaaacttaataataattcgacccagaggtgttatgacaaaactagttaaattttcagcatttgttcgtgctaagaattatctttaaattagttatattaaaaaaattattgaaaaattgaacttaaagtcctatttgtaccatttaaaaaatacaaggtatattttattatttaataaaacagagagtccaatctataacttttacaaaacacaagatccaaaataaaatttacatttttcttttcttttctaaaaagggaatatactcatttaataccttgtgttttcataaaaaacatatttggtacattgtgtttttaataatacttaattgatacctcatattttttaattatacatatttagtactctaaagtaaaattcaataaatacaattttatcaatttaaccaaatagatatcagttatatgtaatcaaataattaaattt

SEQ ID NO: 240482 - DNA, 853 bp, Cannabis indica
atgagaattataagcaataatcctattaacttgcatcagaatgcaccctagacccttgctggatgcatcacaataaactataaacttttcttgatcggatggtagagctaacagaggagttgtgatcaattatttctttaactcttggaaacttattttagactagtctgtccatataaaccgctgattcttcttagttgactctgttaaaggcatcaaatttttgaaaagcccgtctacaatagaaaacttttgacttcagtgactgtcttcggccttcgttaatccctgacgaattcaatctttctcggatcaaccatgattccctctttactaataatgtaccctaggaacgacactcgggataaccaaaaatcacacttcttaaacttggcataaattttatgttctcgtagacgttgtagaaccgttcgtgctcttgctctgcttctgattgagagtacacaaggatagcattgataaatataataacacttatattgaagaaatccttgaataggacctattgactcagaaattcggactagacttctaagccacacccgctcactagattgacgagaataaataagtacactacaacaaattggattaataccagcggacccaataccggagggccacgtccgcccctaataagggggttaataccggcggatgtgggggcccgctggtattaataattttatctgaatttatttttttataaaaattaataaaaatatgattagcggtggacatttattaataccggcggatagccccccgctaatagtgtgggatattaagtgcgggaaaaatcctgcccttcccattcaaaagtcattagcgg

SEQ ID NO: 240483 - DNA, 759 bp, Cannabis indica
cctggtgatggtcatttgatgcattcggccactgtcagtacaactccaatgctctttcccagtttatcaaccaaacactgcctgttggtggatggttcttttcaagcagggagttttggttgtgcgatgctgtctctgtctagatgttcttcagattggtggactggcgtttcctccggctcctgcaattcggcgttggaagcggaaatgttggcgatcatccagggcctccgttgggccatccaaaaccggctggacgatctgacgataatctctggttctaagatggtggttgatgcagtgtgtaagagaagagccccggagtggatttcgactgcaacttttacagttattttgaacttattgccttctttttcttgttgtaagtttgttcatgttaaaagagacatagtgggttatgttgactcattggccaagtccactcgccatgttaagggtgtttggcaagttgttaaaggggagggattgccccctgtgaatctcaatcttttctggatttaattaatgaactgaggttctttcaaaaaaagaataaataaataaattgataaacgattcaacctattctaatttaaattagaatatatgttaatcaatattagaataaacaaaaatttagtgttacttgacaccctaaaaataccaacaatatcaatcatgtcgatcgggattatactcattttcttcattgtcccttgtctcattacgaggtagttcaattattattatttttttttt

SEQ ID NO: 240484 - DNA, 1272 bp, Cannabis indica
ttttctattttatttttttattgatttaggaaaatcaatttgatgtaattaatccttataaatagtggactcattttactattcagggacacaaattttattcagagagagaacactcaaagagagaaatcttgattcaagagtgaaacacacagagatcattgtaagagcttttgagagagatcaaaatattcttgttcctcttctcacaagtcaatacagctaaagggaggtaggctattaccatcaataagaggtcgaatctctataaatttcatgttttctttagtttatattatttatattccgctattcaattattcttaatcgcttttatttgactcattgtcattagctaaaagtgagatcaaaattttggtgctttcattgagagcaaaagcacacaagtttttgttttaagttttttttaggacacaaaatggttgtacaaacatggatgggaaatcaaaccgaagttactgatccactggctacgaatcctaacatgcagatgcatacaaaccctagagatccagctgagatgaaccccgctctgactaatcctcagccaccaacaggcccacaaactgtaggtcaatagtgactaccgctctggctgggtttattctgggctgcaaaaaattaaaaccaccagtattcagaccgagcaaactacccccaatactggaatcccatctattacaaatgttcaaaggccaattgatgaagacaccaaactacagaatttgcaagtcgcattggggcaaatacaaggccacaataatacttttcactataaccagcaagatactcgagcatctataaatcttgcttttgacaaacaaagattccaaatcaaagaatggagggattgagagatgagaattatgagagcccatgaagcggtaatcgacaaccgttctagtcaggtcgtcgtactaatcaggagatcctatcaagtcgccagcctacagccagtagctgatacatatatttgttggaaatattttaccgggatctagatttactaataagtatgtttcattaacatcctgatatgaattctaaaataatgaaataaacgcataatggtttcagaaaaccttacattgtgtgcagcagaatataatgactccttccgttcagatcgctagcccttgattcctttctgtagcaaagcatcaccaagatctgaacctggatctctttctctccttcctttagtctgattcttcttcttgttgattggattcttcacaatcttccacacta

SEQ ID NO: 240485 - DNA, 1018 bp, Cannabis indica
tttaataaaaaatagtgttttatgtaattattctatttaatttagactaagacttgtgaggagggagagtataatgaatggagatgatagtaactctactttgtgttgtttggtattatgagtaaacttggaggactgatttttaaaaaaaatactatatttttatgttttatttataattttacaatctaaagtttttagttacaaaaatacacttgtaatgttttaaaattacaaaaatatattttgttcagcaaaaaagaagaaaataactaagaaataatgagaaagcaaactcatgacaacttaaaatcaacaataaaataaattataaaacaaccaaaaacaacctaagacaactataaaataacaacaaaaaataatttattgtttttactgcagaaagtatttctgtaaaataaaataaattcaaagcgtaaaaataattttttttctgtgttaacgtatttttataatttttttaaaaaattttgtatctatgtaaatttttttaaaattacagtgacatcacttttagtgtaaatatatgatttgggtgttgtgttggtcaattatgtattgaaagtaagattttgtggtgagcatgcatttgttagactggggagttgatatctaatctgcctatcttctttccctcccttctctatcctaccaaacactgaatttcatcacctccctcttcatccaaatatcccttcttcttaccaaacatagtgtgtaaggtaacacagaggaagttcaataaaaaaaaaagttcactatttgcatgaacaaatatcactatttgcatgaacccgtagttaatataaaagtaataatttttttaataatgatatccaggtttttttttttagaactaaatgttattatattactacaatgaagttaaaatacaataggcatcagtggtagaggcatctcctcaaaccatgaacaattagtatctactgagagtgcaaaatgatatcaagattgagatattgtattatagatatat

SEQ ID NO: 240486 - DNA, 1155 bp, Cannabis indica
tgggcctcctctcggatagcttttctctgcgccgccaagtcccttagactcttcatggcctcatccatgcccctaaacttggacatgatgtacccatggtcaatcagagtctttgagagacaaccagtctctgcagcaatctggcaaaacaagaaaaatgtataagtatgtgaggccaagcaccaaaagacaaggtcgaagatcactgacagaaacttaccgcggtcatagccgcactgatgtcctgaatctagtagattgaattcgtggaagcacaggccgcgtatctctttgccggaagttgggtcagattggagacgaagtggcttgtcaacactgaggcaaaaggagcaagagtaggccagatgaagcggttgaaccagtctgtcagaggatccatgtttaaatcccaggcattaccggagtactcactgcgagagagagattgtcctgggcctcccttaggaccttttttcaaggcctccacctccgcgtcccccttcgtgtattctgccatagcatagttgtgcttggcaatccagagttgctgtccttcctcgtcagcaggaatgggggtcaggacaatactgggaggcacagtgtactcctccgcctcaggtgggatccccgagtcagagctgggaaccggagtgtcgactcttctgggcttcttggcagcctcgactgccaccatcttgcctttgcgtttccgatccagaggggtgagaatctcgccctcctcttcctcttcagcctccccgtcttcgtcaatcagaacaatctggcttaaggggaagctggaagaaggattaccgaaagtcacctccaagtcttgtgtttgaggctgggctgggtcgggattgtaagtctgggcaagagtagccaaaagctcgtccattggcctagctgcttcaagaaacaaacaaataagtgttagaacggtgatggcaaactgtgcacacaagaacaaagcagtaaaactaatcctacccagaaaatctaattcaaccctagcaaagtcctgcactaaaatgctggcttcgtcatccccaagaaagttgtctgaggggagaaaccagctggaagacagataggctgaatgatccaacaggataggtgcgggaggcccggaccccatccgggaccggcctagaa

SEQ ID NO: 240487 - DNA, 567 bp, Cannabis indica
atcaatgatttttttcatttatttattaataaactgaaatatattattattagaaattgaattgatttttttttataattagtctaagattttatttaaaccagcacaaagcctagtgaccacagcagggggtcacttcccttaagacactccgagcatggatcttctcatttcgaacccatcgggcgagagaatccgcagagcaattagcatcacgactaattaaaacgaaactaacagaatcaaagttcttacacttaaataaacaatccttaaaaaccgagaaagagccccaagacatagggagcgaaccaagattaagaccattgactgcaacactacaatccgatttgattaaaattctcttaactccctcctctgacgcaaaagaaagagctaaggaaatagcagaaagttcaccttcaagtgcgctgctggctgcacagtaatctaccactgagtcccccctggagttgatcacagcaatcccagcccatccttcagcgaccgaagcatcagtcgtgtatatatcagtattatcagtcatagatgtaggctgatcctgct

SEQ ID NO: 240488 - DNA, 1621 bp, Cannabis indica
caacttttttgtattttttttctactaatgcttttgtccataatcacctccttgtggaatcgacagctcgatctatacaacaaccacactactagtaccttggataagtggtatgttctttccaaggcattggtaaagtatgctagtatcggatgtatggagtatatatcagaccggaccaatattgaacttggataagatatcataaacttactgttatatctttctaagtcaatatcacttagttgatcttagatcaatagatcttaatcctgagatagttaggttctagcttaactgtattatttgtgttctttgacttgttcgttaaagctgaccaaatggatcggcccaatacttacatcttgggaacatggtagtacaattaagtgggagtgctaatcataaatacggaatctatagcttctatattgacatagaagtgatatgatgatttctttcgagcttggcttaatagagataaatggaagagctcttgttttaataattatattagcttactaaaatatcatttataggaagctaagtgttttaaggataaaatatattgaggggtagaacggtaaatttgtccatacttgatgtaaatcatctatagaagatgtttaattatttagattataacaatggataattagcgtatctatatttggaacatatagggtgttctatgtaattaaagtgcaattctaaatctatagtggagtcaggagaaattaataagttagagagtttactcggtaaattctagttctacttattggaagcttgattatataggctcatggtccccacactagttgagataattttggcttgtagactcagttaattagttttaattaaccaattgaaattctaaaattagactaagtcttatttatgaattttcactaagcaagggcttaattgaaaataaaagaagttttattatttgttaattaagagactttataaggtctaattaataaataagttaaataacaaatttatttgataattaattataattattaaataaaacagatttgacatttataggattaaaattaaaatatggtatttgtaaaagaaaagagaagttattaaataaatcgcaaaattaaaactagtgggacccattacgtggtcggccacttaagggagtatttagcctttattttatcttttttaatttcatataatttaaaccctaaccctagaaggaatcttataaatagagaatgagaggctcataacctcatagccattcattagtctattctgttagaaaattgaaaatggagaggctcctctatattttcaaattctctctctcttctctcttaaaattttgaagtccctatagtgaagagtaccttgcccactcatatcaagttagtactcaatcacagtgtctaagattgtgaagaattccaacacctgaaggagatccaggttcaaatcttgttattactctgtgacagaaaggaacaagggttagagatttgaacagaaggagccataatattctgctgccactaatgtaaggttttctagaactttatatgtatttattttattattttaggtaattaatgtttaggatgttagattatag

SEQ ID NO: 240489 - DNA, 1395 bp, Cannabis indica
atttaagctctcttcaactgtgtagtcgcatacctacaaagtcttagaatcatcccacttgaccttccccaagaagtgttggattgcacagcttacccgttatttccccttacagatcacgggattactgactgtcacataatcaataacatcagctactaagtttatcaagaacacatgttcaggatctataaccaatagcagttaataactttcaaatttccaataatacatatgatcaatatcaataaccaataacaattattaacttgcaaactttttcaataacatgtattcaagattaataactgatatcagttagtaactttcaaatctttcaataatatatattgaagatcaataaccattaacgatcaataactttaaacttttacaattatttttttcttttgattccactctgattaattgatacatatacaatatatttgaactgcaaagaagaaacaataaagtgacttcgtctctctgctaaaataaaattacatgacacgggtggaataaagtacagatatgtcgagtgcaacaaaaaaaattatctttaattttataattgtgattagattttttattttttatttttttgaaaaaaaattcaatcacttgaacctatcttgaattgacacacttattttagacttaaagtattgataataagattaagcgtagaatttcatttaattagatgtcattcttattattttttattaattaacgttatgggtgtaataattttaaattataataagttttattaaaaatatttcaataatttaagtgcaaaaaaattaatttttaaaagatttttatttagtaacaaattgtaaattattaattgataattattagtaatttaattttaaatataactaatttcaattaatgttttataaggaaataaagtaccagattactatcaggttacaagttttatatttatttatttttattttaatttttaaaataaatctaacatgatggttacatatttgatataaatattgaaatctcctccatatttataaatatagagaataaaatatgttgaaataatattaaaaaaaaaaacaattttagtaaaatttatattgacatatatatttaaatatatatatatgtaaattaaaatatatatcttttttgttcaaaaaaaaatatattttaagagaacaactcgatgctctaattcaataggtgtggatctacctatgtgtagcacgggtttgacttagtttgtagataaagaacatattattttgtagtgataatgtagttcctatatatcgtaataaattgtactgagatttgttttaattacaataattaagttaacgtgttaatatatagtgtcatgaaaaatttagacatcatcat

SEQ ID NO: 240490 - DNA, 1718 bp, Cannabis indica
gattgcacagcttacccggtgtttccccttacggatcccgggactactgactgtcacagtcgcagcccacctaggggtttctgggcagtttgaatgtcgaattttgttttgctcataacgctttgatccagactccgtttggggtgtttcatatatcgttagaaagctcattctgagctctatatatttttttgtatttgaatgccaattctatgaatatgtagaagtggatttagggattaaccctatttgtgaatctcagaaattgtgactaggattactgacaattgatcaagagcacccgggaatttggaatctccacatacttgggacatcaggtaagacagtagttagcatgtagagttaagcgcggtggcgctcatgtttgatatgataattgtaattaaatgagaaccgggattagggtaattaccctaaagtgagcggttatatggcctagggttattaccctagtgattaaggattttaaatgctatgccatgctataaatattgaagtaaagaattatgcgttcaaggcataatttcgttcgactcggtaattagagtcgagataaactgttctagagctttatttgtgaaaaagaaggatggttccatccgaatgtgcattgattatcgagaattaaacaagctgacgattaagaataagtatccaatttctaagattgatgatttgttcgattagcttcaggggaagactgtattctcaaagattgacttgcgttctggctatcatcagctgagaatttgggaagaagatattccaaagactgcatttcgaaccagatatggtcattatgagcttttggtaatgtcattaggattgacaaatgctccagtgacttttatggatctcatgaatagagtattcaaggatttcttcgatagttgtatcatactgtttatcgacgatatccttgtgtaatctcaaacagaaaaggaacatgagcacatctttgaatggtattacaacgacttagatatcataagttatatgtgaggttgtctgaggtgtcctttctaagacacattgtcagaaaagatggaatcatagttgatccgagacagatcgaatcagataaaatttggcgaggcccaggatagtgactaaagtgcaaagttttctcgagttagcacgatattatcggtgttttgtcgaaggattctctaagattttaatgtcactaactgagttaactaaaaagaatcaacggtttatatggtatgacgagtgtgaagtgagttttgagaagttgaaacagcagttaataacaacgccggtgttagctttgccatcagatcaagaaaagttcatcgagtctttatattttctcctccttaaagaaatttcatcccaaaatttcaaaatacaacctcaaattgaaaattaaatgagtgaggatacttcatatacatctcagacttaacttcggcctattgggaatattttaccaggatctagatttactaacaattatattgattaacatcctaaatatgaatatctctaaaacaatgaaataaacacataagggtttaagaaaaccttacattggttgcagcataatataatgactccttccgttcaagatctctagcccttgattcctttctgtagcagaacattattaagatctgaacttggatctctttctctcttttgagtttttccaaccgtcttactcactatgattg

SEQ ID NO: 240491 - DNA, 1957 bp, Cannabis indica
ttttaataatttaaattgcattatttgtgtaacaaatttaatttaatttttattttaagagggtttttaatgtatgttgtggcatggttaagtttaagtggtgtgagtgatgtggcatacattctaatgacatggcacgacacctggcacattacaatgcaaaaaacggagaggtacctatggaagttccagagtagtgacggaaggtatttataccgccaaaaataggacttaggtatttatctgctactcggcataaaacttaggtatttttgccgcaaattactcaataatgaaattagaaacttgaagctgactcgcaagaccaatccccttcaaaataggcagacttttcacaatctcaataggtgaaaccacatttcaggactgggcagataagacaagaatcataccattatagtccttggcccccaccccaacaccacaatgagtaaggccactctgaactgaagcatcacagttaaacaacacaaatctataaggaggaggaagccacttacacagagcactctctggagctgtagaccccgcttgtgcattggtgtgaagcatagaaaaagctcaactcaacagctcaatatcgttggggcagtatgttgggattttatgccctaaataaaatccaatttcattgtaatcttatttactttcaatatagatcagaaatcataacctggccttgtcatatgctttgttcacatgttttatacatgattatttgtttaatatatatgttctattaaattctaaacatatagttattcataattatagtgatgtcatcacagtagaaagtaattgtgattatatgctttaaattattttgtcccacaatttattagtgcactggatttacgttgacttgataatcaacgatggggtttacttatacttggataagtggaatgtctttttcatgatattagtaaagtaaactagcatcgaatgtattggctatacattagactggaccgatattgatagtggaaaggaatcataaacttaccgttatatcttttctaagtcaatgtcacttagttgatcatagatcatttgatcttaattctaagatggttaaactctagcttacatgtattgcacgagttctttgacttgttcgttacaagcttaccgtagaaccaactcaatacttatatcttgggaactcggcagtgcaattaggtgggagtgttaatcatagaaatggacatctatagcttatatgcctattagaagtgaatgatggtttttttagaagcttggcttaacagataaatgttagagcgctcattttggtaatcatattagttttctaaaatatcctttacaagtagctaagtattctaggataaaatactttgaagggtaaaacgataattttatatatactcagtgtaaatcgtctatagaggatcaatcaatcgttggtatttggctcggaagcaatgctgccagtagaagttaatattgcgacccacagacattaattctacaatcaagaagaaaaccaagaactccttaagttttccttggatttacttgaagaaagatatacagagttgcaaattactaatgtagcttatcaacatcgaatcatgaggaacttcaacaaaagagttaagaaaagactcttcaatgtcggagatttggtgttaagacgagtatttgcaaacacacgagatgcgtctgctggagtgtttaacccaaattgggaaggtccttatgttatcgacgcaatagtaggaaccagggtttataaattagctcgctcataaagaaccactggaacagtgaacattcgaccctattaccagtaaattttaaatatacatgttgtatttagctttgtaacatgtaaattcctattattaataaagttaaaattgctaggttttatgccctaaataaaactccatttcaatgtaatctattttat

SEQ ID NO: 240492 - DNA, 981 bp, Cannabis indica
ataaatatcctttcatgttgatattgaaaaaaatattgtgcacttacaataactttattaccaagtatatcaataggactattcctttgcctcttttttttctaaaaaatgataataaaagccaaatattattttttttgaataaaaatcataagatctattaattaataaattcgttcaaaataatagaacgcacttcagaggaacagtcctccaactgaagcacaagacctgtagaaaaacaagagccgcttgccaagcaaagagccaagttatttgcagatcgttttacaaaaacaatttttttttgatgaatcagaatttcattgctcacaaacagataatacaatctaaatacttttcaaagtatgtacatgatctatacattctctcctcttctttcttttaaatttgtaaacttgtatgcacaatctaattacaaagagttaaaccactcataatctatttttgctactgttttagacattacacaagtaattctagttttgatctgccactttacttcttggaccaattgctgcacttggctgctgcttccatgccagattttgcaatttctaattttccatatgtggtacactaaagctgcaatggcagcagcatatacagcttttcgaaacttacttattttagctctgttaatccaccgaagcacattctgcaaggatgtggttgcagctctccaacaaagccattccttgatctgtccgaggcagtcctgtgaaaatctgcaacaaaaaaacaggtgaggagttgtttcttctgaatcttcacagagaatgcattgagcatctgctgtaatttggaacttgaccagcctctgtttggtctttaatctgtccaacattgctagccaaaggagaaagctatgtttagggatgttcatcctcaaccatacttgtttactccaatgacataagtcatctgctgctgttaggactttataaacttcagaaactt

SEQ ID NO: 240493 - DNA, 1522 bp, Cannabis indica
ggtgctctttttggagcttccagtatgtccttttgatacgtctagggttcttaaaattgagggcgaggtctcctaccctatttttgaccatgccagagaaaatgctcaaagtataattttcatttgaatggtcgaaaccagcgcaccagtttggttgttaacttgggcactaggctcaacttttaggccctcaagattctcattttctccctgagtttacttttatctttgttatatctaattacaaaaaaagtgttcggaacactttttcaaaaatatgattggaaacagcccaggttgacaaaatatcaacctgggcgctaggcccagcactaggtgtcaatctgggcgctaggcccagcaccaggtgtcaacctgggcgctgagttcagtttcaggccaccagaagactctgtttgattcctggaaatactggtatcttaatctttgacaaaaatgaagaatattcctagaagacttcttggcaaaactctttggaaatggcccaagttgataaaatgtcaacctgggtgctaggctcagcaccaagtgtcaatctgcgcattgggtcctcattctgacctcttaattgctctgtttcttctctaaaagtacatgtttcctcatttttgatgactgggtgcttaggacacctagtgctccgagtggtcgaatatgaaagtgctctgatataattctgatgcctgaaatatgttcgtgacatgtctaattcatgtcctattacaaagttttgacccatctggactaagacagtcccagaaactgaaaccttagtagggttgtcaacttgggcactgggtgaaaccctaggcgtctgtgtgactttcgaggtgttgttttgtccatttttcagctcccgagcattggacttggatgcttcatgtcttcatggtacaaaatagtgaaagatagtgagttggaaacaacttggtgggatccaaacaaccactctagagttctcaaagtcaacttgggcgcagggctaggaacctctcccaagttgactgctatgactcatgatttctcaactcgaggatgtttctctcttgccacgtgtcaaacattcatgtccatgtcaccgtggtcagttaacacctaataataataagaaaactttacatattagaccaaaaattagataaaaaaattacaaaaatatatcaacatggaaaaatttatttttacgctttgaattttttatttacaaaaatatctctttagtaaaaataataaactgttttttgttgttttatagtttatttgtagctgtattatagttgttatgaggttgttttctggttatttttagttgtcgtttagttgattttttgatatttttaagtttttttattttttactgaataaaatgtatttttctaatttcaaaattttataagtatatttttataaataaaaaatttaatccataaaattttaaattaaatatatataagaaaaaagtagttttatcaaaaattttataataataataagggtaaat

SEQ ID NO: 240494 - DNA, 711 bp, Cannabis indica
tctctctctctctctctcctctaattttcatattgattagaggaagattgatttcttaatataaaaatacgactagaattaacaaattacactaaacagaatttaaataagttccaattaaaattacatacaatacaagactgctcctagactagaatcatctcaaaacatgacatcaacaacccatattacaaattacatcaagacaaacttaaatagagagagagagagagagagagagagagagaaaatttaaaattacccaatggaccgcactactctctctctctctctcaaacttgcaaataaacaaaggatttaaggcaaaccaatttttcaagtcattattcatccttcacagaactattgtttttaaataaaaaatgcttgcaccagatctgaaagcgtcatcacccacttcatcatcttcgtcttcgtcttcatcacccacagatctccgttgaagcttacctagtcgcagatcttcattaatgccataaatagagaaatcgagagggaggaatcgaggagagaagaccgtcgtcaaacttgctctcagtcgcagatcttcattaatgctggcaagagagaaatcgaaaggggatgcaagggagggaggagactgggcttgcaggtttatgggcatggggatcaggatttcgaggttcgtttggaccactggtggccagagtgagctccgccggtctggac

SEQ ID NO: 240495 - DNA, 1052 bp, Cannabis indica
cgttgccaccttaaaaataactaactgtcaaatatttacatatgaagaaattcaatttaagtatgtcatactttgttctgaagacatatttatcaataacaaaaaatttctaaagcataccatagagaatgaaaattattctaagactataatttttacttataagtctcaaagcacgttaatgtgagatggacatctaaattctctatggtttactaagcctttttatgcgtggaggtataattcctccaagttgcatgtatggtaaattattgaaaaatctaaacaaatatctttaagcttaaaagtggaatattaatcaaataattttacaaataaaaatatggttaactagtgaagtttctaaagaaatttgaaaatgaaattgatcagctcaaatgatgtcgatgctagaacttttcatttatagctaaacatggcacccaaaaggtaattacatttcaatcatgaccttacacgtatacatcataacagaaagcatattcctgaaaatgaagctaacaataaagataataacaggtggtacgattgcctcgggattgcatacattccaacaaacttggacacacactctattgcctaaaatacccctgtatttactctgttacaccacccctcagagagagggtgatttcatcacaccatgattttcgagtaagaacttgaaatgtgagtgtgtgagccctttagttagacacttgatcgtgagaagggacatatctaatgtcaagttgtttaagcaacaccttgtcccttacaaagtgcacatctagctcaatgtgtttggttcttgcgtgatacactgggttggaagttagtgcactagcactcatgttgtcacaccacataacaagtacaccaggaagcttaaactttatttctttgtgcagttcttgtagccaggcaattttagcagctagttgtgctaaggccctgtacttagattcagtacttgaccttgcaacaactatctgcttttttgaagaccacgaaatgagcgaatctcccaaaaacacacaataaccggctat

SEQ ID NO: 240496 - DNA, 565 bp, Cannabis indica
atagatgaggagagccaaaaaaaaacacatgattggtgtcttatgcaaagagattgatcgcttagagattgagtgaattgttgttgtaataaatgagaacttaatttagcataccattgccttgaagattgtttgagaccatacaaacttttttgtaatttacacactgcattaggtgggacgggttctttaggtgtgtagccttgagggagtttcatgtagatatcttcatgtaattctccgtggaggaatgcattattgatgtccatgtggtggaggtgcaagttatggatggcagcaagagcaaatataagttttaatgtgttgaattttgccacgtgtgcataggtttcgaagtaatctatgccaagttgttgagtgtagcctttagctaccaaacgtactttgcagcattctacagaaccatcaggattatattatttcttgtagacccatttattgtgaatgacatgtttgtttggtggtaataggatttcttgtagcccatttatgtcaatgacatgtggtttagtggtataaggcaaacaatccaagttttgtcttt

SEQ ID NO: 240497 - DNA, 817 bp, Cannabis indica
tttttttttaaaaaaaaaatccctattagtgtcgggtgttgtattagcgtctaataataaccgacgctaaatattaattttttgcgtcgatttagaagtgacgcccaaatgttcccttatactattcacgtcggtcaacgcaatgaacagtagcgttgaccgacgtaaatagtgttttttgtagtagtgtatttttttcagcattaatagtaaaacgtttttttactattgggatggattttaacaactcccataacctccaaatcacccatttaatcctatttacatcccattagaaaatgctaacatccattgggtgtgtggtgtttgaattttaaagtttttgatcctaaacactataaatagaggccttggttcaccctttgagacacactcttcttctctatctttcaaagacaaagctagagagttctaaggtttgataattcctagaagtatttccacaaaaccctaagtgtttcatagagggggaaataatcttcttggataaaggtgtagaaactttgttcaagcttctggtgatccccatcttcactttgggtgtttgttcttctttcttattttattctattctcaagttttatattgatctcttattctcctgtaaactctcctatatatatatatactatcatatatatatatatatatttatatcttgaatgtatagtattatatatattatatacatactatatatacactctctctatataaattatttatatctctactatatatcatctattatatatatgtatatcatatatattctctattatatatatgcttttat

SEQ ID NO: 240498 - DNA, 1218 bp, Cannabis indica
gtatgtttgttatcactcaagaaagaacttacagaaaataaattgaaatggaattgaggaacaataaacattggttaaaatgattttgggattaagaatgacagttccaactttttcaatgttgacacaatgtccatttggtaatgtaacagcagaagcatttttttattgacaaaaaagaaaaacatctaatgtcacaacacacatggtgggtagccccactatcaattacccaaaaattgtaagaaaaaggattggtattaccagaaaaattggtgatggctgcattggtttctggtgtagaggaagaagagggttgcagctgctgggttagcattgaaattatctgctggcattgctcagtagttaattgaggcggttgtgaatcagatgaagtagtgaaattatctgctgggttagcatggtatggggagttgatcgagatgcagtattggaatctgctttgcctttgcctttggcagcagtatcggttgtcctatgattgccatatctaggaggaaatcctatgaggaagtagcatttgtctcgaagatgacccgatttttggcaatttgaacaagttggacgcatctttttatttttggtggtgaaatttgctgctggattagattcaagatttggtgtagaaggtgtggatgaagaggcaattgcagcaaggggggtaacatttctattgccaagagttctttggcgttcttgatgaacaagcatgaaaaaactttggttaatggtggacaaggatcgagaagcaatacctgatcacgaacaacatggtaaaattcattgagacccttgaggaattgcagcacttgatcatggttgtgatattcttgtgctttagcagcagcaacacaagtgcaaggtatctttgggcgaagttgttgaatttcatcccaaatggcagtcagtttggtgaagtaggtactgactgaatcatctccttgatggagaaaagtgaggctttcattaagctcgaaaatgcgtggaccgttaccttgattgaatcgattgttgagctcggtccacatttcagcagcagtatcaagatacatgatactgctcttgatttcggatgaaaccgagtgaaggatccaagattggaccatttgattacaacgaatccaagaactatagagaggatcatcaggaggtggtttgggaagcgtaccgccgatgaacggagtctgttacgcgcac

SEQ ID NO: 240499 - DNA, 1150 bp, Cannabis indica
tatgttcttatgaatgcctttggaagagatgcgtagtattgtcaacatacatatatataaaatccaatcaaattaaagggagaataatttatttatttttatttttgttagggaagaaaacagttttctctaagaaaattaataaaaaaatatattttaaagttcattttttttttccaaaagagaagacactttttttttcgtaaattagcttcaaaattgtaaaaactatttacaaacaccaatcaatttaaaaaatatataatcaatttccatatttaaatatctattcaaagtaaatatattattggataaggatatatcttattcttttgttaggaggattaggataaattgaatacaatttgatcaagttaagtcaaataatttgtgtacattatttaaaaattatttagaaccattcattttgtacataattcactctagccacaatcattatttctaattccacaattcactctggaacaatcatttgtatttatggatattaccttcttttctcaaattattttaacataacttattacatctatatataaacacattcaaattaacataaccctaaatttcaattctcaataattatcaactaggattaaaaatgagtagctctactactcccttgatgcttgttattgcttgccttttgtttttaacattcgaaaccacgaaagttagaggatggtattttcaaccaaagacgcatgtatcaatgacgaacagtattcctaataaaagcgatctgaccgttcattgcaagtcaaaggacaatgatctgggtacccacgtaatccctttcaataagtcgtatgagatagtatttcatccgaatttattagatacaactctcttctactgtaactttagatggcctaaaaataactccgaccatttcttcgacatatatgacagtattagggataacaggaaatgtaacaaatgtaagcactatgattggaatataggatctcttcgtccttgcatgaaagataatgacaccaaagaatttactatttgttatgattggtaaaaaaacaatagactatgcatatgcatgcatgcatgcatgatacgtctaaatattgtattgtgtttttgattcatgataattatgatctctttaaataat

SEQ ID NO: 240500 - DNA, 1156 bp, Cannabis indica
tttttattcttgggcattgatttcttcctgcatagcatttctccatgtggcgcttgacactataaggtgacccttagcctttctgtactaacaatagttgttaaagtaaattttacaagagtgtgagctactgtattagcagttctagggctgaaaaaagcttagtaaattttacaagagtgtgagctactatattagcagttctagggccgaaaaaagcttacattattaaaatatttacttaaatctctaattcatcttgatgtaaaccttaagacgaatctaatatcattgaactattaagttaacgaatcttaaacatacttattattaggtagaataaaatgaatgatttattatataaataaattaaggtttacactaagtcatagctttgagaaagtaataaaagtgatgagattaaatttaatatatatttcaaaaatttgcagctaataggatggaaggaaggagaacagaagttgttggttgactcagaagaaattgaatgtttgaatactataagaagcttgaactcaaatgctgattcaattcacgagctctatgctgactccaccaccatatttcgcccaggttttatttggaatgacatcgttttatccccctccaggtcatccattcagaaacgccttagggaatccattcaaaaaatagaaaatagtaatattaatacctcttgaatataacttaaaataacaatccatttgtagctctttggattttttttgttaacatttctgttggtttgaaatatatgtaatattgtgctatatactttttgtgaagtggagttcctgtgtatttccactcaaaaagaattcatagtataggttgatctcaaatttggagttgtatttatgattgatatcaccacgtgtacataataagaacaagaaaattaaagagtacacagtatttttatagaggtttgatctccttagttaacgggtaatgacctactccctttttggttgtattgataccagagataataccactcggatcacaagtgttttggattcttaagtggctctcttaagattatagtagtaagaatcaagaagcaaacctcaagtaagagagatgagagagactctgtctcttctacaatgcttggggcgtgtagaagagagag

SEQ ID NO: 240501 - DNA, 1321 bp, Cannabis indica
gtgttgaggtcaagtcaccctatagactaataactcaaccttattattcaaatgacatttaacgatctaattttgttcattattagtcaagaacatcaatagagaatagaaagaataaaaagaatgaatagatttattttctatggaagaaaaaaaattatatctatatacatttagagaaaaagaagaaattgataaagaaaaaatgagagaaagtaaataattactttttataagccatactatattaccatgagagaacaaaataattatttcgaattgttggctcaacaggagatttattggaagcagagatcgaaatagttttggcttcataatggtaacaagaataccaagtatttccatgcttctgcaagtgctagaaagagaaacaatcaaatacgccaattgcaaaatactgctggagtttggaccgattgggcaactggccttgatcaggtaattgtccagtatttttcagatctgtacactgctagttgttcgacaaatgctagggttattagagagattaattgcactgttagtaccagacaaaatgaagaactcttgaaaccagtttcttgcgaagaagtgagacttgccttgttccaaatgcaccctcacaaagctccagggccagatgggatgggtccgggtttctttcaacatcactggaatactgttgggttagatgtggttaaacttgttcaggatttctttcattcaggctccttcccaaaagagttgaatgaaactaatcttgttttaatccctaaaaagaagaatgtcgctacaatgggagatttgaggcctatcactctttgtaatgttgtctacaaagtgatctttaaagttcttgctaatcggatgagagatattatcgatcttattatctcagacactcaaagtgcgttcatccctggacgccttatctcagataatattatggttacttttaaagtcatgcactatctcaaatgaaaaacaaaagacaagaaaggctacatggctcttaaattggatatgagtaaggcctatgattgggttgagtggagttatcttcatgctgtgatgcttcaaatgggatttgctgaaagatgggttaacttgattatgttttgtgtatcatctgtaagctattctattatgcatgatggtcatcgaatgggccctattcttccctcacgtggtattcgtcagggcgacccgttatctacttatctctttattatatgtgctgaaggcttctctgctcttatcaaaaaatttgaatctcagcatctcctccaaggttgtcgcgtggctcgatggggcaccatcc

SEQ ID NO: 240502 - DNA, 775 bp, Cannabis indica
attcgaactgttgatacacaccaacttagagaattatcagaagacgagtgttgggcactatttgtgaaacacgcttctagtgaaaactttagaaagtttactaagaacccaaatttagaaaggatcggtagagaaatttccaagaaatgtaatggtttacctttagctgctaaagttatgggaggcatcttgagatcaacgttagatgtatggagatgtgaacaaatagcaaggaataatatttgggagttgacacatgaaaggagtcaaggccttcctgctgccttagaagtgagctactactatctccctctacacttgaaagggtgttttgctttttgttcaatattcccaaaaggctatcaatttcaaagacaagagttggtcttattatggatggctgaaaattttgtcatgcgctccaagtggaatagaaaaatggaagaagttgccggtgagtactttgatgatttagtatctatgtcattttttctaaaatccaaggacaggagcggtagatctatttttctgatgcatgatctacttgtggatttggctaaaattgtttatggaaaggatagttctttattagagcacaatgaagacattgttaagttcgagaagaagacacgtcacctcggatgtgtaatggaacattctactgatcacaaggtatctagctatgattttgaaggtacacatttgcgaacctttttaacattaagttcaagatattctgaaatcagttcttctaaggaagtagtgcagaatttgt

SEQ ID NO: 240503 - DNA, 779 bp, Cannabis indica
atgagtgtgcttttcagcctgtcgtaccacgccctcggtgcttgttttagtccatagagggatttaacaagcttgcatacatggttcggtttagaggcatcaacaaaaccttggggctgttccatgtacacgtcttcttgtagctcgccattaagaaacgcgttattcacatcaagctgtctaatgtcccagtttttagcaacagcaatggtaagaatgattcttactgtcgatgccttcacaacagggctgtaggtctcgccaaagtcaataccgggcctttgattgaagccttttgcgactaatctcgccttgtacctttgaaatgtactatcagcattcaatttcactttatacacccacttattaccaataatattcattccctcacactttggaaccaatatccaagttccatttctcttgagtgcaatcatctcagttgacatagccttattccaacctttgtgtctaagagcttcttcaacagtggtaggttcttcataatcacagttccactgagagtgtcccatgtagaccttaggcttaaaaatccctgccttagctctagtaatcatcgggtgagaaggagctgtaggcacgatttcttgagaaggatcgagggaaccagcattgacattaccaggtgagtgtctcgagtaaacaatatcactcaaattatcagtagaaccacctggactgtgtgcatctgcaggtaactcatcaaagaaaccagatgaaatagcagaaggagaattaacccgagttacctggttttg

SEQ ID NO: 240504 - DNA, 640 bp, Cannabis indica
agatcctggtaaaataaattccaacagaagatcctattaaaataacaataatatgatccaaaaaaatatggaaaaatacaatttggctatgttggaccgtagatgatgatctaacagtgaaattgactgtggaagacagtcgtcaacttttagagcttgaatcgcgtccccggacccgcttcgagtaaactataacttaaatttaaaactctcttgagggtaaaatttagagtcgataacttcagaattgtaattgtagtgtgcaacatgacttgacagagcatggaaataactttaaaatacaagttcaatggtttcaatcagaaagacattgagtgagttatggtcattttattgaaggttgttcttagcctagcgccgaggttgacatgtaatgtcaacctgggtgctaggtgagtaggaagacgtgacaacgatatattcttttgatgcctaagtgatatttagacatcacttagcttgtttctatgttctgctaaaactggttaacagttctcgaagatgatgttattttacgggaacgagagactcgaaactcccaatttcaaataagccactttgccagaaaagtgaaaatatgaagttgtgaatttgactcttctaacttcatggctcttag

SEQ ID NO: 240505 - DNA, 824 bp, Cannabis indica
tggtgaaaaccatgaagagagtcctgtttgcagaggtgaggagttatgattcgagcaggcaccattatcttttgttgtttatagctttggctcaattcccactgtttacatggcttggcaatataagtgttaattggcttatataagccatcttggtccattttgtagtttgaaaagggaaaattctgtgttcataatagtttttttaactgttgtaagcaattttcttcctattcatggcgactggcaatatttatggtcgtagatttaacaattatgagaaatttctttttgagtgtattattgtttttgttatttatttatttgtccctgtagtgatagtatcattataacaggaaacagtcctgattttggtatccaagttggaaagtgtttggaaataggatactaagtgataatgatggtggcatggtgctatcgtcaatattgttggattggatgttggttgctgcaggttgaagcttagttgattttcaggagttttatggtggcgattatagtgattattattgtgcgtgagtagatctaaaaataacatgactatctccgctatggtaatgattattaagattactatgtttgttgtgaggtttttcattttttatgtcttggaatcttattaaaatctagttaccctagggggagggactcctcaaaaaatggtaccattgaactattactctccgttataatactatggaattaaattttagtaatgggataaatgctacgattttatcaaaaaactagtaaacaattcgtgtttcgcggtgggtatttatttattttttaaattactatat

SEQ ID NO: 240506 - DNA, 732 bp, Cannabis indica
tttttttttttttttgaagataacaagctgctagagaaagaaaacaacgaaaacagcagcaaagcagggaccgatcaatccccactagacagcttctctcagcctaagagcttcttttgcaaggccatgggcatccatgttgagttgacgaggaacgaaatgcaacgaagcttcagggaaattggagaaaagccaccgaaaccgagacaccagaccagaaagagcagagcggtcatgccaatcactgttaactttagaaaccaaaaccaagcaatcagagaaaataaactttggccgcaactgggaatccaaacaccataaaagactttgcaaaagagcctgcccttcagcaaaaagaggagaagaagcccctggcaattgtcgatgatgagaagcaatagtatgctgccaaccagacttgaaaatgaaaccagttcctgttaaagcatgctgattatcaagggctgcatccacaaaaagagcaggagaatcttcttggaagccaattgagtgcaatcgctgaatatgcggagagatggaagaggcctctgaattcggttgatttgtccgattgctttgttgagcttcattataatcctgtaaataattaataacaaactcttccacattgttaccaaaaccagatttctggaataaaattgagtttctagtattccaaatatgccagataatagcaataaaaatcgaaaaatcctgtgtagagatatgatg

SEQ ID NO: 240507 - DNA, 573 bp, Cannabis indica
atgttagtctataagggtgtgtttaaaactcttagactacaccacaatcttcaaatcgctatcctccttgcacaagtattttttattccttgcataccagattttgtacactgcagcagctacacaagcagtatagcagctctttttgaatttgctttgtttttccctaataatccacctcagaacacccggtaacgaattggtctttgacttccatcccagccaatttttcaattcctacaggcagtgttgtgcaaaccgcactcaaagaacaaatgacacatactttctactgcaatattacacagcaagcagtttgtatcacctgcaatgttgaatttctgtagtctatcccaagtccttagtttgttttgtacaacaatccataatacaaaattatgttttggtacatttaacctgctccaaatctgcttgttgaggtgaaagttcatctgttcttgcatcattagcttataaacatcagagattttgaactcagatgttgtaaattgatgaggaggaataatttgtttcaccaaatcctttgtgtacactactctcctccaataccag

SEQ ID NO: 240508 - DNA, 1135 bp, Cannabis indica
ttgatcttgattgagagaactcaatttcttgagtggtcttcctcttgccaaatacacttcttctttcttggattctttctccaactgtaattcgaaatcttttgacttaagtgcggcaaaaatatcttccaatgcaataatatccatgccatacttgatgacaaccttaacttcttgatatgcgattggaagtgatctcaacaagatgatggcctggctttcttcatcaaccttgtgatttatgtttgccaaatctacaataatctcattgaatctatcaatattctcatctaaagaaaaggaagaaatcattataaaatcgtataacctttctagcaaattaatcttgctaacaatcgatggttttaagtataattcttctaatttatcctaaactcctttcgtcgtattctctgcgatgagttttcttcgaacactatttgatagatacatgatgatcatgtagtatgccatctcctccacttttgcttttcctcttgaataacttctcatctccaagaaccttggagacttcttggtgcactaagattcctttcagactttctctccatagcacaaagtctccagttccatcaaacttctccaattcaaatctcgacattgatgacattcaagtttcttcaaggttgcagcggaaagaatcttgattatgcgattttgattgattactaagctctaatttgtgggaaaattaagattgatggagtagaatcaagatgatcaaaattttaaacaatcaaacaattagcaatgacaagattaacaaatcaagaacaataatcagataaaaataaaagggcaaacagagtatttaaaccagaatcggtaaatacaaaaaataaagaaaatcaacaccaagatatatactggttcaagtccgatagatcgatgtggtctatggctctactctagttctagaacaccaccgtaattcttcttaattgattgagaaaaaataggtacaatacagtcgagacgaaattatctgttgagttctgcacctctctctctctctacctctcaattttttctctctcaaactctcaatctcctctgaatagagttcttaaactcgtatctcaatcgtgtcttcaaatgttgggccaaaggtggt

SEQ ID NO: 240509 - DNA, 1754 bp, Cannabis indica
gaatatgtttggatctgtgattttatatatttcttaagtgtttttataaaccctagcagatttaagacaaagctcattgtaattgtcaaaaattagtagaaaagtctaaataaatgtaagaaatgattagaaaataattttctagaaatttttagaaacaatagtgactagatatttctagtttttgggtcaagcccaatgctaaaattctctaacaaattgaagtggcttcatcaaccaaccatgaggcactatatataaatagatccttggtctcatagatgtgggtgcacaaaataagtgaagtcttaatgtgtgctaagttatttatataaaagtgtatgagtttttaataagtgtctaaaaacaaagcgtcccaaaaatgtgagttatacacaagtgtgtagtaaatgtgtctagtgataaaataaaagagtaagtatttagtgtattgtggtctagtaaaaaatattcaagtcttggtgtaattactttttcaataattaaaataattacatttttcacgtgttatggtgtccaacaagtggtattagagccgcatcgagttcgttctgaaagagtcctttttgagtttcttagagtgatcatgtgtggtttagtactacagagtttgcacgatgggtgaccttcaagtgatcggcagaattaagaaacttaacaaccaaaactacaacacgtggtcgatgcacatggaggcatatctccaaggcaaagacttatgggagatcattggaggcaatgaagtcacacaaccggaggacacatccgttttgaagaaatggaagattaaagtgggcaaagccatgtttgcgattcggaccacagccgaagatgagatgttggagcacatcaggccgacaaagacaccgaaggaagcatgggatacttttacatcattgtttaccaagaagaatggtacgagattgcagcttctagagaacgagcttctctcaattaggcagcgcgacatgacaatcaaaaaaatacttcaccaaggtaaaaatctctttgttgcgaaaatctctgtaattaaactctggtgctggcatgtcgatgctagaattagaagaattattattcagggattaaggccagaatttagaacttttatggctaagccaaccttctcttgtgagttagaaaacttgctagctgaccaagaagccttagctaagcaaacttctggagtctcattaaagagtgacgaagaagcactctttagtagagataagaaaggatgaccctgaccaaatactagtagaaatactagaaaacatgatgataatgatagtcatcgtgggagatcccaaacatgaggagctcagaaataaagacaaacggggtggtcaatcaaagaataacaataaatttgatggaaaatgctacaactgtggaaagtatggccacatggctaaaagttactggttcaagaagaaaattacagagggcaatgccgccacatcaaatgcaaaaaaggcaagtgatgaagaatgggacgcaaaagcatcattcacagtggaggaagaagaattagctttgacagctttcgttctatgaaagatcgactacaataagggctgagcatgaaatccagaatactaaaaaaactgctcaaaccgacctgtctaacaccgctgaaactgaaactgccaaaatcgaaaactaaaaaaatcgccaatagttaaaaccgccactgggcggtcagttttttttttcagtaccaaaccgaccaa

SEQ ID NO: 240510 - DNA, 909 bp, Cannabis indica
aaaccctcgaagtcgggcccagctgcaagttgaggtaaataaagtcgaatcccattcttcctctactaatagtcgctcccctagtgtttataccaagtcggtttctgttgaaatgcgacgaggagggagataccatgtttatagcggtgatcttcgtgatcatctcaatgaaatttttagggtgcgatcccaaacaccaaggaatcacgatgatgacgagccccatgatccctaggtgggcgatcaaagcacacataacataaataaccccactaatctagtcaacccgctaaatgcaccagctgcgactacagaggtagtaatcctggctaacatagtcgcagttgctgccatacaattgctaacataggccaatcctattttaccaggaggtattgaccaagaaagcctcctacgagcattgagaatcgagcagcaaagaaagcccatttacaagattcatgggaccgccttttacagaagaagtacaacaagctcgactcccaaaagccttcaggctgtctgaatcactcaaatacaaaggtactactaacccaatcgattatttagataaatttaatatgattatagaagtagacccagctgacaaaatatcagatacttgctaatgctcacgactggtttagccaattactcgagacctccccatcaacatgggagacttttatagacatgttcttgacgcacttccaagccacgatggcgtacaaactttcgtacacaactctggcaaatattaaacaggaaggtcggtgagtctatacaaaattatttcaaacattttaacgctgaaataaccaaggtcgagaaggcccccaagtcttcgttagtttgcatgttgattgcatgtgttttaccaagaaccgatttttagaaggaactacaagc

SEQ ID NO: 240511 - DNA, 1170 bp, Cannabis indica
ttctgacagtgggatcataaaacttatagcccctagatctctcagaataaccaataaagtagctgctaactgttttggagtccaatttattttcatgtggcctataaggccttgcctcagctggacaacccaaaatgtggaaatgctttagactagggttttgacctgtccgaagctcataaggtgcctttgtaactgctttagttggcactctattcagaatgtaagttgatgtctttaatgcttctcgcccgagggtcatgtaaggtagaatgagtgatcatgctccttaccatatccttaagaatcctatttcgtctctcagcaacaccattcatgctaggtgaccctgacatggtgtactgtgggacaataccactttcctctaggaattgaacaagtgatcctggacgttgttcacctgagctatcatatctaccgtagtactcaccaccgcgatcagatctgacgttcttaatccttttattgagttgattctcaacttcagctttgtaagctttgaacacgtccatagactgagatttttcatgaatgagatataggtacccataacgcgagtaatcgtctatgaatgatataaaatattattgaccattccaagatgccgtagggaatggcccacaaatatctatgtgaataaattctaagacttctgaagctctattggcacctaatctcttagttttggtttgttttcccttgatacaatctacacagacattgaaatttgtgaagtcaagagactctaaaatatcatcagacacaagacgctcaattctacctcttgagatataacctaagcatttatgccataatgacgctgaattttctttatttaatttgcgtttagtacatcgtgattccacattcaaagtttcattataggatgcaattgcttctagcaaataaagattgtcgtaacaatttaaatcagttccaataacatttggatttaaagacaaagtaaactgattatttaaccaaatgaacaataatatcgaaatttttccaacaaagaaacagaaactaattccgtgtaaaagacggcacaacaaaagtgtattacaaatccaaataataatcaattcccaataacaatctaaaatgcccaattgctttcacttccaccgattgtccatcgcccacaaa

SEQ ID NO: 240512 - DNA, 1770 bp, Cannabis indica
tggtgaatagtcaatagttatccaacgcaaccacaagtattgtagtaccatatcaataaaccatagcaagggaagagaattatgtcataacttataacaatctaaaagcttttgacacttatttatactattcgttatgtaaacttctttaacccatgattcggtttagaggtaagcttactagaactttaagaaatgcttctagaaccaccttagtttttttttagattatcaaggcacataatacaaatttaatcactaaatcctgaaagaaagaaaaatgaaatcactaaactgaagcaaaataaaggaatagaactagtagaacacgaacacatattacaaccagaagaaatgaagcagattatatcacatcctcaagttgaaatagagaattgtcagttatcatggcccccaggcattgactacaacttttcgatctaaaaaacaatcaaacaattcatcctaatccaaaacgcagcatctcaagtctattttcttattggcaggattttaatattaagaattaagaactaatcggttagcaattaagaaaaaaattaagaactaactgatcgttgaattcaattattcatatgcacacactgacataacctcacctttcttgcaatggaattaaaaccgtaatccagtgattgctcggcaaagtttaaccattccatatgtgaaacctcaagccactggcaacttgtggacttgaaatccctcaaaagcaaggcctcgtacctcaaagccaaacaattctgtgaaaaaagaaaatgtaaaatatcacgaatcggataatgtaaataacattataaatcagtaatgttatttcatatggatcattagataagaaatttttgagataagtagaaaacctgcctcgacatcacctaaaagagcgaaagctcggacaagaaaatcgagatccagaagcttcttctccacaggtttttccgcgttctcacgcataatagaaatagattcaaacctaatgaaatcgcgcaagctcgatcgaatcgccactgatgatgatctgacgtctttggaaaccatgactgattcgatgattcgcagcgcggcgccgtcgagcctgcgtgcaaaagttgagagagcttcagcacaaaatcgagaagtgaaagaaagagaatgctcgaagtttgaagaggcagaaggcgtgaccttctgctgagaatgagagagcgaaagagggagatttggtgagccactgagtctgacattttgggcgggtaatgctagagttatgcactgctcatgtctttcgcggggtttgtctttaaatatgtttttttctttcttttctcctatttttttttcaaatttcttcttcttcttcttttttcttcttcaaactatcaccatcaacaactactgaaaccaccacctaccacaacccaccaccactaaaaaccttttcaaacacaaataaacaaatcgacacacatgtggatggatcatccgcagatcagttgtttgatggagggattgctcttatcacacctaggggcagcctttgcacgaagcaatcaagtttggattcataacatccaataatgaagcagaatatgacgcacttatcgcgagactaaagcttgctcgagaggtacgtgatgaatatttagagatctacagtaactcttaattggttgtaaatcatattcttagagaatacagggctcagggagaaaaaatgatggcatatatgagtaaaatccaagacttcctcacacaatttaaaggatatac

SEQ ID NO: 240513 - DNA, 882 bp, Cannabis indica
ggctcctaaatcacatcgataattacccgaataagcgactcgctaaatcccaaccaggacttaggttttaaaccaaaaccttatctacaacaacttaatatggcaatatcctaaactagcagggaattaaccgaccagaaacctaaaactaacgtgaatcgacaagctgaatttttcagggaaccctactgcaaaatctgggtaaccggtttactggcacctgtaaaaccggtttgccaattttccccagaaaaaccaaacaaactcaaaccctaaccaaatcgattccaaacacaaccaaaccttcaagacctgcatattataccccaataaaccacttccaagcaataaaacaactatccaagctcagaattgaaaaacaccattaaagctccaagtttgagttctaaaactcaaaacttgatcaaacctacttacacccactaaaacatgctcaaatcaacctatataaacataatttaacctctgaaatcaataacaaactaccacagcaagaacaacaaccaaaattacatttcatgcaaaaatccattttcttacacttcaagaaatcaaagaaaaggatactagaaatttacctaaagcttaagaccactttttccttactgaacaagcttgaaatgtagaaaaatcaaaccaaaccctagttggtctagggggtttcgaagagagagggagagcttgagagagaaatggtttatgtcaatttttttctattattgtaaaaatgaagaataaatgagttttatttgatacatatcaacttatcctttatttaaaaaatatgatttaaaacttaattaaaatccatataaaacaaaattctaataggcaaaaagaccattttgcccttcccacact

SEQ ID NO: 240514 - DNA, 2049 bp, Cannabis indica
gacaatcttaagcacaagctccagtctaggataggtagaagtgcgggcttgcttttattttggactaatgatgtaattgtcactttgctttctcaatctatcagtcattttgattgctacgtttcgtgttctattactaatgtttccttccatcttacttgtttttatggctccccggttgattctctcaagcctcatacgtggaatattcttaaccgaattggtaggggtaaccctcgggatccgtggcttattattggggactttaatgcttttctcttttcccatgataaacaagggggaaatcccgataggggcccttcctcggatttcagacatttccttgactcttttaatctctcccctctcgaccccactggtcccttgctcacgtggaataataatgtcgcatccccaaaaaacattcaagaacgattagactggggcattgtcaataaccactgggtagatatcttccctgatgccacccttgcccatttgggattctacggctctgaccaccgcgccctagaactgaacacttccaatcctccgggcacttgccttaataataataacaaacgttttcacttcgagaatgtttggcttaaggatccaaattggaaccaagtttttgaccaatcttggactagccagccgaaccagcatgaacccatcctcaagctagtcgcgactcaagcctctcgtgcagagaaacttaacaattggaaccacaaaaaggactttaattttaaaaagcacataaccaagcttgagaaagacctggaaattgcccgatctgctcctgtttgggatgacaataccatcagaaatataaaggagctccaatccaggcttgactctcttctgtacaaagaagaaacttattggaaacagagagcgaggacccagtggttagcccagggtgataagaacaccaaattctttcatcgacatgcctctcacagaaagaaaataaacaaaatcaataagctccaccttgccaatggaggtattgtctctgacgatgagggcatcacccgtgaaatggaatcccactttaaccagctcttctcgtccacgaacccctccgaggaggatatcaacaaggccctacaaggcattacaatctctctctcagagatggacaaatctttccttgctgaggagttttccttggacgaaattgaaaaagcttttttccaacttccttcagataaagcccctggtcctgatggtttcaattctaatttctacaaatccaactggatatctgtcaggcatgatgttctcaaagcagcaaccagctttctcaatgggaatggggacatcacccctctaaataccactctcatcacccttatccccaaggtcaaacgaccttcttccctgtctgatttccggccgatcagtctctgcaatatcatctacaaagttatctccaagactctcgcaaatcggcttaaacttgttctcaacactttgatttcccccaatcaaagcgcttttcttccgggtagacttatttcggacaacatcattattgcccaggaagttgcgcattccatcaagctgaaaactaggggtaaaaaaggttggatggcggtcaagctcgatatggcaaaagcttttgacagagtggagtggtccttcatcgatgctattcttcgtaaattccaatttcctctcagattcactaatctggtgctctcttgtatctccacgactacctttcaattcaacttaaacggtaaagttacgggccgtgtttccccttctagaggaatccgccagggtgaccctctctcgccctaccttttccttctctgtgcagaaggattctcttctctcctgcgtcagaaagagcgaaataagtccctccctggtattaaagtagcaaggcgggccccggccatctcccaccttctttttgcggatgacagttttctattctgtcaagcttccattagctcttgtaacgtcatcaaagaggttctggacgtgtacgaaagggccactgggcaaaaagttaacttccaaaaatcctct

SEQ ID NO: 240515 - DNA, 812 bp, Cannabis indica
agggatcaacttgcgtggatgtggcatatacaccattccactataagtgtattcagcctcaatcccacgatcctagcattcagcattgatcacacaatctttctctttatgcgctttgtaacgagagaggaaactcttcctcatcaagtttcctgccctataaatagtgaagaatgttcactgggcaggggatcagatccaaaaactgtaaacaaagattatacgccgaaacactataagctaaggctatctaagaattatatattcagagatattattgtaagagctataagaaaaggaatcttcttccttattcttaagtcaatacaactaacgaggattaggctattatcgaactgctcgtggctgaatctctataaaatttctgtgtcttattattattattatttctttactacgtattcatattatgacatatcgtttatcgcttatcaaaaagactcattgtcgttggctaaaagcgaagtcaacagtcatcatcactatcatcattatcatcatcatcatcatcatcatattattattattattattattattactattattattattattattattttgtgacgagttaattctcaaactagactatatcatttaagttacttattagaagttatctaggtgtaaaactaaaatcacgttagctataactatcttgtcaaaacctttttttttcttttcaaattacagatacatatctccattttctgtttgtatttcacgatcacaaatttagggttaataagatttttataagtgcaagagagagagaaaataaaaatatt

SEQ ID NO: 240516 - DNA, 1632 bp, Cannabis indica
tttgggtcccaagtttgggtctgggtccaggtcctgctccagcttcgggtccttctttgagtccccgatcaagacaccgactatgggtattgtccaagccccggttcccagatcccgggacaagatctggatcccattcacgggatccagtctggtttcagttcatgtcccaggtcccgatctgggtcttggtctagctctgagaccgagacttgggtgcagttttgggtctcgatcctaattgtggttcccaagtcctgttccatgcttgggtttgagttcaggtctgggtttgggtcccaagtcccagttcgggtttggattcaagtttgggacccaatcatagggtgggtctgtgtccgagtccgggtcctggtctggttgcagttttgtgtatgggttcaggtcctagtactagtcttgtttctcggtcccgatctccttctggttttggttgtagttcaagtcacggggtacgagttcggttcgattttgggtctgtgtttgggttctagtcttgatttgggttcggggcgaggtttaggtccgtgtttcggtctcggttagggtttgaggttgggtccggttttgggtgccgatccgggtggaaggcccagtctctttctaagatcctagtccagttctagttcaagtttcgattttggttcccgagtgtgggtttgggtctgggtatgtgtccaggtcttggtttgagttcgagtttgggttcaggttctggtctgattcccaaatccaaacactgaatatgggtcaggtccaagcatcgagtcccggatcccaagtcccgaggtgggtcctaggtcatgatttgggtctcggccgggtcccggatcctgatccaagtttcgaggcccaagttttggtcccagattggggtaccaattttagggtttgggtcccccatctatgtccaggtcctaggtgtcgatccgggtcaaagtttgtgtttcgattcgtgttcgggtcttgagtcctggtctgagtccaggtcttggtttgcttttgggtcccactcgcagtgtgggtctgagtttcagatccctggtccgagtctggttcttaggtcctgggtccagccccagttttggggtctggctctggctctggctctgggtcccggtctgggtccaggtcgcggtctgggtccaggtcccggtctttgtttaggtcccaagtcataggtcccgatccgtgtccaagtctcggtatggattctagtctgatttttggtttaggtttgggtcctgctacttcccaggtctgcgttctagtccttgacctggtccgattcctattctgattctaagatcgggtttgaatcccggtctgggtctaggtccgggtctggatacggatccgggtccggatcctggattcaaacacttactacgggttaggtcgaagcctcaagtctagattcggatctcgatcttattccaatttatgtgtttgtgtccaggttcggggttgtgtccctgtagtcaggtcttgggcttcaggtacaaggttgtgtcccgtgtctcgagtatggggtcgagttttggggctctttcccggttctggggcccaatttcgggtctaagtcccccatctaggtccagatccttagtc

SEQ ID NO: 240517 - DNA, 1621 bp, Cannabis indica
gtttgggtccaggtctaggtcctggtctgcgtttgagtctaggtgtaggttcaggtttgggtcccagatccagacactaactacgggttgggtccaagcctctagtctagattttaatcctagtctcagttcttggcctagttccaattcaagtgtcgggtcacgagctgggtcctaggtctatgtctgggcctagggtcgggtcctgggctcggtcccaattccggggcctaggtccttatcctattcctgatttcgagtcctagtttttgtttgggtttgggtcctagtccgggtttgggtttgggtcctagtctgggttctcgtatgagtctgggtttgtgtgtgggtatttgtcaagttacggtttcggttccatttttgggtctgggtccgcgttcgagtctgggtccaggatggggtttgagtcctggtccgagttcgggtccgggtctagatcccaatttgggtctgagtccaggtcctggtctaggttcggttccatgtctgggtctgggtttggggtccgagtctcgggttttgatcctaatttgggtgtaggttcgtgtctatgtctgagtcccaagttcgatcccagtcttggtccaggccctcaaccgtaaaccctaattcctaaaccctaaaccctaatccgtaatccctaatccctaaaccctaaacctcaaaacggaaagaagaatcgggactcggactcggacacggcccaggacccgaacagggaccaggaccaggacctagacctagagtttgggtcttgggtctaggttcgggtctgagtccaagtccgtgtctgggttctggttcgtgtcccgagtctcgatccaagttttgatcctagtttgggtctcaggtccgggtcgcaggtttgggtcgagggtccgggtccaagtctgtgtctaggttggggttcatgacctaagtgtcagtttgtgttttaatccaggtctgggtcccagtcttgtttcgggtttgggtcctagtccaggttctaatatgggtttgggttcgggtgtaggtcctggtcctgatcctggtccacttacgatttcggttccatttttgggtctgggtccaggtttgggtcttggtcaaggtcggggtttgagtcctagtccaagtttcggtccgggtgtagatctcggtttggctctgagtttgcgtccgggtctgggttcgggtccatgttcgggtttgggtctaagtcccaggttcgatcccaatctgggtcaaggtccaagtccctaaaccgtaaaccctaattcctaaaccctaaaacctaatctgtaatccctaatccgcaaaccctaaaccctaaactcggactgaaagaagaactgggactcggactcggacccggcctaggacccaaaaaaggaacaggactgggacccacaaccagacctgaactgggacctaggacccagacacggacccggacacagacatggactctaacccagatccgaacccaaacctagacttggacctagacctggacccaaactggtgttgggttttatgccctaaataaaactcatttcaacataatcagatttacttattaatatagatcggaaataacatttaatgttgcatggtt

SEQ ID NO: 240518 - DNA, 2280 bp, Cannabis indica
aaagatgaaaatgaatgaatatgcacgtacgtactaggctactagctagcttggtgtgtttatatactcaaatcataataattctaatcctaatataattataatatataataataataatcttaaccctaattattattgtgaaaaaatatagattttttactttttttttttttgaagaaaagtgttctttattaatcaagagctatcgcccgaaagacaacaactccgaaggaacactattaatagggaacatacgttcagctagagacaaagagtgtcgggcaatataatgcgcggcacgattcgcagaacgtttgacaaaacataaagtaacatttaataaacttctaaggattaacttgcactcttccacaataaaaccgaacccagaattaagcttctcattgcttcggatagcagccacacaaaccaggctatcggattcaacagtagcgtgggaaaagttgtgatttttcaaccaacttaacgcttctctaatgcccatagcttctgcaatttcaggtgaaactttgccttgctttgcaccagcgaaaacagaaaccaagtcaccatcagtatttcgaatcacgcagccgtatccatgcttgagttcttgaacaaagagagctgcatcaacgttcaacttgatgcctacagtcggcttggtccagatctccgaggcatcaccaggtttcggaggcgacaaaggaggtaagttgcttctgccttgagccttcaaaaactggtgcaaacttgattgagcaaaatcaaccacactttttacacttcgagcccgattcttccaaaggagatcatttctggctgaccatattgcccaacacaacatgacgactcggcttaacttctcatcatccattcgggcagcattggaactaagccatgacagcaaggacacgggattgctatcagctgcattaaatccagaaaactcccaacaagcccaagcaaattgacaagagactaacaaatgcagctcagtttcggcgaagacgccacacaaagggcaattgttatcattcagtaccttcttaatgcagagattcgatttggttgctaagcaatttgacgccgctctccacactagatctttagttttgggaggaactttaagtgaccacattttattccaaaaccggtggtcttctgaagaagttgggggctgcttatgatcttgaatcaattggtaggcgcttcggacagagtaaagtccgtttctctctgcaaaccagtaccaaaagtcgtcctgaaccacctgatttatttggatgcccaggattaaggcagcatcatcgaaagtaaaaaggtcattaacaacttcagcatcccaggagcgactatgtgtttgaaacaagctattcaccgtgaagttctcaagacccgggacattgggaattggcgttggtctgtcaagagaaggcagccaaggttatttgcacagtcaatacccgatcctattcccttccttaaaccgagcttaactgtgtcctttgcggcaaatatactactccaaatgaagctaggattagaacccaactcagcagataaataatcaccttgtggatagtatctagccttgaaaactttactcacaagagaatcatgtcggaataagagtctccacccttgctttccaagcatagcaagattaaaatctctcaaatttctgaaccccattccaccagcagtttttgatcttgtcattttttcccaattcatccatacaatgccactcccattgttgttagctctttttgatttccaccagaagcttgccatcattctctcaagttcattacatgtaccaataggaaaaagaaaaacattcatggcatacgagggaagcgattgaactaccgatttaataagcacctccttaccagcacgagataagaattttccctcccaactgcttattcgcttcttcattttctcttttaggaatcccaacactgcattcttgtttcgcccaaccgtgcttggaagtcctagatacatgctatcggccccagcttcttggacttgcatcataccacagattctactacggatatccgcccttgtatttgaactgaagaaagctgacgacttattaaggttaactttttgtcccgaagctctctcaaaaagttgaaggagtgtaagaacatgattagcttcctcctccgaagcttgacagtatacatagctatcatccgcaaatagtagatgggaaataggaggtgcactcctagcgaccttacatcccgtgataagttt

SEQ ID NO: 240519 - DNA, 663 bp, Cannabis indica
ggtcaatagtaatagtacgtaatagaactaagactatagctactatacataccatttacatgattcactaattacgtatataatattatatatatatatatatatatatatgatatttcaatcattactacattaccacatgcatgaaggctatgtataatttatgacaggttatatatatatatatatatgtttatctatacgaactcaagcagtacatggggacagaaaatgtttgtagggagctaattaaagtgtgaaaaaattattttacgggggccaaaaataaatttttaataaaatacaaaaaaattacaaaattataactaaaaaattggaaagaaaaaaattattttgttccgtcaactcaagtgatgcacttttcccaatggtgataggatgaatgggtccttgcggtgactcactattaaaagagcaaaaattatcattctaaatgaataatagggcgggaaagagtattaattttattctcgaatgttaattaaataggacagggatcatagggtcatgatgataacactcattctttggagtattgttaggttatgggtcctcttcgagacatgacaaatctccaaaatacacttttcgagttagtgccaaacttcaaaatagaagaaaattttattatcttctttttat

SEQ ID NO: 240520 - DNA, 1543 bp, Cannabis indica
caacacaaaaacaaaagtaaaacaataagcagacataaccacttagaaaaacataaaagaaccacacacctcaaaaaaaaaattctagtgaggtcatcaaatatatttttaggagaaccagaataaaaaaaaccacaaaatagacatagagaaggaataagaaatatattgtataggctctatcttccacacccacggatagaactactacaacactacgagaacaaccagaaaataattattaattctagcaagatggagcaagaacagtaaaagacgttaaaaaaaataaattataaaaaaacaactgtaaaacaacactaaaataaatcaaaaaaaataaaagaataaaaaaaataaaagaaaaattaacaatcttttgcacaatctcaacacttgatgcaataaaagctatatttgcaagcccggttttgaaaaaataaattaaaaaaatactcttatctttccaaaaaatgtgactgaaaatttaaaaaatttaaaaaaaaaaatgaaaagaagatgaagaataaaaactgaacaagaaataaaataagaacatggagataaaattaaaaattaaaaagaatgactgtgtggattttgaaaaaaaaaaacagagaaacttatgaagaaaaaaaaagatgatagagagagagagagaataggaaatgtgatgaacatggagagagaacatgtataatttagatctcatctttatcatcctcatcaatatcatcaattttaagtaaaaaaataaataaataaataaacttgtagacaacatcaattaaatcaaaattatatatataaattaaataaaaatcatgtcaacttaaaacttttatttgaaaaacttttaaaaaatattttatatcaacatcaaatcttttttcttttccaaaacatgacaaaaaaaaaattaataaaaggcagtagcagtgtaaaacctttaaaaaaacacagtaaaaatgaaaagactaccgcctagcagtatttttgtaagaaaataacaaaaattagtatatcatgtaaatttcccatatgaattagtttttcataaaaataaaatttaatatggttatttgcggtgaaattttattaatatttataattattataaatataattctaattaaaaaaaaagtagcggtaaaaatattttttcttacaattttgttgtagtcgtaccaacttttagttatcaagtgtcaactcagaaacacgtgacgatatattattagactacgtattaaataagctaaataaatatgttattatgtatttttgagttgacacttaatgggtttatttgacacttaatagctaaaaaaggtacgattgcaacaaaattattagacaatgtattttagctgtcacttttttttattagagtcatatgtgtaataattacaaatattaagggtaggtgtgtacgtcggtctgtttggtcggtttatgctacattttattcaatccaatataaagatcgggttataaaaatctaagtgcaacacaccctattaagaaaaaagaaaataataac

SEQ ID NO: 240521 - DNA, 957 bp, Cannabis indica
tacccttttgccaaactcttacacataaaaagtagcatattcatgctaaaaaagataacaaacctatactggtaccttaccagttcatacactattgtggtcgaggtacacacgatagggcttcagacttccgtccacatctatttttcaatatcctaacctcaggcctgcttaccaacatccaatgactatattgcaatggctcaaacaatgctcgtacgggatgcacctcacacaagagtgggaaaaagttcataacaagagactcgtgggactcaattgcccagccaccgaagacatggcaaatccattgtgaagttttacaatcttgctactaagactacatgtcaattcagagttattatttacgacaagtgtcaaagtacataagttgagtgagcacccgcgtattgtaataggaaatcttgaagtaagacagctggaaaagctcctattttctatcaacatggtggtccaagacgccatttggttaaactccaaagatttaatttgttattgtaaaaattaattagttattaattttaatatagtttaggtaaactacattatatgatttagtttaagttaatgtgttagtgttatatgtaaagtatgtacgtgttgtaatttataattttttttatatatgtttatttatgtaatgtgtttgaaaagttctattattatcatgtattttaaatcgtaatgcgatctcctcatttttggtataatattattatttaattagataagtttatgtaatattttatagaatttgtgaaaatcgattagtctcaattaaacatgtcaataaataattgatgcatattttaaatttattttttaggtcatcgatgttgattgaagaactgcaaaagtatagctatattggaaaaatatatgatcactaaaactttaaaattctttatttagtggagtttaaatatcttaaatatt

SEQ ID NO: 240522 - DNA, 814 bp, Cannabis indica
agattcagcctgatgtttaatggatcactccatgggtattttgaggccaaaaagggattacgccaagaggatccaatgtctccattattatctgtgcttggaatggaatatctttccccaataatgatgagaattggtttaaaggaggatttcaaataccatgacagatgtgatcatcttaaattgaatcatttgtgttttgtagatgatgtgttgctattatgtcatgggaattttaaatccatctacattatgcttcagggcttggaattattttctcaaacctctggactatagctgagcaaagagaagacaacaatttattacaagaatatggatgaaaatgaggtgaaaagagtgattgaagtatctggttttaggcaaagctctttcccctttaaatatttgggtatactcatctgtgcaaagagactaccagctgctaaatgtgaggttttaatagaaaaaatggctgaaagaatttgaatttagagtacaagaaacttgtcctatgttgtaagagcaacattagtgaacttggtacccatagccatacatacgtattgggctcagataatgattattccgaaaaaaagtcttgtacatagtaaacaatctctatatgcaggaacttcttatggaaaggcatggtgaattcagctggttcggtaagatatcttggaaggatatgtgtagaccaaagagtgaaagaggattgggatccaggagaatcgtggaatggaatgaggctgctattggtaaatatgtatgtgttgttgcaactaaacaagatacattatgggttcaatgggta

SEQ ID NO: 240523 - DNA, 1159 bp, Cannabis indica
caatccacccatctccaccaaagggaaatttgagtaaatatcaaatacaatgcttggactaaagatcaaattggtaatttttcttacatctccacccccgcagcccaaatgtttatattaaataatccatttagagacataaaaaagatatattaaaattttaaattttgtaaaaactaaattttacgggaacaagtttaagtccattctttttcccaaaaatctagatttgtttaaataaacataatatttttaatttaatttttaactttttttcaaaataattttatatatttttattgaatttttaattatttttctttatttttgaagatatgaatttataaatataaataaaattgatttttcttcaagaaaaaattcttagtttgggtaaattatttattggacttccaataatcttggtgttattttttaagacacgtgtttgcaaataaaataaaatttaaaatatttttttaagaataatttaaatttttaagtaaacttaatattttttaattaattgaatatttttatcaagtttattaataattttttattagttttttcagagataatagaatattataatttttaaaattaattttttttaataaaaggagataaaattttgtgttggtcaaagtttagggggtaaaaatactaatttttaacggtaaaagaaatagaacctaagagaatgggcataattatgtaattgttacattttacgaagaatttttaacaaatcgtatattttagggtacaaaatcaggtaatgtcgaaagttcaggagacaaaaatgttaattattctatcataaatgtttaagtcactcatatttttttattataaattactatatatatattgattagttaaataaaaaatgaagttacaaataactttaaatcatcacaaataagacacattttttggaccaattagttataatttcgataagatacaaattagctacttttgataaaatcatcaattttaaaataaaaatatctcatataaataagttttgatttttatattagttacttttaatattgtatgttcatattaattaagatatatacttttatgttacttttaagttcacatttacgttacgttcaatcttattgaagaaactatcacattacaa

SEQ ID NO: 240524 - DNA, 710 bp, Cannabis indica
ggtggaggtggttgtggctctttgcttgggcagaaaagaaaacctacatcgatattggaggcctcaagacgaaataagagacttcgggggatccggggccgaggtagttttagaagacgttatacttatccatagtgtatgcgttgcaatggaaccgaaagtaacttaactttattaaaatttccatattaaaaacaagaatatcaaagtcaagggcccaggccgttggaatcggagcctcgaggaattcgggagtagatagcttaataaaagcctaagaaaagaactaagttcgagattgaagcccaagagcctaggcccttggaatcgggacctaaggatattcgaaagtaaatcacttagtaagaaattcatgtaagatgaatccaaataaaagaaactatattcaaagtaattaaaaattgtcttagtccccaaggacttaccgaaagatataaaaatattacaaatataaaaaaagcccctcagttagggcataactactttattgtaatactaaaagaagaagtaaagtaaatggatagactcaatgctggacatttgtatcaactttgtatttgaactcgtgaggttagctgaaatgggagccgaaagagattaatatggttcttgagcaagatggatggttgtttgttcttcagctggaaggtttgagtcttgacctagggacttctcttatgcttcccttt

SEQ ID NO: 240525 - DNA, 1024 bp, Cannabis indica
tctcaatcttctcagaatcccaagggaaatctctaataactccagggtgccgacggatgattttatggggtctagagcatagagatgcagaagactcaaaaaatttccgctttttgaagggagtaactctctcatttgtttcagaagtaggcttaacaccaatgtctcctcccaattgtttgatctcatataaatcaagattcccaaaatgtttaagctcatgcaacaacgtttcctgggcttgaaagaaggaagcaagagcttttttctcatccaatcccgaatccacatcttggccctcaattgattctttagataggccatcgggtcccaacgcctcaagagagtcatggcccacgttggaaagataagaacccccacttaatttattaatgttacccttcatttggataagcccacggttaggattttcaggcccatcttttaatattacactcctttttaaaacattaattggaattgtaggccccactgaagttgggatgtcattattagtgtcctgaagcccacttccaaccggcccaataaacctgtgtgagcagccctctccatgagatttattaattgtaacctgaagcccatagttaaacggcccatttcccatttgttgatcttcaatcggcccacgcaaagagagaaccgagccaacttccttctgcacgtgcatcacgtgatgcgtctctttgaccgcttcagagacattaggtgggtttgaattcctcacactattcgagaaacagtgtaaggtctttctcaacgatatatcaggaaaattttcagaagcttttccattctctatttgctcaccaagaacaccattaccattaccagaaattttggccgtaccaccaccctgcttcgatctgggcacccacgctgccgacttcagaaaccccatcgacgcaggagagcgacgggtcactctcttactcattctcgaaaaaccacccacagtgggagctattcgcctggaaatcactccgttaccacccttcgacgccga

SEQ ID NO: 240526 - DNA, 764 bp, Cannabis indica
atgtctaacatgattaaattacccaataacagctcctggattttagattcaggggcaactagacatatttgttctagtataggtttatttcaatgcatatataaagtcattcctaccaggttacttctccctaatggagattttgtctctgtacatcaaagtggcacaattaagatttcagatcatatcactttgcaagatgttttatatgtacccaatttcaagtacaacatcatatcggtacattgtttaacccgtgacagtaaccttgatattaagttctccactgatgaatttattttgcaggatcttgtcaacaaggggatgattggcagaggtgaatcaaagggtggtctgtacatgcttgatcctacacctgctgctcatcatgttcttgctgtcaatgcagaaacttggcatgctagattaggacatttgtccaacaaatacctaaatttgttaagaaacaaactcaactgtaatactcatgttttacataaagattccccttgttatgtttgtcctatggctaagcaaaggaaactccctttcccaaataacaataattttgcttgccacatttttgatttagttcattgtgacatttggggaccttaccatgttccctcccattcaaattttaggttctttcttactcttgtggatgaccactctcgctttacttggatttaccttttaagacaaaaatctgatgctttgaatgttgttcctcaattcttgtcttatgttcaaaatcaatttgg

SEQ ID NO: 240527 - DNA, 1094 bp, Cannabis indica
tcattaatctttgttcatttttttggttcttggttgctggtttactggtttattcattattgtttaaaacaattcgaattacttttcaaactgtttgcattgttcttgatcaatctcttgtttcgttttgtgtgtgaggtgtatgatcaagcattgatcatatcaaatggtatcagagctcagtcgaggggcatcatcaaagaattgaatcaagaacatcaagaaagaaccaagaactgatctacaatggcttccactcggtttgaagttgataaattcaatggtacaaatgattttggtctgtggaggattaaaatgaaagcattcctagtacatcaaggaatttcagaagccattgatcgagaagagcttgatgctcttcgagatgacaagaagaatatcaaggaaatttagaacaaggcacacggtgccatactgttgagtctgggtgatgaattactcaaggaagtgtcaaatgaagacactgcagtggggctatgggaaaggttggcatcaatttatttgaagaagtcattggccaacaagctctatctaaagaagagggtgtacacaatgagaatggatgaaacagaagatctaaggaagcatcttgatgagtttaataggataatcttggatcttagtaatataggtgtcaagatagaagatgaagatcaagggatactgctgctcagtacattgccaaagagttatgaacactttgtggacaccattgtttatagaaaggaatctttgtcaatgatagaggtaaaatctgccttgaaaaccaaagaaattcagaaaagaaatgaagatagatcaaatggctatggtgaagggttgtttgttagaggcagattaaacaagtgaaaacagaggtggattccacaaatcgaatcacaagagcaagcagtataaagggtcaaatcagtcacacaaaaccaagcctaatcccaaagcaagaaagtagtgctactattgtaagaaagaggtacatttcagagatgaatgcagggcattgaaggctaaactacaaagagataaaagtaaagaaagaggagatgttggtgaggtaactgatggctatgaatcag

SEQ ID NO: 240528 - DNA, 1273 bp, Cannabis indica
gtttttagcttaggattgggatgaatatcataaaaaagagataaatcagggcacacatgatgtgtagcccttgtatcaatgatccaatcaaaagcacgagttttagaattcataccagaaaaatgagataccacaggttgttcattgacagcatctggtgtagactgatcagcaaccttctgagctagcatggccatcaatttttggcattgagaactcgataaacttgagattaagtccttttcaccaggtgcctcatcacttttctgctgttcacctccaataaaattagcagaagcaggcttcattggaggtcccttagcatttctgtttgggaagtttccgtgaagtttgtggcctggaggatatccaataatcctgaaacatctatcaaccgtatgtcctgacattccacagttagtgcaactgtacttaggtctgaaaggttgcacgtttccaacaaactgagcagcatcactcgatacagacttatctccttcattgcagctgtttccaccattattactgttgctattggtaagatttctctgcctttcttcttgaacaacactagcataagctttgctaacattaggtaaaggatcacgcataaggatttgagatcttaccatgctgtaggaatcatttagtccaacaagaaactcaagcaacctatcctcttcttgatattcttgaaaaattttcatagcaccacaactacaaacaggttatggtctatattctttaatctgatcccacagagatttgaggcgtgtaaaatatgtagtaacactgctagacccctgtgtgagactttgcatcgtctttttggcctcaaaaatcctaggagcattcctttcattgaacctttcctgcaattcatcccaaatttcagcagcattatcatggtacaaaatgttgtctgctatctctccagaaatagcatgtagaatccaagaaatcacagtgctattacacctgcaccagctatcatagtcctcatcatcttcctcaggttgtggaagttttccattgacaaacttgatcttgttccttgccacaagagcaatcatcatcgatctcctccaggtgctgtaattctcactccctgtgagaatttttagaaccaaaacagcacctggattatcaccatttgacaaaaaatagggattagaaagatcattagcattagtagatcttgaattttcaccaagaacagagaatcggttaggatcattcagattactcttttgatcacgagtaacacgagttc

SEQ ID NO: 240529 - DNA, 630 bp, Cannabis indica
tatatatatatatatttttaatatgattccaaaaattataatttatttacccatttcacttatttaagacaataacgtcagtcatatttcaaaatggttgattcgaatcacttctgatacaagaagatgtgcttagagttttgacaatggcgacttatcgaagggaagaagatgacgatgatacactattctgtgactgagattcttacgagttcaacggatggaatgcaagttatctgattgcttcaatattgataagtcttcctcctttttgaacttttatcttttagtagtgttttcacctttttcttgattttaattgcttcaaaactaattttgttttgtgccgaatttgacgttttcgtgtataagtacaatccaattaatatatgaacattttcggcctcagagaacacgcccctgggcttagattttcggatttagcgctcggggcgggggtcgctctctatggtggagctcttggcggtgtagactcgggatggttcatgtgcccagatttagatttttttccagttcaaactatatgatatatcattttaggtcagttgcatagattttaaactgataatatcacgtgaacactgacaaaattgtgtaaaggggtacaat

SEQ ID NO: 240530 - DNA, 1877 bp, Cannabis indica
tggttttaacttagaattactttcaaaatctaccataacaagatgcgaccatcatgaaagaattattcttcatgctttctcatcttgagacttgataaatgtcctcattctaaccttcaaataaggatagttagaattattgaggagtggtggataaacaatagaatttctttctgcaaagggaacatattacaaaaatatgagaaaatgttaaaggaccacactaagagtttagtgtcccactctaatactaattaaaaaaactatgtttttgcaaatgccaatatatttactaaactttagtaattaaaaaataacagtaacgatctgcagcaatagactggaatcctgtcacagcagaacacagatttgtagaatcaaaatagaactaaaaataaatagtgcacaaattaaaaacttaacacaagagaattatatgtggtttcagtgttcgagctacggggtcatgcccagagaatgaaatcaattagtaaagtatcaaaattacaaaagcaattgacttaaataaatttagactccctctagtaatttgtcggtaccctttgtaatccaccttgcgaatataatctctgaaatacaccaagtagtaaactctcttcagctattgatgtgtgcttacttcctcccaaagtaaagttttaaacaaatcttctctcgaagatatatgctcacttcctcccgaaatgagacttagaaaaatcttctcttgaagacccacatttgttcaaacaagtttttcaaccaattctacgaacagtataagaacaaaacaaacactaaaacctagatgaacactctagctaggttttcgcaaaagaaactctcttctcacaaagacgaaaatataaaaaataaagttagaagaggtaaatcgtttgctctctagtttctatttatagaacataacaaccctatagacaacaagaaacacgatttcccagctgcacaaaacttttttaattttttttatttgtagcatcagaattagactgtgttgcatcaaatcaggaccaaaaaagaaactttccaaaaatgaccaagattataattttgtcttcaatacatgccaaataaagattatttgatctgctaaaagtatgacaaaactgaaatcatcaattaaaaaaaggaaaagtcaagtttctaaaaataggcaaatttccataaagagaatttattctctgcaagaaaaatttcccaaacaaatacaaaagaatttccataaaagaaatgagcaattatactaaaattaatataattgctaagaaaaacacaaattaattaataaatattttgtcaattaatttaccaaaaaaaaaaactttactggatcgattgattgttattagattagattaatttatatacatctttaatagccaatcacaccttacatgattagtttattttaaaactagatttttttttaaaaaaaaaattagtaatgattgtgacatacttatacacaataatatataagatattaatttaaattgtaggagggaaatttgattttttatgcttacatttggttaaaaaaaatttcctaaacaaataataactaatatttgtaggatatgacaacttttatgatatccctaaaataccctccatttacatcacccccatttacacaatcggaccccccatcggaccccacatcagacactcatcgggccacccatcggacccatcagaccatatctgctaccaattttttttttttttatgtttttatacataaaaaaaatagcatcaggtgaccatcggaccccatcggaccagatctgctaccaattttttttttttatgtttttattgtacatacaaaagaagcatcaggtgaccatcggacc

SEQ ID NO: 240531 - DNA, 1203 bp, Cannabis indica
gatattacaactattccctcttttacagaaattttgtcctcaaaatttacctaaataactcgggatactgcacccgcatctgcgactctaactcctaagtcgcttctttaaccttgttgttcctccacaacactttaactagcagaatagtcttgttccgcaacactttctccttcttatccaagatctgaactggttgctccttgtatgataagtccgtctgaagttcaatgtcctcgtaactcagaatatgtgttgtatgagacatatacttctgaagcattaagacatggaacatgttgtgaactccagataaagtagggggtaaggctagccgataggctacttgacctaccctttcaattatctcgaacggaccaataaacctggggcatagttttcctttctttccaaatctctgaatccccttcattggtgatattcaaaggaagacaaagtccctaacttggaactcaatatccctatgcttcggatcagcgtagcttttttgtctactttatgaggcaaacatacgagcttgaattttctcaatggcctcactaattatttggactgcgtcgggtctaaggtatcttcgttcaccggcttcatcccaatgaatgggcaaatgacattttcttccatatagcatttcatacggtgccataccaatagtactctgataactattgttatatgaaaattcaatcagaggaaggtacttgttccaggaaccttcaaagtccatcacacacgcctgtagcatatcctcaagtatctgaatggtcctttcagactgaccattagtctgaggatgaaaagttgtactgaactttaatttagtacccattgctcgctgtaaactctcctataacttggatataaactttggatctcaatctgagacgattgactttggagcaccatgaagtcgaattatctctttaacatatagatcaacatactgatccactgtatacgaagtccgcactggtaaaaagtgagctgattttgtatatcaatccataattacccagatggaatcatagagccctaccgttcttggtaatccacccacaaagtccatggttatatcctcacatttccacttaggaatcttcagaggttgaaataatcccactggtctctgatgctatgccttaacttgctgacaagttatgcattttgacacgtattccacta

SEQ ID NO: 240532 - DNA, 734 bp, Cannabis indica
cctcgaggttaattttcctagcccccacgaatcgacttcgaaaagttacttgtaatttgttctaacaatctacagatccaggttctaactttttgaaccattcttcagtggatccgcccaacgttagtggaaaacataaacattttgtgtcattactgaccctcatgactgtcattacctgattgaacggagacaggtgatcactagggttcgtatctcctgcatacgtccccatcccaggcattttaaaaattttagggagttctgcctccagaatgtttttagcacagggctccaagttttcaaaattagactctgaatcatcccctttttgcttatgggaggccttggctatgtctttttggaggattgcaagttcagccagggtcccttcactcaagacgccctccgaaactggtattgcttgtttatttttctccaggtgattcctgaggtcactgtgtgttattgatcttttgtcttaaatcatgagggggatacttgtgattttttctacctctatcccctggctcttgatgcacagatacgcttttttgatcctcttgatcctgaggtccagtgctctctcaagggagcttgcccctcatgggccttttccttttaggaaatcagagtggactttttacggatcctgagccttcttgttcttttcaggtaaagatgtaggatttttctttggaatcctttttagggatatcagattgggcttggtt

SEQ ID NO: 240533 - DNA, 1054 bp, Cannabis indica
ttaacattttactaaaatatgagtttttttttttttactttcatactttttctcatatttttcttaacactctttctctatcttaaaaagaattaaaagcactcctcctatatctttctctcttttaaatgatgaataaaagtaatatttttcttttgatgttttgtagtttattcggaattagtttatgaatcatttgcatattttaacaagattgatgccttgttatttttctactaattatagttgtcttttagtcattttatacttattttatagttattttttcatgttgttgtttatgtgttttatagttgtttatagttatttttatatatattttttgtacaattgttatttagttagcatatttttagggtttatatttttagtttattccatacaattttttttattgtatatatggtttattttttttttgttatttttacactattttttagttatttctaagtagttttcaattttttttattcaacagctattttttaattattttttttattcatgagtattttttttttctatggtgtatattttttaatttttttctgacaatttttttttgattgtatgtgtgttgctttatagtttaaatacatatatttagtttattttttttgacatattttatcaaaatacaatgataagatttttttattttttaattgatacagtgtatagtaatagatattgacatattaattatatattacttattatattatataccctattttgaaatcatgttattttattattactaatattaatgtaattatttatttaaattttaaaaaatatattattattttaactgtaactaattcaaaaaagaaaagagaaaagaattgaaagtataaagttgtaacaacaaattctcagaaaaaaaaataatgtactagtgcaaaaaaaaaaaaaaaaattaaagttgtcaaactaagtaaaaaaaattacataatacgaaaaatatattgagaagttaatattattttgtatatattacaattatattattgttttgttatttttc

SEQ ID NO: 240534 - DNA, 1060 bp, Cannabis indica
aacacattatacaaaaccaaaataaaaaactaaaaacttaaattaccttttttatatttatcttatgctctaaccattgaatgaacttcaaacactgctcactagtgttattatatccaatctcatttttaaaaggattaagcccatcaactatcaatttatctccaaccaaaatattcttcaaactgtgtttgcctaaatcagatgatccaaaatcagttataaaaggagacaatataatagcactctccttccgaatacgctttgggttttccaatgtttgataagaatcatcaaacaaaactatttccatattattaattttttcacaaaaaggctattcttttgaatacaaaatgtctttgattgtattgtcaacaactttcataacatcaggagataaataatattgaccataatcaacactgtccttatgaacctacataacaaaaagaaactagttatattaaaagggaaaaaaagattcaaaatcacataaaccagtttcaaaacatacaaaaaaatgcttaaaatatgtaccgcatacttaacactgtgaactgacaattctagaccaccaacatcatcagacaaatcctgataataagcctgtaaaaaattaactaatttgattaaaagagaagaaaactagtttcatacacaaaacaataagaaaaaataataatttgattaaaaaagaaaaaaatcagttccatacacaaaacaataagaaaaaacacaagcgtaatttaattaaaaataaaataatattaactttaaaaagccatttcaacaacaacatataaaaataatgcaagaaaaaataatttaaaacagtgctaaaatttaaaactagtttaatcaacaaaaaaataaacgaattcttcaatttaaaaaaagaaaaaagaacagtttcataaaaaatataaagaaaaaatacaagaaaaattaatccaaaaataataacaactttaaaaaaaacaaatttcaatgtgaaaatcaattatactaaagaataattacaaataaaaattaaaagaaactaataattttgttaata

SEQ ID NO: 240535 - DNA, 668 bp, Cannabis indica
ctaataaataatgagaatagtaaagtagtcattccctaatacttttttatttaatttattaaaattaagaaagggaggacttgattaaataagggataaaagaataagaactaatctgttaaggaatgcgcttaagggtaatgacttttatttattttttattttattttttaatattaaatatataatgataaaaattttccttaaaatatgtcttacaaaatatgtgatgattgtcagcgaggcaagcaacagaagatgggtggtgctgacaatatgttagagatggggtctataatgttaagagtggctactcgttggcatggtcacttcaggttgaggagggtgttgcagactcatccaggttaattcgatggtggaatggagtatggaatcttgttatgccaccaaaggtaaaagtttttatttggcgtatgttccatttgaagttaccagttgcaactcaacttatctcccgaaaagttcaggcacctcgttgttgttcagaatgcagagaagaatctgatgaaaactcctgagcatgctcttttctcctgctctgctttgattcctgtgtgacactggttgggggtgtggtcggtgctccatcgatgtgtacatggaccaatgcaggaaatcctcctgtttctctttgataggttatctca

SEQ ID NO: 240536 - DNA, 1049 bp, Cannabis indica
gggaagacatgagaaaagctccagctcgctgccagggttattgtttctatcctagcgaggtgacccagcgagatacactttgtagcgtatctaaatccacgtcagcattgatccggtaaaagtggataaaacatagctatgtgattctcaaataatagccgcatttattttacgtgggatgtagtcaaatcccataattttagggaaatattgttgtgggatattaatctgattgtaattaactgccttcctatgtaactataaataggggcagaatacactaaaaaagggacaaaaaatctttaaggaaaagaacccttgtttgtattagagaaatctaataagatagacttgtggactatgcaaaattttaactgcaaaactacgtaaaaagttttgtgttatttcttcttcttttactactgttatttttgtgcaaattaatcacgaaatcggctttaatatcgttaacaaaaatttgcgttaacagtttggtgctctcattgagagcctacgtgaaaaaagcttaaaaaaaacctaatcaaaagaaaaatctttctccatggctgataatggagaaaatgacgatactcgtcctgaagagactactcaccgtcctagaaaagagccaatgggctcacggaggcctcccaatacacgatctacacggtccactcgttcaagaaggacccaacctaaaggtggccaaaatacacggtccacacgttcaaggaggactcagcgtggaattggccagaacccagaagcaaggaatgaagaacccaatattggtggtgctcaacccatggaatatgaaaatgatggtgcctatgatcccacgagatacatgccagttgtcgatttggaaagtcgccatctcaggcgctgcctggaagaggcaaactgacgaaacgctgagttagaacgggaggcagccgcgactagggtgacacaggataacaacgataataacaaaattaacttgtaattgtaaaaaattaacatatacatattaattgttacacaaattataggtcctaaatcatata

SEQ ID NO: 240537 - DNA, 1050 bp, Cannabis indica
acttcaaggttaatttttcttgctgtgacaaactatctttagaaactgacttgtaacttgctccagcagtccattgatcctggctccaacttcttgaaccattacagcagaaccgcttagcgttagtggaaagcataaacatttcacgttattgctgaccctcatgtcagtcatcacccggttaaaccgggacaaatggtcactggggtaataatctcccgtgtaagttgccatttcgggcatcttaaaattcttgaggagttccgcatccattatgtgtcgggcgcatgattcgtggtcctcgcaatcagagtccaaatcatcctttttttttgtctccgggagatcctagcaatgtctttgcgcaatattgccaattcaaccaagattccctcgttcaatgtgcctccggagactggcaatgcatgttttttcttttcaaggtggtttctcaagtcaccatacttttcattgattttttgtcttaggtcagccagagggcaccttcgacttttcctccctctttccctgggttcttggtgcacggatacgctctttcggtcctctcgatactgagggccaagactcgctcgagggagcttgcccctctacaaacctttcccttttgggaaatctgagcggacctttcacggatcctgcgtcctcttttttctccctaggatcgaagttgggtttttctcaaggttttcctcagaagggtactgtatagggcttggttccctggtcttgggcttctgagtgcttggtgaagattcttcttttgttttctctggtcccgttgggatgtccttggggtgtatatgtattctcgttgtttccatgggttcttgcatggcgaccattatctcttgcatcctctaattctgttctttttgggcagcaagttcaacttcatgatcagctgccttttgcctcaagaccaatagttcagtatagctaccttcgtcgtaggcgtcgtaccctagggttgtacgtcggtcggtttgggcggtttatcctatatattttctaacccaatctaaagttcgg

SEQ ID NO: 240538 - DNA, 1338 bp, Cannabis indica
ataacataaaaaaaataaaagcttatttaaataaatgatataatttatcaaaaaaaaagtaaagacaagttcggtatagaaaattagattgaattagtttgaattggattgaactgcattacattatattagtactcttgtctcgatttttttaggacatgttttaccactaaaagaaagaattgggtaatgatgtggctacacgtggcatatatgacctaggccattgacgtaattaagagattatcgaagccaagaggcaaactttacctttagcttctttaagaaaaatattgtgaagggttgacaagagaaatgaaagaatgtcatgtcccgaacattctccttgagaaagtcgaaggccttgtacaagaaagatagggatgacgtttagggcaaaagggttcatttcctcctaaatgtgattggcgctaaaaaggttgcaaagcttcttagagacgtttctaatgtgtcaaaggggtattgtagaccactccccttcgtacatcttataaaggttgtgagcgaaaacagaaataaattgtgcataatttagaacttgatacaagagaattatatgtggtattagagttctttcaaacactactaatctacgggattatgcccagagaataaaatcaattagtaaagcaacaaaaattataaatacaaagtttagactccctctaaagctttgtcgtaatcctttgtaatttactttactaatctgatttctgaaccacaccaaccagtgaactccctttagcttttgatgtgagtgtgttcacttcttctcaaagtaagtcttggacaagtcttctcccgaagacttcttctcttggtgaatgaagctcttcaccctattctaagaacaatgaaagtacaatagtacaaagactaaaacctagtagaacactctaggttttcacacaagaaactctttactcacaaagttgaaaatgtaaaacaataagactagaagagatgaattcgtttggctactctctaggtcctatttacagcacaaagaaatcctatagatagccataacacgtttttacaattgtatgatactttcctaaaataaaccctaatttgcaatgacaaaatcgcactctacagtgatagcgcaaacagaattagcaaacttttcttataaagtcaaaatgaagaatttaactttatttcatgccataaaaggattattgttgacctcgcttttaaccaacgacagtgagtcaattaataagcgataagaaatgaattaagacagagcaaaaagtagtaagcaataaggaacacaagattttaaagaggttttagttcggtaataacata

SEQ ID NO: 240539 - DNA, 758 bp, Cannabis indica
ttcaatgtctatccctaggtctgacccctttcttagtccctttcaccaacaataccttcccagtcaccacacagatcatctccgtccaagcacaatcattctaaatctttgtctagacataagactgtctcatcagcctctcctagtattctatttcccaagaaaaccaaaaccattcacccaaggactacctctaaccctagtttatctgagtcaaaacatttgggtccacctttttactcaaatgacaagttgcttcgctttcaagacaatattttttttttgtcctttaccgactcaagttgaaatatttccctacgattaaggaactaattgtgtctcgagggtgggttcttatagtcacacatcttcaagaacctaataagagcctggtaagggagttctgtgccaatctcaatgataacattctaaataggaaaagaaaattcaaatattagacttatattaggggtaattggtttcagtatgctccctctactgtgtatttgtgtgttgaaaattccccggttagataagcctaactacgatgagaattttaagccttcatttaaggagattgggtctgagatcactggtacaatactgatttgtgtgtggagtgggaaagagttgtctgtcactgtgttttctgagttttatagagttcttcacaagattgctctttccaattggtgggccaattcacatatttccacagtgaactatagcataggaaagttctgttttgctttgagtac

SEQ ID NO: 240540 - DNA, 1633 bp, Cannabis indica
gccagacgtaactgggattattgccaatatctgctgagaaaaaagagccccgaggataataccttgccttaaagatctttgaaacaagcgtatctggttgtgtaataagcctccaaccttgttttcccaacaacgccaagttgaaacttcttaagttacgaaagcccatacctcctttagttttgtgtttacaaagtttcttccatgacatccaatggatacctttgggagagttactcgaagattgccaccaaaactttgaaattaggccctccatctcttttatgacttcctgaggtattaaaaaaacactcattgcatagcttggaagtgcttgtgccactgtttttattaatatctctttgcccgcccttgataagaactttgttccatagccaagtaatctattcttcactttatttttcaagaagcccaaagcagttgttttattcctccccatagaactaggcaaacccaaatagagattgttttcattggccgtggtcatccctaggatagagtttaatctatctttcatggaactcagggtgtttgaagatagaagatttggagacattcaccttttgacctgaggcagattcaaatttacttaagacttcttgtattcgcctagcttcagcttcagtagccttacagtaaaggtagctatcatccgcgaacaacatgtgggatactctaggagcaccattggctactttacaaccatgaagccatcgtcgttgttcaaacttgcgaagcaacgcagtgaagccttccgcacaaaggatgaagaggtaaggagataaagggtcaccttgtcttatgcctcttgaaggagtaattgggccaacttcattgttaccatgaataacactgtattttgcagacttgacacatttcatgatgagctgaatccaattgtcaacgaagcctaacttccttagcatagtctcaagaaagtcccactcaatgtgatcatatgctttgctcatgtccagttttagagccataaaaccatccttgccctttctcttccttttgagataatgcaaaacctcaaaggaaactagaatgttgtcagaaatcaatcttcccgggataaaagcgctttggttctcagatatgatggaatccatataaggcttcatcctattcaccataactttggttataatcttgaacaaaacattacataaagctataggacgaagatcagacatacgctctggatttttcttcattgggataagcactacattcgcatcaccacacccatcagtaaggatcccatttgcaaagaaagaacggacattcttgaccacttcttctcccacaatcggccaacatttctagaaaaatgcaggagtcatcccatcaggtccgggactcttatctggatgcatttggaagactgcttttcgcacctcttcttcatcaatcggttgacataactcagaattgatcaaatcagtcaccactctaggaacacaatcaacaacttcatcacaatcacaacccgaggcttgaaataattcttgaaaataatcagacacaaccgatggaaaacccgactcccatgagacccaattaccgtgggaatctttcagctgagtaagttgattatttttcttcc

SEQ ID NO: 240541 - DNA, 1044 bp, Cannabis indica
tcatctacatacagaagtacatagaggacttcttcaattttagtgcccttgtagtatagacaggtatcatagtagcttctagtgaaccctttcttgatcatgaactcatcaaaccttttatttaattgtctttgttactattcgagtccatagagggacttaatcagtttgcaaacaagtcttccttccctttttcttcatatcccttaggctgatgtatggttagtataattctgatagttttatacttagccacaggtgagaaaatctcagtaaaatttatcccctctttctgtgtaaaccctttagccactagtcttgccttaaatttcttaggatcagtctcagttaagccatctttgtgcttgaatagccattcgcatgaaactatgctcttccctttaggtttcttaacaagtatccaggtcttgttctttctcaaagagttcatctctgtgtccatacccttagaccacttctttgaatctttgtctgtcatagcttcttcataggttctaggtttagtcatttctactcccatagcacaaaagaaagaataggctagcacttcttcccaagcagtaaaactgaatctttgtgtaggtctaggaatccttctagctatgtctctagtttactggtagtcttgtagtacatttgcttcttgtccttcttcctgaataggttccacctgaatagtatcatcctgaatttgttcatttccttccatattgtctccttgagtgttttccacctgttctggttccacctgaactgtatctggtgttgtattccttgtttgcatatccattcatgtgcctgcagggttagtatctacagtaggactagataaagtattatagtttgtaatacaaggaaataagtcttccttaaaaataaaatccctactgcttgtagttttaaatccctttttttctcttacccataatctgtagcttttagtgccttcagggtaacctaggaatacacatttcatagccctaggttccaattttaacacactctgatgtgcataagcagcac

SEQ ID NO: 240542 - DNA, 705 bp, Cannabis indica
gatttcttaaataactataatctatttacgaccataaaagaaattaaactaaatatttttttaaataccaaaataaataaaactacatcgatacaactattttgaaagggtgtattgtagaattttcatttattttttttatccaattttatactaacatcatgtagtagttaggggccctagtagtagtaaacgaccagaaactatctttgtaaataaattacgaaaaaattattatcttatgtgtaatgtgtcggtcatcgtaatgtctatcaaaactctcctctcttctctccctccaatcattgacattacttcattcaattcaagagttttcataaaaacaacttctttgtccttgacacgtgtcaacaagttgcatccgatgccagatcaaatttacccctgaaaaaaagtaattttcatgataaataaatttgggtgattctgccatgcaccttcttaaaagggattgtactgatacacccttgacttgtttcggcatcaaagaaaaaaaatttagtcttatttttttttttcattaatcatgtacgttatagttatttaagataacctacaaaattttgaagtaaatccgtaaatatatataataatagaaaaacaatagttcaaaactacgtctaacttttacacgttagtataaaaataaaataagtcacgcgtgcaatacactgttagatgtag

SEQ ID NO: 240543 - DNA, 721 bp, Cannabis indica
tatcccggccagatcgagggtcaaggctactgatgcttcatctgggaacttagaaacgggtggaggcgctatctaccgtccaaatggacatatattgtccgtccagatattgttgacaccttaccggtaggccgtccaaatcctgctgctgtaggtaaacccattgctaccttctctgtaatcattgccagacacaccaaccagactctgcccaagtctaggatgatggcgcgtaccaaacaaaccgtgcaaaaatcttctttatctgacccacacgtagcccatctcgctacgatgccgagtgctaaacaggcccgacctactactcaggaagaagatattgttgggaacgttgaagtccaagagatggatgatcagggcgaggtccgtcttggtactccttctgaagctgaggaggaaggtgcagcttggaggttgccctttggtagttttaatgaagagggacaacttgtgtttgaggtcagggaagtcttggaggccggtgaagattatgtcactgaggaatacgtcgaggccgttcctctgagaagacaatgggaaggtaaagaatctgctcaagcatggttacttaggggatgtggaatgcttcctttcctttcccaaccagttggcgaccagtccaagggaagtttactgcgcttagtcaggcgtgctgggttttgtgccctaaataaaactctttacaatctgattagttatc

SEQ ID NO: 240544 - DNA, 719 bp, Cannabis indica
tatttgtatttataaaattaatatttaatttattgtgtataaattaaaatgtaccccctatcaatttcgatatcagagagacttttttagtctattttttattcatggttgtatacattataattatttaagacactctgcaaaattttgagaaattcaaaaaattaacacgttgaaaagaatgttcaaactatttattgcatgtgtgactcttttatttgaaggggtgcattgtagaagcactttttaatttattgtgtgtaaatttaaatatgaataacataaattatcattatgtaattgcaatatgatattttaatttaccgagttttatcgattttacaatattattatctttaaattaattagtagttttatttaaatgattatttagatattacaattgtggtgattttaataaattaatataatattaaaataagttattttactaaaaattaatataataataaagaatatttttttagtgtaaatttttgttttgtggttggagtgaaaataatttttgacacaaaatttaatgatagtatgacactaaatttagtgtgtaagttggagatgttaggaggatttgttcaactcttggggtccaaaatagtatgacactaaagttttttggatggttttttgcaagtaaattgatagttggggggggttttgccgcaaattactcttaaagtttttattttattttgtaa

SEQ ID NO: 240545 - DNA, 923 bp, Cannabis indica
ctggttacaaaattatattttttaaagaagtttaagaaaaattagattgaaaacaataaaagaaaaatggcaaataacaataattaaaatttagtgtacttaattgtattaatgtcttatggtccaatacaattttaattactatgtaatagcagatttaactctttcaatcgatattcttactaaatatataaaatttaaattatatgtaataaaagtcctatatttctataataaattacacatataatttgcattaaatataaaaatcctaattacaacgtattttcgtctaatatcgaaatctatatctattttacaatagaatagaggcacataagaaattggagaagaattaaaattgcattaaaccatcaagaaatatatatcaaacaatatccattaatcgtcttattaaaagtttagctactcattgtcatggtgaacaattgaattaaactaattagaaacatcaaatgataaacaattgtagtactctctccagtcgctttctgcctccaatttcgtatcccaaaagtctaaaagtccaacaactctcctccttcaaaattagggtttaaaaactgtcataagtgcctaactgcctcagcgggccgtgacattagcttatgcaattacctaataacccctaaaagtattagatgtgacaagttactattatgggcgacaaaaagtcacccctaataaattgaaaattatccattgcccaaggacgggaattttcacacttatactagtaggggcaactttttcgcccttaatggtcgcccctaatagttttgcatttaaagctgatatcccttcttctccaacccattatcttccctttcccattttttcatctgaaaaacctccattaacaatcccgacccggcccatgaccacaaacaagaagaagagga

SEQ ID NO: 240546 - DNA, 902 bp, Cannabis indica
atgaccgaggcaggtgaaggaacgagagactcgtcagataatgtatcaggtgcagaggatgtgaagagtatacaaacaaatcatcatcctccccctgatgagtaggagtagttaaagatgaaaaataaggtgtattttctataaaggtaacattaataaaaacaaaatatttgttgagatcaggacaataacacctatactctttttgaagacgagaataactaagaaagacacactttagtggcttagggtctaatttggtgacaaatggacggatatcgcgagcaaaacaaacatgccaaatacccgaagagcaactggaaacaatgacttatgaagaaagagaattttaaatgggatttcaccattaaatacagaagatgatacgattaataagaaagtatgctgtggaaactgcatcggccaaaaaaggtttacgaactttcatttgaaacaagagagcacgtgcagtttcaagaattacattttgggacaccattttgaggtgcagtatcaacacaagaagtttcatgaagcatgtcattagaggtcatgtaagattgaaattgaacagatgtgtactctttggcgttatctcttctcaaagtactaacaaatacattaaattgattttgaatctcagcgcaaaaagcacagattatagaaaacaactcagaacgatttttcattaaatataaccaagttacatgagaataattatccacaaaagtaacaaaatacttgaatccaagttgagacaaaatagaatgaccacaaacatcaaaataaactaactcaaaaggaacactagcatgtttattgactcgaggattcaaactaacacaatgatgtttgacaaattgacatgactcacaatctaatgaagacaacttactatattg

SEQ ID NO: 240547 - DNA, 1058 bp, Cannabis indica
cctataggtcatcgtggcttggagatgtgtgaggaacaggtcgacaaaggtctcccatgtcgagataaaagcctcgggcaattggctgaaccaatcgtcggcattctcttccaatgttgtcgtaagaatgcagcattttgcgagttgagttacctgatccacttccataatagtattaaatttctctaaatagtatatgggattagaggtacctttgtattttagggattcggataaccagaatcccttggggagtcgaacttgtcgcacttttacggtaaaaggagaggtcccatgcagcttgtatatgggctttctctgctgctcgagcctttttaaagcctgcagaggcatgctttgatcaatattcccagctaagggagcagtgactggtgctgctgcaagttctgttattactgcagcgaggtttgctgggatattaaccccggtagtcgaagctggtacgataggcagattggtgcgattatttatgctctgatcgcccattcggggatcacggggctcttcaacgtcacgaggtgcctgtgagtgcgccctgaaaacagcgttaaggtgatcacgtagatcgcccctgtgaacctgatatcgtcctccatgcggtgtctccacaaaacctgacctagtgtacctactgggtgtgcgaccatgcgagaatgaggaggcagattcaacgtcattatctcgcgactggggtttgctgcgaggattgcgtcgttcagggtcttcctcagtctgtgcctcctggttgggatatctcacggatcggtccctcgatgttggttgattcaagtcgagtccttctgggttggcccttcgttccctgcgagtacagttattacgacgtctagagttagttacctgaggattttccatgccagcagtgggtgctcgaggaggacgtcaggccctgttctgtccatccaccttggcctgtagggcgcgtagctggtcttggattcggtgtactgaccggtggtcagttggacaataccctcggacactgccgccagaataaagggtggaaagtgccccgttgt

SEQ ID NO: 240548 - DNA, 1553 bp, Cannabis indica
gcagagttaacaagcatcacatgaccaccagatccaagttaggaattttcaaacctaaggcatttttggcttctagagaaccctcctctctcaaagaagctcttcaacaagagcaatggaatagtgctatgagtgatgaaatccttgccttagctagaaacaaaacttggatcttggtgagacttcctgaaggaagacaagcaatagggtgtaaatgggtgtataagatcaaagaaaaccccgatggaagtgttcttaaaaacaaggctcgtcttgtggctaaaggattccaccaacaagcaggttttgacttcacagagacttttagtccagtggttaagcctgttaccataagggttgttttgactctagccttgtctaatggttggaaaattagacaactagatgtcaacaatgcctttctaaatggtgatttgcaagaggaggtctatatgactcaaccacccggctttgaagtccctggacaagaacatttagtgtgcaagctgacgctctttatggtctaaagcaagcacctagagcatggtttgacaaattgcaacagagtttaacatcctttggatttgtttcttcaaagtctgatcactccttgtttattaatcacaccaacacctcaacaacacttgttcttgtgtatgttgatgatattttaataacagggagtgaccaaactattattgacactcttgttgcagatctcaacactcaattctctttgaaggaccttggtcctttgagatatttcctaggcattgaggttgcctattctgatgaaggaattcatctctgtcagactaaatatgatcgagacttgcttataagggctcaaatgcttgactcaaagccttctccaacacccgacaagtggtcttcgcttatctgctcaccagggggaacctcttgccgatgtccaattgtacagatccattgtaggagcattgcaataccttacaattacaagacccgaattgtcctttagtgttaacaaggtatgccagtttatgcaaaagtctctctcgacacactggctggctggtaagcgaattttaagatatatcagtggcactatggacttctgcctcaggtttacaaaaccaaaaagttatgaccttgttgcttactgtgatgccgattgggcttcagaccccgatgacaggaagtctacctctggctatgctattttctttggttctaatctaattgcttggaaaagcaagaagcaacaaaccatctctcgctcaagtactgaagctgagtacagaagtgtagctaatgtgacagctgaactcacatggttgcattacttattctctgaacttcacattcaaatacctcagactcctacaatttggtgtgacaacctaagtaccataatgctcactcagaatccagttctacatgctagaactaaacacatagaattggacctatactttgtgagagaaaaggtcataaacaagatggtgcaaatcaaacatgtggcagcctttgatcaaattgcagttgggttaactaaagccatttccagccaa

SEQ ID NO: 240549 - DNA, 1153 bp, Cannabis indica
tttgattatatcgaaatgagtttatttagggcacaaaacccaacacatatcacccgagatgtgattgtagctgccaaacaaccaggggtttgttcaaacctatgctcaggtggttgagttagcccttgctgctgagggtgcaaaagaccaaatccaaaagagaaatagtatgaggagacattcgtggaaacaatctcctagtgtcggttctggtaagggtgttgaccctaatgattgcaagaaaaggtctaatgatccaccagctacgggtcctaacaagatattccaaggtaaccaaggttttcgatgtggtggaaacaaaaattggcgaacctatctaaagtgcctgaggtgtaagagacgccatcagggcgaatgtcaagctaaagcctgcttccagtgcagggtagtgggccatctgaagaaatatgacactctagttcctgctcgggtgtttgctttgacccaagcagaggctgatgctggtccttctaccatgacatgtcagctttctattgatggtaccttgttgactattttaattgagtctggtgcaacacattcttatgcgtcgagtaaagtgattgaaaatctacatgagcctagtgatattttaccaagttgttttggtaccatactacctactggagagttagttatctccagcaggtggcttaggtctctttcgatatgtattgaaggtagagaattgtcagtcgatttaattgaattagatctagaagattttgatgttatactaggaatggattaaggcaagagatttgttattggatggatgtgttggtttcctagtcagtgtggtggatactacaaaagaaataccagtgggaccggttaatgttctggttgtttgaaagtttttggatgtctttctagaggagctactagggataccaccataacgggaatttgactttggaattgatctgatactggggcagagcttgtatctaaagcttcgtatcggatggcacctgtagagctaaaagatttgaaggttcagttacaaagaatgttagacttaaaattcactagactgagtacctcaccttagggtgcgccgattttgtttgtaaagaagaaggacagaacattgagaatgtgtattaactaccgagaattgaataagctg

SEQ ID NO: 240550 - DNA, 856 bp, Cannabis indica
tttggggcaggcatggtggctcgaacaagtgctggtgcactactggaggctcggcaaaccagtttttctggtgtagttgcaccgattttggctgaagcagtgggaataaaggaggccttgagttggattaagagcaagggatggagagatgtgattgtggaaaccgattgccttaatgttgtcaatgatattaattctaacaaaccaatgatttctccatatggttttgtgattcatgattgtaaggcactcttagtagatttattgtctgtttcaattgtttttgttaagcgatccgcgaacaaggttgcgcatgctttggctcgtaattctgttcatacagctgattgtacattcagtgtggctactttgccatctgaaatttcatccttgattttggatgacttatgttaatgaagtttcttcttcttttcaaaaaaaaaaaaatcaacaaacaatttgcaatgaaaaaatcaactaaatacaattcaagaatcggaagaataatagagtataacagagacgataaaactaaaaataaacaatgcaagaaaaccataaaaaaaaaaaacaataccaaaaattatactagttcaagtttgatagattgatgtgatctatggttttactttaattaaagaacaccactgaaacatcatttattgattgagcaagaacacaggtgcattaaagttgagagcgattatctatttaaattctctcaaggtgtttctctttaacactcttctgtgagaagcttcttcatctacaaaagctttccctttacaaaccccaaacaccaaacaccaaaactcaatactttcttttctagctatgtacttctctctctctctct

SEQ ID NO: 240551 - DNA, 1374 bp, Cannabis indica
gttttttcggctttttcggcatcgggtcggggcgggtggtcggatttttcgggttgccgggtcctaatgttcagccctattagaaagtcctcaccaaactacacctcagtctgtagctccaactgatataaaccagcaggaagctaactctggagcatcacagtcagtgatgtcaggtccctcgcagcaacagcaacatcagtttgatctcaccaacaatctctttgttgaattagagcttggcacacctcctgttactgatcaacaacatgttccactccaagctgatccagcagcagatacacgtgttcctgaacagcaaactcaacctcaatctaatcatcctatggtcactcgttcaaaggttggtatctttaaacccaaagtgtactctgctcaagtaaaatggccaggcaacacgtctgaaccaaagtctctcaatgaagctcttgctcacaaaggatggaacaaagcaatgtcggatgaaaatgtggctttacagaaaaataaaacttggatcctagtgccaagaaagaaagggatgaatattgttggaaacaaatgggtgtacaaggagaaatataatgctgatggaacttttcagcgctttaaagctcggcttgtggcaaaggggtttcaccaaagacctggtttagactttggtgaaacttttagcccggttgttaaggcctcaactatccgaattgtgctcacgattgctgtcaccaaaggatgggatgttcgtcaactcgacattaataatgctttcttgaatgggacacttgaggaagatgtgtatatgtgtcaaccaccaggttttgaggacaaagacaaacccgatcatgtgtgcaagttggttaaatccctctatggcttgaagcaagcccctcgggcttggtatgactcgctgaaacaaactcttctccaatggaactttgttagttcacgtgctgatacttccctcttcctgcttaaagctccacaatttgtcatcatggttctcatctatgttgacgacatagtagttacgggcaacaacactcaagaactccacaagttcattgacaagctgcactccacctttgctttaaaagatctaggagcactaaattacttccttggcattgaagtcttccgagatgaaactggtatgtatctttctcaaggcaaatatgtcatggaacttctttctcgacttgatctgaacagcatcaagccttgttcgacgcccatgacagggggcaaacctttgtctttgcaagatggggaaccattgactgattgcacacagtatcggagtgttataggggcactccaataccttactcacacaagaccggacatcgctttcgccgtcaacaaacttagccaatt

SEQ ID NO: 240552 - DNA, 1347 bp, Cannabis indica
aaaaaatatttttaagaaaaaatacagtatttttaaaaagaattctgatccagggtataaaagtaaaaaagttgaaaattgtaatatgtggtgtaattatctctcagaaaatacaatatagagtgtccttagcacttgtcattgaagaaatactatgtttagtatgatttagtattaaaaaaaaaaactaaaatgatgttctaaatgaagtaaggaagcatgaaattgactcacttatgacacaaagttaaatagtttatacaattattttaaattttccaaaagggcatgtaaattcctcaattttttttttgtaatggacaatacataagaccctcttttctaaatttgtctgatattttattcaattttataataagattttaataattgctcaacctatcacacaaaaagagtctaattatatcatcaaagtagaattttgacttgtaattcattgtatatataggaaacactgaacttcaagcatgtaatcaaatgtggacccctaagtttaatttatatattattgaaaaatatatataaagtacatcattaaagcattggtatatttttctatctatttttttacatagtaaaataatttttaagtctattttttatgatcgacacacattataatattttaagattatttataaatttttaaaaaatttcaaaataatttacaagtgactaaaataaaaatttaaacagatgcttaggacataccatacataataaaaaatagtgtaaacaaatatttgaatagcattataaactattcataattttaaaaaaatattacaagtagttctaattaattaatacatatacaactaattaaaaaatagactaaaaatttcctacataccaaaaaaataagaatataccaatataactattttagacgtgtatcatagaattactctatagtataaaatttgtaagtactttagaaatataatgaatactatttgactagttatccacaaagatttgaacctttttcctaactgattggttttgtaatgaatgaaaatgcatggctatgtcttcatattgcattaattattattaatatctaaatgtataagccactaccaaaaaaaaaaaaaaggttcaaatcactttgattggacatatatagtgtgatatgaaatgaaggcactatctagctattatggagggagaattgggtatttttctttcatctttggattggattggaatggagtgttgagagttccaattcaaatgatgcaatcatctaattaaactttgcaggtaccatagccaatcaaccacttatttgatcactttggcccttgaattttcaagatatta

SEQ ID NO: 240553 - DNA, 899 bp, Cannabis indica
actgttttatctatttttgaaacaaagaacttaccatctgcagaatagagtttgggttgtcattgaaagaattgttctttcttccacttactacttcaatgacaagaattccaaaactataaacatctgccttctcggacaacttgccacgaacaatatactccggagccatataaccactaaaagagtcaattgaaattcatatcagaattggtattccaaaagggtagcaatcaaaatcatgaccaagtccaaataagttatttcaaacttacagtgtgccagcaatggcagtgctgatgtgagttttatcttcagggaataatctagctagtccaaagtcagctattttcggtgtcaaatcttcatcaagcataatgttgcttagttttatatcccggtgaatgattctcaaattcgattcttcatgaagataagcaagaccctcagctacacccaatatgatcttatacctcgactcccacctaagttgtcgaacattctttagagctgagttcatccaaagataacaaacaaaggataagtaaataaaatgaattgaaaagatcattttgcttcaacattgaaaaagttcagctttaagagaattcagtaccaccaaataagttatcatgaaggctttgatttggtacatattcataaacaagaagactctcagggcctgtaatgctgcatcccaaaagctcaacaagatttttgtgtcgaattccgcttatcaaattcacttcgttgaagaaatgatccgcccattgtcttgtattgaagaaaagcctttttactgcaacaaccttgccatctggtaaaacaccctaaaagaaaaagaaagcaagagaacataacatgatggtgtcatttcatgaagtgaaatgcaaaataaa

SEQ ID NO: 240554 - DNA, 821 bp, Cannabis indica
attttgttgttaatgaatgtgctacatttacaaaattatagctactacgcctatcattgttgctagacgtctgaaagtcacatcatttaatggtagatcattatctcattttatctttgatttcccattactttgttttaaacgttattgttatcttccaaatttacatgtattatcatgtttaccatttcatattttgtattttagaaatctcattatcaacaaagatagacagctctctcatgatcaatccaaatgttgctaaagtacaaacactgaggcggtggtaagtaacccttacgtttagcttcaaatatatataacataaacttgacttataatttctcatttacacttactgtcaggtgtactgaaaatgaaacttttcttcaagacctcagaatgaataggaaaacatgcttagaatccatgtcccatctaataaaacctcaactacatcttatgacacctataaatgccattaaatcagttgaggtaatttatttgttgaactttaattatctcagcatttgtttaccactccaaaactcctaacaaaactaattaatgttttagggtaagacatattggaccacagcttcaataactatcacaaatccaacacaaacactttggtacatggtatgtagcgagtgcaaaagatttacaactgctgacttcaatcaagcattcacttgtataaaatgcactgaaaatgcaacagctgaactgttggaaaaattctaattacaagagagaatagaaggattacaatcaaaatactcaaaatacaaataaaaatatttcatcaagattacaag

SEQ ID NO: 240555 - DNA, 1516 bp, Cannabis indica
aagctcatgaaatagattgatcacgactcttgacctaaacaggaaaatatacctattctcatgtcgattcaataaaaggttagctaaaaatgctatccattttagatgagctaacaactctattcaatgaatgatatctttaactctcgccgaaacgggatattaatatcgatttgttagaaatcttggaaatttttgaaaatgtgtttgtattttaacatgtctttattacttgctaaatatttaataatttcaaaactgtgtatgaatttatattgaacctaattgtatactgttattaatgatgtaatataaattttgaatcttcattgttggtctaacttggcttgttattaatgattcattgctagaataattacttaaggaatatttggtataaatttaagtctttgactttaaatagaaattttatattttagttttcctaatacattgaaaactacagttaaacttccacaagttgttgataactattttctaataatggatacgaattttatgttaatgtatggattataagttttgtattctatgactagaatccacttgaactattctacgaattctttgttctgagtagacctaggaatcatcaaaatgcatcaaaccaccgtattatatctatgacatttgcatcatgttcatagtagtaagatcagtctttacaaagtgaaaacatgccaatattcacttgaaaataggatcatctttattcgaacatatggatatacatttagcggtggatatgagttatcattaaattttaagacgatcactctagattatatcttaaataaaaaaatttgaaatatttgagaattttcatgcatttctagtaaatggtgtaaatcattgaggtaagtggttaaagatcttgcgaactgataggggtggaaaaatatttggttatactattcaaagatcattaagttgaactttaaattgtatccaaacttacctcccaagaaattccgattgcataatgattaaaatgaaaggtctatgattagttactagtagttgtctgagtccctctagggaaatgctgagtctagattcttggatctcctgatcttgaacttaagaaaagctagaactgttaaataaagtttgcaagcttgatagctattaaaaactgattagaggtggaccattctatggtcattaagataagaaagttgttatcccaattttagtactttgacatggcattacaatctggtgacaggtggaagtgacttcgcatatctattggaaagagatatgccaaatagaatactgcataaatctgcacagatgaagtcttcctgaccgggcagtggacggtccgaacagcgtgccaacacttagcaacttcaattaatacttgcatcatgaatcacagaagaaatccctataattttgggatcatatcacagagatatggcaagctgtccaaatcccataatcagtgtctctgtatttcatatgtaatcttaccaattatagacatcgt

SEQ ID NO: 240556 - DNA, 893 bp, Cannabis indica
ttttccacagaagtcgagatagatagtttttttggatactccaccagaagcagcaaatatagattctgatgcagtagaattgaattttgaagaaggaaatgacaaatttgtcgctgcaactgaagtagatgaaccagaacagtctatctcgattcatccaaacatcattactaattatatccagaaagaaccaagcaccagagtaaaactgaatcatcccaaagctctcattcttggaaatcttgaagaaagcatggtaacaagaagaaggtatgttaatttgattagttttctttgttttgtctcacaatttgaatcgaaaaatgtgaaggaagccatgacttttgaagaatggctcaatgcaatgcaagaagaaattaattagtttgtccacaacaaggtttggattttggttcgaagaccaaaatgtatcaatgtgattggaacaaagtagatctttaaaaataaaagtgatgaattcgctacaattgtgaggaacaaggctcgattgatggcacaaggttatacacaggtagaaggtattgactttgatgaaacttttgctccagtagaaagattagaatctattcgtttactcttgtgcattgcttgtattcttgatatcaacttataccaaatggatgtgaagtcggcctttatgaatggcattttgagtgaggaagtttatgttgagcaagcaaaagaatttgaagatcttcagttttcagaccatgtgtataaagttgaaaaagctttgtatggtttgaaacaagcgcctcgtgcctggtatgaaagattaactcaatttttaatttctcatgattaccaaagaggtagtgtagataaaactcttttcatcaaacatataaaatctgattttatcattgctcaaa

SEQ ID NO: 240557 - DNA, 776 bp, Cannabis indica
aaaagaacttgattaagcaaaaaaaaagagagtacaaagatgaatgagagtgagaaaaaagagagcaaaagagagaaaacgatcgaaacaagtgagagagaaaagaaagagaagagttcgatcaatgagaaaaaaaataagagagaaaacaaaataatttttatgcgagaaaagtgagattacgtgagcttcgcgtacaaaacaaccaatgatttttttcgtttacaagttaagttctagttggcccgatgacgagggcgcgagccaagagagtcaaagaagaactcaataacttagtcaacaaaattttaaaacaagaggaggctgtggtcaacactgaaggagagcaaaaatttgtgcttctcatcaaagtagactcaggttaggaatctttttgtagctgatcacgtattttaaggctataggcaacgtaacttttctttttaatttttgtttcctttatcctgtctttgttttatttagaaaattgtctttcttttaatttccctgttacttggttgtaagttgtttatataaaatcttgtaaacactttggaaaatcagattatttttaaataaaattttgagagattttcttcttgagttcttgaaaaaactattcaaacttatcaaggagcattccttgtggcattcaaccaacttatcaaacaaggaacctttcctctacccagccgtttcagtttaagaagatgtgaaagcgcctctctctatataagaacggtgcgttccgaggtgtgaaatgggagagaagggat

SEQ ID NO: 240558 - DNA, 1414 bp, Cannabis indica
gagcaacagagaaatcacataccatctacagtggattgtacatgaaacatatggagatcagaggaagaggcaattaaagaacttaataaaagagtggtcacccactggaaagaaattaatgaagactttattaggccaactgttgtgccttttcctatcttacttcgtgttcttaattttacaaaagtaatagatcttttttacaaagagggtgatgatcaatacacacgtgttggaaaagcgctcaaagaaagcattgatgctttgcttatagattcaatcccattataaaataaaaatcattatataatacttaactaaattatttaatctgtccattatattgtgacaactgaatactattatgtttttatgaatcagtacttttatggttaaataaacttgtatcttctctttactattaataaaattagttaattattataatttgtttttaaatttttttttttttgaagaaacctggacttcattcaaataggaaactggaggtacaaatcacaggttacaaatcacaagttacaaataaatgaatgatctttccaataaacttcctgaactaggcctaatgcaaacttggcaagagtgtgagccatttcattttgctccctgggtatgtgcataagtttagcattaggaatacaagaaaggaagtttgtaatttctttggcgaatctgtttagcagtaggttgtgcgatgattcactacagatgtaatctacaagtactttgcaatctgatacgataaggtccggttgtatgcattgctggttgcaccatgacagagcataggtgagagcatgagcttccatttgaagagccgagtgagtgcctgtccatggcttagaaactgacagcaacatgttaccttcactgttgaaaagagccaaaccaaatcctgtcatattggaatgtatatcctgtgctgcatcaacagtcaattttaaattgtaattgggcaattctccatgaggagcagcctctaataaggaatggtgagccccaggtgcagctgagttcatgttgttttgctggtatagattcaagtagtccgaagtggattgtatcataagagcagggttgattcttttctgatggtggagaaattcgttcctgcaatgccaactcttccaaaccaaacagaggaagaattgaaatctgaatccggaaatgaggaagccgcagcatgtaaaatttccctacaagttagttccatatattttaaaatgaaagaagagaattgagttaatttccataccttctggatagttgggcacctgaaaacagcatgctctagggtctcaatgtggtgatgacaacgacatcaactaggtgttggaatgattttccttgtgtgcatattctgactagtaggaaggatgtcatggtaggctct

SEQ ID NO: 240559 - DNA, 821 bp, Cannabis indica
actgcataatgagattacacacaagtgacgagaatccgttcgcacgcaaaacccgaagaaggaagctccattcaaggcgatcgtacgccttactcatgtccgttttaatagccataagtccccctttccctttcttgtgcttgatcgtatgcaacacttcttgagcaactatggagcactcagcaatacttcggccagggaggaaagcaaattgaaaaggggacaccaatggatcaataactcctttgaggcgatccgtaataatacgggagatgatcttataaccaaagttacaaagactaataggccagaaaagctcgaactttgtagcatttggacctttgggaataaggcagatgaaagttcgattcacctctttgtctagaatacctatagagaaaaacttcctcaccatttcaatgacatcttccccaataatattccagtatttttgaaagaaaatacctggataaccacccgccccggggccttgaggggatgcatcttgaacaccgtatcgcgtacttcctcagctgaaggaactcgaccaatttcatcattatccatctctgacactttatccaaaaataaagaatcgagttcttgacccgctagatcacccgtggtctcgaagagggcttgaaacttatcctggaagtacttccgatatcagtacgatcacgaacccactccccagtatcatcattcacacaacccatgaagttacgtcttctacgaatgagagtcgacttgtgaaagaattttgtgttgtcatctccgaaacggagccacccttcccgagacttttgcttccaaattct

SEQ ID NO: 240560 - DNA, 776 bp, Cannabis indica
caataatgatgccttcctcttgtggtgttatctggcctctcttaagaccaggccttagataattcacccacctaaggtctgcagcttttcccactcctattcaatcctgatatatcatatatatatatgtgtcatgtacatacatattacatattacatagatcatatacatatatacacatatatacaatatatatatatacctgcagaacgagctacagagctccatcttccttcaccattgaagctgacatattcagtaagcatcttaatcctcttctggagtccaagggccttttctccaaccttgctgctgatcttgattagtcatcccccaactcattgaagataccatacaactactattattattattgtgtctgctctctattattattacctagtcacttcggtccaatgttgtccccaagtttaatgacaacaatcaaatttacaaacacacatatatatacttatctcatcaactacgtacgtgacatgtacatataatatatatagatatacacccacgatgatatagctagtaatattattagtccctttcaataatttgatttgatatataccttagctgctgatatcacaatcactagatagctagttaagattttgtttgaaaagctttttgaagaatatcgaagttcagtttgctttgagtacctctctctctctctcttccttttgatgatcatgatcatcaaataaaaccagcctccccacattataatatgtcttttgttcagcttcagccacgt

SEQ ID NO: 240561 - DNA, 860 bp, Cannabis indica
tgtttcatttgatttttatttgcaatttcattatttaatttttatttgtgtgtttttgaatgaaaagtttgatttcaactgtaaaataaattttcacaatcatctttttcttctatttaactcatcatattcctagagaaaataagtaagaaatgaacattattactacttctgaaactctgagactgtattgaatatgaatgtatcaatatagagtgctaggaggaacttagggaaaccagtagagtagctgaactattggagctcttcttttgtcctgtgctttcctttggttctatagattgtcatgagaaatgtgtttgttttgagacttccaagttgcatgtgcgaactagtgctgatgcccactttcgtagaaccaatgttcgtccacctgtctagaatccatgttaaaggttaagttctttaaactaggttcttttgtgatttgatttggattgaatttgtttaggaaaggacatgaagaaaaaacagctctccttgtctcactattagcttagaattccttacatttgttgtttatgccatggttgtatggaggaaattgtaatctcaatgagctgctctgttttcaaactgtaatctgtttgtgattctactatactttttcttgtcaatttgaaatatctgatcagtttgtatatagcaatatctgccattattcctctcctgtgtgcttttttatttagccaaatgaattttatatagaaagaatcttatacagagtgggagatagaagtggtcttattcttcttgcaaccaaatgaatttcgagaagttctgatcttttgatgacttttttcaaggaattaaatctttttatggtattgggtcatttt

SEQ ID NO: 240562 - DNA, 833 bp, Cannabis indica
accatctgatcggagccaagtggttacgaactggggtcgaagatgaactgcaatcaagggatatggccggatttgacactgtcaatttgcccattagccaggctgccaaccaaaatgagataaatttggcaagaaatcagggacaaggattaactaagtcaactgatattttaggcaacaagtttggtggagcaaatcgtggaaaggatatttccaaagatatttcattgccaaatagagagatcaatatggaaaataatgaaagtgttattggtgagaattctgaacttaccatattagaaattaaaagaaggaggactgaggagttgatgttgggtgatccacgtgtgatcagctcttctccaaatgggccgaatgtgttatcagcccaaagcaaaatggatgtccaggatgttagtggtaatgcgaatggggcttcaaaaaacgagttgttggtgggtcttggtttccaggcccaccgttcatcatgagtattttgagctggaattgccgggggcttgggaacccgcgagcttttcaattcttaacggatcttattatccaaaagcgtcccaattttgttttcctttgtgaaactttgtgtcgacaacatgttattgaaaggctgaaagtggctgtgggtttcgaaggaatgctatcagttgacgtgagaggccacagtggtggaattgctttgttatggagattcaatgatgaggtaaaattaataggcactgctgtcaattatattgatattgaagtcactttggcaagagaggaaccgtggagacttacaggattatatggcgaacccaatcgaagtcagcgacata

SEQ ID NO: 240563 - DNA, 682 bp, Cannabis indica
gttttcaggtggaaaatggtaaaacagatctggtttgctttcttaaaagatcattgtatgggttcaaacaatcacccagacagtggaatcaaaggttcaatcagtttgttcaaagtattgggttttcaagatcaaaatttgactcttgtctctactacatggaaatagggaaacgtaaggttgtgtacctattactgcatgttgatgatatgatgatcattagcaaagacaagactgaaattcaagccattaaaaacaaacttaactctaaatttgaaatgaaggacttgggagttgtcaagaaaattctggggatagaagtcataagaagtaggtaagaagggaagatgacactaactcaaaggagctacattgagaaagtaatcaagaagttcaatttggattcatccaatgccactggtgtgccacttgcagggcattttaaattgtcaaatgaatattgtcctaaaatttaagcagggagagcaaacatgaaaggtgtaccctatgctatggctgttggatgcctaatgtatatcatggtcaatactaggccagatatagctcattctctgagtgtactaagcaggtgtatggcaaaccctgggttagaacactggaatgcagtgaagtggctgattaaatacttaaaaggtacaatcaagtatggtctgatttatca

SEQ ID NO: 240564 - DNA, 618 bp, Cannabis indica
attccataaactcctggtttttggtgaatctcatccagaagttggattgtcattctcttgcggagatgtcccatccatgctcaaaactttatccttcaatacttgtaacaccagagtatgccaaccgctttttctctccatatgttcccaaaaacttcaaatctcagtttaaattgggaacgaaagattctaagactgaagatcatccgattatttcaacccaaagagatacagtcaatcgttacaggcgatcctcacaagagatctccgagggtaagcatcattctttgcgaatggtggtctgatctgaattcgtcgttttttttattattgttgcttcattgattttttatttttatctctacaggaatgaatgtagattttgagagcatgttcgaaggtcctccccgtgccaacgagaaatccagggagaaggtaacccaagccgatgaagtttcaaattccacaagagaacccaaatggctcaagaacaaagcttacacgaggaaatctttgggccagccaatctctggtgttgataaatttcgtaaggctgggaatgaggtatcagttgcagggaatgaggtttctgctacaggaaataggatcttctgatgc

SEQ ID NO: 240565 - DNA, 1115 bp, Cannabis indica
tgtttatttcataatcgttttacaagttcatatttagggtgttaatcaacatacttgtgagtagatctaagatcatgttaaattaatttccaacagaaaagtaggtgggtatgactttcattaaagagcccacaaacaactcaaaaaagagtctccaaggggatgcaaaactgagttagttgatccctagtaagcaaatgagaattttaacctttcgataacataaatctatgtttaggcaagctaactgtattccacaccgcatatgtatgtaacattggttgttgaacaatggtactgttataaagtaaggaagctttaaatttacccttttagccagcaccaagaatttgagctttggggaagctttgtctcaaggcacagaacttcttccaatgccaactcgaatccaacttcataggagtttcccaaaagtcacattttttcagataagttgaatgaatccggcgaacccaaagcacatcatgtttttctaaaatggcccatatatactttgctatagtaactctgtttcatgtaggaccatcaagaaaaccaagaccaccatatttttttggaaggcaaactttttcccatgaaaggatatgaattttgcatctattgccttcaactccccaaagaaaacctcgacaaagcctttcaacttctttaataacactctgaggcaggatgaagatactcatccaaaagttttggagaccaagaagaacaaagtgaataagctgaactctccctgcaaacaaaagatgtttactagcccaagtatgaagtctaatcttgattttctttatgataaggccacaatcttctttcctccattttgtaggcctcatgggaaccctaaggtacttaaggggaaaagatccttcttccaaacagagagtatgaagcaacacattttttttcctctccaaaaacacctccaaagaacacttgtaatttttcaagattcgctttcagacttgaagaagcactaaaatcatcaaaaacagatttgataacttgggtagactgagcatctcctttacaaaagataataagatcatctgcaaaataaagagagattatctgaaggcttctacacatcaagtgat

SEQ ID NO: 240566 - DNA, 731 bp, Cannabis indica
gtcgagtaccttcaagcatttagatattcgcaaatcgtatttgccaagtcaatggagagtacctagccaaaggaggacgtttggccaaatatctttcttacacttgtgagtttttacaaaatttagacaacataattgttagtagaatacctcgtgcttacaattctcatgcagatgctttggcccaactggcctcaacaagagaagcagaattactcgacgtaattactatagatgttttgactcatccaactatcattcgagaatggatgatggaggttaatacagtcaaaaaggtcacctagatgaccccgataattgactacttgaaaacatgagcgtttcctggcaataaaattgaagccaaaaaactgagatatcgagccgctcggtatgtcatttatgctgacaaagtctatctcagatgttttagccagctattacttaagtgcatcgatgggagcgagtgcgattacatactctgagaagtacatggtggaatctgcagtaaccatgctggtggtaatttccttactctaaaaatcatgacacaaggatattactggccaacattgcaggcagatgcaactagctttgccaagagatgcgacaagtgtcagcgaatagcaacttatgtaactagacaactaggccaattgaattcaatcactagtccttggccatttgtggtttgcggcattgatttatttggtgaactgccaaaaggaaaa

SEQ ID NO: 240567 - DNA, 1377 bp, Cannabis indica
gggttcgttttcaccagaaaaatggaccacatatatacaatttaaagaaagatctcatgaaccttaaacaagaaaatcaaaccattagcatgtattttaccaagcttaaaaccatatgggaagaactaaccaattacaggccatcttgcacttcaatggatgtacatgtggtggagtcaagaggctccaagaccattaccacatggagtacatcatgtccttcttaatgggactctcggattccattctcaagttcgagggagcatcttgctcatggatcctttgcccgaagttaatagggtgtttcatcttgtaactcaagaagaacaccaaagaggtaccaacaattctctcaattctaatgtctctaaccaagctatggcttttgcttttcaaggtgacaaaaggggaaaccagaaagatgagaatcaaacatcaagatctcacccaccgaagaggaataggcccttttgcacacactgcaacatccatggacacacaatagaaaagtgctataaaatccatggctaccccctggttttaacaagcagaataaaccaaaagaagcaggcgcaaaccaggtgcaaactggaaaagaagaagaaaacagcaccacagattcgcataccttacttccccaattgtctagtgtccaataccagcagctgttgaacttacttgcttcacaacaaagtggtaacaatgtgaccgaacctggtacttcctctggaaattcaggtattatcttatctcatatatctatgcttcctttacgcaactcttggattattgataccggagcaacaagacatatatgctccaatatcaaattattccaaagtatatgtaaggttcctccaactaaactcattcttccaaacaataattttttgatggtaaatcaaagtggaactatcgatcttggtaataacataattcttgacaatgttttatatgctccaactttcaaatataatatcatatcggttagctaccttaccaagaatgctcccatttcgattcaattcaattctaacaatttcattatgcaggacagtgccagcaagatgatgattggaagagggagtgcagtcaatgacttatacattcttgatgttgcacatgaagcccctcaagtcctctctgttgctgcagaaacctggcactcacggctgggccatctctctcataaacgattagatttactcaaggatgttcttaattgtaacacttctggtttacacaagattgaaccttgttacatatgtcctattgctaaacaaaagaaacttcctttcaataataaagcaaagtttgctgataaaatttttgatcttatccattgcgatatttggggaccatatcacattgtttcac

SEQ ID NO: 240568 - DNA, 913 bp, Cannabis indica
atagttcttggggaaacaatcatatttatactatagttaatcatataatatatcatttggaaaatttttacaatgtaccatttaaaaagaatgcgctgatgcacccttatctgttttagtatctgaaataattttttagtcaaatcttttcttatagttatgtacgttatatttatttaagacatcttgcaaaattgtgagaaattcaaaaaaattaaatatgccaaatataaattcaaatattatactgtacgcgtgactattttatgtaaaatagagtaacatccaatcatataaaatcattcgattaacacacaaattaaactaaatatactcagaatattctaaaatgggcccagtgggtggtggagaaattcttacgtttatcacacactcacctcttttctctctcttgtccttagtttctcttacaaaattaaaaattttaatttaatttaaaataataaaaaaaaagaaaattttacaatactcttacttaaaaaagaatgtacttttattatcctaaataatttttaatcaaattattttaaggttatatcaaattttaaaaaattcataaaaatttaacataaagttaataattttaaaatatgattattttattttatacgaatgtaaaatacactatttaaaatattatttttatattataaattattttatattttttaaaattttacaaaatattttaaataactcatgaatttattatagaagtacacaataaaataacccaatattaattaattaatattaataaatgaaaaaattgaagtacactggtcactctttgtaaggtttggttttgccacatatattttgttatataattagcttagcttataaatcacagagtatctcattccccattttcactatcatctctctctct

SEQ ID NO: 240569 - DNA, 1348 bp, Cannabis indica
gagtcaatcttattcatatttctcagtatttttcatggcctctttcatatgagttttttcgtcccttttgtgttcttttttgtcattatttatatttacatagtggacaattgattacaaagttgaccgaaatatgtttattgcaattatccctaaagtcgtgggatttgattacatatcacgtagtgtaaatgcggtatacgatttaaaaatcgtatagatgtgattttcctgcttttactgtgtaaaaaatatcttgtactaaacacgtctttaattgttgtatatggagtctctcgacagaaacttgattattgcgatcccaatagcgagttggggccattcttccttccgaggtcgacgatgtatgtcttgtgtcgatcgcggttatttacaaagaattcttctgacttctagggttgtaaacctcgctccctttatctggatgaagctatgggaagtcttccaatagcgagatggtcacctctcttatttattctttgagttgatccgtcttttacacttagtttgttcattgcacgctaaggacattcacggttgatacatgtcgctttctctgctgcctcgctttttgcatttagcgatatatggcttctcactaatatactaagcgccagcttgtatattgattccttgcctacgacgttactgtcagcaggttacaaatatactctgtctcttatgtaattaatgagttattcaataagagcaatttcattgatttacatttccttcattctgacacgtgcccttcattgaggtggcagtcgaattttgggtataacaccaggtgatgtggattttgaaattatgcctcccaagacacatacatcaaagactcctcaggaccccaatatcacctttgcgactgagttgatagaatcgaaggtgcggtctatctcaggctacacgggcgagatgctaaagactttcggaatcaaacatgggaaatcatgccaggttagataagtacaagagggtgagttcagctgtcatccccctgcgcgttttgcaagcagtaactcagggacaagtggtgagactagtaccagtggtgagactagtatgggcgcctggagccttgagcacatcagtgcagcggccacctttcctctttgaaactatttcaaagatacataacaacattggagtttccccattccagatgactcacatctcctataggattctcgctagtttgaaagtctatcaaaatctgaactggggtgtcccacaccagtggagattgagtatctttactcagttaaggtcattctgtcaaggagaacgccgtaggggatttttcgtatatcgatactcatccttg

SEQ ID NO: 240570 - DNA, 796 bp, Cannabis indica
ctgaaggtgtttcaaaggatgataatactggaaaaatgggttctacttccaaagatgccaccattgatgatgccaagaagtctgaaaatttggaaactattgcagatgttaatcaaatttattttatttctacttttttgttttttggtgtattataggtttttatgttgttttaatattttcccactgttttttattgtcactctcaacaaccagaccctaatgttgatgatgcagctattgcatctattgttagtgctgtggaaaaatggtatgtttttcttgtaatttgttttgtgtgtttttgttttattttggtgttgttttagtagtgtttttcatttatgtttcttacaaataaaaaaaaaatcatttcttattttgtcagatggtttcctcaaatcttgttgtttctgtttctggttctgaagaggtttctgaaaagaataatcttgaaatggttatttttcaagagactcctctattacgtcctcagaagagggattagaagaaatgagcagttttgaagtctccatttatggagcttacttcttgtgcttccaaatcaggttcatgttctgtttcacttgatgagtctctttttaaggtggttaaatatattggtgatttgtgccctttggacgacaagattggtgaacatgttgatcaccaattggagtctgagtttgacatttggcttggtaaaagggcttagaaagcaaaaatcaaggtaagtctttttaggtgtttttaatggaatatttttttttgttcattttctttttgttttgttgtc

SEQ ID NO: 240571 - DNA, 973 bp, Cannabis indica
ttgtttgtatgtgtaggtaagggcaaagctaaggctgagcagcagtgagctcgagcggatggagattgtacatgtcggaacagttaggcctggagcgtacgatctttaggacaacaggctgtattttttatagtcgctatgcaataacttttgtatcaagtattttgaatcagtacttattaaaaaaaaagtattttgaatcagttacaaatattttaaactcgacattccaattatataaaggttatttatttttaaattaatattaattaagtaaactcatgatttaaaatacatattaattattctgaaaatcaatagaatagaagacatatctgattccactggatatgaatgagataatgggtatacggtctttcacaaattactattaagtattatacattataaaatccataccaaataagatatttattaagcttatttaattagatcacttatactacatactgaaatttttaattattttattttttttttcttcaaaaatactgtgtaggttttatactttatagtactgtgttaagttttcactgttattctacggttatttttagttgttccactattgttttaattgttctgttttattgttttacggttgatttataaaaaaaaaacagtattttgtaaaaaattatataacagtaaattataattttgccaaaatcaagtattttattaaaattccaataaattatcttaatttatacgtccacatattaaattatttaaaataacctcacagatttgagaaagaaattagacaagttcaataatttgtcctataaatataatatagtttatttagaggatttaattttgtggtttcatgagtatagtcggttctaaactttttttttatttattcaagcatttatatattacaatatgttttgtgactcgaatccaagacctccaacactcagacacccacctatagccacttgag

SEQ ID NO: 240572 - DNA, 1605 bp, Cannabis indica
attggggaaaggagtttgcagcattgataaaagcgtctcggttgtagaagctcttgccgggacagtccccagtggccttgttgattatcccattgaaaaaatcaggtgtgacaacagaagatacagaaccaccattgtttggagttggatttggattactgggagaaccactattacaaggaccagattggcagccttccccgcagtaagcatccccagaaccacagaatccaaatttgctgcagcaaaggtcagggctacagccacagttttgagccagggctcctctggctacaatagttccaatcagaatgaggcttactagtgttttggctacattagaagaagccatgatttcggggtagagaattgggtgtcaaggggtgtgtgtggttaatgtattagtatatgaaaggaagtgtgtgtatggtggtttgggagtgtaggaggtatttataatgatgtgttgtgaagcagaggtgtaagaagtcgtgttgtgtacggcattggacttttatttttgactacttacgctaacagactatatgtatcagtgctgattctcttctcttttttctttctcttttttctgtttaatgtagtaaaacatgttagatcaagagattgattgatacaactttcttaaaaaaaaaaaacgaaagattgatgcagctcaaaatatttggtttttattagaatgtgtatgttgctgagaactagattctcaccaatatgaagatttatctcaaagattttggttttgataaatgctggtccgttactataacaattttagatattatatcagaaaattctgccgcctataccaaatatatgcacccatgtatttatatctgttttgatatttatgggaaattttttaatttattttatatataatcttgtatattttataaaatttaaaaaaaaaattaacaagtcaaaaataatgtgtaatcaatctattacacatgtgaaataagatttctatattttatgtttgtttcttatttcactaaattttacattattaaataactacaatgtgcatggttcatcggtacactgcaaaagttcactattattttttgtttataattttttatataaatttatatgatatgagataggataaatattattttagaatttatattttattattataaaagtgacataatggtataatatttttggactattttacccctatttaaaacaatatttttaaatatgtctttttgctttttatttcttttcctatttttatattgactattttctttaaagataaaattatttacttttgttgtttctctttaatcattattggtgaagaaaaattacaaatttattctattatctactataacataacattatgttatgttttatgattactctatgttcattaagttttatattatttttaatggcaaaatagtgttataatcaatatgtattttctacttttttccgacttttgtttttaatttttttttttaagtaatatgtccattctaacttaataaaactaatttttttctaggtcaatttttctctatttgaccatttgtaagaaaaatacaaatttatcctattatc

SEQ ID NO: 240573 - DNA, 1459 bp, Cannabis indica
tagggttttacactgatattgaaatttccaacttttttattttttacagtaggaggaaatttgtttcaaaattactgtgtaagttttatactatgtactgtgttaagttttcactgttgttccacgattgttttttagctattccactgttgttttaattattttgttttgttgttttatggttattttataaaaagagaatatttttataaaaattccatgtaacaccaaaattataaacttttgccaaacatttaatattttgtaaaaaccccttataaatttcattacactttctttagaaggcccataaagtaatactaatcccgaacaatattcggctagcccaactcattatgttagggttctttatatttttaatccaagagagaccaacctcaatagaaagacagtaatgggaagcgacagtggtgattgaacgttgtactgtgaaaattacatgaaatatgaaattttttaaaaaagttacaacattatggcatttataggtttgttactcttctatgacattttttcacatttaagattttttatggtatttgatatgccatatttttgtaaacctattatccaaacccatatttcatttttttgtttctaacttaaatagttttattttttcttagtttattttacatttacattttaaggtttctttttatttgaaaactttacgccaaatactaactttttttttcaaacattacttttataatttgacaaaaatatttttactttaggtaagtgtataaaattacatgtataatttgacaaatataaacattaggtatttaagtgtataaaatctgaaacattaggtatttatgctgcaatttacccttttaatatttatctctatttttatattctttaagatataaccacttttatagatggtgttcccattataccccttagattaatgtaaattatatgttaaacttaagtagagggtggggatacattaggcaactcactcactaaagtaggtacattttaataaaatataatataagagtattttggattaatggatatttcttaatttattcccaaaaataccatataaattagggttttacactggatattgaaatttccaacttttttttttattgtaggacaaaatttttttcaaaattactgtgtaagttttatactatgtactgtgttaagttttcactgttgttccacgattgttttttagttattccactgttgttttaattgttttgttttgttgttttatggttattttataaaaagacaatatttttatagaaaattccatgtaacaataaaattataaacttttgccaaacattaaatattttggaaaaaccccttataaattccactacactttcttagaacacccacaaagtaataataatcctgaacaatattcggctagtccaactcattatgttagggttct

SEQ ID NO: 240574 - DNA, 837 bp, Cannabis indica
tgcgagtttattacaacctttaatttttctcgagtagaagtgggaggacattatcatagattttgtgattaagttacctagaaccacaggtttgtatggttcgatctaggtaatattggattgtttcactaagtcagcgtacttcctaccagtgaaaacaacttatacagtggatcaatatacaagattatatgtgaaggatatagatcatcttcatgaggctctgaaatccattgtattagatagaaatcctaaattcactttcaagtttttggagagtctttagaaaaccatgggtacaaagctgaaagttcagtaaaacttttcacccttagatagatggtcatttcgagagaaaaattcagatattggaggatatgttacgggcctatgtaatggattttgagggttcatggagtaaatatttatcgttgatagatttctcttacaaaatcacttgtcaaactacagtagcgatgacttcctatgagatgttgtatgacagagagtgtcattctccgattcactgggatgaaaccgggaaaagtaagtatttactgttgatagatttctcttacaaaaacacttgtaaaactacaatagggatgactttctattagatattgtatgacagagagtgtcgttctccgattcattggacgaggctcgcaagccaactgcacccaatgcagcaccaagtgcactcttgcacataatctcttcgcaatgtactcactattggccctccggccctactgcacacccaaaacttcatgcaaaaggtccctctgacccactgcatacgtgctcttctgagcttctttcatgtggttaatg

SEQ ID NO: 240575 - DNA, 1433 bp, Cannabis indica
gatttattcacttttactgggtccatgctgacgtggatttagaaacactgcaaagtgtatctcgctggggcatcttgctgggaacttgaatagcaaaaataatcctcacagcgagctggaacttttcccttgtcttttcaagattgataatgtaaatctccatttctgcgattgatgacataatgctccctctgataatcgcagttcttggtgacaaggtgaacttcaatagtcaatatcatttgaatgtcagcttctatctgagagagctaactcgacggagcagtgaatctcattgaaagatgtctggagctgattagtgaaggtaccatgagtatgccttcctatagagagatggatgcctcgctattcgccacttaggttcttccagttgcgatacttagttagtacaatgtatattacacactaagtgttctaacaaccaacatgtctcgtcatcacctttttatacgtagcgaggttggtgcctcgctttgtattactgatgtcatccttatgattgtgtcttctgacgcgaaaagatttctcgtcaatgcatgatttaatagtttgtacatccttacctcgcttaagactttacactcaacgagttacagatatactctttcaacttcgcatttaatgagttattccattttaatatcctttaatataattgctataatatttgttgatttgtattctccaaggttgacgcgtgtcatcctctgaagtgctagccgaatttcaggtataacaattgccccttaaaaggttcttttgaatgaaaagtgctttttaaatgattacagagggtatttttgttataatccattttgaaaaaatgcatgtcctctaattttggcagttttgtggtttcgaagcacatcagcatttaataaccatcttttccactttcttttttaaattttacctgttggatcaattgtctccttaatctgacggagatcaacccaagagtataaaacaaaaaaaggaactaccttttcattacctttgccatttcaaaaactctgaaattttttcgagtttctctgcaaaaaaccatacttagattgttttgaaaccttgcatgccatctttgtctttagcattctttttgcgagtttcattcgatttactttttgacctcaagcattcagagggatcatcacaccgttcgttgttccgtcgatcgcaagaccattcattgctccaaaaaccaatttcaaacagtacgtgattcctctttctctgttttcttacatgcttttaatttcacaattctgggtttgatgaatagtttcttagttaacacctctatctccttttctagttttagcaattttagggttgaattgtatctggataaattttagggtttaggcagaacgtaggtttttgggtttctcaaatttaccaacttctggttt

SEQ ID NO: 240576 - DNA, 1157 bp, Cannabis indica
tttcagatgagcgacttatcggacagctagatgctcgactccagaggtaatgctttcgatggcgaccaagatcaggaggatagcttcatctcgacctcaatctcagaaatggagactccaattgctgagctgcggaaccaggcccattgtcttccacgaataaagaaaggatggttcaggagctcgctgagctggggacaatcgagatctgtgatagcgagtctacggtgtcagcttgtgaacaccttgttcattctaggcacgctcctgatgtcgaaactgaggagatgggcaagaactgggagattcctgactgtgagtcagatgaggaaggagatgccgaaggaagcgggactgattcaatggacaacacgcaactgaatgagcctttctcctgcgaggacttggtttcaagagttaccaaattcgacttgaccaccttttcaagattaaatttattgcgactcggtaccatgtgtcctcaccctacccaaagaccgcaccttccttttactaaccccgcaatgataccctcagaggacgttgtagtctccattcctattctttgatgtggagtattgattcctttccatccattcatctccgctattctcaagcgataggatgtgtccccttttaaattgactctaaacaattatcgcatagccttagggtttcatgcgatgtacatggagtacgtgcatagggaaccttcaatggaggactttagctaattttacaatataaagaacgtgggccttcacaacgatttctattgcttcagcaagtgggccacttctaaaatcaacgtggtggaaggcatggtctcaaatataggagattggaaatctaagtggttttacatgtttaaagtaccaggaatcaagattgattttaatcgtcgacctagtacgtcagacactttaacacttagttaattttcatgttaccttgtggtatggtcaaacacgctcttccttattttttgtagatagatcggctcgacccgtactggacccgactcgcagagaagccgctgaaattcttggaagcctccctgttcaagatcgcgattgacgactactatgcatgaccttgaagttgcgggaacacaagttaattccagagaacgtcagccttcatcgggagccagtgta

SEQ ID NO: 240577 - DNA, 978 bp, Cannabis indica
ttcttatgactaaattaataataagatataattagataatttaatttaaaaaatttataattttaaattattattttaatacgtcaaaataattattacttttaagttaatttatataaatgatttttttctttttattaaagtatttttattatttaaatctgccgcacgaaaagcggcaaagttatctagtttaataaaaaaaaaacaaataatatatatatgtcatatatataactatatacacatgtcactgcatcaattaagatccatatacacacgtgttcgactttgtgaggaggagacaaacctaaatcatgcactatactatatttatgtatcatgatatggagtcataaataagagaaagaggcttaccctgtatggccaattgactatgcaatgatacaaagaaaaagtcttacttgttgtatgctgacgactgttgtatatattgatatattttacaaactgcaaaataattaggcagagttacacttcatgttccaattatataattcgaatgaaaaattaaatttgaattataaatatgttagatattatcttaaattataagtgagccacttaaatttaaatttgagataatatctaataaaagataaatttttattccttaaattttggaataaataattaaaatatcagtcaaataatctttttgtttataaaagataataaaaagatttcaaagttcaaatttatcacaaaaagtggtaaaattctaaatccatacaaaatgacacaaaattctaaatgagctcactaaaattaatcttggaatattaaagaggtcattcacctcacaaaattttaaagaggtcattcacctcataaaaatctcaaaaatagtaattttacctaaaaaattaaatagtacactaaacttcaaagccataacaaattaaatggcattccaaaaaaaaaagaggtcattcacctcataaaaaattaaaactt

SEQ ID NO: 240578 - DNA, 870 bp, Cannabis indica
acagtgcgacaagagagacaatgttgagacaacaccaaatattgagtaactgttgacattccaaggttgatagatttaaaaagtatctctagtcaagggaaatcattcaaggagtcttttatattttaaatttgaaaggaaaagataatcatcttttctcttctcattttatacttagaattttgaattccactattcaaaagggaatggggatttgaaatcatactcgcactaggaatgcttgaagaatagaaatgattgtccaagattgccaacagtgatgcccacttggtagtttcaagagaaacgagtgtcaatgtttacaccaaaagtatccttgattacatggatgtcaatgtttgaaatgtgacaagaaagaaaacatcccgaagttgagtagtcctgaatcatagcaagtcaacctgtgatgggtccctagccttgtgcctaggttgactttggaaactccggaatgggtgtttagatcccaccaagttgttttcaacaaaccacattttagtattctataccttgaagacatgaagcatccaaattcaggtctcgagagctaaaaatacacgaattagcacctcaaaaattaacttggacacctagagtttcacccaatgcctaagttgacaaccccaactaggattttaatttttgagaccgtcttagtgcaaatgggttaaactttgccttgtgacataaactagacataccacgaacatgtttgaggaatctaaattggatttggattgttgtttttatggtactaaattaggtacacaatagaaggatttcttattatctgattattattgtaccatagcccaaaggatctccaaatgtgtgtacattaaatcaata

SEQ ID NO: 240579 - DNA, 1792 bp, Cannabis indica
tttggtggaagattgagcaagaaacaaaaaattttgtgctgaactggtgcaaactggctagccggttttaccagacctttctagccggttttggcagggtccccaaatgcttcattttctcaatttttgtccatttcagtgccgtggttgggtgtttccctaatttcagagtttaagtaacctctaaggggtataatagaacctaggattgtgggttcgggtttcccaggataagggttttgagcatgtgacttacccagtttcatattttgattagggcatccatctagctcgagacctttcgttcaggtcagccagcacacttgaattcagaaagaaggtaagaactgtatataatgtgtgataacaatatctgattgtatgtatatgcatgcttaaagtgttagttgcactatcaacacttgtacatttaaggtatatagtgcattggtatagtgaatgttatctgagagtacagtgataccaacataagtacggagaagtactgagtgtgtgtggtacatcacttagtggtactcagggtatgaaaaaaaccttaccaacactcgtatagtgaggtacgtagtgtatgtggtatagaggctacaccctagtatagaacgttcttactcatctgttgagccttgtaaataggtgtatgggcgcctaaatacaagtcggaaattgtatgatatgctatatgctttttttactgagtctgttgactcatagttctgcttccatgtgtaggtaaaggaaaggtgaaagctgaacatgagtgaatctgagctggatgaggttgtacatgtcgaggcagcgcgagctggagtgtttgttctcgggacatatggggttgtattttgtagtcgttgtgcgacctgaataatatgtattttggaatattatgttttaaaagtttgtaaacgggatcccggtacttgtaaatagttttgtatattataaagtttattaattaatataaaagttttaatttgacacgtttttaaagaaaactctttgattagcaaagacaacactgtaattgaaaaagctgttgcgtgccttagcattagggcgttacaattttggtatcagagccaccaagtttgtctaccgaagcttgctaagacatgtacaatcttcatcggagaaagctcgattcacgattcagtaagcccgtacttgtttagtattttaaatgattattaaagcatgctaggaagcatattagattttaattatttattttaagtgggttgccttgaagtcctaaagagcggtattaagttttatgatcgctatctaacctgcctggcttataagttcgcaggctaagtcctataaaatggacgcccagcgaaatacaagaagtcagggtaacatggttgagaccggaggcggtcaaggaaaccaaaatccccggaatccccgtggtcgcagccgtggccgtggtagagctcaggatggtcgccctgtaaatccaccacaagctcctctggattggtagcagaggtttgcaaaaatgcaagatcgaatccaccagtaggatgatgaaattcagaggttgaggcagtagggtcctcctgccgtgcctcctcagcaagttgctcaggccgttgcagttccaacggtgccaacagaacaacctgttgctggtaactgtatggagccgttgtatgagagctttcgcaaggaagcacctccagtgtttctgggaggtcccgatgtgatgaaggctgagtagtggctcacagtgattgaacgattttaaagtttatgggagtggttggta

SEQ ID NO: 240580 - DNA, 792 bp, Cannabis indica
atatatatttttttaaaaataatttttcaatatatattttaattattttatatgtatatttaattttttgcagtatatattttttatataagtttaattatcatatattttacatctaaaaataatcatgttcggtaacacctaaacatattcaaggaaaataaaactttacataaattagtttaacactgaattggcattacacttaatagcgtgaaaatggttagatatagtaggttggtgcatattttgtgtgtacatataattattctaattattactaaaaagttatatattttcttaacatggtatttaaattttaataacaaattataatttaaatattattttttatttataatcgtccagactaaaattatttatagcaaaattgatattaattttatagaagttttattatatctataaacacaaatttttaagtaatttgacatcatgaaaaataaagtaatttgacatgaaaaataacttttacgtatttgtaaattcttatacatgtttacaaataatattactgaaaaaaaatagtctattatatttgaaattaattacttttaatataaattaaaatatatatataatgtttccttattacaaaagataattatcattaacactttatgtttcacaccataaaacaaaatgatattatgagcgtgatattcatcgaaatattttagtattagaattatattactaaaattattaaaaataaattttagaattaagattaaaaatgttggtctaaaatcagactcaaaatatcattat

SEQ ID NO: 240581 - DNA, 670 bp, Cannabis indica
tctggataccatgctggatcattaacagaagatgcagaagcaagcatggcttgcatcggagacgatttgtcattttgaccagcaccaaggcctggaaactccagattaaaccgttgatagcatttggaggaaacatgaccagccctgccacacaattgacagacaggtttgttgccaaattgagtgggagagggacctctgggattggtggaagacattggagaaccttggccctgactgttgggtgagaaatttcgagatcctgtagcatagggattccaataaggagctcttgcagatggaggagcagatcctctaggttgattagtatttccttgattcgattgatcagaaaaagaagaacgattcttgaaggcacttctgttatgagcaagattagctgagggagctgaatcaagatcttgactgtgtttctcgattctatgttcttgagctagcagaagtgattcaatctcggcaactgtatattcatcatgacgagagttgatggagatgatgaagatatcataatcttgtggtaatccattaaagatggcagatatatgttcttttgcagaaagagactgtccaacagatccaagacgatcgacgagagttttgactccaagaagataatcgttgatcgatttggaccctttcttgaagtttc

SEQ ID NO: 240582 - DNA, 590 bp, Cannabis indica
tatgcaacgtaagctacaagatcatccccaaatgccttgccaatagaatgaaagatagcttaaaggaagtcatatctgaaaatcaaagtgcattcattcgggactgcctcattcaagataatgcaatattgggatttgaaagtcttcattgtatgaagaaaagaaggttcggcaatgggaaaaagatagctctcaagttagacatgtccaaagcatatgacagagtgagttggagtttccttgaagcaatgatgatttgtttgggctatgacaaacggtgggtggacaaggtcatgaactgcatcacttcactttcattttcagtactcatcaatggagaaattagtggtcaaatttagccaagccgcggccttcgtcaggaagaccccctatcgccttacatgtttcttatttgctcggaaggcctctcttgccttatccaagaggctgaaagagcggataggattcatggtatcatgtttggtaaacacaaaatcaagttatctcaccttttcttcgcagatgacagcttcatattcatagaaggcagcactgctgtgttgggttttatgccctaaataaaactcttt

SEQ ID NO: 240583 - DNA, 943 bp, Cannabis indica
cttgttttctatttgttttaggtttaaatagtaaaattcataatgtgaattgaaaataagaagaaacgtgttaaatgagatgaatatgatgaattatcatagaatttggagttttaggatataaataatgaaatattctatgttttggaggctcaacacgctccatttgtgattgaaaatcaagtctgaagctttaatctaattttcaactatgatgtgttcattttgaggaaaaatattgtgtataaaagttctaaatatctctttcaatttttcaaatgatcttgaatcatccaatttcaagcaatattgaaagagttatggccaaaatatttagtcattgcaccaggaagctcgctgctaaaaatcgagttttaagcgcctcgacactacaaggtagtgtctcagtctgtctcttttaaactacgagaaaattagggtttttctttgtttagctatataaaggaccccttttcaacacttttcaccaggcaattaaggagtacaaaaattggaggcagaaagaggctctggagactattatcgatattttttcaacgagttcttttcttatactctttttctttgttcttagttaattgttatcagatgttttcaattatgatgagtagctagacttttttatttagggtgttaatagagattgtttgacattttattctgattttaatgtgatttaatttttctttcaattttttatgtgcatctatttaatttatgcttaatttccttacttacctgaccatcaattaattatttatgatattaatacgaaatctaagaagtgagtattgattattgctatagtgaaatagatacagatttgttacgaacattatgatcactacgcaagtatacgcaatcaagtagtaaactcacacaggtgaggtcgaaccacaggaaattggactaattactacta

SEQ ID NO: 240584 - DNA, 691 bp, Cannabis indica
ataataataataataatctgatgcatataacatcttttattatcattacattatatattattattattttattgttgttgatggatggttgcattaaatatgatttgatttgtcttttatgtattttatgtaggcatgggatgagttggcgcgaagaagaggagaagctcatgcatgaggctaataggtggctggcaaatggtaaagcgccatgtggcgtacgtatggagaaaggagagagctgatggaataagaaatggaggcagcgagccaatggcacgctgccatgtggtcgcacggctggagaggagaagcgctaaacagggcgctagctggattgcgtggacgaatcgggagggaccatgtggcgctgacgtggactcctactgggctgaaggcaaattgggccttaagctcttttgggttgcttctttcttttctttttgggcagcctcatttttcctcaattcttctttcaattttgctactttcatatctctttttcttttcttcaacaacactttaattcctacaaaataaaaataaattaaattcaaataaaatattttcaatataaaaatgtatttcattattttcgtgaaaatattaatttaaacttaatttattttaaactttaagatcaagaaatgtgcatttttcaccaataatcacatattcgaaccttgagtga

SEQ ID NO: 240585 - DNA, 1042 bp, Cannabis indica
accgatgtgatactgtcaaataacacgaaagccaacatacatatctaatgtaatctaacaggcttactaacatgtacgctaaacatgtaaatacatatgcatactgttatactaatcttacctcgatttcgaattcaggtgtgttggtcaacctaatggaacaatctgcccggcgaattacaggctcctaaatcacatcaatcacaacactggtaagcgatactctaaatcacttcccgtggacttaaacttgaaattaaaagtttccctatcgatgaataacatggcaataccctaaataacacaaaaatggaaaaaactggggttcccacatttgccccaactagtagaccgattccccaactgaaatttcggttctgggaggaaatcctggaagccaaccagaattccgcttcctacaagcctctctgaaccggaattccggttcagtgcaggaaacaccaaaaaatccatatctcaaccaaatcaactccaaaccaattcaaactttccagacccgctaattagacaccaatgaacatttctaaagcaacaaaataaagcttcatacacaaatacaaaaaccaccattgatgagccaagcttgagttcaaaaactcaaagcttgctcatcaaactaattagcccttaaaacctacttaaatcactttaaataaacataatataactacagaaaacataatctaatcacagcagcaagaacagcaagctaaacaacctttcaccattaaaaccaaagtttgagtttaaaacaccaaacttgaataaaatcaactaacagccactaaaacctgttctaatccattcatctgaacataattaagcctaagaaaacaacaataaacatatacaccaaccacaacatcaaaaccataaacatgcaaaatttcacttccttaaacttcaagaaaatacaaaagaggtacaagagctataccttggcttggatttacactatgagctgctggaaaacacagaattgaggaagcaaaatcaaaagccctagctgctctaagggtgg

SEQ ID NO: 240586 - DNA, 1235 bp, Cannabis indica
ccatgaagagatcattgaaaaaaagagaaaattttggcgttctaacacaattcatcacaagagtgataaactgatcagggaagagcaatcccttaagaacctcttcaagaaagtcccattcaatagtatcataagccttttgcaaatcaagcttgatcatgcaattagccttcttggatttcctttcatagtgcttaaccaggtcttgacagatcatgatgttgtgtgctatgaatcttcctttgacaaaacccccttgattctgagccacaatatcaggaagtatatgttttagtctcgagcaaatgatcttcgtggcagctttatagaccacattgcagcatgcaatcggcctaaaatctcctggtgtgttcggacatctgacttttgggataagtgtgagggctgtgcaattgatttcttttaagagctttccagtgtggagaaaggatttaacagccttgcaaacatcctctccaactaaattccagttatcctgaaagaagtagctagaatatccatctggcccgggtgctttagctcctggaatatcaaaaatggcttgtttgatctcagcatcagttatttcttgtaataatatctccctgtgttgaattgttacccgtggaccatctctaagtacattagaaatggttttccttctgttggtcattttggtgccaaggagttgttgaaaaaatctgaggaactcttgtgtgatgctatctaaatcttctattcggtttccctgagaatcctcaatagaaagtattctattttgaactctccttgatttaatgctagcatgaaaaatggttgtgttatcatctccatctctagtccaagccaccttagctttctgcagtaggaaagattggtaatcattatgtgctttggagaactcattcctggcagctttctcctctacctgcagcaacacattcatcggatctgacattaatttgtgttgatgttcctccagcaataactttgttcttgtgactgctgcttgcaaatctgagtaccctgcttgattaatctgtttgaagaccggtttcaaagctttaagtttagtcatgagctgatacatagcagtcccttggtaattagcctcccaaactgccttcactttgctgtcaaaatcagggtgagattgccacattttaaaataccgaaaaggttttttcccattatgtagcagagtatgaaatataacaatggccggagcatgatcg

SEQ ID NO: 240587 - DNA, 1545 bp, Cannabis indica
atcctatgaatgattagttatttagaattttttacttattgaactatgatatatgtattattgtgcctcttaacttttcagcctcatataaatagttcctgaactatttacaatattataaattagtcattctgtcaagttttattacacatggcaaataaaatgatgatatgactgcttagtcaattactacatgagcactacatgtataaatttaacattaaaaaattaggtatttttaaaacaccattaaactaaaacttaactaatgattaagaaaagtccgtaaaactaaattacaaaaaattatttttttttcaaactaaatacacacatggtattgacatgacactgacgtagaaactggctaagcagccatatcattattttgtttgtcatgtgtgataaaacttgacagaaggactaatttacaacactgtgaacagttgttgaagctaaaaagtgaccaacaccagttcattagattggcaagatgaataataaatctaagtaaaaaatttagagagacaatctatagtagttcatttcccatgtaacgatggtaatggagttacgactactttagatatttatttctcacgagatggtaattactataaaaagggtaagtgtttaagctctggtttctaaaaaaaaagaaactacagagagatgctctgaccttgtgggtagttttctgaatgtgaaaaatgatttaagggagctcttcttttataggtgaaggaggcccacaaaaataagaagaaaataataaaaaaaatataaattgaatatttctaaccgtagataatgatctaatggtgaaaaacaacttctgaaggtgatagtcatgttttggagcttggcgagattcgctccgggtaacccaaagcttatttttataactcccttgagggtgaaatttgagaatgataacattagaattgtgattgacatcgataacttactgaaggcagtacatgacccagcgctcaagttgacaaccagtgcccaggttgacatatgacgttaacttggacactgaataagtggaaaattgtccaggagatgtactttataatgcctaagttatattttgacctcacttagtctgtttctatgttctggcgaaattgaccaccagttcttggagatgttgttttgcaaaaataagagactcgaaactattcatttccaagtgagcttcccatactaagttgtgaacttgacttctctgatttcatggatcttagttattgtaaaaaactagacggatgatcgaaatggaatcaaaattggacaagtagaacccaacacaccatgccatttgtcaacctgggggctgggtacccaatttccgagctctcgggttgtcgttttgatactttcaatgttcttaaacttgagacgaggtctcctaccttatatttgaccattccagattcaatggtcaaatctaatttggcatttgaatgatcaaaaccagcacaccaggttgattgtcaacctaggcgctggccctagcactaagtcaacctgggcgtt

SEQ ID NO: 240588 - DNA, 1250 bp, Cannabis indica
tccacggccagccatggttcctcaagttggaacttgcagatgagaaccaaaaccaggtggaggatgattggccgagtaagaacccgatgcacccctgaacacaccagattgagatgaagaattagaggaaggataataaggagaagagaatgtacatctaccacctgtaaaaggttttgtgagagccaaattggcttctggtttattgatatcaagatcctttgaatctttatccaatctaacttcttgagccatgagtaatgcctcaatttcagcaactgtataggtgtccagtctagtattgacagaggtaacaaacacgttatactcactagaaagaccattaaagatcgcttatatgtgatcttgagcagacattggatgtccaatagaggcaagaagatcaacagtgctcttgattttcagcaagaaatcattgagtgagcccttcattttgaaatttctgagttgtgttttgtatttaccaacatttgctctgttcaaagccgtgtagtaggtactgagagtctcccaaatttgtgcagctgagtcacatccaacaatgcgagtgagtgttttctctgacatcgatgaaagcaaccaagaaacaaggatactatcttgctgatcccagatttcatactcaagggaatgtcgattgaggatccgatccttattggtgaggaattttggaggagcacttgtatgatcaagatgatgctgaagtcggcttccttttatggcagcaaacacttgatggcgccaggggaggtaattgtgctcatccaatcgaacagatagagaatgagagaaagtaacaggtgcggatctaggcagattggaaccagaagtctgagacgaacctccattgacagccatgaacgaaggcttgagcttgaagacgacagacgaaagcaaaaaaccagaaaaggaaagagagaaagaattagctctggtaccatgtaaacaatagagaaatagaatgaaagaaatgaattgtgtatgttgtattgaataacagaaagttagttgtataaaccaactaactcttcctttcttgacaaagttgtctacagtaaaacctgaatatctctctgaataatgatctgattctagcgatcttggtaccgttgaaaagataatttgattttataaatgtttttatgaagtaaactattctaccaattatttattattctaagtctaaattatgtttattctgtagtccgaaatccatttgcttcaggatt

SEQ ID NO: 240589 - DNA, 1423 bp, Cannabis indica
cattttttttgcggtgcgggcggtttgagcggtttgagcggtttgatgtacacccctagtaaatacacatacaaattacaaagcattatttattttgaataaatcatacaattttattaatagcaatcacttaaaataatagtccgcaatctaatcggaacatcctatattggaaacacaaccagaattagaattagaaaaataagtcaaataatcagccccctaattcccagatcatttgacaaaaaactaaaaaaaaaatagattaaaaagattgcagcatcatagttgactttaagaacacctatattcagtttcatctaccatttagaagataaaacagtagaaactgttgtagtaggttcattcaatctcgtagctttaacactcaattattgtacaaggtaacttcactactaacaaccccttcagccgcatagaacttgttatttccaactgtagaagataatgaatcgaattgtctatatattttatagaatagtacatatttatatactaagttaggagactaaatgggaaactactagatacaaataggaaactactaaaatacaagttaccctaatttcttgacaactaatatgcctcaagctggagcatagatgttaatcatgcccagcttgttacaaagatagttaatcaatctcaatgtgcttagtttgctcgtggaacacgggatttgaggcaatatgaagagcaacttgattatcacaccacaattttgctggaatagaagtcttaaatccgaattcagtcaaaagttgataaatccatattacctcgtacacattgtgccatagccctatattctaatttagcactggatctagacacaatattttgtttcttactattccaaaagagcagattgcccccaacaaatacacaatatcctgaagtggatcgtctgtctaccttggagcctgcccaatctgcatcagagaaacactcaaaccgagtatgtccatgatccttgcaaacaatacctcatcctggtgctcctttcaaacaacataaaatttgctctagtgccgcccaatgatgaattgttggagaagacataaactgactaatgacactaactgggaatgcaatatctggacgagtcacagttagataattcaactttccaaccaatttgcgatatttctcaggatcttcaaatggttccccgtcacgtgtaagatgcacagctggattcattggagcattacaagattttgctcctagttttcctgtctcggttaacaaatcaagtacatgcttcctttaagacagaaaaatacattgtttactccgagtaacttcaatacccaagaaatacttaagctcccctaaatattttgtgtgaaactaggtatgaatgaaagacttaagggatgagatgccttcagtatcattt

SEQ ID NO: 240590 - DNA, 1686 bp, Cannabis indica
ttggcgatgtgtattgcagattggttgtcgtaatatatgaaggcatgagtactttgttcgatttgaaaatcctttaacagatattgtagccatgtgatctcattgcttgttgcagccaaggctctatactctgcttcggcagagcttttggagatggttggttgctttttggttcgccaagagatgaggcagtcactaaggaatatgcagtagccggttgtggatcttctagtggttggacaagaggcccaatccgagtctgaaaagcctcggagatgtagggaagaattggtggagtagaggattccttggcctggttgtcctttgaggtatcgaaggagatgattgatggcttgcatatggggtgtccttgggcaggacatgaattgacttagttggtgaactgtgaaggttatatctggtctggacaagctgagatacagtaggcgtccaatgagttgtcggtagtgagaaggattttcaagaggggtgccttgttgatcatctaatttgattttgggatccatgggagttttggatggtttgcttcccatgtatccggtgtcctctaaaagttgcagggtatattttcgttgagaaaggaatagtccctctttagcccgagctatttcgaatcccaagaaatattttagcttgccgagggctttaagcttgaattatgcatgaagagaggcctgtagttggtgcagcaaggtaaggttggggccggtaattatgatatcgtccacatacacaagaagggcaatgaaggtgctgttggagcctttggtgaacaaggtgtagtcagcttgggactgagtaaatccttcaagaatgagagcatcaatgagctttttataccactgtcgggaggattgcttgaggccgtagatcgacttgtggagcttgcatacgagaccagtttctgcagacaatgaagaaggaagagtaaggcctggtggtatagtcatgtatacctcctcaaggagatcgccgttgaggaaggcgttgtttatatcaagttgaagtgtgtgccattgcttaatggcagatatggccaataataatttgaaagtaaccatcttggctacgggggagaaggtttcaaaaaaattgagtccttcttgttgtgtgtatccttgagcaacaaggcgggctttgtgtctttcaacggatccatcactattgagtttaattttataaacccaacgacatccaatggcgtgtttgtttggagggagtttgacaatagtccaggtcttattgttgagaagagctaataattcggtcgccattgcttgattccaaactttgtgtagcacggcttgtttgtagtgttgaggttcgaagtgagcttgcactgcacaaataaaagccttattagcagcagataaattagtatatgtcatgaatttatgaaggggataaggtgtggaggattgatcctgaattatggagtgacattcgtaatcacgaaggtatgttggcggtttatggattctgctagaccgccttagaggattttgattgccattatcatttgtgttactgttatcttcaatagcaggtttgtccatttgttcagttggtatatttgtgggcacctccggatgtggtaactcagtaggtacaccagttggttcatgtatgtgagctgctggtgtatcataagtggaattgtcattt

SEQ ID NO: 240591 - DNA, 956 bp, Cannabis indica
attgctcataaattaggtgatttaaaggcaattgtcgaaaattatgaagaaaagcggtttggattccttataatacctaacatcaaaccagaacaaaaaattaggaaatctaaaaggtagaatcaactacattcccctatgtaatcataattaagtatactcaatttctatttaaattaaattcaattaaaaaaatgttcgaaactcttttacatatttacatattattttttttcagtttaaaccaaaaaaaaagtaataatattacaaaaatactttcagttggccaaataaacaaatatagaacccaaataaaaaaaattaacacaaatacaacatacacacaccttcaactcaggatccatgcttcctgggcaactatcgtgcaaccatcgcgcaactacgcaacaacctaacataaccgaaacgaaaattcaatcagaaagagaatcaccattaattccggcgacttcacctgagaagacgaccagaatcaatcaaaacatgggctgctttgaattcataaaaaaggtgtagaaaaactactatgaaactaaaagtcaactgaaaatccagtttaatttgcataaaactaatgtccttttaatttttagatccatgaaaggcagatctcaaaaagttgaactggaaatcccaaacaatccaactcaagtataatccaaaaaaaattacattaataccatagtaaaatgtttatattattgtaattttgttttccaaatttctaatggtaaatttattaatattaaatcattaagagacatgtagatagagttacgtgcgtggaaacactgttatgatttttaatgtttcacaacagttgctttatagttgcctaagcattttgctaacagttatttcttctgattgaaacctttatttgatgcaaccttcagccaaccacccagttgttggaatttattttaccaggatct

SEQ ID NO: 240592 - DNA, 951 bp, Cannabis indica
gactaagacctagacccagaccctgaccgggatgcggacccaaatcaaaactcaaattgggactcgagacataaacccgaacccaaacatggacttggacctagacccggacccaacacccggatcgggattggagactcagacctagaccaaggatccaaacctaaattggggactcaaactcaaaataccagaatcgggacctaagaatggaactgggacccatgacccgaccctagtctcggtcccacacccagacccggacacagaccaggacccaagatccgaattggaactagagtgggacccaagattaggatcctgatatttaccctcgactcggggcttggacccaacccgtagtcggcatctagatcttggaatcataccaacactcgaacttggaacaatttccaagccaagacccaaacccgaacttggaatcaagaccctgaaccaaacacggacccggacccagactgggatcgatactcagtcccagacccgaacctcgacccaaacttgcgacaggacttgcgacctagaacccggaccccaagacccacgatccgggacctggaccagaacctagacccgtgctagaacccagactcagacccagacccagacccagacaaagacccggacccaaacacggactgaaacccagatgcagacccggacccagaacaagactcgtaccataactcttactcgaactcgtgacttggacctggaccgagatcaggagtgggacccaaacctagactaggaacgagacctaaacctggacttggactagcacctagactaggatcgggacccgggacccgatacttggacttgggacttgagaatcgaactttgactagacctagacaaggccaagacccgagacaaggaccagtactgaagacggaccgggacctgcactcggactgggaccctaac

SEQ ID NO: 240593 - DNA, 1660 bp, Cannabis indica
tcagcaagaggagaaagaggcaacagaacaatatgctatgactcataaaacatatatctccttcttacaacagaaatccaaagtttcttggataaaagagggagatcaaaattcagcattctttcatagctgcctaagagaaagaagaaggcaaaacaagattctgtcaatagaagatggagatggacaaaggattgaagacccagctgccatcacggaagccttcttgaagtattaccaaggtctgcttggatcgaaaatgcaagatagactaccagtgaacaaaaaggtgttgagacgaggagctgtaattactaagactcatgaagacatactaaattcagattgcacaaaagcggaaatcaagaagattgtattcaacatcccaacaaacaaagccccgggtcctgatggatatagtagctccttcttacaagaaaattgggaattagtggaagaagatgtgtatctagctgtcaaagaaatcttgcaaacgggtcacctcctcaaagagctgaattcaacggtgctcaccctagttccaaagaccaaatgcccgaatgctgtaagtgactttaggcctatagcttgttgtaatgtcctttataaaattgttaccaagcttctctgtaataggttgaaagttatattaccggatttgattgctcagaatcaaggtgggtttgtaaaaggaagatttatagctcataacattatgatctgccaagacctcatcagacactatggaaggaaatctgtaaagcctaattgcatgattaaactcgatctccaaaaagcctatgataccttagattgggatttcttagaggaaattcttattgcctttaagtttcctactaaggtcatcaatttaatcatgcagtgtgtctctacagccagattctcattgtattttaatggtgtcttacatggcttctttggtactaaaagaggagtgagacagggtgatcccatgtcgccccttctctttgttcttggcatggaatatctgagcagaatcatgaagaaagtgggaaataaggcagagtttggattccatgaaagatgcaaagaattaaagctcaatcatctatgttttgcggatgatgtccttctcttttgtaaaggagatttgcaaagcatcagactaatgcttcaaggattgagactcttttcaagatcttcaggtctcttgcctaataatagaagtctgcttctattgtgcggggatgcctgaaacagagatccaaagggtggttcagatttctggttttactagaagctcagttccttttaagtatcttgggattccaatttgctcaaaaagaatctctcaggctgaatgcaatatcctggtagacaaaatgacggctcgcatcaaaatatggagcactagacacatctcatttgcaggtagggctgtcctcatcaactctgtcttgctaaccattcacacatactggagtcagatcctagtcttaccaaagaaagtggttgctgaaattgaaagaatatgcaggggttttctatggaaaggctctaacaatatgttaggagctggagccgtagcctggaataaggtatgcctctctaaagttgaaggtggaataggtttcttaaatatcaatacttggaataaggctggtttaatgaagaacat

SEQ ID NO: 240594 - DNA, 746 bp, Cannabis indica
ccttacgagaaacattgtcacttcgggtggtgatgccagataccacagaatcaaactcaggtctgagaccattgagaagatgcagaacaagatcaagatcagaaataggatggccagcaatggcaagagaatcacacaaaactttgatcttatcaacataatcagagatcgattgattacctttctgtatgttcgacaattgactcttgagttgcaacaaccgagccttcgattgactggagaacttctgttcaaaagcagtccaaacagcattgaaactggtgtagctagccacagtacctaggatgccttttgtcatggaggatcggagccaagaaagaagaagtcgatctttcttgcgccattgttgatacgccgagtttggagtaccattgaggagaagcatgggacaggttggtgagaagaatttcatcaagctcatgcccaatgacagtaggaagaacttgcgatttccaagctagaaaatgtgtgcgatcaagcttgatcgtgagagaagaagttaaagaatgagagaagggattccaagatgatgtcgcttgagcttgaggagcaacattgggatcagaaattccagctggagacgagttgtcgccagaagaagccattgacaccggtccttggctctgataccatgaaaacttaagatgcagagagaaacaaaggaacagaaatgttcaaagcttaggcaacaacattacctctaaaggaggcttttctctttattt

SEQ ID NO: 240595 - DNA, 645 bp, Cannabis indica
tgtagaggacaggtacaaattaactgtgaagatagcagcatcaactcaatttgtacagaaagaggggcagtgatgcttggaaggaagatctccaacatgaaagcgtagcttctcatacatttttcaaccttaataattctatttctgaccaatattttacagttagaaagtagagctagttgcagtgtaatgatgaactgctttttctaagtaacttaaaattcatggatctttttggtgcaattttttccaataaaaatttgttctctcctttcatgtctataaaagtatctctaatagtagcattttggagaatgcttgacaaaatagaaagtttaagtagcaaaatatagagatgttaaattatgggagataaaagaatattattcttgaaatttgaattgatgccacacaataacattgatgctatgtttttttttaaaaaaaaataaaaaaattaaagttgcaatatatatataatagtttaataaagaaaaagatatttatgtatatattaatgtgtgagattataattataatatttttaaaaggtgttatattattggagtgtttttagatgtaaaggtgctaaaaataatgtggaagaaagataaaataaaatatatttttagatgatgtagagat

SEQ ID NO: 240596 - DNA, 1188 bp, Cannabis indica
gttttcggtggaggaaaacaggatctctttcactatttttatcttttttcttttttcttatccaaaacccaccagccacctccattgtcatcttcttcctaaaccctaaaagctctcaccacctctgcagttatcttctgtaagtataatcaacttaaatggattaaagcttgaatctttttgtttaggttgttctgtttatgagtaattgttttgtggagtttattgtttttgtgatataaatgaaatgggatatgaaatttgagtgaatttaattgaaaccttatctgggtttttgttattttgttgttttattggattaaaatttcagtctttttgtttagtttcttctgtttgtgaataattgttttgtggggtttattgtttttgtgatagaaagaaatgaaatggcatatgaaatttgagtaactactgaaaccttatctaggtttttcttattttgttgttttttctttattgggtttattggttttggggatagaaatgaaatgcttacattttggattgaattttgtggaaaggttcgttttttggtttgatttttgttttagtttatgggtattttttcggtgtgtgtgtgtgaagacattgatctcataaagctcgaacaccatcagctataaccacaagttcactcagctcaacattcatgtgtggttccactttgattgtgataattccctttgaccctaattgcacatcataaacccctgctgcctttgtaaacattgttatatttgctctgttatgattacctgataacccattgctaaccttcgcaatatatatcaaagcaactgattgttctccaatcattttcttatatataatattgaatagcaaccaaacaattgattgattgatttcacatttttgttttggttgttctgagaaataaattggcctgagatggggtttaaactacatctatgtggaggaaaaagcttttatcgatgtataaaatactcccatgaggattaggtctgttggtcaggactatcagtgggagaggtctaatctaccatgagatatgtggtttaatttctcggcctagagtttcctgtctggcaaaagattcagttagatggctctgtgtgagcgttttgattgtgaattagaccctattttgattttcccttctcacaaaaataaaaaatgaattcgatt

SEQ ID NO: 240597 - DNA, 770 bp, Cannabis indica
aaacagaaaattaaaatgcaggaaattaattaaaatgcagaaaattaaaatttttaaatctctccccccaaactaaatattacattgtccccaatgtatacaatgaaatgcagagagaagagacttacctgagaccctttcagaaagggttgggtggcggcggctgatcatatggataaaaccgaggaggtggcgccaagtaattcgggtcatcaatcccgatgttcattctgttgatgagagagttgagttggtgaacttgtccctcatcatgtatactcctctgcaccatatagttttgcatgtggttgttctgctgaattatataactcagctgggcatgagtatattgcatcgccggatcgataggcccaagcagttgtgggggctgttcctcctcttcttcgacactaggctctctttgccgccttcggccttgtggtgcatcaggtggaggctggccataaggatgtggctcttttagcctgttgacaaaggtgatgtccatctttcgtagtggcaccacagtgttatcatactccagttgtggcacatcatatgccccgtagagttcagttatcacacccgccaaaccaagaccaccacccgtggctccttgtacaatttgctcaatgctgtttctgatgacttgtccaatattaatgtttgtaccccttcataatggcgtagacatatttgaggcgatccatttgggcatctaaaaagtgtttactcggcaccaaccgagcactcacaaagtacagccatgt

SEQ ID NO: 240598 - DNA, 855 bp, Cannabis indica
ttcatcatcatcatcatcgatagaaccatcgtcaacaggaactgttagtagactttgagggacatcaattgatgttggtggatgataagtttgttgcacatctaacacccccaaatccacaaatagtgaaaaatttgatgaatttgtttcatgtaccatatcgatatcatcatcacttatgtcatcggtggcatcagcaattttgtcccaaagttggcgatgattaacatcttggacaaccctccaattatgacctctaaccaaatcattcacaaagaaaacttgtttcgcttgattggccaaaatgtacggctcatctttgtaccattgactactcacatttatactagtgatgttattttcagtgattattttctttcttcttggatctgtgttgaaccatttgcacttaaataatacaaccgaataagcaccactaaaagacaaatgcaaaatttctaaaagttcaccgtaatagtcaaaaccttctgtccccttaacagacacaccactattttgagttaagcgttttttatctctttcgagtgtaacaaatcgaatcccattcactatacacgctggataagagtaaaccacaatatcagacccagatgctagagctagaagttcatcaccatgctctaaagacccgagacgattcagttcatatatctacatatagtaaaatattgtaacataaatttgagaataaaccaaaatattctaacggatatcttcaaagtccacatgtgcaaggcaatataccttcttatgaaaccaatagggaaattctttctcatgtaaaagattgtggttagaaactccatctctctgtcgaatctcattaaagtgttc

SEQ ID NO: 240599 - DNA, 1900 bp, Cannabis indica
gtatgaacagtaaacttttgtaaatgattttgtaatcgggatcctgagtcttttgtataaatattttataagtttaattaaaaagcaaaaattttaatcaatcacgttttccataaacctcgttgattagcaacgaactgcacagcatgtttaaaaatcacgtaatacgctgggacaacaggtgtatgagccctagtatgtacaatctgaaaacacaaaataatatactatttaataactctacacaaaaactcctacgaagtttcttcttcttcaagaggaacactagaaaagtagattttctgcccattgtatatgaatctatatgaacatttattggccgatgatcctaataaagtggactcgcggactaacgattgttaacgccataaccacgtaaaaatctcacatttgttatttattttgtttatttctttcttaagctttaaatatatttggtttttgaaaagctcggtaaacaatttggtgctttgattgagagcgaaagaaagatagaaacatgcacggtggtcaccatcgccaatctgtaaaatggagagcccgtgtaaggaaagaagtggaaaggtcgcctgtctgctcgctgtggacaagtttggggtcacaagcctattggccaagggtgtcgtcagaggttgagatcttcacctttttcctgacaaagaaagtaaagaagatagatgcacatggtttagaagtgctcgtagtactcacgcatgttagtagaagctaaaatctggccagccaactctctgaggaaatggctaaccatcgacatcatcaagcctgggtgcaccgctgttcattaaggcataactacgcataaacaacgagatgcaagggatgttttggctaggtggagaagttaagactagtcgtgttgatgatgaacaacttataaaaggctttcacataagtccagctcacaaccccgaccccttaacctcttgtctcggtgccagtgctgatgctagtgcgtgattagtcgtcgacgactacttccactgtcttttcactgagccaaaaagttgatgagaagctagcattgtaggatcccatggtggaggctactgggggtctttctataatgtcatcaccgcctgctaagtttttgggttggtctagttatggtatcgtgggtggaaggtgcattgtcaaggctaatcacttttggcaaaggttgctgacaaggaattctgtcattacgatgtaactataactccggaggttataacgatgaaagtaagtcgagacattataaaccagtcaggaagtcttctagagtaacacttaccctatgtctgagcctttgccttaagaattactaagcggcttccaatcccccaggggaacagactgcaaaggagatcctagggcgcactaagttgcacacgttacctgaggcttcccagagcccatgtcgcatgtgcacattgttttttgtgcatgaaagatcactgggctacgacacatcttcaaccctccttcccgaagagaaggacttcttgaagtctgtcacacgcccagtgatgggctctttttcctatattctttcagatggcactgctacgtctgcccactgcagagcaggcctgactcccgtgagtaggtccgctggctttttgtacggctttttacttttatgatccggcatgataacaactcgaactccacttctattctttcaagagaaggccgagaatgcctctgagatacccatggagatttgggcatcatccagtagcgttgatgcctttgccgtagcacacgctgcttagcaacaggcggttggggtaaagtgttaaaagatttccttttttcttctctttttattttacccctggtcatggtatttagcttttttttgtttatctttgcttat

SEQ ID NO: 240600 - DNA, 1002 bp, Cannabis indica
ccaccaaacattttttctgtttcagaaagttgaaaagctcccttgctaattcaacatcacttgagttctttatgtgaattttttgttcatctgtaggagaagtgagagaaaagtgaattcctttgaagacattgcttgtattacattgctgagatattgaggcccaagcataacaatcaaagtgagtcctgacttgagaatgctgataaacctttcttgcaagagtagtcttccccaaaccacccatcccgcatatcgaaaccaccttatgcttatgagaattctcttcttcagtcaaaagggcaaccaactcttcaatgtccttatcgaatccaacaacaacattgtcttcaacaaaagaataagcttgcctcaactgtctttgctgttggacatagctgcttgaagaagcttcatctgctttttgtattgatctgtgtactccaagtgcttctaattgtgaagtccaagtatcaatgttggatgagatcctctcaatctctgatccaactttgtggacatcaataatgcgaacacacccttttaatgcacgtttgatagttccatgactagaagacactttgaggacataagtctcaataacatcttccaaggcataagaattttctctgatctggacaaccaaaaggcgaactctctcattaccatttgttacccaagcatcagcatcttttaagaaagcactcatacattgaagcttgatctgtgcattccccacttgggcttcaactccacccaagaattgagcttcagaaagcaccaagtctccaagcctttcaatcacaagtgaaacaacagcatctgccattcgatgatttttctcagtaagtgaactgaattgaattgaattgtatgatatgatatgatctaagaacataacagatgactcatttaagcatttctatcccaagtggtgttgttggtattcaaaattggctgctgattttgttctatactctgattttttttttttttttcttt

SEQ ID NO: 240601 - DNA, 717 bp, Cannabis indica
aatagtgatcaattaatatggatttatttaacattattgacagaagtcaaattataccaaaaaaagaaggcatatatgtacaactttaattaattattattcaagagtaattaatatgataattttctttaattttgtgtcgtgatttgtaaaaattattaattgaactttttattttgttaaatgataaattaaatcttatatattttttgaaattgtacaaaatataatacatgagctgatttttttttataaaaatataaaacttaataataactctatctagatgtgttataaaaaaattggttcgtgctaaaaattatcttcaagttaaatatattaaaaaaattgttaaaaattgagtttacgctactattttagaaaatataaaccctaatttattattaaacaacaaaaaatatttacgattaattgaaaattgtattaattattatgattaattcagtgtcggcacatcttataaactttcacaatataattaaacaatacatattaatctctctcataatgtgttttctatataattattgtatggacacaaagtgttaaactatgcaatcaaatcaatcataaatattgtgatcttgtgattgattttatacgtggacgttattattattattattatcagttaaaccctgttttacttgcagttattaatcctcgagacttataaaattttagcggtaaaatttt

SEQ ID NO: 240602 - DNA, 1003 bp, Cannabis indica
atggcccactaaatttcagagtcagccctggatgtgaatgtgaactgaaatttgtatgccttaatagatttttgggttgtttaggttgtaagctctttggatttttttgctcttttggaacaccttgaactcctaagatggctaattttattctttattttggtgaaggcttcacctgacattggttgtcactgcaatagtatgttgttggatgatgtaagttattacccttttctttatttatttgagtttctttcattattttgagtatgcattttagtagctaccactttgttgtttaacaataatgaccaccaagctcagaagatgataatgtacattatatctctaacttttacactttgtaacaagtaactctcaatctaaaattttagtggcaatacttctcaaactctattttcgtttgcaaatctaatcgaaaatcacacgtagatgatccaactcggcaaataacacagagggttttcaactgaaccttaaattggcaaaatagaagtggagttcaggaagtattgccaccaaaattttaagttggggcttagccctccataacaaatctagaccaaatctaagtggtaaaccttgattagatagatgcctactattgcattgtttgttattttaactcacaacaaatcctctcatttcttcacacatttttttcccgatctagattttactaagtacttggatttctcttcttttttggatcagaggggcactctagacgactcataaaatagacaatgacttagtgaaggaggagatgaaaccactcatcgttccaattctgagtgaaagagagtaaagtgtagacatgacaagagtatgtacgatcgctatgtttcgagctccatgaggagtagtgtatacttttgaaatagtatcatattcatatatttagcagtgcatttttattgtcctttaagttgttcattcattctttagaacatgttagttttgtagttcatttaattgatca

SEQ ID NO: 240603 - DNA, 1092 bp, Cannabis indica
ttattttcaatgatcttttatgtgaaaatttaatgttattcatcttcgattagactaatttgaaacctttctttatttagatttaaatttacctaatcttttttccctattattgtagcttacttttaataatttactaggttacttttattaatttatgaaggttcctcaatatatgatttcccaaacaaagtgatttggaacaaaagtacaacctttcaataatctctctgtagtttctgacttgaacactactttcactaataaacaaaaggagttatttaaagcaacaccgtttggacattttttacaatttccaaaggatcttaaacttcaagctcagttagtacatcacatcatgttgagagaggtctattcgatgtctgaagatgttgatttttggtttaagataaatgggactatggtaaggttctcgatagaggaattttccttgattactggactgaaatgtcatggtaacgatgatgaatctatctttgttgagaaggatgagagttgaagaaagtactttttaaggaaagtaagggtttgataacaaacaaaagaagttaggaatgctttcattcagaagagagcaaaaggggatgtgaatatggtcaaacttggtttggtccattttcttgctaattttttgtttggtactgttcctgaaaccaaagtgagcaatttcttttggaatattgttgattcagatgatgccacttttcaacaattcccatatggtaaacttttatgggaaaaatctcgtcattcaatgagattaagtctcatgaaaaaagaagagatatttgagaagatgtttgatgaggaaacaggaaaagttcaaccatattcctacaagctatttggttttccatatgcatttttgatatggatatttgagactattcctgctctttctccaactttttgtgagaaagtttgtgatgatgctcaaaggattttatgctggaaatgtacatgcaaactgagttattccacattaaataagaaaatttttaccagaagaaaggtaaatttcttaatttatttattgtatatttaattgtggttattgaaatgtagattaac

SEQ ID NO: 240604 - DNA, 1562 bp, Cannabis indica
aaataatctatttaatttgacaaaaaaagataaaaataaaatgagatgaaaaaaattagagcaaaaatacgttaagaatatcaattgtaattaaatagataactaattttgaaaattgctaaactatttttaagacgacacctcttgtttaaatatttaaagcatttctaatgaattactaaaatattaatgcagtactaaattcgcaacacactaagttatttcaaatttacgtacacaaaaaatatcaactacttaaaaatggtttatcataattatttaacaaataatgaatgtatctttatagtaataacatatttctacgtaattatttttttttaggttattcaagtagatagtacaacctactgatttgaccgtatatggattgatgggaaaatattagtaaaatgtttattattttaaaatacaaaaaaggtcctcctcatttatttaaaatcgttctttagggttttctttgaaaaccacaaacaatatcagctgcattgttcaaaaagtttattgggaacacaaggtattttgaggtgtttttcatttccaagggtatacatagcagaagttgactaaaggtacagtacaatttgagctcgtttggaatgccgtattagatcgtattgtattgtattgtattatattgaattggattatacattatatttttatataatactatgtcaaactttaagttatactaaaatattatatatttaggtatccataaaagttaatgtcacatatagttttacataaaaatattgcataaaatacaattcaatataatacaatacaatacaatacgacctaatacggcgttccaaacgagccctttgtgttctattgggtatgtctttcgaaatataatcttaaattttatttggaatagaactatgttaaccgaatatgtgccattgagtttcactatttccaataagttaccaacaacaattgtaatgtcaaattttattaaataattccctaatataataagtggatgtcaaatcataataattaattcaatactgtaatgaaaaaaaattttccaacaatgtcaaatcaatagattttattgattatactttcaaggatttgttatttactttaactgttcaaattattattttattataaaaacgttcttggctgagttttaaatatatatatatgtcacatcatatgtactgtaggagtttttattaacaaaagacaaaaaataaacaatggtaatttaagtttcattgatattaacccagtcaaaatgtatatttatttttccaaagaaccgattgcagggtaactcgtaaattaggccttccctatttcaacacattaaatactgacactaacgtacttcaatgtttatacagtgtacttcccatcaaactttcggtcacgagtcacctcattactgcatacttggatattatgagattttattttaaattaaaacattattttctttcatattgacttcaaaggtttgtgttataataatatccctaaatttgtattttttatgtttttaaagaaggtagtacatccta

SEQ ID NO: 240605 - DNA, 741 bp, Cannabis indica
tggtttggtttgatcatttaatttggtctaattttgaatttttaaaaaactgtaatagtggtttggtttgaaaaaattaaaaaactgaaccaaatcaatccgtaaacatccctaatgtcataagttctagaattataatttaggtattattaccgctaaaaattaaacttaagtatttatttacaaccgcgagttaaacttacatatttatgctacaaattattctttttttttaaagaaaacttaataatatgggataaatcatcatagataaaaatgaataccataaacaacttaaaaaaacttgtatataattttacttctatataatgataaccagttttttaatgaagaagttgttgatgaaaaagtcaatttcttaatgaaaaaccaaggaaccagttacttttttgtaatcaaaaatagtttcttaatgaaaaaacagttataaataccaaaactcatataagatttgtgtattatgaaactggtttctatatctccaattgaagcggaatctgtttgatcctttagggttttagtggtggaaatctcatatctagagtctgtttgagccatcgaccgtcggatgtgtgggtctctgaacgctgaatgtgtcgctggtgaatagaggtcagtagacagactcttgaggggtgaggcatgtagggtacttgaatggaggagaaaaaataactttgacattttttttttgaaataatttatctaaacatcaaatat

SEQ ID NO: 240606 - DNA, 781 bp, Cannabis indica
gcttggctaagggagccgctgtgtgtgcaaattgtgaaagatagttgggaggcgaattcgaatttgtttatttcggacaagatttttcagtgtgggtagcagttacaagattgggggaaagagtatacggggaattttaaaaaagaattagcaaatgtaagaaggaagtaagcagatggaggttgggaagggatgaaaattcagttaacaaatttgctgaggcaaaaaaacttctttctgaagcctatgcccaatgggaagtattttggcgccaacgatccaaacaactatggcatcaagatggggaccaaaatagtaagtattttcatacgtttgctacttctcggcgtcgcaataacttgattactcagttgcaagatgataatggccaattggttgaatggggctcgggtttggaagatgtaatggtgaactatttgaaagatttatttgctactgctgctagtgattggacagcagtaacatctaatgttcagcctcgagtttcttatgagcagaatatagatctggttaaggaggtttcggaggaggaggttaagaaagctatgtttcagatgcatccagataagtccccggggcctgatggaatgaccccaggattttttcaaagatgttggcatattgttggtagtgatgtggttcggctggtacaggagttttttgctactgggtcttttccgacaagcttaaatgccactaatgtggtattgattcctaagaagaagaacccgaggtcaatgggtgatttgcgacctatttc

SEQ ID NO: 240607 - DNA, 662 bp, Cannabis indica
gaaaaatcagcatgattattaagaatgtgaagaagaccctgagtgagatcatgaccaatagtgtcccaatttttctggtagaaaaaagagttaaggccatctgggcctggggatttgtctccagagaggctaaacatggctgttttaacctcctcggcagtgaaaggttcagcaagaaaagcagattgagctggggaaagagacttggtgaccccctgaaggatggaagagatggcagatggggaggttccttgagaggtaaaaagatcagtgtaaaaggaaagaaattgggcacaaatggtttgagagtcatgaatgagagaaccatcaggaagagtgagagcccgaatgtaattgttgcgtttacgattagaggctttttggtggaaaaaacgggtattcttgtctccagcccgaagccaggcaatccttgatctttgtttccagtatatttcatcttttaggagaagtcgattaagctcagattggagatgagatatctgttggttatgaaggtgagttgattgattgttatttaacagccggtcaagatcagcttgagttcgagaaatttggtatttaagggagggttgtgaagattgccaggccttaatagtagagaggcaagaagattgtttgttgaggaaatgctgaagagggag

SEQ ID NO: 240608 - DNA, 854 bp, Cannabis indica
aagtcttgttctttttcagagcataaacctcttctcccattgcaccattccaaccagaatgtgccaaagcttcagcaagagacttgggtaatttgtgagtgtcgactgttgcagtttttcccatgtaaactttaggtttgaaaattccatccttggctcttgttaccatgggatgagtggatgtcaaaggagcagcaggtggttgagtattttggtctgtagcttgctgatttgtaggctcctgatcttggctttgtgtttcagagttttcactctgtatttcaatgttctcaatggcataattactgtcatgatcatgagaaacaacctgttgagagtcaatattatctgaaagtgcctcattggaattaagatcaggatctctatcggtttgggaagatgtattgtgatgtgttggtgactgagattgcctagttgctggaacatttaaagacacagaccacgaaggaagatgaacatttactggtttttccaagtgaaaattgttgagaaaaccatgcttaaatgggaattcagtctcattgaagattacatttcttgaaatgtagactcttccagtggtgcttaaacacttgtatcccttgaaatgttcactataccctaagtttagtagagtgatactgaaatttatgtgattgatagggtctaaggcacgggtaacaagcaacaccaaaggtcttgaggtgtttgtagtcaggttttctagtaaacaaaatttcagtgggtgagatgttgcctaaaactggtgtaggcagtctgttaatgaggtatacagcagtaagaaatgcatcacaccaaaacttaagtggcatacttgcttgagcaagaagagt

SEQ ID NO: 240609 - DNA, 934 bp, Cannabis indica
tgtcttatgtaattattcattttctaaagttatacaaataggactctgaactgattttttgtcaaaataaaatttaataataatctgttctagatatgttataacaaaactggttacattttttgtatctgttcatgttagaaattttcataaagttggttatattaaaaaataaaattttgaaaattgagcccaggatcttatttctactactttagaaaatataaggtctattttgccatttaacaaaatagaaggtctaatcggtaacttttacaaaatacaaggtccaaaatgctatttatccttaaattaataatgctattttaattttttaaaaaataaatttattattccaaattaaaaccaaatcaacgtattcaattaaaaaaaaaaaacaagttagatttttttgagatgttctaatgttcctaaaatacaaccttgttacaagaaataaaatcttataacagaagcaacataataataataataataataataaagaaaattatctcatatactattttaatttttttttccaatttatgatttgggtaattgggttgctccagtagtttttatgtgggttgctatacggatttttattgcaatttaagttgttctgttagttgctataggagtttttgtgtggaatttcataaaaatacaaaaaaaaaaaaactattttaattataaaaatgaaaaaatctctaataataattcaaattgaaaagatgtattaaaaaatctttatgtacacgcatataagttgggaaatttacatcatatattgaattttcccattttattacattaatactactaggcggtaatatttttatttttactgtgtatattgtttgagtttatattgttgtataaatttttgatagtgacataagttgtcacttttaatgtatttcaatttttt

SEQ ID NO: 240610 - DNA, 1246 bp, Cannabis indica
catttttttttagacaaatttaaagaaataattgtttattcttttaaagaatcatttttctttattattttttttcaattcatttttattttcatgaactgcctaaaattaaaatgaattgttattttttttaaaaaaaaaaatcatgaattggttattatttttcagattacatctggaattaagatcttttgttaaaagatgatattttatagtgtattaaactaatctaattatgacacatcaatttatttaaatatatattttaaaaaaattgtctacattgttaatagagtttaagaaaagtagttagttaagtagtaatacttagattgatttaatatattatgagactaatttctaacaggtgatcttaattctcttttattagatactaagtgcatctctaatagtggtacttgaagaaaatgtttgatgatatggcggaatgtttggaagaagttaattatgtgtgatcatgatattaaatttgaagagtgtttaccattaaagcaagagtgtagaaaataatgtaaaagataaataaaataaaatattattttttaaatgatgtgaagacttttgacatttttgaaaagtaatataattggaaatgctgtaaatgctaatgtgaaacaaccactatagtgtatcaccttaatgattaacaatatttgtaataagttattatattaaataatgtaccacataatatttaattgtatttgtatcactgggaatgtgatacctcaagtaatactaggcatcactattgcattgacaccttaaataattttaggcatcactattatttttttttagtgtttgagaggtcaccactcaccaagaagagctgcactgttttgttgattgttcaacaaaaaaacttaagagcattgacacatgtaacttacgtagtgaatttttttttacgtggtgaacagaatcactcataaattaacgatgtaggaatttacaattggcagtgaaactactcaaactaggatagctcatcgtctaaccgaatgacatgttttgccaaaccatgaactggagaattcttattgtaagccacatgggacaaaattgcccataaaaatttagacaataaagttataacatcctcaaacaacaaccctaactcattaaaaaaatactcttcctttgttgatagttgtctccagagaaagcgaatatgaataaacctctttaattggaatgagcccaattgagtcctaccaaaaga

SEQ ID NO: 240611 - DNA, 821 bp, Cannabis indica
ctatctcatggatgccctcctaccaccattggggccataattcaacacagaaacctaagaattcaagaaatctctgatgacttcgaaccccaagctaatgtgttgaagacttggttccctccccctcctggttgggtggtatgcaatacagacgtctccattggcaagtcacagacagtaggggctgcagtgtttagagatgaatccgggactgtcattaattgcttcaccttcaggctgacggttagtgagccactcattggagagacaatgaccctttgcaaaggagcagaagaagcagccaagaaaggatttaggaaggtaatcttccaaaatgactgtgctaatgcaatctctgccctgaaaaccaaattgcaggaaatcagctcgctgaatttcaatatccaggagctggtgcttgagttcatcggtatttcgagcagcttcaatctttgggaagcttcttggatacccagaaatctcaatggtgtggcccattcggtggcgaaatgggcaaatcaaaacaattacttcggctggtttgatttgccccttgaggatggtcctctacgctctgttctaacagagattggatgaccttaatcttctcgttttgttattctgtgtgttggactggtatcttgtacttttagtttagtgtcctgttagttgtttattttatctgccttagtttgctgttttctgttcgtgtttcctgttaggccattaggcctggtttgtttgttgcgttccttggcgcttccagggtctcattaatcaaaaaaaaaaaaaaaatactcaacaaaactattacattgatc

SEQ ID NO: 240612 - DNA, 1737 bp, Cannabis indica
ggagtaggcctctttgatgaaattgttgttccatagtttttccacctcttccttcaatgccttggccctttctttgtcgagtagccttcttttttgttgaactggcttgaagttttcgacgtcgatgtttaaagcatgacttatcacggtggggcttattccctccatgtcttcgtgtgaccaagcgaagacatcttggttttcccttaagaactggatcaaagcggatcttatgtcctcaggaaggtttttcccgatcttgattaatttggatggttgtttggggtctaatggcatttcttctaattcttcaatcggaccaacccctgtatcaatgtccccaaaacggggatcaatgtcttcgaccccgttttgggcgagtcttcattgttgagaactacttgccgtagctttgagggatttggctgctttctccctggttgcgatggataggttgtaacactctcgtgctactatttgattgcccttcaagtagccaattccacccttggtaggaaacttgacgaggaggtgaaagatagaagtgactgctttcaggtcatacagggttgggcggccgattaaggcgttgtagggagatattgtatccaataccacgaataatgccatgatagtgacactcttgggggctgttcccactgtcaatggtaacttaataagtccagccggtgccataccacttcctgtgaatccatagatgagatgttcgcagggctctaaatcctttgctcccaaacccatcctttccaatgaggacttgaagaggatattggctgatgacccattatcaatcattgtccttgccacaatcatattggcgatttgtacctctactaccaaggggtcgttgtgtggatatcgaacgtgtttggtgtcctcttcagagaacgtgattaactcatgttcataacgaggttgcttgggagctcgctcttggacagccaacacatcgttacccagttcatgtcgcagagaccgagcgtacttctctcgggactttccggagttccccgcaaggtgaggtcctccagatataatgtccaaacggcccgcaacggggggaggtaacaattgttggtcatctccaactgcttgttgttgttgtcgttggggccggtcattgtcccgtcgtacatatcttttcaagttggggttgttttgtcttatgagaaactctatttcctccttcagattattgcactcatcggtgtcatgaccgtagtcattgtggaatcgacaaaacttgttcatgtcgcgtttgctaatgtcctttctcatgggataaggtttgcggtacggtaccaccgagtgagttgcattgtagatattttctcttgtgtccaggagcaggctataggtggtgaaccttgggattggatctcgcctggctggctcgggggtattctttagtctcttgttatcattgttgttaccgccattactgttattccctctcttaccattgttggagccattcctagcgttacccccttgagagctttgactatttgagcttgttccgttttttttattcttagtgtggttgaagttttgagcgtttcgctcggcttcttccaatttaataaactcatctgctctgtcaagaaagtctctcatagtatgggttggtttccgccttgtatctttccatagccgacttcccacaaggatgccccccatgatggcggcccgcttgccatcatcgcttagattttt

SEQ ID NO: 240613 - DNA, 1156 bp, Cannabis indica
agagaacacagatcaaagaacaaccaagatgaagaatagcaggaagacaacaacctgctctgataccataacagctcgaatgagcttgaacaagagaaaagtaaaacagagagaacagagagaaattgaacaattgtattgaatcaatcaagttatgtacaaacaccaatgctttgctacttatactaagcaacaaggaaacaaaataatgcatcaaaaataacagaatatacagctggactaccaactaaactaactgattcccaactaactcaaaactcatataactgtcacaatagttcttgaaatctactattcatataataaatatcagccaacataatggttttcaatgttaaaaaaacacttataacaccaatccctatgacgaactgataaatgaaaataactttcgtgaatgttggggaaagaaaataaattcatacttggtggcctgtttgggggctctggcgaaatgcgaaaagtttgatggttatgaagaatttcacaaatttcagctggttgcaaccaacgatgttgtgcctcagataataattgttgaatgtctgcatataaagaatcaagaaatctcattaatagagagaacgatgacaaaagaggcctcagtatcaggaaagccgccaagaaggaaccaccactaaacgtttgtcttttcttacaaccgtgatagttcatttttattaattagcattgagtagcaaaatgttacatatccttataaaatatgatagttctaaattctattagaaacaaatttcacaaatactttattgtactcaaactactcttagccttttcatttcatcaacaacgggaaagaacttagctttctcccaaaaacctcaattcacattaacgttagttaatatgatctaaaaaagattaacacacactctattttaaggatgggcattatgtgtaaatgttgagatagtaatagatttcaatcatagtagtccagtgaccaacaaaacagacttcaatatagcacacttatttttccttgaccaatagccattgttctccaatattcaatcatagcctcaccctttttgttttctctctcttcctcctacttggagaacttcctgttacctaccatttatgccaaaaaaaaaaaactcacaaaagccta

SEQ ID NO: 240614 - DNA, 753 bp, Cannabis indica
aaaagagtttgcattatgttgacggaaagaaatgaaaatttgatgtgcttctttgtattgtgcccgtaaagcattttcttcctgtataaggctctacgactttttctgtaattcttcttgacactcaagaagcttttgtttaaatcgattatcattggcctggacatcccctaattcaatttttttttcatctaatcattatttacaacaaccacttgattcatcttcctcccttatcaaaataataataataataaaaaatctctaatttcaaaaattagggtttcagtcttttccaacctgacatcatgtaaaatttacacttcgatgcaatcacctacatttttatcacaaacccatttctctaatccaccagctacagttagatttctctttagtttttagtgagttgcttgctattttcctactattatgcttatttgtgaaaaaaaaaacaataatctcaattaatattgataatctactttggtaattttttttacaatctctagattgatgaatatgatttcaacgagaagcaaaaatagttagctaatatttaattttatacttgatcttacattttaaactatttttcatttaatttttaaataacttgaactaattttggactgacacgttgatttggcacttaatggtattaaaaataagattgggtgtaaaattaatactaattcgatgtcatgcttactatttattattaattaaagttacgtgtataataattttaaa

SEQ ID NO: 240615 - DNA, 725 bp, Cannabis indica
taattcgcagacccagaaaactatagttcaagagctttctcatatttggacatgtgatatagaatggcaggtactcacaattttgtttttaccgagttgaaagataaaagaagagctgaagagttttcttccaatgtgaaaatttcttgagacaatgattgatctcatacaatatcaatatcaacatcaactccccttaaaactacaaaaaggttgggtactgacagcatttataagcttcattgactgaagataatatgtatgtatccaaaatataaagaaaaagaacgcaaaatcaaataaacatattataattttcttaattgaaaaaattagttaagagagaaagcaaattaccgtataaattggtatcaaaagtggattggaaagcagaaagaggaacttcagctacgggaccaacgcactgaaccccgacattgttgaccaacacatcgatctgaccgaacctctccagcacagttgaaagagcgtgctgcacactctcttcggatcgcacgtcaagctcctgtagaaagaaccttgaatcgtgttccagatccgacatggacctcaccgacctgctcttcgcaaccacagtacaaccctccgtgttacgtgcagtctatgatggcacgttacaagctaagtgatgcacacaagttggccaagtgttggtcaagtggtggcgcatgatgtggtgcatgcaggtggcatgctgatgctta

SEQ ID NO: 240616 - DNA, 508 bp, Cannabis indica
aaccatggtacacagcgagaatgataaccccgtaatgaaaattgtaatacacctggaactagtagtagtcgacaagatagatctgaagaacatgctcctcctcatcatgcacccttgtcaactttatcgtcatttgaagtttgtaccaagttcaaagctcctatgtcgacaaaggaaaatataatggaaaatcataagcttactacttacaaagtaaggtttcagaggagatacaacttggatatttttatgagaagaaggaagaattgagacaagtagtgactaggtttgtaattaatgacaatttgagtggatggtgaagaagtcagccctcgatgtgttgtacgttacatgcaaggatccatattgtaaatggagattgaggggaaggaagaagatgcattttaacaggtttgaggttactatatttcacaacgaatacatatgtaacctgaatgcgagatattcaaatcactgtcaagcaacaccatgggtggttggccacctt

SEQ ID NO: 240617 - DNA, 1682 bp, Cannabis indica
aactaaacaaaataaagacaatgacttcaaaagatatccagtaacacagaactataggactataaaatgtctttgcaacaataaacatagcaaaccatgaaaccatatcaaaagaaaaacttgagactatagacatctcccccttcattgaacatgagctgattactccacatctttgtcaggttccccctgggaaagtggcacagaagacaccaagttaggtgtagtggttactggagacgggccagctgtaggagacaaatcctatggcactcgacttgagactggggcagaaacagacggctccccctgcacatgtgctttactaccagacccatctgaggatgcaccaaacgaatctctatgaaactgggggagagatatatcaattcatggagttaaaggatccccataatgatgttgcagcacagtagacttgatgatgcgaaccattttgtacatggaggcctcaaaggaaagctggcgcttttgatccttcttatatcttttgacaaaggattaaaactcagaaaaaaatttcaccttcaaactgtagtccgataaccctttgaatagaggagacttgcctttgctcatttttggagtagaaggagtggttgaagagggctgcctgttaacaactgataaaaaactcttactaagaacgagatttggaacttgataatcatgagttgtaagaggagggtgagaaaccatgagcacttgttgactgagaattggaaaggggagtttgttacgagtaccattttttttaggcttcgagaatcctttcaaagatgagagttggcagatcaatggatacatgagttcctaaagcatacaagaactttccaatatcaagtgtgactgagttcaaatgggaattaggaaaccaattgtacaaagcaacctgatgaagaaccctatagaatggagttagatgagtagcgaaaatttcctgcttttcccatagatagtcatccctacaagttagcactctacccatcatactttgatttggattgaactgattcccatatgttggatttttgaccgactcaactttcaaaatgcatgcaatagtagatggaccaaaaagaatacgagtacccctgacaaatgcactcactcatcttggatgaccctcaacaataacagtcctatctagattggcatagaattcacgaactaaatgggatgaggtgtagacaacctagagacaatgtgaacccatttcttaatttataaaaaatcatgcaggtcaggaaagtcatctaaaatcactatttgttcgaaccatagctcacgactaccaaaccatcgttggtacatagatgctttggaggcatcaacaaagcattaaacagagaatgggtcgacagttgagatagggtcttttggaagttttttcttttgggagcctttggacgactgtttgggagacaagtctatagatgggacaagaatagactttgtcttggacttttgacaggtagctgataagtgatatcatgcgatgattttcttttgggctgaaccctttctttgctttgggaaggtatagagaccttatatggaggacgaggtggtcctatgggccgggtttgatttagacaacaatgaagactggacagagtacacaagagattttaaactcgaagaggaacgggtgactctctttg

SEQ ID NO: 240618 - DNA, 1350 bp, Cannabis indica
taatcaatttttaaatttaaacctcaaaatatcaaagattaataatatcccattaaaaaataatatattattaattttaaaattgatatttaagtttaaatatttttaaaaataatattttattttaatattaaggtttgaaattgggaaaaaatgggtttgggagtgtgctacccaggaggctgcacgtgcagccaaatgaggctgcaaatgggccagacgcgcgcgtggatgaagatgcttggccgagaaaactcggcatttgtagggtgaggcgcgcgcgggtggtgtctgaacgaggcaccacgtgcgagcttcaaatagggattttgtccccttgacgcgcgcagaagtctccttgtccgaagcacctggtgcgtgggagcaccatgctcgacaccatatgcaccccgaaacttcaaaccaccataactctctcattttttatcggaattgagttccgtaaacacgaaagttgcttaatttttcacaagtaacccaaataaattattttcatggaaaatttcgtaaaacacatacagtcatcaaataatcacataaaccatcacgaaacaatccaaatcaacacaaacatcgttttaattcatatttcatgaaagtaaatcattaccatagctctgataccagttcttggaatatgttttaccaagatttagatatactaccatgtatgttatttaacatcctaaacatgaatatctaaaataatataaataaacacatataaagtttaggaaaccttacattgggtgcagcggaataataatggctccttccgctcagatctctaaaccttatatcctgtcaatagcagcgtattaccaagatctgagcccgaatgtccttctcttgattctggattcttcacagccttacacactatgattgggataccacttgatgtgtctgggcactcactctatcactcaaggtatgaaaatatgatgaagaaaagagagaggttggttcgaattctatagaaggaagaatagatggctcaactttttctgaaggcaagaaatttcatgatcttttaagtgtgagccatcactatctatttatagccaaccacctaggtataggttaggatttattaggcattaaaataatagaaatattaagtggaaattaccacttaagtggccgatcatagtgatgggcctcacttgggaatttttctacttttgacaatctttcctatattttctcaaaaatgacatttttcaaattcaaaccaattaaatgccaaaactaattatttaataattaaaattaattatcgaataaaatttccattaaatatattttttaattagacataataaagtc

SEQ ID NO: 240619 - DNA, 1168 bp, Cannabis indica
aaagattctcgacaacacctaaacttaacctaaaaaaatttcacttcttctcagtcgacggtcgactcccactcacgtccttccgaccaatccatcttctcagtcgacggtcgactcccactcatgcccttccgaccagtccatcttctcaatcgacggtcaactcccacccacgcccttgctgccctcactaaccagttcgtctcctcagctgacgacgatccatttaactcgtctcttcagtcaacgaccatctctttagtcgacgatcgtctttacagtcgaaggtaagatgcgaaatatttgttgtgatataaatgaatagtctttgctttgaatcaacaccattaaaattatgggtttcttttaaaatcctacacatatacatatataaataataaccatggaatatgatataaaatgattattgggtttcgagtgacatggactgatattgagtgtggatggaataacaatgactaaaaaggattagtgaatgccacaaaatttaatttagttattggatagatttgagggttaggatttgtgaaatagaggtagtaggaaattttgtctggtccgaacatcttttaggaaaagtaatctggtagctcaaaatgatattgggtctctaatgatatgaaatttgaagaaaacttattaagtattggatttgataaaggtattgttgaaacacgagagagtcaacatcaatgataagaaattggacattaaattatgctatatgtagagttgcattgctgtgaattcccattaagctgttgatctttatttaattttcattggtcttttgtgtttgcttgattattcagaattatttggggcatttgcaatcaggtcttgcagatcaaaagtgtgtaggtactggttgttcaatttagaagatggtacatgcttgtatttttttttactgttatgacttatgggagtctaatgtgttgttggagattacgaaacaattgtttatttgttaaattttaaatctattttaattgcgttattgctgggtttttttctccatttttgaatttttattgaaatattaaaatgcaatccgcactaaaacaaccgatccaatccgcactattgcggatttgattggattggatttaaattgctatgcgaatttgattggatccaaaatatg

SEQ ID NO: 240620 - DNA, 874 bp, Cannabis indica
agagcttcaatttcacccactgaatattcctcaattcgagtgtttgaggaaataatgaaggtatcataatcgctgggtaatcctttgaaaattgctgcaatgtgatctcgagaggacagattttcacccacagaagctaagagatcaacatgttgcttaacctttagcaaatactcatccaatgacagagaacctttcttgagattctgaagtttagtcctgaactcaagaattttagaggagacttgtagagtgaaatgcttctccagtgtacgccatatttgtcgagcagtgttacacccaaccattcgaatgaggaggttctcgttcatggatgataggagccaagacaccaataactgatcttgagtttcccagctcaagaactccggattgtatttttgagctgcttgatcagcatctgagagaaactgtggtggaggagcaatttcttgaatgaacctttgaagctgatgtccacggattgcagctagtacttgttgcttccagagtagaaaattgtggtcattgagttttacagagagagaatggctaaagtatatgggactgcgagattgctctgtttcacgggttcgactgcatggatttgcagggggattcgattgtgcgggctgaggatcggaggaggtggagttgcctataccattaacagcagcatttgccattaatggaggaaaaggctctgataccatgtttgatctggtattgtacctagccatgaagaacgaaaggaagaaagcaaagaggaagaaagagagaaaacacagagctgaaagaatagcttcttgatattatgaattgatacaaggcaatatatatacagctgatgaaaacagaaaacagttacagcaaa

SEQ ID NO: 240621 - DNA, 751 bp, Cannabis indica
taaaataaatttccaacagttttatgtctaccaacaacaaattaaaataaataaataataaattccaagaaagatgaaaaaaaattgtatgagaaattttttttagtttaatttagattatatttttcttatatatatatttattgatatgttaaattttaaaatatctatataccatatgtattatacatttgtaatttttttttaaatatatatgaataagtatggattagattagatcgattacttttgcacataaatgttcaacatcctatctgcacaagtgtaaattttagatttctcaattcgatttgcacaaatgctgatatccatactttgcggattaaattgaattagatagtgcattgaatattgaattggattaggtattttataaactcggtggaacaatgaagttccatcatatgctatagtttgtatatgcatatagtgcaaactaaagataaaatcaagacgttgttttcacacagtgagttccaaaaatttataacttctccatctcggctctctgtcttaagttgtagaattttcaggttgatagatggaagtctcctatgatttgggacaaatgtagtgtggttaatcatggagtcatcacttggcttactttgcctggcaagcttcccattagggataggctttaaaggtttggaatgactcaaaatacataatgtttattgtgtggaaatgctattgaaaactacaaccacttcttaatttcttgttgatc

SEQ ID NO: 240622 - DNA, 1094 bp, Cannabis indica
ttttcgtagcagtatcagctgaattttgagcttctgaccgacgaacagaacctccaattgccgacgtagaatcttcgtttcctgtcttcaaccattgtgctccgatcagataattcttccttctcatttgtgccttcattcttaatccatatggcttaccgagttgatcaaagtcttggtcgaaacgtttgggacaaaagcgctcagagtgaccaatgatcccacaaatgaagcaaaatgtaggcaatgttcatatttgaaatttgcccaaatccattccccattttctttgcatagcttcatacgacgcttcaatggcttctcaatatcaatagtagctcaaacccgcaagtaatcacgccaaattccattgaagtttttcggatcagatttcacataggctcccacatatcctcctgcactacgcacaactttctccatcataaatctgttctaagatcatgtatttgaacccacatgtctattttgtgtagatgaaccgttctcagattctcccccctcttcagcctatgaaagatcaaaggagccttattgaaagtccaaggactactatctataacactttgaatatcaagttcatgataaaattggaaaaggtatagattagtctctaattctttgatatacacttccccggctgccacaatgaagccattaaatgtctcatagcatcaaagtctatagatcttcccgtcaaaaacttaccaataagacaccatctatcatcaaaaataatttcatcaccttcagttttcccttcaatcagcactccttcctcctcatcttcaatatttatttgatcgtattgatcggctagtatactagcattttgactactggacgccatattacaatcacaagcaaaaccaaaaaaacaaattcagaaccaccagaacagagctcttccgccggacttacaaagacatgtcagaggacaagactttcgtacatgcatgatttttactttcttggaaggatcatgactcgtctttggatttagttcttaatataaattaataattagtcaatgtaattagcatccaccttagctaagctaaccaaacattataatt

SEQ ID NO: 240623 - DNA, 1277 bp, Cannabis indica
ggtatcagacgccggcgaacctggtgaatgccgtcgacgagaatggagaagaaagtagaaggaatcgaagaagggctgagcagtgtgaaagcaagatatacataatatcaaaatgatccttggagagttcaaggaaaccccagggaacacacagtcacgggtctagctgaccagattcggttgtgtttgaatgcgtaggcgagaatggcggatgagatgtgctcactccgggagagtcaggcgccgttgcaaagcttcggtcgacgttcggtcaacgagcgacctacatcgccggcagtgtttgggtcgaatggaagagatagcgatggagggcggcgttcggagtttcaagctcagaagattgaactccctgtgtatttcggcgaagaccccgacgaatggacttacagagtcgatcgatacttcgggttgcagagattgacggcggcggagcaacttgaagcggcgatcatgtgtttggagggggcggctttgaattggtttcgctgggaaaactccaaaaacacaatcgggtcgtgggaagagctgaagttgatgctccttcgccggttccgatcagctcatgaggggtccctgtatgatcggttttttgctctccgccaaacggactccgtccaagattaccggagaaggttcgaatctcttgctgcagtgatggggacgatgaacgatcaagggttgcaggctgcctttgttaatgggcttaaaatggatatacaaggcccattacgtttgttgcatcctaatgggctgattagagcaatggaacttgctgaatctattgaggcaaatcaagcccttgtgagaaattataaacctgggcctaatagaccatttcatagtcggcccaacactttgagtatcccagaagcacgggttccacacgtgacctcctctcccacctattcgaccacttcagtcaacagcaagatgacttcggcttcaacttcatcttccccaacgagtttcaaacgttacacagaagccgaattgagagaaaagaaagaacgtggtgtgtgtttcaagtgtgatggtcgctggtttcggggtcatgaatgcaaagaggctgaattagtggtggcggttgtccaagatgaggctcaagaagaagcgccggatgattttattgccgagatggtcgggcttcctccggtaggagcagcgaccgaagcccaaactgttgaagtttcattgcattccgtagtgggattgactcccccgaagacaatgaaaatgttgggatccattcatggaca

SEQ ID NO: 240624 - DNA, 734 bp, Cannabis indica
gcaaaaaaattaaagtcgtcaaaaataactatggtggttaaaattgccagcgtaggtatgacaatcaagtaagtaacatctaagatagttttgcaaaattactaaagaaatgtaattttgtcttccaatacaaaatgttaggcaaacctagcatgacgagtatttgagacatgtaattaacatttatctaagaacatggtaagaagtgtgattagtcattcttctttaagaaactcattgtagggagataaacttaaggatgcaacataagttctgaacaaggtgtcaagtaaagtatagttaaaattatttataaactatggtgtggttagaataataatctaacataaagatatattatttttcgtggatgtccaactaaggtaatgtcctataagaacatgaaggaatctgagctctaacattgtaaggaactatactttactgtatctctagtaattaaagagcaacaaattttgtgatcccacactaaggttcaagtttgagacgagaaaagtttattatttggaggatgttgagtttggggagaaataaaattattagagatattattcttgaggaggaattgacgttaaactcattttcaattatcatttttgacaatgtttatctttctatgcctttaattgatcaataagtgaatccagaaccttgataagataatatcaaacaattttccattcaagatatggtaaatatttcagataatcaaa

SEQ ID NO: 240625 - DNA, 1705 bp, Cannabis indica
ttttttttttttttttagagttagagtaatagtattataattattttaataatgaatatagttaatttttttttcattctttttttttttttgaaaaatgatgaattttattaaatcaaatcatctgagaccaaggaagcaatacccgaaggtaaagcatccccagaaaaagtacaatcagcctctgaaagagaagatcgcgccaaaacatgcgcaaccttattagcagatcgttttacaaaattaaaagaaacatcgacaatatctgaacacagagtcatacaatctgagattatatggccataaggagaagccatatttttaattctttgtaaatctctgatgactctcaagcaatccgactcaatcaccacatttgtccatccattagttttgatccaactcaaagcttcctttattccaatagcctcaaccacatgtggcttcaaagtacccactttgctaaatcttttggcttgtatagctaaaccagtagaagaccttgccaccaaaccaattccaaagcgcctttcatttgtgaaaattgcaccatcaacattaacttttattgtaggaaaattgggaggggtccaatgctccaagttaccatcaaccgaaccattatcttcatgagtaggttggttatttttttgggcattataccattcaataaagttgagtttagctaatgtgacaacatcactaacagtcggcattgtggaattccaaaccagctcgtttctatgcttccaaacggaccagcataccatcgaagcttctaatctctcagccatcgtccatttgtccaagccctcttcgaaccacgcagtgaaagtcattgctgccccagcaacagcagggacccgagacaaagcccagcactcctgagcaaatcgacaacgcaccagaacatgcaaagatgtttccggagcagcattacaaaaggggcagctggtgttgataggtacatgtcgaactctaagctgaaaccgagtgggtaggcaattagttgagactcgccataagaaattaagaactttcggaggcaatttcaattgccaaagttgtttccaaaagcctaaatttgccgccatttcattatcgcctttgatttcttgctgaagattataagcgctcttgacggtgaatagaccattatctctttcgtccaataccacgtatcgctgctgttaccattagagggaggaattttccaaattaattcttggtctctctcagtcaaaacatccaagattacctcttcatcccattcgttctcatcaatcttcatgagggacttcacaaaagcaccagtaagtgcaggatgtctagactccacaaagggattcatatcgtcgaccaaccaaggatctaagagcacactagttgtggagccatcaccaactaactttcgaacacccgcccgaactagtccttgtgcttctaagacacttcgccaaatgtagcttgggtttgacccaagtgtagccgtgagataagaacccgaagaaaagtatcttgctttaaaaatctgtttcattaagctattacctcctgtgagaagtctccacccttgtttggcaagtaaagctagattaaagtctcgaaaatcacgaaaacccaatccaccattaactttatgagtcgaaagcttgtcatatctcatccaatgaatacctttttttgaagaggttctccaccaaaa

SEQ ID NO: 240626 - DNA, 1107 bp, Cannabis indica
ttcgttggaaagctcatatctagctctatgtgattatctacaatctgaatgccaattttttatgttgtggaaatggatttagggatgaaccctatacttgtgaatcccgaaaattaggactaggattaccgacacttggtcaggagcacccgagaatctggaatctccacgtttgtgggacatgaggtatgacagtagttagcacgtagagtatgcatggtggcacctatattaaaaatgatatgtgttgataattgagaaccgagattagggttatcaccctaacatgaggggtttaatggtctatggttattactctagtgattattaatgtgaatgtggtatgacatgttatatataagtgtatattgaggtttagggttatgcgtttaaggcataatcaggttggactcagtaactagaaccgagatgaactgtttaaaggccttattgtaaatagacgtgtgagcgtaacacgtaagtctatgccacatagacataaatatgcgtgtaagtgtaacacgcgggtctgtgtcatacagacaaatgtcaaattgcattaatatatatgttatatgttaattatgattattgataactatactgtcttgcggggcttatctcacaggtgctctactgtgtaggaaagggtaaatttgtctctgatcagccatgagtgcgagagctgggcaatgtatgtacatgttcgggccacaaaagactaagagcgttggtatttaccagtgatgtgcttttctaactctgattttgtaaatatttttgggatctctaaaaatgaaattttgattgtaaagttaaagttattacaagttttattttcttcattttgttttcgtttaaagttcaaattttcccgcaattatcttactagtaatctcgtttaggggattaggctttcttaatcacctcgagtagcgtgctagtttggtactagagcgccatggtttttaaacttcttgtagaacgaccaaacatgtacaattatcgccagagacaagctcgactcgtggtgctgtaagtgttgagagtagatgctttactgcttatatgattatttatttaccgctttccattttaggcagtatg

SEQ ID NO: 240627 - DNA, 1270 bp, Cannabis indica
ttcaatgtatgagctttcttaaaagatgctgatgcttgcgtaagaaatggtgatgagagagttcgccttttggttgtccaaatcagagaaaattctcttgacttggaggatgttattgaaacttatgtcctcaaggtgactttgaagagaaatgaaggcttactaaagaggtgtatttgcatcttcagaaaaggaattgatgtccacaaagttggatcagagattgagaggatctcatccaacattgatacttggacttcacagttagatgcacttggagtacacagatcgatacacaatgcagctgaagcttcttcaagcagctatgtccaacagcaaagaaagttgaggcaagcttattcttatgttgaagacaaccatgttgttggattccataaagatatccaggagttggttgcccttttgactgagaaagagaaccctcataagcataaggtgatctctgtatgtgggatgggtggtttgggcaaaactactcttgcaagaaaggtctatcagcatcctcatgtcaggactcactttgattgttatgcttgggcctcaatatctcagcagtgtaatacacgccaagtcttggaaggaatttactttgctttcacttcgcccacagatgcacaaagaaatcacatcagaaacttaacggatgatgaattagcaagggagctttaccactttcagaaacagaaaaaatgtttggtagtccttgacgatatatggaccccaacaacatgggatcttctacaacatgcattccctacgactactcaaggagacacattgcatagcaagatcttactcactactcggaataaggttgtagctttgcatgccgatccacatggtttcatccatgaacctcatttgctcaatgacaaggagagttgggagctatttcagaataagtgctattctattggaacagatccatcaggtaatatactattcttcactctaatattctttttaatattcttttttttttaatcttttctaccgtttatatttatacatgtcaatacattcactttgtatattttcctagtttgttaagcagatatgcatattatactgacattagtgagatgggatctaagtattagatctcaatttaattatattttatgcatatgttttggcatgatgacaatccagtaatattattttgtaagcctcatacttaaaagttaaatcataattgtttttgtgtattttcaatggacaaatttagattcaaatgatgatgaagaaa

SEQ ID NO: 240628 - DNA, 1435 bp, Cannabis indica
aagtggattttcaagaagaagaattatgttgatgggaaggtagagacctttaaagctaggcttgtggccaaaggctttacatagtgagaagacatcgactatgatgaaactttctcttctgtggcaatgcttaaatctatttgtattcttctttccatagttgccgcatatgattatgagatatggtatatggatgtcaagaccgttttctaaatggcaatcttgatgaattcttttttatggaacaaccgaaagggcatgttttaccagggaaagatcgaaaggtgtgcaagttgcttagatttatttatagattgaatcaagcctctagatcttggaatatcacttataataagactattaaagagtacgacttcgaacaaaataaagaagaagcatgtgtatacaaatacattaaaggtaatgtaattgtattcctagttcattatgttgatgacattctacttattggaatcaatgtagaacgattatcagatgtaaggaaatggttagccgaaaaattccaaaatgaaggatttgggataaacaagctacgttcgtgggatcaaaatctatagagatagaaaacagagaacattagcactttcttaagcaacttatatcgataaggtgcaagaaagattctcaaaggagaattctaagaaaggacaattaccgtctagacatggaattactctatacaatgatcaatatccaaagactcctcaagaggaagagacatgagaaagtacccttatgcataagtagttaggagcttgatgtatgcaatgttatatacaaggcctgacatatgctacgatgtagagattattggtcgttatcaatctaatctaggtttggaacactagattactgtaaagcacattctcaagtatctttagagaatgagagatctcatgcttgtatattttggtggagaattaaatcataatagatgtattgattctaattttcaatcagcaaagatagtcgaaagttgacatctaggtcagtatttactcttggtggaggagttttagtatgaagaagatttaagcaaactagtacagcagattcaaccatatggaagtcgaatattttgtagcttgcgaagaaactaaggcagcagtttggttaagatgttgtaggtttaattttgtatggattatgttttttgaagttgtattaaggttatttaagctagtttggatctttgtgggtgtttgttgttgtgtttgagaaaaatttgaactttagagctcaaactttgctctcaagggtgatttttgtttttgaggttgttttagggtgctattgcttaaagtatgtatattgtaacctaatgaggaggtctacaaagtttggtttgatttggggtcgatttgagttgtgtaggagggaatttctgttttctgcactgaaccgatcgaccggt

SEQ ID NO: 240629 - DNA, 833 bp, Cannabis indica
tatataagcatttgccaactatgttaacaaatttactgataattaatgattactcgtgatccaaaactctaaaaaagcaataagataaaacaaagccttcccttctctcaacaaaccagccaaagaaaaaacaagagagggagggagagaaggaatcaaactcttttacattcttgagcagaacagtaacccaatgttttataatttttcatattatctagcgagttctctttttcttgatacgatcatatttttttcccaatcaaattgttcacataatagccaatactccacaattccagattatcttccccttctttatttaaacctttaacagccatttatctagtttccccatcaaactccaaaacccttcttctttaatacaaaatccaagaaatctaaactatttatccctgtaatcttcaactggttcataatgctttctcgaaatgaattttaaaatctaaactatttatccctgtaatcttcaactggttcattagcaaaccaatgacgacatctaaaatttgtctaacaacaaaatagacttcttgagcttctgaattcgtatcctcaaatcagtagtagctaatgcctaataggcatttaattcaatattttataatttataatattaaaaattgattaatagagaagaacaaaaaaagttacgtacaacatccaaaaaatcatgatgatacttaaagcccaagaaaccaaaacaaacccaaacccctccatccctgtaatatattcatgtgaaagctaagtcaagtagttagcttaattatatataaaatgaaacttacccctcaacattcatgttttca

SEQ ID NO: 240630 - DNA, 1999 bp, Cannabis indica
cgcacgttgtctttggaaccatagtagtcgacatgaagtaatttgggatactttggagaacagatcttaccagagtagttcttgccgcttgtgacatagattttgctttccaaccgtcgatacgcttgagaattttttccttcagaaatttgaaatcctccgttctcctgcccgtgaagaagaaagggttacccaagtatttttctttggcattaagtctttgcattgacaaaattcccatgatatcctctttctttctaccataggtgttgggcgagaaaactaacccactcttgcttttgttgatcctttgtccagaccaagcttcatatttatcaaagatttctaatagacacttggcatttgattcagtggcttggcaatagaatatggcgtcgtcagcgtataagaggtgggaaattgccattgcatttcgagcaactttaataccccttatctccttttcttgttccgcccttaggatcatcttagataagacttcactacagagtataaacagaaaaggggagagtggatctccctgtctgagacctcgattaggattgaagggagcaagtggtgctccattgagaagaattgagtaactaacagttgtgacacacgccataagcaattgaatcgactttgctgagaaaccatttgaacgcagtactcgtcgaataaaaatccattctagcctatcataggctttgctcatatcagtcttcacagccatgattccctctctgcctttcttgattttgattgcgtggttgacttcctgagccaggaccgaacagtctgcaatccatcttcctggaatgaaggcggattgatgaggagacaccagcctatccataatactcttcaagcgatccgttagaattcgggaaacaatcttatagcagaaattacaaagacttatggggcgaaacttgtcgaacgaactcgcattggcctccttggggataaggcatatgaaagtgtgattcgtttgtccctgcatcttcccatgaatgaaaaactctttaaccattttacacacctccgtgccaacaatactccagtattttcgatagaatattccagagaaaccgtcgggtccaggcgattttaaaggatgcattttaaaaactacttcacggattgcgtcgtctcccggtatatggcacaacatggaattgtcttcttctgcaattttattgttgaaaagtccatcaaagtcttctgaaatctcaggattggaagacttatatatttcttggaacttttcctgaaaataaagcccaatttcttgcctgctccgaatccaacagttaggattcctctcaatgcaactaacacgattctgccttcttcgcaccaccgttgaagcatgaaaaaaccgtgtgttattatctccgtatttcaaccagttttctcttgatttttgtttccagattctttccatctttgcttccatctctaggatctccaattgtattccagcttcattttccagcatgtgttgagaaatcggggctccttgaatcaaacccagagtatgcttaagttgtttcagcttgcgattgacatatccaaatttttccacattccaaactttgagatccttcttagtgttctgaagtttcctctgaagtctattatgatgagatacagtgttggtccatgcccgatcaattacctctccacattctgtactcgaggtccaaacttccatgaatctaaaagggtagcaaagcttctctctatctccccacactttcaaacagagcggagcatgatcagatccatatataggaaaatgacagaccgatgcattaggaaactgaacacaccaatgagaatcggcaatcgctctatcaagacgtttccggatatgttgggtcgtatttctagcattctgccaagtagcaggaggcccaacaaatcccagatcaatcccaccagagtttagtaaaaattccgtcaaaatgtttccctcgttggactgaaaggg

SEQ ID NO: 240631 - DNA, 1291 bp, Cannabis indica
agtaaatattgggaaataaaaagaaattaagtgcctcaagagaataaccgtcaaaagcgtgcatgggaaacgtgtctcaaggcactaattaagtcagagcattagttagccaaaaactgaaaggacgcctggactgactcatatcgaatcacgaatagatgcacccgacacatgtctcccattcaaatataataccagctcggatgaagtctacacgcaacttcagaagcctcgtgtagacttgggggcaaatgttatctcaatttttgcactctaacgtggcatcacatgctggtgacacgtggaattgattctccatacctgcccgaaagagatgttccgagcagaacactgcatatacctgcacggacgaggtcctcgtagccgagcagtagacaatctgaacagcatatcaacacttagcgatttcagcacttgcatcgtgaagctcacgagcaatccctataaatatgggatcgtatcacagagacatgtcaagctgtccaaatcccacaatcagtgtactctatatatgtaatgtgtattcttgccaattatagacattgtaagaaaaagagaaaccttccctcaagcatgtaagttgtaacgctataaatagtgattcattctcactgaaaaaggggtcaaaagaattatctaagagagcatactcaaagatgtcattgtaagagctctaagagaagaatcactgtattctttgttcttaagtcaatacaaatcaaggagagtagtctattaccgaactacttggggccgaacctctttaaaaactgtgtcctttatttatcttttcatattatatctaaattatatcacttatcgcttacaatcaagacttattgtcgttggctaaaagcgaggtaaccatacttatcaattttcttttatatatatctgtgtttaaattattacgaaaaaggctcattaattattaacgaaaatttgcgttaatagtaactgttgcccctcattttgcctgaaatacgtggaccaaccggatgatgacacgtagatagaaagggtttagcgttcgaataaagcagctaagtctccttaagcgaaggattaccttaaacatgcctcccggagaaggcatgtaagtctcacatactcccggagagcaagactacaacaaagcacctccgagaggtgtcagatcctatctgaacagccatctcgcatttaatgccgcatgggaggaggcgtattggaactgccatacgtaataaagtctgacggcacaactcccactctgcacctattaggctat

SEQ ID NO: 240632 - DNA, 1669 bp, Cannabis indica
ttgcttgtgtctgagcaatccccgtgtgttttatttattatagaaactaagttaggacctaattctatttcccgctttcgtcaaattttacatttcaataatggacttgaagtcccacgtgtcggtcgtagtggtggtctaatgttactatggaaagatgatgtatctgtaactcttttaaatcataatgcaaacttgtttgactgttacatggctgttggtaatgatcctaaatggcatttctctgcattttatggcgctccagctgctcataatcgtcacttaacctggactttgcttcaaagacttaaagatgttgcacctttaacaccttggttagtcattggtgactttaatgaaattctatccaaccacaacaaatctggtggttccttgcgaaatgagacacaaatggacagatttcgatccactttagatatttgtcaactttttgaacaaccatttactggtgatccatttacttggatcaaggggaggcatacagttgacaccattaaagaaagcttgattggtgttttgtcaatactcattgggctggtttgtttcaaccaattacaacacaacatttagacttcttcaactctgaccaccgagccatttcagtccaagtcatgacacttgctgcactacctaaacaacaaaaatcacatcggtttcgatttgagaaactgtggttaaaagaagaagaagctgcaacaataatcaaagatcagtggaagccttctcctgctggtaatgtcctggttgagtttaatcattgtcttcaaaaatgttcagactcgctgcaagagtggcatcaaaggaaatttgggaacatcaagaaaaaaataaaaaccaacagcagcaggttgcttcacttaacaaccagcagactcgcactactactgctatcaatgaattaaagcagtctgaagcaattttagatgaattgttagcacaagaagaaacttattggcaacaacgttcgcgtgtagattggatgaaatgtggagatcaaaatacaaagttttttcatgcctatgcttcatcacgaaaccagcataacaagatcagtaaacttaatgatgctaatggtgtggaagtcactacaaaagaaggtctcacggatgtcatctcttcttactttgctgcacttttcaaagcttctccagttgatccccaagcactgcaaacaacactcaacaccattccaaccatggtcacagcagaaatgaacaattctttaacacaaccgtatacaagccaagaagtaattacagctttaagattgatgagtccagataagagtccgggcagtgatggcatgtctgcaatgttctatcagcaatattgggatattgtgggtaatgatgtcactaaagtcgtgcttgctgtgctaaatgaaggttattctatggactctattaatcactcattgattaccttgattcctaaaatcaatattgccatctgacatgaatgcattcagaccaattagtttgtgtaatgttatctacaagctaatctcaaaagtcttggctaatagatttaaggaggtgctgccatcggttatctctgagaatcaaagtgcttttcttgctaatagactcatcactgacaacattttggttgcttttgaactaatccatcacttgaagcacaaaactca

SEQ ID NO: 240633 - DNA, 1503 bp, Cannabis indica
ggtctacccaatttactaaaaattctggctgccacataataatgagtgaccccagagtcaaataacatagagaagtaagagttgttgactgagagctggtctgttaccactgaggggctggcttctgcatcagcctgagttaacgggaacacccttgctagagcgggtttcactacggtcttctgttcttccttcttgagttggggggaatcacttttataatgccttggcataccacactgaaagcacccctgccctctacactctcccatatgatgctttttacaactagggcactctgggtaagtgtatcgggttttagagcaaccctgacgattgcctcgaccctggttccctcgaaacctcttattctgacctgaaccactggatgcaataggtgcctttcttttctggtcaatggtcgagccactacctcccctaccatagcctgatgtaggaagagtatgagccccaccaacaacctgagtccacgagactctagggtgcactccactgcgccctcagctcgcagtgccttacccaccatatcagcataggtggtgttgtcatcggtagtaattattaagtcatgtcttatcttcgagttcaatctgcctaggtatttctcttcttctaaaattagttggcacgattcttgaggccaatcttgccaagcgatcaaattgagtcgtgtcagtaacactcatattttccttctgagtcagctgagtaaattctttcattttcgcgcttctgactacctcattgtaatattttgcattaaatagttcctggaactttttccagggcattgtagtaacatcatgtgtcagggacactatgccccaccacactagagcgtcctcttggaattggaatgtggcacatgccactctatcattgtcggtgacgcccataaagttcagaattctagtaatcaatgttagccactgctcggctttcataacatcaggaactcctagaaaaattggaggtgcctgcttacggaacctttcatacagtggttctatttgatttactacagtgactggtcccgcctgcacagcaggggcaagagctataggtatttctagagcagggattgtaggagcaccctgctgtattaaaagccgaatctcttcatcttgttcattaatcctggcttgcatttttgcaaacctgttttcccaatattgggcagcctgtgcagcttgggcagccagtggcaggttaacatcaccctggtcgtgtgccctgcctctaggatctctacctcggtcatgaatattaaggggaatccgaactccctgaccaccactggatctaaccgaattaccctggctcttggtgtttcgcctgacgtccatactatttagaacagcctgcgaaccaagagatagtctggtcagattgtgatcaagtaaaacttactaattgccgcttatttggaaattaaaaacatgcgcctattctactattaggctactaacatgcattctaaca

SEQ ID NO: 240634 - DNA, 539 bp, Cannabis indica
cctctaaaatgagtgggccctagtcgcgggcctagcccgcctatgcctagggccgaccttgctagcaccactatgaggtgatgtcctataattagttaacgattttctatattaaaataaaataagtaggacctgatattgagttacaccaatagcgatattacacctcgtaaggatgcaaggcaccataagtaccctttagcatttctagttctttattttttggtgtgtaattaataagcaaaccaacgcaacaataattaaaagtcaagaaaagttttgagttatgtacgtacattaagattgtcgctcttgcaacgatggtaaccaatagcaattttattgagatctccccctttatccacgatcacaaaagggttaaagtggtcggcctttggtttggttcttggagttatttttatgggatctcgatttggagtaccagaataataaaaaacctcaatgtgtcgatattgttcaaccgaacgaacaatatcatcaaattttgattcttttcgaatagttgcgacggccacagt

SEQ ID NO: 240635 - DNA, 1017 bp, Cannabis indica
caaacaatttgacagccaattgtttacaaatttctgtatgactcattgaatcataaaatgtttctctacagtagacaataagaaacttaaagacaccatgaaaaaacgacttgaagaagctaaagggaactggccggaggaactaccagaagtattgtggtcataccgcacaatcaaaaaaatagtaactgaacaaacactattcgatatggcttatggttatgaagctatgttgcttgtagaattagaacctccgtcccatagaagattgacctatgatcaagaagctaatcacgctctcgtagcagaatcacttgacaaaattgaagaaaaatgagtattagcaaacctaaagttagtagcccatcaacaaaaggtggctcgatacttgaacaagctagtgaaggcaaggaaattttttgtgggagatatgatcctcagaagagtattcttgaacacaaaagacagcatggctcgtgtgcttggacctaactcaggttagatgaccacctttaacagtacaatttcttttcataagtgcaattgttttatgtttaaatttagttaaagatcagattaaatcatgtaatagcttttatgaatgtaagttattacggtaacaagactgttctaaccaataaatgaataaagatgtttatttccattctaattgtgtcaattgtataagaaagttataaatttaccattaaatgtgtacaaaggtctgcttgaccaaatagccgatagacaaaaaccatacttgtgaagtgcaagtgatcaagagtcataagtttgctcggtcgcttggggggcaactacacccgtacaaagcattggtaaaagtaaataacaagctcaaaaaaataaacataatagtttgtatgaatattatcaaaacaagagaaaaaaatcattaaaaaaagacaacaaagcatggtaaacccaggattaaaggctacccgatcagccaattgtctcaaaataaaatgaaatattacccaagtttaaaaaccgctt

SEQ ID NO: 240636 - DNA, 1156 bp, Cannabis indica
aaaatgacagcaagaatacgtagttggagcacaagaaacttgtcatttgcagctagaaatgtgttgataaactctgtcttgatagccatccaaacttattggagccaaatttgcatcttaccaaagaaagtatacaagaggattgaaccaatatgcagattttttttgtggaaaggcctagcaaactatggtggctcaattgaatggagcaaagtttgcacccccaaaatcagtagggggtttagggataaaaaagattgaggaatggaacaaagctaccatgtccaagtatgtttgggcaattgcaaatagacaagaaagtctatggatgaaatgggtccatagtgtgtaccttaggaaagatgaatagtggagtcacacggcttcaattcatgcaagttggcattggaaaaagcttatggctctgaaaaaccagctaaaagatctcactaacatccaacaattcaccagccagcagtactctatagctaatggatacaagttattcacctcggatggcatcaaaaccaattggagtaatgaggtatgggctcgattgaacactcctaaacattgttatattttatggttggcaatgcacaataggttgaaaacaaaggataaactcctcaaattcgaattacaaattgaggaggtttgctgtttatgtaataaagagaaagagtcaagtgagcacttatttttccaatgtccatttgctcgagaatgcttgcaggagattaaagggtggctcagctggactgttgtgagtaacagccttccccagctcattcggtggattggcagggcaaaaaccagtaagtttaaaaaacttctgctggcagcagcgtgtgctgctttggattataatgtttggacaacaaggaacttggttatttggagaaaggaggagagtacagtaaatagaattgttgagggtataaagcaatgtatcaaactaagagttcctatgttcatgcctaagaaaacaaagagagaagatagaatatggttccaaagtttgtaaaaagatgtaattagccatcatttttgggcctctattgaggttcctataggttgtacaaattggtttagagcaatacaaaatcactgattcgtcgaaaaaaaaaataaataccatatgtagttttatata

SEQ ID NO: 240637 - DNA, 859 bp, Cannabis indica
tctctttctctctttctctccttagtgtaatgggataaagttagtcaagacacaatgccttaatatagggagcattaggtaataaatactttttcttaagagggattttagttgcattacatgcattttgcattttaattataacttgggaattaaggcgtggagtagtgatattttggtactattgagatagaatggtgacctattgctgcctctgcattaggtgttgcatggtcaagttgaattttagagtgttcacaaagtaaaagaatattttcccagaaatattatcaaaattaattaaattaattttattatgatttctacaattccctctttatttttaacttattaatagtagttgggggcaagtttaatcacctagcgaaaagacaaaattatgaatatatatgtcaagtgtcaactattaattgctcttctataatagattgcgctaataatattgcaatatatatgtagttaaaaagtcaattagtcattgcttggagtactctttactaaccctattaattaagctgatcatcataatcatcatcattacatatcacaactcatttagtacgtaatatttagtacttctggacgttgttttgatacttttaattctactccaaaatctcatggccacacaagcaatatatttgttatatatataaaaacatatttgtattattttcttaaaatataggatatcaacaacaaaattgtcacatctattgatgcatattttcttcctgctactattttatttatttatttatttttgtggcggaaccaattaatcgaagacaaagtgcatagatatagaagactacaccagagtatgacacacaattag

SEQ ID NO: 240638 - DNA, 1182 bp, Cannabis indica
cagctcctccaaggactttaactcgcagctcatccatagcctccctggtttcccgcagctcgcgcttggcccttgctgtagcctcaccctctgccttcagctcctcccagtgccttacctctgcctgagcctccctctactgggcctcctcctggtacttcgcctctgtaagggcctccctttgctgggcctcttcccggaatgccctcctttcggcagacaagtcccgcaaaattctcacggcctcgtccatacccccaaatttggacatgacgaacccatggtcaatcagggtcttggaaaggcggccggtctcgacagtaatctgaaaagagatacaagaatgaaatcagatgccttaagaaaaaatctaaaagaaggaaataaaatcacaagtactcaccgcggccagagcagcgctgatgtcatgaacttggtaaacggagttcacggaggcacaagtagcgtatctcttaggtgggaactgagttaggtgggagacaaactggctggtcatctctgaggcgaagggagcaagggtaggcccgacaaagcggttgaaccaatccgtcaaagggtccatgttcaggtcccaaggattccagaaagcgtcctcgcgcaaagtgttctgctgctcctctcgcaggatcttctttagggcctccacctcagcatgtccccgactgaactcgtccagggcatagttatgtttggcaatgcggagcatctgcctttcctcttcggcgaggactggggtgagcacgatgccgtgcggcacagtatactcctctgctgcagaaggaatctcggagtcattgctcacagctggagtgtccttctttcggggccgcttggaaggctcagtctcaaccatttttcccttccgcttgcgctcaagggcggctgcagccttgccctcatcctcctcgacttccccctcctcgtctatcaagacaatcatgcctgaaggggcactggacgaggacctcccgggggtcaccagttgggatggggccgaaggcaaagaagcgtcagggttatatgcctcgacaagggtagccagaagatcctctattggcctggctgctgcaacgaagaaataaacaaagtgttagaatgaccatgagaaaggcgcgcgcccaacaagaaagcaataaaactaatcctaccctgactctctaa

SEQ ID NO: 240639 - DNA, 878 bp, Cannabis indica
aggtgtaagggtgttcaaaataattgcatacataaatgttaatacttatataattttaaatttaattatttaaatattaaaaactaacaataattaattaaaaataaataaaaattagtttgagcgggtaaacttaaccaaatgagattctcattaaaaaatatctgctaacgaaacgagttgaaacaactcaaacaccatccaacaatcccgaccactaaactaatagcaatctctaaaaataaaacaactttagctaagttatgagctacgatattatcattgcgtatgcttacaatagttaaaacttaaaacacgaacattacaacaaaaaggcataaatactttataaaatttagccaaactcagcaagtatatatactatggaactataattattctaactttacaacattacaacattataatagtcttactttcttaggcataaaatacctaattctattctttacttctttcaacattcgaactattatatatactttgaatctacaactatttcagtagcaatttcacacatattaatttaagaatagaagaagaaaagaatgttgaaaaatgctcttgaaaacgcctccagtgttgaatttgatcttcaaaatttgtactcccttgattgcttttgaattgcttgccaaaaatagctgaagtccacttcttttatagccaataaaagataaaaaagatagaaaaagataacccacacggaagaatcctaatctgcttcgaattaaaggggtgggttgcgacatgcacttcctatgttgctgctcgtgttgcaaaatcctcagtctccaggtttgccttgacacaggcctaggcatgacccttattttgtgcacaattatcttttattt

SEQ ID NO: 240640 - DNA, 1356 bp, Cannabis indica
tattgttttgcctccctaaatgagttatagaaatggaatttaagaaaataggggagtccttgatttcctccagcaaagcgctccaatccgttttgattttcttgttaccttttagcacctcggccacgcgaagaaaatcggtgttgatgatgaaaggcactgccccggttttcaccgccagctgaatgcccattcggatagcaagagtttcagctgcctccactgaaaaagcgccaggctgctgttggatttctgctgcaataacagccccttcaaagttccttatcaaagcacccaacccgattctcagctcagtaggccggagacttgcatcactgttgatgcaatagcagtccttaggaggagcttcccagccgagaggagaagaaggaatagttgtactgctagtttccttgggagaattgttggtcatcatgtaattggcttccatttgggcccagccgatccacttctcagttggggggagatgcaaattgagccttttcttgttccttctattccatataagccaagacagaataagaaaaaaaaataaagtcatccttagaaacctattgctgaatgtgaattaacatgtctaaagcattatttctgcttcgtttaaggattggccatattgtgaatcttcgccaaatgtgtttagcagaagtgcaataccaaagactgtgatctatggtctcctcttcctcaccacagcagcagaggggggtaatttccatgccccaagtcctcaaagccatgttaacagggagccaaccattgcaaactctccatatgaaatttctaaccttcgggggagcctctatcttccatagacctcaccaccatttcttaattttatgatcttctgaaggacctgctgtaaattcattagttgtgcccacttgatacccactactcacagtatagcagccatccggggtgtaatgccatatcatatcatcattttgggttgtagaacaaggggctatacctaaaatcattggaatatcatccggatgaaagcactcttttactctttgtgtgttccaatgaccattttcgtctttgaggatgttgaccgtggccccttgggggacttgagcaggggtacgtagagagaaagttgaagggcgagggagccatttgtccttattgatgcgaatgtctcttccagaaataaccctccaacaaattcctttttcaataattttccttccccataagatacttctccacatataagaaccgaacccaccaactttagcttccaagaagtttgaattagtatagtagcacgcctttagcactctagcaagcattgagtgagggttattgatgatcttccacccttgt

SEQ ID NO: 240641 - DNA, 1080 bp, Cannabis indica
ttagcacctcggccacgcgaagacaattagtgttgatgatgaaaggcactgcccctgtttgcaccgccagctgaatgcccattcggatagcaagagcttcagctgcctccactgaaaaagcgtcttgttgctgttggatttctgctgcaataacagccccttcaaagttccttatcaaagctcccaacccaattttcaaatcagtaggccggagacttgcatcactgttgatgcaatagcagtccttaggaggagcttcccagccgagaggagaagaaggaagagttgtactgctagtttccttgggagaattgtttttcatcatgtaattggcttccatttgggcccagccgatccacttctcagttgggggagatgcaaattgagccttttcttgttccttttattccaaataagccaagacaaaatgagaaaaaatagaaagtcatctttagaaacctgttgctgaatgtgaattaacatgtctaaagcattgtttctgtttcgtttaagaattggccatatcgtgaatctccgccaaatatttttagtagaagtgcaataccaaagactgtgatctatggtctcctcttcctcaccacaccagcagcagagggggttaatttccatgccccgagtcctcaaagccatgttaatagggagccagccattgcaaactctccatatgaaatttctaaccttcgggggagcctcaatcttccacagacctcaccaccatttcttagtttcattatcttccgaaggacctgctgtaatttcattagttgtgaccacttgatacccactactcacggtatagcagccatccggggtgtaatgccatatcatatcatcattttgggttgtagaacaaggggcgtatacctaaaatcattggaatatcatccagatgaaagcactcttttaagctttgtgtgttccaatgaccattttcgtcttttaggtatgttgaccgtggccccttggggaacttgagcaggggtgcgcaaagaaaaagttgaagggcgaggagccatttgtcctcattgatgcgtatgtctcttccggaaataaccctcc

SEQ ID NO: 240642 - DNA, 705 bp, Cannabis indica
aagggattctggtatgatgatcaaacctccctgttttggaataagctttggagcttgaaagttcccccgaagatagctaatttgttgtggcgtgcttgttccgaatgccttcctactttagttcacttgcgaattaaaaaagtggtgagctgtgttttatgtcctctttaccaagctgaggaagaaacaaccttacactgccttgtcacttgcaatatggttcaacagtgttggaaccgtgttggaattggtacaaatgttgcaccaggttcttcgtttctgcagtggtgcaccagcagttttctgcggtcagatggtgagcagaaatgtattttggcagctgtttgttgggcaatatggggtgcccgaaacaatcttgtatggcagggaaaagtttttaatcctagtaatgtagttgtgtttgcaacaaagtaccttgagcaatggaggaatgctagaaaatcaaatttggattcatcatggtctgaacttcagattggtgatgggaatgagcattggacacccccaaccgaaactagtctcaaggttaatgtagatgcggctttatttaatggaggaaattcttacggtataggattggtggcccgaaatcatgacggtgtgcttattgaagccagaactgtactctctcacggtgcagttgatccccccccccttgccgaagccataggtctcaaggaggcc

SEQ ID NO: 240643 - DNA, 1024 bp, Cannabis indica
ggttggtctaagatttttcatttcaaattctgtgtaaagcttctatttcactttgttgatatcttccatgtactttcttgcaatcaacatatcattaacatagagtaataagtaaaatgttaactttaccttagaactcttgatgtagacacaactatcacagtcccaccttttgaaacctgatttgataatatactcataaaaccttatgtaccattgccttggtgattgctttagtccagatagagacttcttaaccaagcacacatgatcctcttttccctcaacctcaaatccctctagttgcttcattagaatctcctcatcaaattctccatgtaaaaaagcagtcttaacatccatttgttcaagtttaagatccttgattgctaccattgccaagatcattcttattgatcctgggtcaactgatattgtaggatgcttggatcctcatcctcttccaattatagttcttcttgaccaatgttttcttcaccatcttcttccacttcaaactctattttagtagctgtttctgttgacatttctcggttgcctggtgtcaagctcttctcaagttccacctcaaactgtatactgtcatttttcttaggtccaatgtttgaactcaattctagtgtatctttgtacacttcatcttcttcaaacacaacatccctactaatgaagaactttttatgattaccactttctatgctccacagtttgtagctttttacaccttctggatatccaagaaagacacaatttatgcctcttggttctagtttatcttgctcaatgtgagcataggcaatgcatccaaaagttctcaaccttccatagtcttcaaggtgacctgttcttgcctcaacaaatgtcttaaagccaatagcagatgagggacatttttgttggttaaataaaaagttgttacaactgcttctgtccaaaaattccttggcaatcctgagtatattagcatatatctaaccctttccattatggtcatgttcatcct

SEQ ID NO: 240644 - DNA, 1178 bp, Cannabis indica
ttaggtttttgattaactgtactgcatgtgttctttgacttgttcgttaactgaccacttggatcggccttatacttacatcttggaaataaagcagtgtaattaagtgcgagcgctaatcatagatatagaatctatagcttctataactatttagaagtgaaacgatgattttcttagagcttggctaactgacataaatggaagagctcttatttaagtaattatattagtttactgaaatattatttataagaagctaagtattttaaggataatattgaggggtaaaacggtaaatttatccctactcgatgtaaatcatttgtagaggatctttgattatttagattgaaataatagataatttatagcatatttattcttagtgaatagaacgttctatgtaatcaggagtgcaattctgaatctacagtcttatttgtgaattttaccaatggtataattgagaagaaagggaattcaagattgatataggaaatcttggaaggtctaattaataattatatttaaatagtaattttatttgataattaattacaattattaaatagatagaattagtgtttaaataactaaagcagaaaaatgacattactgaaagaagataagtttgcttcattaaggaagcaaaataatgataaaaatctaactcataagtcatgagggagtaatttaagccattggatctttcaaatcagcctatttagttctaaccataaacataatgaatccctataaatagaacataatagtttttgattcaatagaaccctcttagactctctcctgtctaacaaattaaataaaaaagaaaacctattattttttgatattctctgagttttcttcacaaaaattcgtggtccttggtattgagaaattgtccacacatttcaaagcaatactcaacatagtgaggaagattgtgtagttcaaattgtcaactgaaggagaatctaggttcagatcttgatcatactctgcaacagaaaggatcaagggttacagatctgaacggaagaagtcattttattatgctgccatcaatgcaaagttttctataacttttatatgtttattattgttttagaaaatttatatttatgatgttagattatagaattataatccaacatgcatggtagtaattctag

SEQ ID NO: 240645 - DNA, 1151 bp, Cannabis indica
tatgtcttatttatgaattttcactaagtaaggacttaattgagaagaaaataagttttaagttttatttactaattaagatactttgtaaggcctaattaataaataagttaaatggtaattttatttgataattaattataattattaaataattagatttgacgtttaaaaagtttaaagttaaaatatgacatttatgaaagaaaagataagttgttaaaataaaatgataaaattgtaactagtggggtccattatagaggccgaccacttaagtgatttttttagccatttatttatttttttaatccatataatttaaacctaatcatagaaggaatcttataaatagatagtgatagactcttaacctgacaacataacataagctccccaatctaatttttctgataaacaaaagagccttctctctctatttataaattgatctccctctttctcttgatcaaaatttcgtctctataaagagtacatttcccgctcatatcaagtcagtactcaaccatagtgtggaagattgtgaagaattctaatatttgaaggagatccaagttcagatcttgttattactctgtgatagaaaggaacaagaattagagatctgaacagaaggaaccataatattccgctactatcaatgtaaggttttctacaacttttatgtgtttaattcattatattagaaaattcatgtttaggatgttagattatagaatataatcaaacatacatgctagtaaatctagatcctggtaaaataactttcaacaatatatgttgtatgttttatgttttttataccgagtctgtcgactcacagttatatttctatgtgtaggtaaaggcacaactaaagctaagcggcagtgagtggtgagcttggtgaagagtgtacacattcaaaaatttagacttggaaggttgcgatcttcgggatagaacaagcttagtttaggttgtctctaggcgacactttttatattatgtattttatgtatgttttgaaaaatagatttcgggatttgagattgtaaatgttttataaatatattgtatgtttagtaaagtagtaattattacgtaaatttttattatacacactttaagttataactcttttaattagg

SEQ ID NO: 240646 - DNA, 870 bp, Cannabis indica
attatttgtcactaatgagttgttgattttgtagcacaattaaagataattaagctttttaaagcaaaactaattcaaaaggcaaaataataattttattaaaattctcgaaagtaacccgaagtggactcaaatgctcaaggaactcaaaacaagactccatgaaggtttatgtacattttctagtcttgtacagtgatttacaagtccacacttgaacattttaagtatgaaatttggctcactaacttgtgcgacaagttatttcacaaaaataatatctaaaatttctaaattgatttttaagattaaatatcattcaactaagagaacaaaactagaatttttgaaatcgaataaacgagtagaaagttatgcacattttagagcctaaaaaggtagctttttgccactaccctattttcagtctaccctttttaaatggcaggccgtttttcatagaaacagcagacagtttttcccagtatttctttttgaaaagcatgttaacggctataaacgactagtttttgttcctacactatataaactcgtttttcactcaaaaattaaggttggttgagcatttattcaacataccaaacatttcaagtgattttaagagctcacaagtttaaaatccaacaaagctattttcacacactttgagccaaaatttatatttatttcttataagtgtgcttgctaatcactctaagttcttcattgtatcattatacttctagagtgagtttgcttgtaattctaagcacatttccaaactgtaattgaggtgaggtaggcaccggtatgtacaactcggttagagtgagattgacactacaacaatccgagaagaggttgatagtc

SEQ ID NO: 240647 - DNA, 1212 bp, Cannabis indica
tttggtttaaagaatgctggagcaatgtatcaactactagtgaatggcatgtttgagaatcagattagagaaatatggaagtctatgtcgatgatatgcttgtaaagtcaataaaaagtagagataacactaaggatctcgcgaaatgctttgagatactcagaaagtttaatatgaagcttaatttaaagaaatcctcttttggggttttctcgggaaaatttcttgatttcatagtaaatgcgagaggagttgaagctaaccctgaaaaaatcaaggccctaatcgagatgccctcaccaacaaagctgaaagaagttgaagctttgacaggaagaatggcagcactaaacagattcatctcgaaattaatgaataaatgccttccatttttttaatgttttacgagtcaataagagatttgaatggacagaagaatgtgaagaagattttaaagacataaagaagcatttatcaacacctccagttttggccaaaccaataacttaagaaactttatacctttatttagctatctcagaacatgcaattagtgcagctttagtgcgagaagagggaaaacaccagcaacctatttactatgttagtaaaagattactaggggcagaatcgagatatgcccctcttgaaaaacttctattatgcctgattcatgcatctcgcaaattacagccatacttccaggcacatccaatcaaagtcctaacggatcaaccactaagacaagttttatcaaaacctgatgcttcaagaagattgataaaatatttaattgagttgggataatttgatgtacttaccacccaagagcatcaatcaaaggccaagctttggctgacttcctaattgaagggacaatctcaaaagaagacccagctgttgagcacgatgcagaaacttggaagctatacgtagatgaggcttcaaatgagaatgtgtcggggcagaggtcataatgatgtcgcctgaaaacttcaaattccactacgcattgagatttcaatttgatacttcagacaacaaggcagaatacgaggccttgttagctggattgagaataacatagacattaaaggttaaaaatcgtgtatgatttagcgactcacatttaattataaatcaagtcttgggggaataccaagcaaaaggcatgaaaatggaaaatatatttagagaaggttcggaagaact

SEQ ID NO: 240648 - DNA, 604 bp, Cannabis indica
agaaggagaaagtaaaaaataatgtacttttaattttaaattatatttttgaaaaaaaataaatatttacgaggaccaattatattgtgccacatgtataatgtgtctacatggatagttcaacatggcagttaatagccgaaaatggataaaaatggctaattgctattagaataccagtttacgggattttgccgccaaaaaatgaaagttgggggttaattgctaggaaaactaagcttttggagattttgccacaatttactctaaaaataatgaatattcacttgtagttagttattatgccacgtgtataatgtgtccacatgaatagtctaattatattgtgccacgtaaaaatttatttttaattgttttttaaagaaatatatacgtggaccaattaaattgtgtaacatgtataatgtatctacatggatagttcaacatgacagataatagccgaaaatagatagaaatggctaattgctaacagaatgtcgatttagggggttttgccgccaaaaaatgagatttaagagttaattgctagcaagattaaacttttgagggttctgccacaatttactcgaaaaaataatga

SEQ ID NO: 240649 - DNA, 1505 bp, Cannabis indica
aatgtccaatctaaagcctactagttattgtattgttgaaacattaaaaaaaaaaatcatatttattttcaagccttatggtatttttgacaagtgttgctcaagctttgttgtatttgtgatagtttaattatttggtgatagtccaaaccgtaaaaaccacaaaattcgcaccgcaccatttttgcggtgcagtttttacaattttttagtttcgcttgcgattgcagtttgtgaaattggaaaaactgcatatgcgggtttgtttgaaaaaatggtcaaatactgcaccacccgcaccacgaacacccctaagcaagggatcaaatataagaatttgcgtgcctcgattttatctgtaggaagttctcaacttaatagatacttgacgattggtgtcatccatgttggcgttgcatctatcatttcgacatcttcctcttcacatatgcttggctcgtccagtacctctactaggaccaaatttaacttgtagagatcaaattgagatgccagttttgctagagcatctgcattagagttttgttctcttagaatttgttctattttaaagtaatcgaacttttccaagttcttctgaactttctctaagtatttagccatttttaggcccttcgcttggtattctcccaagacttgattcattactagctgcgagttactaaagcatgtaatgctcttgaattttagtaccttgactattcttaatcctgctaacaaggtctcgtactctgcctcgttatttgaagtttcaaattgaaacctaagtgcgtagtggaatttgaagttttatggcgacatcactattactcctacctccgagccattgtcatttaaagccccatcaacaaacagtttccatgtttctgcttcacttcctgttccaaagtcttcttctgagtttactcagccaaagtctgccttttaattgaagttctcgggtggtaagttacttcaaattgtcctagctcaatcaaccactttattaatcttcctgatgcatcaagttttgatagtacttgtaacaatagttaatttgtcaggactttaataggttgcgcttggaaatatggctgcaatttgtgagatgcatgaatcaggcatagtgtgagtttttctaaaggtaggtatctcgattctgtccccagtaaccttttactaacttagtaaacatgttggtggtttttaccttcttctcgcactaatgttgcacttatggcatgttctgagacaataagataaaggtatagcattttcctagtaattggtttagccaaaactagaggtgtggaaagatgcttctttattcgtttaaatgcttcctcgcactcttcattccattggaatttcttattacctcgcaagacattgaaaaatgggagacacttaacaattgacttcaagatgaatttattaagtgctaacattcttcctattaaagcttgaacctcctttggctttgtcggtgaaggcatctcgattaa

SEQ ID NO: 240650 - DNA, 552 bp, Cannabis indica
attttttttttagtttttattaccttttgccggcgcgtaccttgtcggaaaaagtactatcctttaatttttttatttccttttattgccgcatatttttgttgacaaatattaggtcccacaattatatctgccaccgaattcccgccaaaaatttattcggcgtgttaactcgccggcaaaacgtcatcaagggcatctcaaccggcggccctattgccagcgatgcctttatgtcggcaaaaacctgtgccagtgtaaatgcttttaccaacacatttactagcctcgccggcaaaaggtgatacactgtcaagctattgccaacaccttttgccggcgaagaaaggcgccgacaaagttacatgtagtttttctggcgagtttttttgccagaaaatgatgattttcttctagtgccttcaatgtttttaatcgttaaaacatttagctacctataaatgatatttcagtaaactaatataattactaaaatgaggcctcaatcatttatctttatcaagcaaatctcaaaggtaatcatcgtttcac

SEQ ID NO: 240651 - DNA, 1686 bp, Cannabis indica
gcttaaaacaagcacctcgtgcttggtttgacaagcttcatcactgcctattggatcttggatttcactcctctaagtctgatcattcactctttatccagcatactgcccgagatacaactctagtgctcatctacattgatgatattcttgtaactggcagcaaccctaaactcattcagcatctcatcacggctctcaatgacaaattctcccttaaagaccttggcaatttacactactttcttggtgttgaagttcaaaccactccatctggtttacacttatcacaggcaaaatatgttcgagatcttctcaccaaagctcaaatgcttgatgcaaaacctgccccgacacctatgacaagtggtcttagactctctagttttgctagtgaaccagatcctgatcctcaattgtatcgatcaatcgtaggagctcttcaatatcttcttattactagacctgaaatctcattcagtgtcaataaagtctgccagttcatgcacaatccacttctcactcattggcttgctgttaaaaggatacttcggtatctaagtggcacaatttcacatggacttcatcttaagaaagctcctcttcatgaaatagtggccttctgtgatgctgactgggccacggatcctgatgatcgtcgatccacatctggttttaccattttttatggacctaatctagttgcctggcagtgtaaaaagcaacataccatctctcgttcaagcacagaagctgagtatcgcagcttagcaagtacagttgctgaattaacttggattcactctctgttttctgagttacacatcacacttcctcagccactaacaatatggtgtgacaatctcagcactgtccttctaactgctaatccggtccttcatgcccgcaccaagcacatagaacttgatctctactttgtgcgagaaaagatactgcagaaacttgtccaagtcaagcacgttccagctcatgatcagcttgctgatggactcaccaaagcaatctctaccccacggtttcatcattttcgaaccaagcttaccattgaagacatctctgttctcatagatgcttccaattgtaagcttgaggggccgtgttaggagtgttagttagttactgttcattagaatcagttaattctgttattggttcatttcggtttattagtcaatattagttctaactgattctgttgtacctaactgattctcctcatgtaattcattggctatataatgccaatgtctattctttcaatattgagattgccttttgttcaatctgtctttcttctatctttcttctctttactgtctttctctctctttcttgttcttctctctactgttctgtttttcttgttactggttcatcaatggcagagagatttaacagtatggaacctatttagtctttatcatgagaggagacaggttaacaacactacttggttgcactaaaagaaatgtgatttttgttggcgcataattttttttatcaagaagaaaaaagttttattaatcacgagagttaaatacaacaactagcaaaagtaaacaagccacacacaactcaagaacacataccagccaagacaaacaaaacctacttatcttgtaatctcaataatctctcacttacactaaaagtaagtgatatatg

SEQ ID NO: 240652 - DNA, 613 bp, Cannabis indica
ggatggttggaaggctgaccttggcttagagaagtcaaggtgccgcacgggtattccgctgcctaaaaaggtgagcccgtgacacttgtgatggcttccaaatctggtgtagaatgcatctttgataagtgaactaagtaatcactgagattcattgactgtgctcttccatagtccatcttaaagcatgaagccttccatacacccttagaaaatttacaaccaaagagagcatccccaagcatgtgaacacattgaacaagtagtgttgttgtaattatttttcgtttctgtataaaaacagctactagaagaatattatgtaccactctctatacaaaaatcttgatttttggaggtaatttaaattctaaaatgtttcccaccacctatcatttaaactcgatgtagacgaatccactaagagttattacccacacaggtgctttcatcacaattttggcagccaaatgaaatccaatcttaactgtgtgcataccagtattgtggtgatgtcacattaagatgccttgtgaatgaaaaaaaaaaactcaaaggaattgtgagaatgttatcaatatccattggaaaaaagtgttgttaaatcaaagat

SEQ ID NO: 240653 - DNA, 1167 bp, Cannabis indica
ggtttggtgatgtcgatagtaatcctcatacggagataatctctccaaacgccaataaaattttttggatcggattcaagaaacttaccgatagcattgcctactcctttgatcgtggcctccgtcatacatccaggttgaacatcatgcatctgtatccatatatccaacgtgttgagcgccaaggtttttggatcaccgcccactggtagtctccctataatcagttgcattctatcgtaagtccatggactaccgtcaatgacccttttaatatccacttcatgataaaactgaaacaagaagcgattattgtccatttgtttgacgaacatgcccatccccggttgccatagagacgctaagatattctgcattttttcaaaatccacaattcgattcgacaaaaatctgccgaccaaacaccatctatcatcaattccttcattcccactatccacactcacagccatctcctcgagttcttcttcttcaatctgaaaattgaagatatcctcccctaaaccactcatgcttccactgccagcctccatttcgaaatacaaacaataccaaaacaaggccaaaacgaactatatttattagtatgtttattataattgtaaacataaaaataaacatagccaataaacatatatataaaatgttttatactgtaactctatttagttataacttcccaattaaagtataatttacttggtccaaagtatattcttggatagaagttttactgtgtattatatgaatgattatttaatgattacatttttataataattattatggttatattttttttatttgtgatgggaggttattaagtaaattttttttttagaattaaataattataattaactatttcttaaaataattaatttaataaacaaccaaaaaagaaataaatgtattaattaaaattttggcatttaattttgaacgatagttattccattttagaaacttacttattacttgcttttttcttttttcttatttcttgtatttttccttttcttgctgaatgaaataaagagaatttaataagggaaatttgacattatatacttaaaaaaagcataaattgtttttatatgcttcttaaaaaaaatgtaaaaataataccctctaaacatctttaat

SEQ ID NO: 240654 - DNA, 872 bp, Cannabis indica
gtagcgtgccttagcattagggcgttacaaaaagggtctccatcaaaagtcttagaattaccaaagaaagcatctttaatggattcgccggagatttcaaggttccggccaagccccaataagcacccggcgaccccttcttcgccggagataaaaccagacaacaatggagaatcatttgtaatcaatgtagaatctccacaagagactcttactcgccggaaaatccttaacaggtcagtcttttccggatttggagagaccttttctccaattcaggatgagatttatgaaaaagttgatttgaagaaagtgaaacgaaagaaattgaagagcaaagttttggttgagttggttttgtttgtgatcttagttagttgtttggtttgtagcttgattgtcaagaaattagagaaaacaatcatttggggtttggagttatggagatggtttgttctaattatggtgatcttttgtggtttttcaatcactaattggtttatgcatccaatagttttcatcatagagagaatcttttcaagaagaaagaaagttcttttctttgttgatgagttaaagaagagtgttcaagtcttaatttggttggattttattcttctaacttgggtacttgtctttaaccatggtgttccaaggtctaaaacagttaccaaaattctagagtacataactttgactcttgcaactttagtcattggggcatttttatggttgttaaagactttatttttaaaaatctcttcttcaagttttcatgtcaacacattctttgataggattcaagaatcaatttttcatcattatgtgttacaaacccttttagggcctccaagcatggggcaattgagttt

SEQ ID NO: 240655 - DNA, 1084 bp, Cannabis indica
aagttgtacttttattgaaaggtaaagcaaaaattttcgcaagctttcatccactacaatcaaaaatatcacgaggttgcaaatttcctaaggttcctttagaagctaaaaattttaaataagactctgaaacatgaccaattaggcgagagtgccacaaataaaaactagaagataaaggagacaaataaaaaaaaaacaaattaatactaggagctccatatactagtaatctcagttcatctgaaacatataatccccccgcctacggccgatcccaatcagcttatgagactgtggatcctacacatgacatgaagtagaagaaaaagacactgaataaccagaatcacacaattgaccaacaaataaagattcaatgaaagattaggaatatgataaacattaagaagcaacaaatttgaattaacaacatgaccaataccaactaatggcatgggagtatcatcagtagtcatgacagacacaaatgatgtaggactcaaagagataaaagatgcaaaatttgaagacatatggtgtgaggcactaaagtccaaaacccatgtagaaggcgacatacctgacgtgctagtggattattgacctaccaaagtagagacagacatgggattaggttgagtagcaaggaacttttgaaattgttctgacagagcagtaaaatcgtaagaggcaggtgaaggaacagttgcagcaatactaaattgtggaggtcaaatttggttgttaagttgtggttgattacccatatgaggaggcttggactaatatctttgttgctgcagagcacgattcacaagcttaggacattgagctttccaatgacctttctgtttttaaaagctacactcatcaatactaacctttgtgtgaggtttgttctcttgtagaggaaataatgtagtaggaggaactgccaaaataaaagaattgggagttaagggaatgcctttccctgactgagacttaagataaatttcatctgctaacaattcattgactactaaatcaatcgaaggaagcagagaacgatgtatatggaaccacgaagttcctcaaaatc

SEQ ID NO: 240656 - DNA, 1177 bp, Cannabis indica
aaaataatttccaacagaaccctggtgagttttggggaagtgaacaccaaattgaccaagatttgcttcaatttctatacgaggataatcctcgtcttcgggccagtccttcctcttcaagtgacgggctctccacttcaagtttttcatccagccatatgatgatggcttgaacaaagcaaacgatgcgtaaggttaacacgttcgaccctcacgtggcccagcacgccacattacccagcaccgaacaagatccgcccgtccaggaggagggggatcatgagggagatgctgaagtccaggagatagagaaactgtacgatgtctgtcctagcagccctttcgaggcggaggaagaggaggaggctgcacctccaaattttgggggatacaacgaggctggggagccagcaaatgcagacggtgatgtcctggttgagggagtgtactacctcactgaggagcttactgctgtagttcctcatagggaggcaaggtgccttaggtgccaggtgggtgagcactccgtccaaagtcattgcggcacgcttaagtgacttggaccaatctggcgatctgggcgaattggaatgttatgtctgttcctcaaaccaccgagctacaaacccaaagaaggggatgtgtgcctggtcggtgctcattccaaacaaggggcgatgctgcctttgcaccctactttaggaaggtggcagacttcttccgtctttgtccgacccagtttactcccaagggtatcaagtatctgttgggttttatgccataaataaaactttatttcaatgtaatctttatcttttaaatatcaataaagaaacagaagtattttcatcacttattgtgtgtcatttggtccttattatcatttatatgtttatttgatttataaattcatccaaatccatatcacatttgtattcttgtttattgtgtcatcagcacagtggaaagtaatcaagattatgtgattaaatatatattcctaaatttatcagtatatagggtttaattgatatgataatctacaacatagtttacttgcaccttggataagtgctatgttctttacagggcattggttaaagtaaagcttgggttcgatgcatggagtatgcaacggaagggaccggatattgacctttgtatagatatgataatt

SEQ ID NO: 240657 - DNA, 1766 bp, Cannabis indica
aatcggcaaacccgactcccatgagacccaatttccatgatcatcttttagttgagtaatctggttgttttttttccctactactagcagtcttatggaaatagctactattatggtccccttctttcaaccaaaattgtttagccctttgcttccaaaaactctctctttgatcaaacgcatcataaagcttcttctttgtttcggcatatcttcggactgacgtaggatcccttaaaccatgaagctttttcaagtcagccttataactcttaatacggtgatttagagtgccagttaactccttcccccagctagatagcttctcagcaaacatattaatcttattagagatgctaatattgtgttcttgggaccaaacatctcgaataatttcaaaacaaataggctccttcaaccaagaattttcaaaacgaaatctacgactaggggcaaagttattaaccacgactggttcaagaaacaatggagagtgatccgaagtagcgaaccccaaattagagagagtagccgaaagaaataattgattccaagatgtagaaacaagagctcgatcaggacgtacctcaatccatgcgcttgtacctcttcctttttcccaagtgaattgatgaccttgcagctcaatatcttccaaaccacactgcaacaatgtttgttgaaacccagttaagagccactggggataagggcgcccaactctcttatcctcttgccgcacaatgttgttaatgtcccctataacacaccaaggaagtgatgatctgtcttttaaactttgaaggagtgtccatgagtcacttcttctatttctattaggttctccataaaatcctatgagacgccaagttggagaagtgggcgatatagagatttgcaagtcaatgtgatgcttagaataacccagcaaagacctagaatccttatttttccaaagcaaagcaataccacccgaggccccattagcatcaaccgcgaaaacactatcaaaattcaaagcctgggccaggcccaccacttttgatttatgacactttgtctcacacagaaatataaaatctggtctcttttgaaatacaatttcttttaggaattgaatggtccgttggttcccaggcctcgacaattccaactcaatacattcataatgcttggcgggcctggaaaccaacacccgactctatcaagttttttaagacatcaatttgggctgcatcatcattctcttctaagttggagatgtccatatttttgaccccctaattatgaatacttgtctcacggcccagctccaccttttgtgtttcattgagcccaatttctttttctaagcccattcttcttcatcctcatcatgaatcgagaacgccgcatattgttcttccattctccgaagacagaaatcccacaaaccaaatctgtccaaccgaaacaaaactttccaaaataaccttaaccaatatgatcaacacacaacaatacagattaactcaccatgtcataagacaagacaataaaatatttccttaggaactattatgtttatttccatataaaggaaaacaaattatataatttaacctaacataccataccattagttgtaaaaaataatttctttctcttatagtcgctctcgtttgagtgtgttttgtcgctctcgtttgagtgaatagttcttgtatttctgttatttttatggttgttgcttgagcgatacctcatggcttctagcagtagcaatg

SEQ ID NO: 240658 - DNA, 726 bp, Cannabis indica
aaagtcgccgatggttgttggttatgtggttgccaagatttgggtagggaaagggggcttcaatcgagattttctaggaaataaaaactgaggggccgaatgttttgaattttagggttttttgattttgttcttaaaataaaagtggaaaagcctaatatttttttattttatttcgagtatcgggtggatatgggctatacctgtacccataaagaggtgttttcacatcttcaaacccgccgtaaaaaaatgggtttcactccacccgcataatagtttcttcaaaacctatttctttttttgtttttgaggagaagtcctaggtgtaaatgttctgtcctactgatatgacaattcttaagggaaaaacagaaggtattaaataaaagaataattaacatttttatcctctgaacttttaacactacttgatcctgccccataaaatatatgacttgttaaaaattcacactaaaatataacagttacataatcatgcaccttagagcatctccaatggagatgctataggatgcttgatgacatgaatatatttttagcattttctaattgatgcttaccattagaatacaaaagaatgccacaaaaattaccataccataacatcctttacatcttctctttcttatttgtttattattattttatcataaagtaagaaattagttcatttaatatctattaaataataatctaatatta

SEQ ID NO: 240659 - DNA, 1242 bp, Cannabis indica
aagtttctcagagaagatgattcttatttttagagcttaataatatgagtagctgggaacatgttgtacaataatggaattcaagctttcgaaaggatcaaatattagtttccttatagtgttaattttgggagtgttaacaattggatctaaatctataataagttatagattaactattcacattgaattaatgatacaaaaggaatcaagagataataagaagggtaaaatagtaattggaccaactctaattatgaactaataattggagggcaaactacttataataattatttcaatggattaccagtaagaattctataaatataattttatattgtgaaagagtgtatttctatatttatagagcaataataataaattaataaattaaattattctattgacgagatcgataataactaagtatttattgaagcttcgaaatataattttatggttctaagtcacatctgtgcacattttataggggaaagtttaatttgatgaggaaatatgagtaagaattaatttctatgagaaataattcttaagggaaaaagtaataaatttgtgaaaatcattattttgaacattataacaattatgaattgtgtatttaaatagtatttaattatttaattttattcgataaaactatattaattagttaaatataatattattcttaaataatattaaagagagaaatatattattttagtgaaaataatatttattttaatccttgtgaaataagagattaatgagaattaattaattattatttattggaaaaataaataataaatcttatttgtggtgaagttaaaaaaattaattttaagacctttaatatttagcccacacatgtagggtgacgtataaaggaccatggtaattttgtttgattattttattattaaattaaaataaattaattaattatcttttaattattcaattaaatatattattggataatctatttaattaaaagataatactaaaattaaaggataaactaatttctgttaatcagttatataatttttatatttgaattcgaattaaattaaaataagtaggtttaacctttaatatatatatatatgatataatattagaataacaaataacctataattttgaaaacaagtgaattaagcaatacattttcatagaagaattaattgttgaaaaaattacatggttttttactactctctctctccctca

SEQ ID NO: 240660 - DNA, 1107 bp, Cannabis indica
ttaagaatgttgcggacttcttcggcctttgtcgggcccagttcactcctaagggcattaagtatctgtttacccttttcatcctttacgcctcccgtaagtgggatatgcatttcccccacaaggacagctggttctttgatttgaagtctacccccaaataaggcaggtcggggtacttctatttctctcaaccagacttcaagttgttgacgagcaccgatgactcagccatcagaaaaattgggcattttattgatgagtacttcttggtggatggcgcgggtatcacccgtactcggttccagcagatttcaacatatcaccatcctcccctcactgttactcttagggatagagctcaaaagcttgcttgactgccgggggaagaccggaatatcatctggttgacctccgaggataatcttgtgaggtacaacctctatctaaagaatttcattcccaaaccagtgagggagaggaagaggaaatctgatcctggacgggctaaacgagctcgtttggagaatgaactcttaagcgcgaagctaagttgaagcgaggtgcaagggccatgcagtatgcttaggagccctcgaatcctgaagatgaggctgaggaagaacaggtgacttcgctcaaaagaagcaagaaacttccagcccagcctagccctatcgaacatgcaattcgcatcatggaggccatctctcccgctcggccacctcctctcgtgctcggaaaaagggaaagttgttatgtctaaaatcagaggcatgtcaggtgcgatggactttcgaggcctgctcgagcaatcatcttgcgtattacttcgtccttctttttagcttcttgactattatgctttatgtttctgatgtctatttcttctaaccatgttgttttttttattctgtgcagacatgtctcaaaagatgcttgatgctctaaaaaagataatcggcggaggctcaagcgcatctcctccagccaagaagtctaaaggcgttgagggaacctcttccaaggaaaagacgcctgtcagggaagtcatcaatctttctgaggagctaacggttgcaaacccctcaactccaaaagttgcct

SEQ ID NO: 240661 - DNA, 1551 bp, Cannabis indica
taaaaagatcttttgatctgacatgggtgggagaagttaagaaagaatatatgcagttcaacaatcttttatatctatggaactctagattatattcataacttcacgggatctctataacactcaggggtggaagaagctattgatatatgcagttcaaatattttttctttaaactcgagattatactcaatacaccacagtatctctatgacacacatattttgattagacatgaatgtaatgtaataaacaaattagcaaattattagaacttattcttgatcctgtaattgttccaattaatatgttactgtagttatagaaattgataccaataaagttcttggacatagtatcacaatatcttatctgagtgggagaattttaaaattctagcccatcattatttggatgacaattttgatagcttactatgttatgatcatgataggaactttagaattcaactgagaaagtaaatctaaccattcatatggatataaataacttattagaattatgaggataagataggtagtttcatccaggtctattcgaatgacttaggcaaaatacctaatcctcatgtaatgttttatggtatctttaatgattacttaatcttaagcaagtattgtacattaatgttaatactagattgctatgttgatgacttagtctagaagaaacttatagtttcagactaagataatatgtcacaacaagacgtccctgagaaacaatagtaacaagttaaatgtacttctatgtatgaatttaaccagactcctattgttgagtgggagccatctaagatgtcatcaaacaaggaacattaggagacagtcaaggaagagattctaaaagtgatctatatgttagatgataggggtgtatattagaatccttatatctacaccaactcataacctattagagatggtgtttactctaggggtggaggaattattctagatgatgtaaaaatccttctatagtaatttaagcttcatcagtgaagctacataactaagttgctttccaaaagcactggaaaagttattcaacttaagaaagttcttaactgtttaatctctattccattttggatagaattagagatatgtcttctatttattcagatacacgttataaacagtaaaaaattcagtatccctagatgagtaattcatatagaaaatgatgttgcataatgttttatgaacacaaaggaagtaatcgtggagaaagctgtagcctaccatagacttacagatcctataatttgggtttagtcaaatacactacacttgatctggatatcaaaacaattaattgattgaaatacactacttgttttatgttagtgcaagtgggagtttgttgggattttatgccctaataaaacccatttcaatttaatcttatttgttatcaatagaagattagaagtcatttatgtatacatgtaggtttcatgtttatgatttaatgtgtacaaaatctgttaaatccaaaacatatagttattcacaattacagttatgt

SEQ ID NO: 240662 - DNA, 935 bp, Cannabis indica
aatatgaaaaaaatttcaaaaatgtggggaaaccaataagaaactaaaaacaaacctgggattgaagaggagcactatcctgattagtttttttgagcaggagtgcatgggaaattttttcatgggcagcaacctttgatttctttttaggaggagctcactcacgtttcgacaactgaggagcaaaattgaaatcatcgtcttgaacaataggatgtttgcccttattcctattagctacagatttcaaactcattttagaacttttctttggcacaggggaaggagtggatgaagaacgagtaatagccatatttataaatggattaagagaaaaagaaggagagggaaaacggttatgtaaatcggttaatgtgagttaaaaaaatggaagaacaaaaagaagagggaaaacgagttaggatcgtggagggagaagagttcagctatggaggttttagttttttaaaaaaaaaaaaactgaaaagaaattgaaaataataagaaaagaatagaaaaagatagggaaatgatgtaaggtatgattgatgtagtcaccaatcaatgacgtgtacggttgcatggagtgtgtgtgcaaatggtaaaattgtaataaaataaagttgatgagtataaatgttggtttacccgtgtgaaagtatatatgtaataaagtatgtattttgtatttttggtgtaaaaatttctatttttaattaggtagaatcatcatttcttatggtaaaaaaaaatctcgaattaaatgtaatataaaatagaatcttttatgatgccacctcatcaagttgattttttaaagttgttaaaaatttattatagcaagttacccatcttgtcacgtcatcaatataataatattttacgagttccagcaatagtgtgagttccatttacaactaatatatatatatata

SEQ ID NO: 240663 - DNA, 1115 bp, Cannabis indica
ttcattgaatttgtaaactgaatattagtttattgtttttttttatgtgtagtgaaaaaaaaagaaagttttctaggcactgcacagtggccgcggcgaaatagtctaggcaaaaagggggtgattgtggatgccatctcaccgtggcgaggccgtctatggccgcggcgagagtgccaagacggaaataaaaagggggttgcgatttttttcaacatacattcacccattcttaaccctaaaccacccactctgaaatcccttccccattaccaaaaaatcttcaatctcatctcaccaaaaaccatttttcttccattattttcttaatcattcatctccattcactttaaaaaccctatttctatcatcaatccatatttttctttcaaaaccacactcaaatccctaattttcattcaaattcaaaaatccactattcatcaccatctacctcaagaacttcaatgtcttcatcaatggaggtagagtgaaggagattctcattaatgtgaataatttcttatgattatctatgaaatttttattagataattttgaattcttgagaatcttgtgaaacttggtgtgatttttggctattgcttggtttttattattgtggaaaattatttgtaagtgaagattgagtaattggtgattgggtattcaccgaaatagaggaattttaaggggaagtgctgtcgaaaattttcttgagttttcttaagtgttaagagtattgagtgaggatgggacccaaaacagcaagagtgagtgagaaaggtgcctcttcatccaacccacctaggtcattgggctgatctaatgttaatagggcgaggtttgtaagtgccgaagcacaagagcgctatttacaactaaaaaaataggccattcattgaagatagggatatggaaattggtgatcttagaaatccaagaatcggcatccctcctatatttgagccaataagagaacaagtaattagcaggggatggatgaaatttgttgatgtcactgagaggaacaaccaaactttagccctataattttttgctaactggccagagaggaaggatgacaaagtaaaagttaggggtgttgatgtgcc

SEQ ID NO: 240664 - DNA, 1394 bp, Cannabis indica
taactttctggtaatttcgaatttacaaagtcatatatcttcactaatggagcttgaaaactacacgttaacataaatcacttctaattcacttattgataacaaatcagattagattgtaataggttttatttagggcataaaatcccaacatatactttataaatgtggaataaggggttaaccctatttgtgtaaatcccagaattgtgactaggattaccgtacttggttaggagcacttgggtttttcgaatctcaattattgcgggacatcaggtaagacagtatttagcacatagagtaacgcatggtggcgctgatactggaaatattataagtgggtaattagtaacccaaattagggttattaccctaactgagtggtttaatagcctaggtttattaccccagtggtatatgttgtgtaattgctatgccatgttaaatgtatgagtatattgagattccgggttatgtgttcgaggcataaccgggttggacttggtaactagaacctagataaaccgttgtaaggccttattgtatttagacgtgtgagcgcaacacgtaggtctatgttacataaacataaataggcatgtcagcgtaacatccaagtttatgtcaaacatgcatatgagaatggcattgatgtttatatagtgtgatagatatgtttatcgatattttatactatcttgctggacttggctcacaggtgctctactgtgcaggaaagggtaaatatgtttctaataagccatgattatgggagctggacggtgcatgtacatgtttgggccacactaaaccaagagggttggtgtctaccaatgatgagttttgtaattctattttaccgcttaggttggctagtggaaacggacttgtaatagtattttgtaaaatatttttgggatcccgatatatgtaatttttggtttgtgaagttaaaattatgacaagtttattttcattccatttgtatttaaagtttaatttctgcgctaattttattagtaatctcgtttaggggattagggtttcttaattatcttgggtaacgtgccaattagttagggcgttacaattgggtatcagagcgccaaggtttctaaacttcttgtagaccagccaaagatgtacattcatcgtcaaagacaagctcgactcatgactcagggtgacggtgtgctagtccgtcaatggtgacaggcctacacatactaccaagctaagtctcctgcttccaagaacgcagctcattccaacaccatgagggcggaggtggacttggccaggaaggacgctgatgacgctagggtggaacttggagctatttgaatggagctgggtgaagtcaacaagaagcttttgttggaaattatttt

SEQ ID NO: 240665 - DNA, 1732 bp, Cannabis indica
cttcatattttcataccctatagtgatagagtaagtgcccacacacatcaaatggtactcaatcatagtgtgtaaggctgtgaagaatccagtttcaagagaacgagattcagactcaaatcttggtgatactctgctacagaaaggatacaagggttagagatctaagtgaaaggagccattattattccgctgcacccactgtaaggtttctgaaactttatatgtgtttatttacattgttttagagattcatatttaggatgttaaataacatatatggtagtaaatctagatccttgtaaaacatattccaacaaaagtttgatcaaagtggacagttgcttggacatctcttgctaaacctcctctatggcagcaagacgattgttcaccaggataacttcctgcttgacgtcctggacatctgcaggagcagaactagaacttgcagtagcaggaacagcagaatttgcaccaacaggaaccttaggaaatgctccatcaaagtactctgagggttgaaatatgctgccactgaggggaggctcaagtgtctcattggaataagccacatgcttctaagaggaatgaattttatagattaagttggcaaaaacaagcttatgagtacgcttcaacattaaacaatttggcccaagatagaagaagctagattgatggatgcccctgaggtgatgcgaaagagaaaatttgccaagtcttgagacaccactgttttgttggagttcggaagccaattgctaagagcgaactgcatgagtgaagcatggccataagtgagaagagtgatgcgaagactttagccagatttccattcaactcatgcaccagtgagttcagtaatcatgaggtgacaatccatagtcattatagcatttgacacacctttgggcagttgcaaagccttggaaatatccttctcagtcaatgaaaaccaatgtcctcaaacataaactttaccaaaaaaattcaaatttctcatcaagcatatcatcagacaaatttgcataaaattctttgacaataccttcaatatacccttcaaaactagtaagagtattttcccaatgatgatattgaacaaactttacaataccatagactcgatgagcatgcaaatttaatttctttcactctcaaactttcgggtagcatatagattccaatcacgttggttgtcacggtaataaaatcaggaatttatagcttgagagggagaaatattaccaggaatggagctcttcatgggttgtttacccttggcagtagcagcagaatgaggaggggctgatgtagatttgggaaagggtggcttaggctccaggttagtttcctcactgtcagaggagacaccaacatcttctggaagatcttttccagaaggaatagactcagttttggtctttgagtcatcagaggacacttccatgggttcttcttctccatcagaactcgaggaggttgaggggggattcatcttaagcttcttagcaacacgaattagtttgtcatggtgccttttggtgtaaagttccttctcaagtgaagctttttgtgcacgggttcgagaggaagggccctttggagttgatgctacagaaaccttaccagttgcagcagcaggagattcagtatcaagagaaggagagccctttgaagatgaagatgacgaagttcaaaattttatgggtctcactgattttcgagc

SEQ ID NO: 240666 - DNA, 1022 bp, Cannabis indica
ttttgacccttaatttacaaataataaaagaaagaactttaaaggaaaagcaaattgatttttctggtttttctacccccttacccgaacccgctctcgctctcaaaccctctttttgtttcaattctttaattggtgaaaattacttggaattggcttgaattgaagctttgaggatgaagagctttgagcttggaagtgaggtagtttgcttgctgagtttattataggaaaagcatgttatgggttgtcttgctcttgaatttcatgtatgaggaattgtgttgatcttcaaagatttaggtgtgttaattccatgatattgttgtgagtttattgttaattattggatgagattgttgaggattttctaggttaaagtttatgtgttaattggtgttatgttgctggaaattaattgagttgggttggtttggagctcaagttcttgagcttgagttcttgttgattaaggcatgatttcgtgttattgtgcaatttgaaattgggggttatatgttggaatttaatgcatgatttatatattttaactctctaatgtttgctagcaattttatttggtaatttgagagtctgattaagttttggggggtgttttggttgtgtttggaagctaatttttgtgtaaaagcttgttggtttctgggtttggaacccaggtgccgcgaaatggtctttagcatgtcgcggcccgcccctcttgttggaacctgggagttggtcccaggtgccgcggcatggcttttgcatgtcgcggcccgtcctcgagtttttgggcagatttgagaaccaactttgaaaatgcatatctttgtgatccgaactccgttttgggagttcaaggtaccgttggaaagctcgtttcgagctctatgtgattatctgtattttaaatgccatgaatataatttatgaatgtggaatcaccctatttgtgaaaatcccgaattttgtgactaggattaccggcacctggtcaggagtacccggggatttggaat

SEQ ID NO: 240667 - DNA, 799 bp, Cannabis indica
tgtggccaaaaaggtcataaccagaagaaatgtcataactaagcaattagatattgatagaacattaatttcaattatttaattttttttctgtgtacttttacaggcaaacatgtcactttgatagattgatattattgatctcccttctagccaacgacagtgagtcttaattaaaatgtttagattaaataaacaatagatggcaaagaacaataagtaaagcaaacactaggatttatagaggttcgtccctatgatagtggtaatagcctacttccatttcagttgtattaacttatgagacaaagaatgaagtattccttctcgaaaactctcgtaaaatatctttgagtaatttgctcttgcatcgtcatttctctatttattgttctctctgataaatttggtatccctgaataatgagatgagaccactatttatacgggctaattacataggaatggtttcccttaatctataaaaaataacataggaaattgacatgtttccataattacaatgaacaaattggacaaatctaggttaattgcttttattctctgaatgtacgaattaatcccataaaaatagtgattgcttcataacatgcaagttttgagataacatcgatcactgctagaatttccaacaaacatttgttgtttagtgcatgctagttgatcacgcggttgatttggttggatgtccaccaatgactttgctcggacatcctactatgtacctctgacatggatcttcatatcaatctttacggtgtaacgccccaatattttgc

SEQ ID NO: 240668 - DNA, 1663 bp, Cannabis indica
ataccatgttgtaacgccctgtccaacagggacgccacatgtgtgtttttataaaattcttatttaatttactatataattatactaaaagtgtgcgtaattaaatttttatatttaaaaacagagatataaaactactttatgataaaagataagtaatattaaccacgtggtccccctgttttcaaaatatttacaaactggtttaatagtgtttttactacataaactttgtattcccaaaaaacattccaaacagagcatcctgttcactgggtcgtgccactgtggctgatatgtacattgctgctacgacctcaaactcatggctgctcaatctttgccttccctttacctccaccataaagcacccgtgagtcatagagaatcaggaaaagtgaataaaacaataaccagtaatattcatcaattcaatctcatatcaacatgcttacatatttacacaatatcataaacacacaatcctggtactttataaagtacatctttacaactcgttaaccacgagctgaatatgtcactatcgttgccggatgaagcaaacgataagtaagaaacctatccatggtttcatgagtaattactcataacggtgataaatacttccaagccccggtcacaatcgagactcaataaacatttaattagaatcttgataataatcaaggctataaccattcaaccgctaacatttagccacatacggtgcttaccacttttcataactcaattcagaactcaagtgtgcgggctcacatgagtggaacgatgctcgacaatctcgggtcctatgtcacgacaaaagtaaatcaataagggtctattccaaaacactgtcgaaaacccgcataatagaacctagagttttctaccaaatattagaaacaccctaaaataaaatacatttttcggctctaatctatgtctcatactgtagatcttttcataagctttgaaacggtatacagaatgtctaaaacagacacacgaatgaaaagttatggataaaatacaaaaattggggattcctgaaaaattgaccatctggaattccggtcgatgcagccctgtacaatccggaattcctgctcactacagaaaaaactcgaaaatttcagctcttcaaagtctcaaaacttgctccaaacctaaccaattgttcccaaacttcacagaacagtataataaccataatataacatattccaagcttcaaaacccaacaattaaatgattgaatcaaattcacaaattaaagtgaagaaaactcaactttagcttcaacaaactaaactcaatcaagcagccttagaaaccacttaaaaccatttctaacatactcaaaaacctaccctaaacacaacctaatcttagtctaatccctacagccacagaaatgtaaaactctacctcaaaaccaactcaaaacttagagtttccaatccaaagagtaagaaaattacctcaaaacttctctaggttgtttgggataagattcagcttgaaaatgaagaaaatggctgaagagaaaccctcaagctggctggtttggcttgcaagaaggggaagaagagaaggagaagctttttggtgccttagcaactaagtaatcccatataaaggtttttttctttttttttct

SEQ ID NO: 240669 - DNA, 2119 bp, Cannabis indica
acactgagatccagaacctctgttatgctcttaggctcatgcaaagtcatactaatacctttcatcatgataaggtggagctctgtcctgcagtgaaccttgcattcgaagagaaaaggtgccaattcgtcgaatggagggatagagagatggaaatgtggaaggctcaacaggcagccatcgacgaccgaacaagacaggccaccgtactgatacggtgggcctaccaagttgctaactagcaacctgcgtccagcattccactgggcagctcgaacaaaattcatgctgggcatactgcccagactctgaaaggttagccgtccaatccccagtcacaggttcaacctatgggccaagtggtaggcggccagaccttatctggcaactcatcaggtggggttatacccaataacttttcccagactagcggttctggccaagtgatcagccaaatcaactagatgttgagacaacctggtgttccagtatttaacagactggggacagctcatgatctcggggatgatctgaatagagggagaagtttagacgaacaatatgttcaaccagccactcggcctagtatccacatccaagatccagctcaaagagatcctgatgtggcactgatcagtcaagaggccaaacaggttcatccatctgtgcaagcacagttggatgaactgaaaaatatgttgcaaggcctggtcggtcaaaagctcaatgatctcgagttggaccgggcacaccggagatcaatgttctagagctacccctcaagttcaatatgccgacctggaagatgtacctagggaaagaagatcccttatcacatctcaagtattttgaaatgcaaattgacttgcatggggtacgaggagatgtgcgttggagagttttccctgccacactttcagaagccgcacaacaatggtacttcaagttgacaccaagaaggttcaactcttggaaagccttctccttagagtttcatccacaattttcttcttctttccaactcccactgcatttagaagagctggttgaagtgaagcaaagaacaggagagcctctccgagcttacataagcagattcatgacagaggccacaaaagtagcacggttaactaaagaaggaaagctagctgcgatactcgggggcatcgagattcttggagagctacggaaagacatcaagaaaagtggtcccatagactcaatgagtgatttcctcgaacgagcaggtagtttcatcaagcttgaagaagccattcaacgggtagatgtcgagcctagaccgggccaaccacaggctccttcagttggaacatctgcccaaaacccccagtaccctagtagttcaaatccagtcggcaaaagatctattaacaacggcaaccaatgcaatgggaaaaagagaaagttcgtaggcaaagccaaacagacccctacagagaatccttccaagttcactgttttctaagtgctgactgacgacgtggagaccatctacatggccactcagtctgtatttccgtacaagaaacctgctcccatgaaaaaggacataaataaacgggacatgtccaaattttgtcgttttcatggagattatgaccatgacactaataaatgcaacaatctgaagcgacaaattgaattcttgataagaaaaaataacccgcatgtgcaaaaatgtgtcaaggctaactagagtcaaagggtcgcccaaacggacaataatcaagacctgttactgcctccaccagtggacgggcatttacaagtcatcattgggggcccacatatagctggatattcaggaaaagctcgagaaaggtatgcgcaaactttacaacacgaacaaatagaagtggtcctggtcgtagaagaaagaaagccaaaaatgccacgagtaagggaacccactataacattcactgaagaagatgatgtcaatgttcgcttcccgcacaatgatccattagtcgtggaagtatagatagccaacaaaatagtggcccgaactatgatagataatggagcctcagcaaatgtaacatccccgcttgaagcctccattgggtcctcacacccacggaatgaatggctctta

SEQ ID NO: 240670 - DNA, 932 bp, Cannabis indica
ctgctgcaatcaatgtaagattatctaaactctaatgtgtttaatttcattgttttagagatattcatatttaagatgttaatcaacatacttgttagtagggctgcacatttagatccgccaacccaaaaaacccgaagacccaacccgaaccgatgccaaaaaacccagctaactgaaaacccgtatagtcgggtcgggttgaacccgaaaatgactgtaacgggttttgggttcaggtcacatattagttattttcggtggtcgagttagaaaccgtaacccgaaaatatcaaaaattaaaaactatttttttattaaaaaatcaatacattaaataattaaagtaattactaattacatttaccaacttgcctattcgtattctgtacaactaaaatgtaaatactattcaaatttcaatgaatcaatcaatgaatattcaatattgaataggcttaggctatttgtattctatttctagttttctacaattcttttcttctttagttcaatcttcatcattcttcagttaatattaataataatattcaataagtaacagtaacacagtcagtcacccacaatcccacacggccacacccacacaccacggcggccacacccggtcacccaccgtcccacgaccacacccacacgagtcacgactcaccctcccacacacccaccaatatcaccgtcccactcgactcgtccgactcacccacaccagtcggtgactggttctcctccccggcggagtcccatcccaaagcagtggcatcgcctcggcagtcggctggctcagtcgcatccataccagatattaaatgtctgtgtgtactgtgtgtagttgtgttatttgtgtttgcacattgtgtactgtgtatgtaacgccctgtccaacagggacgccacgtgtgtgcacttta

SEQ ID NO: 240671 - DNA, 1264 bp, Cannabis indica
tggttgttttgcggttttgaaacgatcgaggtatgttcatcttcattgttcgctctgtacaacagaaggtttagtgcatgtggttatttttgtaaatattatatgtgaactgtataatgttaatgggtcgccatatattttgtaattttttttcctttttatattttctatttttttcccgtaagtaaatacatatagattgaaagaagttatttcacacaataattaccaaaaaaattcagtttacatatataaatttaagatatatattttctagggggccatggcccctataagtagaatgttgttttgttatttttctatcactctatagttatttatttatttatttttattttttttatagttcttttcatattgtttgtttttaggattgtttttgaactaaaatatagtatttgtgtaatttaaaactttaaaatagtatttttataaatttagtacaataaaaatgtaaaaaatttgtgtgccaatatttttgtaaaattttctccattttctaatatttgtgtaagttcactagtccaccgcccttatccatagaaattcataatataatgtgcataggagggccccaactcccaagcccaatgctgagtcgttcttgtgtgagacagcttacgattgagggcacagatttaattttaatccggcgttttgaaccaacggtggtgttttgggtaaacatcggggcaccgtccacgtccagtccaagtccaaggacaagaataacaggaaattattggttgggaggaaatgcatggaatggatactcagtcaccaaccaaaccatgagatgagtcatgtcatgacagtctcacactcagtagtatttgggacccacacactattattattgtgtactacttttcagctttcagggcacccgaatttctacgtggccacatctcaccattcattttcaaaattggccttactgtttcgttggccctacttctagtcctctagtattttgatggaggaaattacatttataacaaatttattttatttgttttaatttttatttttatttttatattctttaaaatatattcacttttatagataatatcttctttagatctcttaagttaatataaattatatgctaaactttagagagtaaagtgtattggacaatctacttaaaaaaagtagatatattttaataaaatataatataaatgtatttttaattaatagataccaaaaaaaaaatatttttcaatttattccattt

SEQ ID NO: 240672 - DNA, 1126 bp, Cannabis indica
atttgatattttttagtttttaatttttttttctagtgtaactctaattagttataacttctcaattagaatataatttacttggtcccaagtatattcttagatagaggttctactgtatatgtgtgagcgtaacatgtgagtctatgctatatagacataatagacgtatgggcgtaacacgtgaatcaatgccacatagacataaataggcgtgtgagcgtaacacgcaggtctatgtcaaatagacaataagtgtggtggcatcattaattatgtgatatttgtttattgtgtatattgatattttttactgtcttgctaggcttggctcacgggtactctactgtgcaggaaaggataaatctattagtatttagtcatgagtgcaggagcttggcaatggattgtacatgttcgggccatactagaccaagcgggttgggtctacctgtggatgtattttgtattcttagatttttccgcgtaggtcagcatataaaataacttgtaatattttgtgaaaagttttatgggatcccgaaacatgttgtctttttgaattgattgtaaagtttaaattattacaagttatgttttttttattccattgtaatcaaagtttaaattttcctgctcttattttctagtaatcccagtttagcgggattaggttatattactggttgttgtggcgtgtctaattattagggtattacaaaaatataacttatattttggctctaaaaaacacaccattgtaaagatcgttgcaaccttcgatacagtataataaaacttccaaaatggacacacgaataaaaagttataataaaaaatatgattctaaattttccaaaacttcccagaaacggtaaaccggttgagaaacggttaaccgcttccccatgaatcggttcaccaaccagtagactggtttggcagggtaaaagtaaaaaattccaaattttgcactcaccgaaacactaccgaaacctatcgaaatcactccaaattttacatggcacacatataccatgagttcaaccattcttatgcaataaagttaaaatcaagcccttaaatgaaaaatgttattaatgtttagacttaagctttaaaaagt

SEQ ID NO: 240673 - DNA, 820 bp, Cannabis indica
caaagagcctttgagatatctcagtatctttttcactatcttccaatgagactccaaaggagtttgcataaactgagataccctattcactgcataagatatttcaggccttgtaattgttgcatactgaagtgctcctacagtacttctgtataaaaatgggtctgaaattggatcactaccaaaggctgacaatttttcacctcctggcataggtgctggaagtggattggcatcctgcatgttgactttggtaagaagatcctaaatatacttcttttgacatagatgaagacctgatgtagtgtgatgcacatgaatcccaaggaagtatgttaagtcaccaaggtctttaagagcaaaagaagagtgcagctgagagatcagattttgtattgcctcattagaactccctgtcaccaaaatatcatcaacatatactaaaacaaatagagtatgttgattagattgacatatgaagagagagttgtcagctttcgaacaaacaaaaccaaaggatagcagtgcagatctcaatttgtcgaaccaagcacggggggcttgctttagtccatacagtgccttgtgtaatttgcaaacaagatgaggatttttagagtccacaaagccaggggatgtaacatataaacctcatcatgtaaatcaccatttaggaaagcattgttgacatcaagttgtttgattgtccaatgctttgacaaggcaatagtaaggatgattcgaatggtagttggtttgataacaggactaaaagtctctgtgtaatcgaaaccatattcttggagaaaccctttggcca

SEQ ID NO: 240674 - DNA, 802 bp, Cannabis indica
aaagaaaaaaataataataaaatgggctttaagactttttatatttttattttacttgatattaatgtgttgtctcatttactcgaaggtggtagttaaagatctttcaaagacaattgtggaaacaaaatagtgagtttatagattaatatatatttgtaaatacatattatggattagatgttttaattttaaataagattactttcatgtatgttatgtatgcacacacataatatttgtataattttttggtcttacaatacattttttctcattaaatattcaaataatttattgatgtatagaaaatgttatcccactctcaatagtgtagataatacaaaatattaatgatcatacctaaaaatggaggcaaacaacaagtacatgaaaaatattatttttagttcatttatttaaaatataatttgtgttaataaatgctaatggttctatacttgtaataaaataaattacttaatattgttttattgattatgtgatcatgatactcatttttaacattaaaaaaatcaattaaacaataataatttatctccaaaaggattgttaaaaacaaaaaatactctccaaagtgaaaaaaaaaatgataatataaagaggtgagataatactttattttttaaatatcttatttttgataatttatgataatttcaatttttaacttcacataaatataagtaaataactgatttgtcttaaaataataataataatttaattaagtaaaaagtgaagttacatgataattcaacttatcatatttatttaaaaa

SEQ ID NO: 240675 - DNA, 1058 bp, Cannabis indica
ttcatatttaggatgttaattcaacatactttttagtaaatctagatcctagtaaaatatacctaacaactggccttagagtcatggtaatgatttactttcatgaaatatgaatttaaaacgatgaatacattaattgtgttgatttggatatgttcatgttagtttatgtgttttttgatgattgtatgtgaattacgatatttttccatgaaaataatttatttgaattccttgtgaaaaattaagtaattttggagtgcttctaaaagttggctacactggccaaccttattatgttcctcttcgctacggagagggacaagatgtggttcgctctatccctcatctgaaaattaaagatggagtgcttgtatgtcagcactcgttgaaaggggtgaagtcaaatctcatggatagctcagacaaagaagtagttctgggcatatccactaacttttgacataggcatgttgttggtgccacctaaccactagtgaccaacttgactgaagtataagtacccagtctgcttctgtttcggagaagacttcaaattaaagtaatacccaatctcatacagagtaggatgtgaccatcctagctccgcatagagaacaaacatcatcgagaggtaatttagtactttttggggtgatttttgttgggcacatcccgaggtaagcagctatatctctaaaatatgggtgtaatggcaacactacccctactggatatggcctgctgaccacgccatccaatcgagggccagccggtgtgctctctgatccctcgtgggtatctcacaccggagacctctcactagtccactggtcagtatcttgtcaaaagtctcatcaggaataacagatgtgggagagacccacctatctccttaggacccatcatcaagaacctgaggctcggctggcctagcctatttaatggctacccattgacatcatatgaacccagagggcagttggagaggatagcgcaaatcatgtacatcctccttctaacaagcgcaactttctccaccttagactcggtgtcag

SEQ ID NO: 240676 - DNA, 1935 bp, Cannabis indica
atcagattgtaatgggttttatttaggccacaaaacccaacatctcatcctctcaatttgagctcgaattgcttcaaacctaggttgacgccttaagggatttttcagggaattcaataccccggtcttcaatgtaaggcctaatttttttgcctcatgaaacgattctaagcctcctcattgacaaactgggttctattgaaactcgtagttggtgggtttgatgatgaaccttcttgaacgtgcctagttcttttgggtgccattttcttagaaattgtaatgtaattttttcttcttttttttttcaaaataattctaagaaaaattgggcagcacctccccttaattttctacttcccaaaaattcacaatcactcaaataaacccaatattaacaacaataccacaatacaattccaacaagcccaatatcaacaacaattctaaacaatatgcactataccacccaaaatttagaaatagtaaatcaaattccttaatatggtaggaagtgatacttacaaacccaaagaagcttttactccacctccattgtttaatgtccttgaaagcttgaggttgaagatgaagaacaatggtattttcggatttgcgatagtattggtgatttttgggatggtttttgatggaaagtgaggattgatgagtgaaagtgggttttaggatggattatgattgagaaattggtttgaagatgaaagaattgaagatttggggaagaaaacgttgaaattttcgaatgggagagattagggacggctggtatttttttgaatttgggtgtagggttgaatggggggaaaagagggggtatttaaagaaatttgcgagctagtcgcgacttgcccatgggctggtcgcgactagcttgaattcaaaaatcagggctttctggaaaagaggttggtcacgactagggtcgcgatttggaaaaaggttcgcgactatgggctttgctggtcgcgactactgcggttgaaatttccatcaactctgtaaaatcccaggtcacgaccagggtcgcgaccacaaaaaagggtcgcgaccactaggcttctggccccgaaaaatattttttttttcacgtttttcatgattcaactggaaaaaatttaatgtctggtacttaactgaaaaattaaaatacaagaaatactaaaacataaactaaaaacataaccaaaaagtctgaaaaatgaaagaaaacacttgggttgcctcccaagagcgctgtctttatcgtcatatagccggacgctgagttgttgtctagagaggcgccagaataatggcagacttggcttggtcaaattgacctcccaagtagagcttcaaacgctgtccattaactttgaaagttgttggaccttcaccttttaactccacaactccatagggaaacaccttgaccactgtaaatggtcctgaccaccttgacttcagcttaccaggaaacaacttcaaccttgaattgaatagtaacacttgctgcccaggtttaaactctttcctaactaagccttcgtcatgccacttcttggttctctccttgtagatctttgcattctcataggcctcattacaaaactcctccagttcattcaattgcagtagtcttttctctcctgcagctttcaattccatgttgagagtcttcatagcccaaaaagctttatgttctaattccaccggcagatgacaagccttaccaaacaccaaccgatatggtgacatgccaatcggtgttttaaaagctcttctatacgcccatagtgcgtcatctaactttcctgaccagtctttccttgatctctgcactcttttctccagaatcatctttatctcccggttagaaatttcagcttggtcattactttggggatggtacggtagagcagttcgatgtcggac

SEQ ID NO: 240677 - DNA, 947 bp, Cannabis indica
attggatcgattattttgaattggttaatgttgaattatttgatatttattgaaaatatatattttttcacataactaacaacaatatcaaataaattattgttgttttatgtttgcaacaacaaattaaaataaaaaaaaagaaattcaaaagaagaagaaaaaaattatatgtataaagaaattaattttatttaatattatatattttctttataaataagaatggaatatacgcttgatctattaagttttgaagtatatttgtatcatgtattagattgttgactattattttttacataaaattattaattgtatatataatttttttaaagtatatataaatatgtgtggattagattgaatcagttatttttacatgtcaatcaacatcagatccgtacatgtgtggatttttagattttccaatctaatccaatctgtacaagtgcagatatctgcactttgtggattggaacgtgcagattggattggattgagtattttatgaacacccctactgaaaacatatagtttaatgaactcattagggacttgagacttgttgatctcaaattgaataacaggaggaacacatggttagaatttagacaatgacccatttgttgcaggattggataatatatttattttccttaacaaatggaatgagttatattcctttgttaggcaagacgtacatgtaagaattgtatcagttcatagcccgaccgttttagattccaacccacttttgtggggaccatgtcctttccgtttcgacaattcgtggtttgaacataattcttttaagaaggaacttgcaatttggtagaaggatgctcgagcagtgggttggccaggatacaaatttatggaaatgttgaaacaagttaaaagcaaaggtcaaggagtggagtcagtggtaaacgttttctgaaaca

SEQ ID NO: 240678 - DNA, 822 bp, Cannabis indica
tttaaaaatagaaatattctattatttatagtctaattggcaatagatcaaataaataatttgtaacaggtaattttataattctttcatatgtgataaacctagtaacatgatacggccatccaaatcaattgtctatgtgagcctatatgttttctattgggcttagatgcatataggaagcccatttacttttagatatttaaatcgactaggttgccaaagtaaaataatcatgttgatagttttatataggcccaattagtattgaacttattcaattaataaaaattatttatataagtagaaattacataatatatgggaaaattataagagtttactttttcatagcataaataaataatgctaaggggttatgggttttttattgttttacatttatatttatgccatatttttgtaaaaaaatatgaaaatcccatatttgtaaataataataagttttgtcgaaaaagtcactgaaaaagtgagtgtcgccggaaaagtcactgttgccggaaaaagtcactggaaaagtcaccaaaagtagatgtctcaaatataaacaaaaatagaaccggttctataacataataatttattgatttgtgtgattataatttgttaaactattttgaagactaatcatgcatttggagggattttaccacattttggtggaaaatagtattaaaaaagttatggccaaaatactaatctgaacacacgaccgaatttttacgccagcatgctgtcaccgcggcaaggcaactcgtggccacggtgaggacacgatttctgccaattttaaattttttt

SEQ ID NO: 240679 - DNA, 833 bp, Cannabis indica
acaaagcttgccatcagccccttttttatatacaaatttcaagttttcccaaacctacaggtcgtggccttgcttgcaaggccgcggccttacaagtgattttccttttttcaaaactttgttgatttttggcagtttttcgttttcaatttcttccagcgatgatcgatagtattctgcttataactctctcgataaaactcagaattgaacgattcaatatgttctagaaaggtgaaagagagatctataacttttatttgaaaagtttttcctaaaagtgaatggataatagttaaaaattggcttaaagtttcatactttattttcgatcacaaacagcacgtgttgaacatccaaaacttaaaatttttcacccattgtatcttacaactccaaaattcatgttaaattcataaaatttatattatttagcatattttctctcattttaacccacatgatatatttgaccattaaaaacccgaaacaaaaaaaaaaaacaaagcgtaaacatgaacaaaaataaataaaaattactaaaacatatactaaaatagaatttaaaaaatgcataaaaataaacctaacaacataactcaaaaataacgaaaactagaatctaacacccaaaccccgacctggacctaaactcgaactcgaatctgacataaaatcaacaaataaaaataaaatatacagaacacttttattttttgtttttaaatttgagagataaatttaagaacttttgtctaatttcattcaatttcactatctcagtgattgtttatgtactaaaccatactccccagagtttttttttttttttt

SEQ ID NO: 240680 - DNA, 840 bp, Cannabis indica
aaaaaaaaaaaaaaaccgtaagattgaactgatagataacttttttcaagacatggcatttttttgttataaattgcagtcacaacaaaacaaacacaaccatattcaaatataaggtaccaggttactttcagaagcaaaataaaactctaagattgaactagcaggtgacttttttcgagacatggtatttttttgcgtatggctcaatgcaaaagatctttcttcacgattatatagaatttttgattatttttatttatgcctcattcattttaatcgacattctataattccataactaaatatattttctttatttttctcaaattttaaaaaaaattctttaaaaattaataattttttattgggggacaagccaaatcactttattaatgattcaaggaaatattttttatttacattgaagtaggaaattgtagccacaacaaaacaaactcacccatattcaaaagtaaggtaccaggttacttttagaagcaatataaaaccctaagattgaactaatgtagagggtgaaatctacaattacggaattggggcaccagcaacctgtcaagaacaaagagagagacaaaagttcaattgggagcaccggtggggtgttagtcaaagggactccgacgctcaagtcagtacgattatagtaaaacataataatagcagaaaataaatgtaatataaatggtagccggacggatgagaggacaagcggacagatggactaaaggagcaactacgatggtgaggcttaagggaaaagcttagaaagggtgattgtctgcttgggccaaagagtagtgtgagtatcgaatgtgt

SEQ ID NO: 240681 - DNA, 677 bp, Cannabis indica
ttattagaacatatttctattaggtaaaactgttctctacttttatggccgttaaagatattaagcaattatacattagtcaaagcaaataaatgaagattagaattctcaaatgcaacaaaatatcaaaaatggaaaactcaatcccattattagttttgtaaagataaacttgatcaaacatctattcagatacaaggaagaaacaactataagaaggaaaagcttgagctttgccattaaagtctttaacttccatttcaaaaatctaaactaaaaagatattcaattttgaattgtaataccaatgacaacaaacaaagctcaatattcttaatatgtgtacataagcaacaagaaaaattggacaagggtcattggagactttcatcgaacatacggtaggcaattacaaaaaacaaaatgcagagttcgcaaacatcttttaacagatcataaaatgaatcgtatcaattttctgctttcgtaaatcccataatttagaaattttgagtagtaaacaaaaacaataaaaaaaaaaaaaaacacaaggatcattacaatctctccaagattaggaagatgacaccatttgaaatgtacccaaatgctaatttagtcgaaatttgggattataattaagttaaggcatttatgcatgtcgatctgaaagaagt

SEQ ID NO: 240682 - DNA, 1972 bp, Cannabis indica
aaaaaaaatctaatatcctttttgaaattctacaagagattctaaacatattaattaaaattaatatctttttttttttttgaaaattacaatatagagaaattaaatcttaaaacataatttcgtctcctataggataatatgcgctaatagataaaaccatcaaaccttgtgtttacttatgactagaaaaaaaatctctttggtgatgaaagtaccaaaacgtaaacatagaccagtccattttggttaaaagttacactactgaaatgtaaaagtaccaaaatccagtgtgtaaccaaaaccaaatgaatataaccaaatgcattgcttaagttctgctcccaggaatgaaatactctacacaattttccttcactttgaagtgaaaattatgtaccctgtattttgattcagccccatcatacgtgcccctgttcagaactgtcaactgcagcaataaaggaccaaattcaaacttttgtcaaataaattgttaacagatattctctagattcaatcttggcactaaaaaccaaatgttactgttagcactatgtaattgctaaattcatacagggatagagaatagagattgtgcaaggattgattgataaacataaaatgtgaacttactacatgacaacaacatcaagaaatcaaaaaaggttgttataaaaaagtttacagctccattttacctgtccatgcacatctttggccaacccagtggtcaacggctcggcttttatcagaattcctgccagatactccaattgtaaaacaagtgttggcctcttggtgctagaatagatatcttcatggtttagcgcaactaaagaacaaccctatgaagagaaatgcaaagaaagaattaataacataacccaaaaaagagaaattattacaggtagagcaatggttgacatgtcttacaagttcagatgttaacgtgtgacagtaatgtagaaagtctatgacaagattcattgatcctcttgcagccacctccataagagaaatatcatctatcataatggtaacagagctcctcctttcttgaggtaaggcacctataaccttctgaattttcccaaaaagagtaacaagtgcacttcttctctttgcttcttctgcttcatctgaagaatcaataatttgttccatcaaaaacgaaaactagagaagaaaaactgaagtttcattaataaagttctcctataacaggactcctcacataagtctaattctaacttctaaatacttagacgatcccactactttaccattttgaagattcaacagcctacaatgagttatggcattaaaagggtagagaaagcttatttatacctgaattcctcacctggacattcccacttaagcatgtcaaagaagaagaatctattattgtccctttgagcagctaagttgcaaccctggtacgaggaccaaactcagatattaatacagataaaaatatacaaaacaaaaaatcaaatccgacacaaacacacagatgtaatatgacacgcatacgtgaagattgttgagatgctaatttcgaagtttctcacgtaatttgtaatgttggtgtcctaaacctccaataaacaaatgtatatgtttataagttaagatatagatacgtgtttatgcacataatcgtcccttgtcaaattaaagtttgccccactaatattgtttttcatttttagataaaagcttatataaagcatgcataaaaattcctccttcttcttcttcttttttttttttttttaaaaaaaaaattattttgttgctgagaatatactagtacttgactataatagcaatttctagctttatgctcgtaaagcaattgtgtttattcaacaacttatattcagtgtaaaaatcccactcccaaacaccccaataaatccataaatcctttttcccctaaacgacactcaaatcaacaaaaccc

SEQ ID NO: 240683 - DNA, 1026 bp, Cannabis indica
tatagatggctccatctgaacttaaggaattgaaagttcaacttcaaggaatgttagacattgggtttacccaacctagtgtatccccctggggagctccggtattgttagtcaagaagaaggatggatcccttcggatgtgtatcgattaccgggagttgaacaagcttacagttaagaacaagtatccattgccaagaatcgatgacttgtttgatcaacttcaagggaagacagtcttctctaagatcgatcttcgctctgggtatcatcagttgagaattcgagaggaagatattctgaagactgcatttcgtacgaggtatggacattatgagtttctagtgatgtcgtttggattgactaatgctccagcagcctttatggatcttatgaatagagtatttaaggatttccttgataactttgtcatagtgtttatcgatgacatccttgtatactctcagtcggaagcagaacatgagcaacatcttcgaatggtcttacaacgacttagagaaaacaaactttatgctaagtttaagaagtgtgagttctggttatcccaagtatcctttctaggtcatattgttggtgaaaatggtattatggttgatccaggaaagattgaatcagttagagattggcggagaccgaagacagtttctgaggttagaagctttattggtttagctggatactaccgtcgtttcgtagagggattttctaagatctccatgccattgacagaattgactaagaagaaccaaaaatttgtgtggtctgataagtgtgaagccagtttccaagaactgaagaagcgactagtcacagcaccagtgttagccttaccatcagataaagaaaagtttgtggtatattgtgatgcatctagacagtgtttggggtgtgtcttgatgcaggccgatagggtccttgcttatgcttctcgtcagttgaaggaatatgagcaacgttacacaacacatgatttggaacttgaagtagtggtgttcgcattgaaaa

SEQ ID NO: 240684 - DNA, 1890 bp, Cannabis indica
atccattcatctcaagaatttacgtatgttgagaaaaaaaaatcgcaatcagcagcgcgtggttcttcaattaggcatgcacgacctacagcttccctaagtctggccaattcaaggtcttctcctaggtccaagtgaggctcgccaattgctggctcgcccgctctcatgcctctctctccatttgtagaaatggagttgagatttagttgttgttcaagggggctattgcccctgggtccttccttcagttggaggcgccaacgttgggtctactcttggaggcgtggaatttccacttggatccacctgggtgcccgtgtcagtttggcaagttgtagtggccagacttgtagcacctattgtggtgaacagattcaccatatttgtagtattcatagagattctagttgtgattggaacctgagtgcctggatctgtgatctgcgggccttgagggagactcgaagaggtagatggtgcgacatgagttcttcttgtgtttaccatggcgttcaatcaaattacgatatctacgctctcaatgaaagcaccaaactgctgacctcaaaaagtgattaactgacagcgggattgtacaaatctgaaggttgcctcgtgtttacacaaataagaatgaaaaacaaatagacaacaagatttgttacagaggtttggcccccttgtgatagtgggtaaagactaactcttctcttagatgtatttatagcgagggaaatactatccagatcactataggtgggatccgctatagtacccttaggattacaaggtatgaatcaatacaggaaaaactcaagtgttgagatgtgctagggtaggtgtgtgagagagaggaagtgaggaagggagagtttatcagacacttagagtttaggatcaggtttttagcttagaggaaacttaggtttttagtctaaggttaagaattttatataggaggcctcaaatcctaggtttacaattcaaatcccttaacttatgcataatttgttagatatttacaaaagaccaaagtgcccttgattctagatattattcatccattctgttgggcttttagggcctaattcgcagcccatagcttgttgtccacatgtagaagtgtccagaaaagcttgcagtgcactccttggccgcccatgcccctgtggatgccaggctggctgaccaagcccctatggatgttagactagctggctaggcccctgtggatgccaggctgcctggccatggggcaatcccaaggctggccgaccatagggctagctaggggtggccgaccaaatcttgagagggagctggtctaccacttgatgcccgtttgagtgtcagagtttcgtttgttcaggggctgacttgatcttcctttcagtgagttgtactagcacgtgctactggttctttccattaagcatgccatgtcatgaggaaaaatattaatataacaaatgagatcatattaatttgatttattacaacttagtgctctgaagtatgattattaatgttttggcattgttataagattaaaattttatcatgtaatgttgttctaaattttttctcgctcgtctgttcatatgagttttttcatattttgtagtattttttcacagtaattttttttctttttagagttttttttaaaagatactaaggcgtcatttggtaacgctattttcaatcagtgttttgtttttaaaactaggaaagtgaaaatatttttcaaaaacatgttctataaaactgttttcactttttaattttttaattagaaatctaaattttaaaagcaacaaaaaaatcactttcaatatttctaaatagtttttttttcttaattaatattttggacttcgattagac

SEQ ID NO: 240685 - DNA, 1047 bp, Cannabis indica
ataaaatagattacattgaaatggagttttatttagggcataaaaccaaacaattaatgcctgaaccacgtaaaaatcacctgcattgattatcccaaagctctcatcattatctcatttaatcagttgctaaaaatctcattcaacattttggtgctttcattgagagctgttggaagcgttgttgagaaaacaacagtcaaataatcagaacaacaatggtggaaacttgagacaacacccgccaacctcgtccccccaggatcctcaaaacacagaaggcaaagaggcggttgcatgagtaaatgtgggctctgaggaacgagatgagacgaacgacgacgaatatgaagaaaacctcgaagggtatgatgtctacgatgaaggtagttacactgaaatattggtcctaaggcaaaaaatagttgatcatgaggccaaactagccgcccaaaaagaacagaataagaggatgcaagagataacggtcgccatgcaaaaaactatggaaatggctggaatacatgtgcatcccaaggccatgcccgcgggaatagtgtaaaaacaagaggaatcctcaccaagcactcaggggcccaagaccagggaaccaagccctatacgatatccttcttaggaaaaccctaagaaaaatccaacttcgatcccttggagaaactggaaggcacaggatccgcgaaaggtccgctctgatttcccaaaaaggaaagttccacagatgggcaagctccctcaagagaattttggccttcaggatcgagaggaccgaaagagcgtacccatgcaccaagaactcagagaaagggggaggaaaagtcggaggtgtccctcgactgatctaagatagaaaatcaatgagaagcaaggtgacttaagataccatcttgaaaagaaaaaacacgcattaccagtctccggaggtgccttgaaggaaggaatcttggttgaattagcgatactcggcaaagacattgctagagtctcccagagacagaaaggggatgactccgactctaattgtgagga

SEQ ID NO: 240686 - DNA, 1220 bp, Cannabis indica
ggtgaatcgaggaaaggccgtgggaggaatattttggatttagaagagagaagaaaaaaagctggtgtcctgttgccattagaagttgacaatgtctcaaacaaactagtagggttggagagtaaaaattttcctagtttgatagggcgagagattacattgcatgtgcctgaacattattcaagttgggcaaatgtcttggagcaatacgaacacctcatcataaccaaacttcaggtaaatattttgaaatttatatctaaattcataaatgtaattattaccatgttatcttaatatttttttttgtcatatgcagcattattaccagatggacatcaatctaaaattaatagctatttcgatatctgagatggccgagaagtacaaaacgagaaaaaatattagactgacacatttcaaagaatattaaccaaaacccaaatggcatttgaaaatgcagtcaagaaccctcccaatgaacttaatgaagaacaatggcgattaatatgtcaattgttcacaactcctgaatttattgctcggtataagcaaaatgctctcaatcgacaaaagataaaatactctttaacacaagggtcggcaactatggctaatcaaaatgtaagttaatatattaaatttttattttatgaagattactttaaatataatttcctaacaagttatatttatcagcaaggaaagagtaacattgagatttgaaaagattgtcatacgaagaaaggcacatacacctttatcaatgaggctgccaaaaataaatatgtaagactttataaaataattacttttaaatatgttcaaataattgtaagattggctggattctaacttattcttattataggaatagatggtgataacctgaatcttcacaagtttttatgcttaagatacttcggcagactcttgaagagaggtgtggccatcaacgaggagtgggtcacaaattgaaagggcaatcatcaagatgacgctcacaacctccaactgctaatcaacttaactgacgggaaatagttaatgagatgcagagacaaatacagatgttgactcaacaattgtcacgtgaacgtcgggaatcaatggatgttgagatgaatgatgcagctctaatccaaccaatgcatccacaaccgtctcactctcaaatgcctagagatggatttggttcatcttcagtcaatgggttttca

SEQ ID NO: 240687 - DNA, 1286 bp, Cannabis indica
gcatgtgcttcaggggttaagcgaccctgttttcaaccagctcaagcaacagtgggaggctctctgcggtcaatgctaaagcgtgctagagctggggaggctgatcttgtggaaaatttgtctgtgaatgatgaggaacaggcgggtgctgctgtgcacacccgcccagaaaaatgaattttataagttggaatgctcgggggctagggaaccctcgagcattcaatcgtctttccctccttgttaagaaccataggcctgctttgctttttttgatggaaactagattgaagcccaattctgttgataagtttagaagggctttaggctatgttaatggttttgaagtccctaggaagcattttgggggaggacttcttcttttgtggggggatgatgttaatgtaaatattcttaattattctactaatcatatagactgtattgttaatatttctagtaattatatatggcatcttacttttttctacggctcccctgttactcatcaaaagcatattacttggaaacttttgaatgatattttttataatgctgctaatctttcttggttaatcataggtgattttaatagttatctttctcataatgataaggttgggggtaactcccctgatcaagtttctatggactgttttcataattttctttataagtttaatctggcccctctttcttttattggaaataagtttacttggactaataagactatccgtgaacgtcttgactgggcagtagcctctgattcttgggttgatgttttccctgaacattctttgcatcatttgggtttctatgggtctgatcatagagtccttaagctagttttaacttcttctaactctcgacccaactccacccctacctgtaatcgatttaggtttgagaatgtgtggctggaggatcctgatttctatagaacagtggagacttcttggaatgagggacctaactccctttccacgggtagtggttttaatagttttctagcccaacaaaaacattgtgtctctgttcttcgagcttgggctaaaaatacctatcattcaaccaagtctcgtattcaatttctgacgcaagaaattaattacttgcaaaataaggccatgcttactagggaggattgttctaaacttactcaattacagtctaggttagattctctgctctataaggacgaaatctattggaagcaaagagccagagtccgttggcttaaggcggggggatcggaatacaaaattttttcacaaacatgcctc

SEQ ID NO: 240688 - DNA, 681 bp, Cannabis indica
tatgcagattgatgggatgaagcctgatgggtttacgatttcgagtattttgcctttgtgtggtatcgattccaggaaatggcctgattatggtggagagcttcattgttacattttaaggaatggattgagttttgatgttcatcttggatgttgtttaatcgatatgtattcgaagagtggaagaattttcgagggtagacgagttttcgatcaaatgaggagtagaaatgtttatacttggacagcaattatcaatggttacacaaagaatggagattcagatgaagctttaagtcttttccatgagatgcaagtgaaagatggtatagaaccgaatagggtaactcttttaagtgttcttcctgcttgtaactctcatggttgtttaagaattggcaaacaaattcatggttttgtagtaaggaaagtactgaattgtaatgtgtctttatccaatgctttgatcgatatgtattcgaaatgtgggagcttagatcttgctatacgagttttcgaggatgagtcgttttgtaaagacgcaatctcttggacttcaatgatttcggggtatggactacatggaaagggcaaggaagctttgtcattgtattctaagatggttcttcaagggataagtttagatacaataacagttgtagggattcttttcagcttgtg

SEQ ID NO: 240689 - DNA, 1051 bp, Cannabis indica
ggattctgccagccattttttgaggtacatcgccagctggagatgcgtgacatattcccaggttgtgatagttaggttcctcgaaacggtgggatttcccagtcacttcagggtcatgctcgaaaaagcatgtcgcttaggttactgggatacacccagccatttttttgagatatccttctacttgcacacctgtcatctcgcgtcttggtgggctgattggttttcgcaagaattcaaatcacccccctaagatgattttatattttatatgtgggtgaggtcacgtactttgttttttcacattcaccacgctgaaaagatcttctatctttcagatgagcgacctatcggatagccaaatgcttggctcaggaggtaaggcatttgatggcgatcaagaagacagcttcatcccaacctcgatctcaaaagaggaggcccctactgctggagacacagagttgggtccgctgtcttttgtagacatcgagaggatggtgcaggagctcgccgaaccagtaaccatcgagattcgagacaatgagtctacggtgttggtacgcgatcatctcattcattccaggtatgctcccgatgtcgaagtcgaggagatgggtgaagattgggaagtacctgatcgtgagtctgacgaggatggagatgccgaagggagcgagtccgactcggtggacaacacgcatatgaatgagccattctcctgcaaagacttagtctcgcgggttaccaaatctgacctgaccaccttttcgaggttaaacctactgcgtcttagcaccatgcgtcctcgtcctactcagaggccacacctcccttttacaaaccctgcgatcataccctcagaagacgtcgtagtgtctatccccattctccaatgcggagtgtcaatccccttccatccattcatcttcgctattctcaaacaatatgatgtgtcccctttacaactaacccctaatagctaccgcatagccttaggcttttacgcgatgtatatggagtacgtgcacagggcaccctcgacagaaga

SEQ ID NO: 240690 - DNA, 1655 bp, Cannabis indica
tttgtgataaggctctatattcagcttctgtggacgattttgcaacagccttttgtttcttagagctccaagtgataagattacctcccaagtagacacagtagccagttgtggattttcggtcatctacggatccagcccaatcggcatcactgaagcattcgacattaagatctttagatttttcgaacataataccttgtccgattgtcccttttaaataccttaacaatctcttgcactcattccagtgatgttgtgtagggttatgcatgaattgacttaatttattgacggtgaaggcaatgtcaggccggctaagtgtcaaatattgtagtccccccaagaaacttctaaagaatgtgggctgttcgaatagcttgctgtctgtcgcactgagtttgtcacttactgagatgggagttggactctcatgagatagcagcatgtgtgttttgttgagtaaattagtagtgtattttccttgtgacagatgaataccatactcccctctagtgatttcgaaaccaagaaaataattgacagagccaagagttttgagagagaaaaactgttggagttgggtaatcattgttttgaccttgtgagtgttgttcccagttaataatatatcgtcgacataaacaagaagatataactcagcaccagaatttttgtagtagaacaatgaggagtcggagactgaattgcaaaaaccaagagaaaagagcacatttttgagtctatcaaaccaagcctgaggggcttgatagctatttgtaacttgcacacataagatggttgtgtggggctgacatagcgaaatggttgttccatatatacatcttcagtgagaacaccattgagaaaagcattatcaatatcaacttgttggatatcccaattgttggtggcagcgagggagagaatgactcgaatggtggcacttttgacaaccggactaaaggtttcaaagaaatcaataccatgttgttgttggaaacctttggcgacaaggcgagctttgaggcgctgcacagtcccatatcgattaagtttcacccgaaaaatccatctattattcactacgctcatacccggttgtcgagggacaaggacccatgttttattcttacgcaaggcaaaaatttcagtatccatagcagacttccagcgaggattctgaatgactgtgagagcattatcgggttcaaactcgatcataaaggccatggatgatgatgagaagacagtgaaggtgcgaggttttcgaataccagccttcgcccgagtaatcatagggtgagatggtgggcgttgtataggtggtggagttgtatgtggttgggtggagggaattgtttgagtcggctgtgtgagtttagtgagaggtgagattggaagatggacatgtagtggtatagttgagtaggaggagattgatttatgggaggtaggtgtgtgtttagatggtgagggtgtctgatatgatgaggcattatggggtggtgaagcggcagtagaatccgaggaaggattttctgttaggacaacagagacaatatcttcattatacacacgagcacctgcatcataatctgaagtcacattagaaatataaggcagccattgaggatagtgactaggttgaaatg

SEQ ID NO: 240691 - DNA, 1724 bp, Cannabis indica
aacttggtccaaagtaaggggattcaatctatttggagaataagttcaggagacatcaagtcgggaagccaggaaaataatcaggatgtgatgtttaataattcgagttggaagcttcagggtcaaagaggaaagatgactctaagaggtcgtccaaagataagaaacataagaaacgcgacaaatatgtacccatttatgttgtctataccgagcttaatgaaactcgggagagtatctacctcgcacttgaacagaaggtcgctttcaataaaccaaagcccatgaaacatgcgagatataaaagtcacccaaccagacgatgtgaataccatggagatattgggcatacaacggaagagtgtcatcagttgaaagatgagatagaaggcctcatagcgcgaggatacttccagcaatatgtaaaggggcaggacaatgtccatgatcagcccggtctatccagtaacccaagcgactagggaccataaccttcctttgtaggaggaaaggatacatcggttatcttaggaggataacacattgcaagaaaaataggataaggggcaattagttcggtcaagcaagcaatacgtaaaagtattgcgaagtaatcaaatactggctcgcaatggctgtcgtatagagctgcaacacagaaaagccaatcgtcgactaatggtggtttgagcagaacaacaaataacaaagatcagttcacttggagctgtgggaatatattagggattgaccctaaatattaatctcgctttatcaaaatcagatgcctctagaagattgataaaataagcaatagaactggaaaagctcttatgagattaaatcgataataaattaatgattgcaaatcacatcactgatgtaatattttgtaactcagtcgtgaataaagttaatcatttctttcgataagtaattataaagtgtgaccctttaaaagtacttaaggggcatatttgtatgattaaccggaatttatctagaaatacatggtataatgcaaacaaacccgccaattttatttaaaaaaaaaattataaggttttcaaccaaaccttttcgatgagaaaggggtcgaactgttataacttcctgaccaaacctttttgacgagagaggggtcgaattgttataacttcctaatcaaacctttttgacgagaaagggatcaaacaattataattttttggttaaaaacctatctgatgggaaaggaaaatcaaaagttataaatgagatataactcataactcgtgcgtggagctgaaaactaacagcttgcactaaaggaaagtattaaacgagacatcaaggtatttttatttaaacctaacgcgtgggtagaagatctaactactcatgtaagcaacaaaaatatatacaaagtgacaaggtcattaaatatatattcaagtttgcttgaaacagattacaactgattattgtgaggcagaatcaatacctactcgtaaataaagtgcatggcagatgattaactgctcgtgcgtaaagtaggctattaactacttaatgtcaaagggatatagagtgatggaaacccctaaaatactttgtgcatgatcaaaatatgattgtttaaattgtgaagaaaacacaagcaaacaactacatatcaaagttcaaacataaaagtacaaggtattaaaagataaaaaaaaaaaaaaaaaaaaaaaaaaaagaca

SEQ ID NO: 240692 - DNA, 1218 bp, Cannabis indica
gaatatgaaagaggtataaaaaataatatatttataataataaggccagcttaccatgaagctatagtccaagctccttgaaagcatctcttttggactcccaagattaagaaaatcccaatcagggggaagaatagtttgaagtttgtgctagcaagcaactccatatgcttgggcaagttcagacctagcctctattgctgcggccgacaaggtctcaatggcctttctcgaagaagcagtagcgtgggttgcctcaggacgaggagcattggcatcagaaacgattagaggaggaacttgttcttggatctcgttgtgaaagacctcaagatcgatgggtcggccagtgacttcttcttaagggtggtggttttcctttgcctcttgggaggaaccacttcagcatctgtagggaccccagggttggttacgctcttcttgcctttccggtccatgatatcttcataacccatgtctgcgaaataaggcaaagcattacaattgttaaaaaggctgatgaaaaagggtaaaagtgaaaattttcacctaatcgatttaccaaagtcactagaaggcgagttatcactagacgagggggtaaaaggaccataatatccactaagatccctacaacctgtaatcttgaatatatcaaaaggctcgattgcatctatcccaactagcatctatatgacctgccctatcttccatagtaccgtattgctcagctataccgtaatatgactcatgatagttaacctggacgtggaatctaggatactagctatcaaacttatgaggaatgcgttccactagaagggaatcccaaatataaaaattaaggcgagagtcttagaaggtgactaatgtactatattcagccctaagtacagtgggaaaccaaccacattgattacctcgggatgctccttcatcggcttcccaaggggcagtgctttgaagatattgtgcttgagccaagcgatcccaggccttatcctcgtttggaacggtaattttctaccaagaagaatacttgggaatcttgtaatcacaagtatattccttgtcagcgagaaggcccaccaatcgcaggttggcctcattcaaaaggaactcgcatgaccgaagaccgtagggaagagttatcagacgcctgtgcctactgaccatctcgggggtaggagtaggtctcgtcaagaaagctgtcaaaac

SEQ ID NO: 240693 - DNA, 1291 bp, Cannabis indica
tttttttttaatgtattatagctttttagtaaataggtctatcccggcgggtccggcttccattattgatttatctcggtgggtctgacctgccataaatttcaatgccgagattggtggtgaatctatctcggcagtcccgaccattcggtaattatgatgcattctcagcaatctatgcccgccgagataggtatatctttatcccaatttaatattttttgagacctatctcgacgggtctggcctcccaatattggtcaatctcggcagtctaaagagcccgccgagagagtgtactggtggaaaaaataaaataattccctctgctattacattgattgcatacaaaaatttacaattcaaatataatttgtaaaataatctttcaatacttcaaatagatgtattatgtaattcatctcttaatagaataaagtattatataataatatatattgtaattagttcaaagtttgacaataattatgattagtcatatatacttaataaattttaatctaaatcatgatatacactcagttaaattggagactcattcttcacgcactttgttgatctcatctattgagtatgttttctgaacataacactacaatataaaaatcagtcaaattttatatatatactagtttctttatgaatcaaaatttaaattatattgtaaaagtatgatagctcaaacacatacatgcttcacaagataatcttttggattgttcgacatagttaagtctttcattagtcgcatgatgtaaaaaccacaggctttaccgtcaggttgtttaattaggaccctgaaaatatttatatatatgtcgtaatttttgaatagaaaaataattcaaatagaaaatgttttaaagttcaatttaagtactcatgccatatccatatccatatctatttttggtaagtttggtctataccatttatgtataagtgttctcttacatctacaacttttaattttttttaaatttccacacttcatacatgggtaagatatcatagtaggatcctcttcattttgcatggaaaaattcatgaaataattaactccattttcatacttttttgaaaatctattctttttcatccaatttctattcatattaatctataattacttaaaataatttactgctattacaagttaaaaattatatcaaagcaatttttaaacaagtcaaatgttttagtacttataaatctttattgttaaaaacttgttggagtaaacctccacttacactgatattaagactca

SEQ ID NO: 240694 - DNA, 943 bp, Cannabis indica
atcatctcaaagcattggtggagccgaagaggagtcgcatttagcaaggaagttgtggcagtgattcacaatgtggctcaggcggtcgcaatagtgacaaaaatcaggaagatttttgaaacaaaattcaagctaaatcagggctgccattccatggaaatgaaagccagtgccacggggtaggggttgggttacatcgagttcaatgcagacatgtaggtaagggccccaagtcccccaaggacttcaccaagtcgttgtgcaagtgcacgagatcgtttaagaaaaacttggatccagaaaggggtagaagtaagcatctcagcagtaaccactgagccaacttctaagggtgtcatgacgataagcttgtagtcaaaatgccatggctggcctatgaggactcgtcgacgattgccaaaacaaccaaactcaacagtgtagaaattagggtctttctctagaacattgatagagaaacgttcaggccaaatttgcctaagccgcttcttgaaagcttcagaattgaaatggcgattggtcaacaacttgacagcaagaaaagccgaaggttcttcacgttcgtcatcttcagggtgatcaagagtttcagaaaaggaatggaaatgtgttttcagttcagtgaggttacgggtagcagttaaagtatgagaaaggtcatccattttcaaggtgaaacgagaaacaaaagggctgaaaaaggaaagggacaaggtagtaaggacaatataatatagggatattatcatgaaagtacaagatgcagggcgatcggttatataggatgcatggcataagaccagtatctctaggggtcttgtagtagtgagatagagcttccccatgtcaggtattcgaatgatgtactctgctgtaatatccagattaaaatagtatttaatttttttttttggatattaat

SEQ ID NO: 240695 - DNA, 1290 bp, Cannabis indica
gcataaatcccaacaggaacaatcttaacagagtaaagatagtcgatttccataggcgtaggccactaccactttagaatttatacaagaccttcaaattggcgagaattctgtaggagacagggtttagttggaatggggcaagtctaaggtagtttacgtaatccttgaaatagtcacggaggggaattatggcccctgccctgatatgtttaaggctccatgaacctatactagtcgagccactggtgctggtcttgccactagctcctttagaggcctcacctgtaagatgcgcatgagggtagcaactaagctcaatagcttgcactgacctaacttggcatactcacccatacttgattccgcaggtcctcagtatatcacctgtgtagcctgagatagtttgcacctttgattcgattgactcggcctcaaaggtgacgttaggatcctggggagtctttgatgtacgtggctggggacacattatttcaaagtccaagtcacctggttcaaaagcaatagtgactttgggtaaaaataaaggcttagccaaaggaatagaagacactttgggatgttctggccaagctgcatctcgcaagaaacggcatttgcctttgatgatttcttgcaagaagcgcctgtggcgaatagcattatcttcttgatgaactttcactaagtgttcccttaccctactatcgtttaactaatttggatgtaggttttgaagggttgggtttataagggatggctgattctctaggaagttcaagttctaaatcttctggacaataaatttctgaacaaaattgggacattgctacaagaagaaagcaatcccaatccctagaaagaattttatcaaacctgaaggtggtgagttgaaggttcttaaaaacctacgtattgcctaacccctactattgacccaaatacagtttgaccataaaagttgctaaaaccaaatgagacgacaatgatataaacaaatactgcagtaattaaacccaaaaatgcagcataataaacataaaggataccaagaagaaaagctacttactcttcgaagttggggtttggaacgaaatacaactcttcggtctgcgaatctttagatgtggtgagggtctcttcgagcgtgtggagtcagaatttaagtcggaggaaactcgcagaaaatatgtcaaggacagagatggcatgcaaattctcgagcaaactcgacgttggtttattagcaaggaagcttgagttttttagaatttctaaaatggaggaaat

SEQ ID NO: 240696 - DNA, 807 bp, Cannabis indica
gcctggctaaatcaaactgacaaaatattgagttggagcgagaagtcgcggcggccaaggctgcacagggaaccattcctcaaactcgacctgatccatctgtaagcagaccacgaggaagacctcaaggttccaggactaggaggcaagagaataaccaagggaatctcacaaatgtcaggaagaacaatcagaatgcgagggatgtcccaatagatagagaaaatccacacaacacaagtaatacaagaaatcatgagcatcgacgtgatgctccaagaactttcaatgggtttgcaaaccagggaaatgaacaaactaatgtacctgagtcatctcgcatgaatgcaaatgcaagacaatcgcgaccaggaaaccaggaaatctctcgtaatgatggaagaaatcctaaaattaacttgggtccggtcgacccccaaggcatccacaaaggccttctcgcacggacaaagagaatacacacacttacctaagtaggggacgtgtgtcaaatctctttcagagaagaggaccaatgcgagatgagacacgtgaagcaagttcgagtacaagagagtcacgatcctacgagcatagtaggtcgactagaactaatagactaacgcaagacgagaatagatctcgacgttattttactgaccaagaaagtatcaataactcgcgtagttattagtctgaaagttactcagggactagatatgtgagtaattacgagcagaggcattgtgaacctaatctccgcgagcgattaaatcgaaggtagccagaccttcgtgagcacttgaa

SEQ ID NO: 240697 - DNA, 1575 bp, Cannabis indica
catttttgcattgttgaattctctctttaaaattacccgtaaactccttcccccaaaccaccaatcgctgcccacacctttgaatcttctgctgcacttcaacatcaccactgtcatcccaacaatcttcgatcaattggtaacaaaatggttcccgtagccatgcattttcaaagaaaaaacgagtgacccgttgctgaacagcagtagtaaaaagttcaagcaaaatgggcgaataatcgaatgtcgatatctcaagattgtaaagtttagccgaactaaacatttgcaaccaagcaagatccgctaagcctttgcccagacgaacttcaatccaaatcgaagtacccctacccctttcccaagtaaaaggataaccacaaagctccatctcttgtaacccactgtcattcaaagcttgttgaaacccattattaagaactcaggatactgattccctccccttttatcctcatgagcacacacattattcatatcgcccattacgcaccaaagtaagcttgagttagctaccaaggagcgtaaaagattccaagttgtcatacgaagccctcgatttggttccccatacagccccgtaaacctccagtccgccataccctcaattgaaacttttacatcaatataattaagagagaatcctaggaccgagacctcctcttcaaccttccaaagtaacgcaatacctccacatcttccttgcacatcaaccaccatcattccttcaaaccccaaggaaactcgaaccctctcaagctgagcttgattactgagagtttcacacaggaaaattaaactgggtcgcttttggatcacaagatccttaaggaattgaacagcccatgggttcccaagcccatggcaattccatgataagattttcataatgggcggtgggcctggataccagcacccaccgagcatgtgtttgttgaaccctcctcaacttggttcatatccacctcatcccccacttccttcggcccatctattaagcccaactccattctccttctctttgaattaaccaccaataaacaatcctcctcattttgaggatttatttcatgatttaactcagtcaacatatccctctccacgtttatagggatatgtctagtaagcattgatctatctacctgtccacatttatctccttgttgacccatgttctcctccacaatcatagggattgttatgccgccacctgtagccgattcttccctcgcctttgaacgatgaaccaatccaacagccatggcatcatcattaccagtatcatcttccatagccaccatgaattgcttcagccacttagccccaattgtatgatccttacacactggcttcaccctcatccattccccatatcgtttaacaatccttccatatgggacatcaaagcgtctagggaaaaatttatccaaatggcccattaccccacatatgaaacagaatgttggaagatgttcatacttgaagtttacccaaaattcgataccctctgtgttttgcaacttcatacgcctcttaagtggcctcgtaacattgatg

SEQ ID NO: 240698 - DNA, 1990 bp, Cannabis indica
gttacaaatgtcatatatatatatatatatatatatatatatataaaggcccaaactaaagagaccaaccacaaatacaagcctgtaaagaaacagcagaagctaaacagaaaatgcagagcaattttagattgaatggtggtatgagccaagctcaatgaaagcttaacccaaagcaattgagctgatcttctatttatagcagaaatgtttgacaagaaagtaaaaacaagaaaaatgttagagctcacttaggccaaattaactaacaaagctaattagtttgtcggtttatatttctctcaaacgaaaagaggttgtaaccattttgagtttggacttgaaataagagaacctatcagtggacagagacttaataaggacatctgccacttggtcaattgctgggacatatcttactgaaatttcttggtaaaatttgatctctgacaaagtgtagatcgatttcaatatacttcgaacgagtataaaatatgaagttagtatctaatattgcagcactttagttatctacccaaattaatggacaatgagacaatgtgacctttaattcagtgagtaaggagaccaactatttagtttagtagcagcatttgctaaggccttagactcacgttttgtgctgtattatacaacaacttgttgcttctttgcaaactatgatacaagatatttctccttgaaaaaaaaaaaaccgtaatcacttatagactttctatcatctactcagtgacggatccaaaatttttactttgaagaagtttatttattattaaaaaaatttcttttaatactcagcacatttcataaggggttttacacagtaccaattgcagattgagtcttgtgttttccaagttattagtttgttttagtaaggtggcgtttggtaacacttttttaatcagttttttgtttttaaaattaaaaaagtgaaaatattttttaaaaacatgttctataaaattatttttacttttcaattttttaattgagaatcaaaatttttaaaacaaaaaaaaaagtcacttttaatattttttaaacagtttttttttcttaatcaatatttttgacttcgatcagactcggacccaaatccctccacggccttggcgttgaactcgccctctgacctgaacccgaatctgacccagacctagactcccgacgtaaataaaatcaaaaaaatgaaaatgaaaatgaactatacataatacattattttctgtttttaaaattaaaaaacaaaagtggttacagaacgcatttttgtttttcaaaaacaaaaattttacttttattttgtgattaaaaatggtaaatcccattttgaatcctatgttttgcaaaagttaccgattgaaccatctgttttgttaaatgacaaaatggaccatgtatttttcaaaatggtaaaaataggaatctgaactgattttttgtcaaaataaatttaataataatttgatctaaaagtgttatgacaaaactatttacattttctatatctgtttgtattttcaagttggttacattaaaaaaaaattgtcaaaaattaagttaagggtcctatttgtaccattttagaaaatacagggttcattttatcatttaacaaaatagaaggtccaattagtaacttttgtaaaatacaaggtctaaaatgatatttactcattcaaaaattagaaaacaaaatatttccaaactacacctaagctaggagactctatcatgcattttcagattggacagatcttccaaaccatattttagacttgatttttgagaaaataaaaacagtgagagattctttgatatttggtactatttgtgtcaagtggtaccaaatatttatgcataatcgaagtaagctagtcaaaattgattcctcatttggaaccaaagctcttatttcccattgaaactaaagctcacgaccactgtttctgcattctacaccaca

SEQ ID NO: 240699 - DNA, 989 bp, Cannabis indica
catgatttagtacatatatcaaaattcgaaaggcataatttggtagatattaaaatttggagagtataatttagtatataaataatcactgaattagtaaaattgaatacagacaaaaaaccttaaatccaacaattttaatagtttttggggaatttttaagggtcaacaaaatttaaagaatataatttgatacatatcaaaatttaagagacaaatatcattagccttaattaaagcaaagctcatacaataactcttcattttctctcttgatattgaatacatttttttatgtgaaaattacaccaaatatgggattctagaaaaaagtttaataaatatggcattttaaactttaccacccttatatggcatttgttcaaagttaatgtattttatggtattttatttgccacttttttgtaaatttaattttcaaattccatattctaagtttgtctattcagccctaattttttcaacttctttctctctagtcggctgcctctctcattttcttctctgaggaagaagttggtcaggctccgagtcaagtttccggcaccgttcgcaaattatcctgctcggcctgctttgactctctctggttctgttattgtaagtcttcgttttttctctgcgtaattttctcgaacaccttctcttcattccccaatttttttaatttccactaatttgcttggtacaccgaattagacttgattacaattcaatatatactatagacttggtctgatgccagctccagttcatcagatgcatcaatactatagaccaaaagggtcacttgataactattctaaaaaatggagtgctgtggtggattgtttaaccttgaagaccaaagggtctgctcaagttcaggtttcttgctgaattctcttgtaattggttttttaccaagatttttgaggccatttcatcatttctttttaaatattattgattgatagattgagtataat

SEQ ID NO: 240700 - DNA, 1139 bp, Cannabis indica
tgagtcttacaagcagtatggtctcaactagtattgggaccatgggtctaattggaatccagcgttgtcccgtataggcgagagtcaaggctattctatcttatgagcttccaccattgtaatacccctagaatcaggaaatggattagcaaaaccctaattagataattatgaataattgaggaattatattattatatagttcaatatatgtgattttgtatgaaatttaatatgttaaagacctcgttggtgagccaggggcattttggtaattatgacccgagaagggtaaattgatgaaattaatttaattacgtgcttaatataactatattattatatagtatgcctgtattgtcttttcaggtgagttgaaggaaaatcagaaattctgaatttgactccctctcacgtgacccctctctctctctcaaaaccctcttcctttaaaaaattgattttgggaaggaacttgattcttggtgtgaattgaagctagcttttgaagaattaagcttgattgtggcttgaatttgaggtagttcttctcctcagcccctttaattatgaatttgttgttgagtttggaattgaaagcatgtttttaggtttgagtgttcttgattatttgatgaatgaatttatgtttgatttggatgaattggaactctattgcatgaaattgttgtggattttattgtgaagttgtggctgtgtgttttaggggattttctaggttgaattcaggtattaattggataatttgctgctggaaattaaatgttttgggtgtgcttgaagcacaaattattaagcttgagattttgatgagttgagcatgatttttaagtcatttatgtaatctgaatttcgggatttgatgcatgagataggtgtttttgatcctctgatttatgctagcagctctatttggtgattttgagatatatgcatgtttgggttgaattgggggtgagtttggcatattttcgaagctgaaatctgggttttctgggtttttaaacccagtggtcgcgaccatgataatggcagattgttattttttttaagtttttgtttttgccataacttttgactcgggactccgtttgggacgttctttataccgttggaaa

SEQ ID NO: 240701 - DNA, 932 bp, Cannabis indica
ttattataaactagtttataaatgcacacaagtagcgtccctaagagttcggatattatacatgtctgtttagtgggtatcaatagaagtttaatagaatgtaattttgaatataaattctcaaatttaaagaaattttgtaacacctcgatatgcctaatgataaataattagggtttataattatattatgggttaattagataataattgggattataatcctactaatctagttcaacataaattttaaatttgctataagtagataaataagcataatttatgaattatagatatttctatagcatgtatgaatgtaatatgacctatatgtggaacataaatatttttaggtttggcgaccttggagactcgattggtggccaaaaatatcgtaattattagtttggattggaatattgtgataagttgataatataagtattagggtacttaagagtatgtggtattaacttagcaccctagaaatagaaatttcttagtgactaagaactaataggataatcattaataaattttttattaatattatattattattattaatcttactgttatgattattaatatattatattatatttattatattaatcttattaatatattatgtatattaacgtaacagtttatatatgattagtttataaacaaaatttacgaccgaaacggaactcttgttctctgtcaaaactctctccccttatatttattttctttaattttcaatccaaaacttagcgatctatgttccggtagtagtagaatagcaaattctcagagcgggaatgcttaaggtaaggtttatttcaggtttaagtttaaaacaattagtttcacatagggattttacaaattagaataattatgaaagttctgaccttgtagaattgttctcgggtagtcat

SEQ ID NO: 240702 - DNA, 777 bp, Cannabis indica
ttcattaaataggcatttccaatacaatggaaatcaatacaatagtgacaagtgtcatacacagaaaacaatgcataaccgaaaaaggaaagaatattcccttagcaatgagtgcataataataacctgtcagctgcaaggaattaaaccatgctacagtagagtgcagagaaaacagagtgcaccctcacatactcactcatggtttctaacaatcacatcaacaatcttacttcacaaggatagttaattaattaattaattcgattttaattattgtacatgacttttgttgtattatttgctttagggagtgtggcaaagtgaatctggtgtggtttggagggaggtgagccaatgtatcatggaaaagaattgggcaaaagctggagaagcaaagaaagatattgaggaaaaccagagaatgcttatgaaagaaagaaaatccaagtctgaaacatgggttcctaaatattttagtatctcctatagcaaggaaaatggatgggactgctcacctttgcaaaagactatcccacctgctcctattgttgtcccattgaacaattaaatatataataataaaagtaatgtatcttgtattctaacctacacttacatgtctcatgtggtttcgatttgatcttgttataattaaaaagtattaaaaatcatatgcgtttcttatgttgagactgattcaatatgatgattatgttgtataatacgatttgttgtagaacacttaacgatttcacttatgtagaagtgaaaata

SEQ ID NO: 240703 - DNA, 1443 bp, Cannabis indica
ctggttgtagtggagtgtttaaagtttttaaactttacaacgcttcgctgcaacaaaatgttgatcttgctgctggtgctatttggtgtagtttgaatgttccgaaacatgcatttcagctatggcaaactgctcactcaaggcttctaacaagggacaagttaagcaggttcaatattcaggttgcaaacttgaattctgtggtgtgtgaggctgaacccgagagccacaaccactttttttttctgctgtaatctgtcaaaccaggtggctaatgcaatctttcaatggctgggttttgaagggtggtccaaaaaatttcaaagttggaacacatggctgtgtagtacgagaccgaagcttttggacataataagactgattgtgttggcagccatgatttatcatctttggaggaatcgaaacaattgcttgttttctctttactctaattctgttaatagtatagtgaacaaaattaaaagtgatatgagatataggttatacttcataaaagatagaaaagggacaagagtggaggaaaacttaatccaaagattgatatgtaattaattgtttgttgtttttgttgcttctctttggagaagttcatttggttgtattgtgttgagttgattaatgaagtttcttccttcttgataaaaaaaaaaaaattgaggttttatagcaaatattgtaatcaaattagtttgactattaaaaatattataacaaagactaaatataaaaataaaattatttataaatattaattattaataaaaatttattagttattttaattaattaatttcttaagtatatagttaattataattaattctaaaaaataaatttctacctattagtaacttgatgtgacatatgtaaaaaaatttaatcttaaacaaacaataagagggatgtgattctcgattatattattatatattaaaaaagggtgactattcaatggttacatttttattgtaaccatatggttacatttttttttaacctgtaatagcaggttactaataggtagactttccttttttagatttaattaattataattaactattttcttaaaataattaattaaatagtagacattccttttttagaattatttaattataattaactattttcttaaaataattaattaaatatttaacaagacctcttttagcaattaatatttatatttaaatccttacttgaattattttaataattaagccatttaattataatatttacaataaaatttatttttttacaaaaattaaacttcttttgacacaaattaaaattctcttcttataataaattttcaaataattaattatttttaaatgatatttaattattttgttacaattatatgaactaagtatgaggcctcaagctaatcaatcgataacaagtgcagccatt

SEQ ID NO: 240704 - DNA, 1908 bp, Cannabis indica
ttcttcaattcgaaacacttagcttttttaccaaaaaatattcagccattagtgattgagtaagcgcccacacacatcaagttggtcctcaatcatattatgtaagactgtgaagaatccaatcaacaagaaggagagaaagagattcaggttcaaatcttgataatgctctgctatagaaaggaatcaagtgctagagatttgaacggaaggagtcattacattctgctccaatcaatgtgaggtttcttaaaccttatatgtgttatttcattgttttagcaattcatattaggattttaatgaaacatacttgttagtaaatctagatcctggtaaaataattccaacaataagtagttgaatgcgattgaaatattataaagtaagtaaagacacaagaattttatagaggttcagccccgagcagctcgattatagcctaatcctcgttatttgtattgacttaggaacaaagagaaaggttccctttcttatagctcttacaacagtatctctgaatatgaattctttgataaaatctctcgactctttgcccactgaataagtatcactatttatagggctataagcttggagaggaagtatttcccttctcattacaattgatataagcagaaagattgcatagtaaatacagaagacactgatcgtgggatttggacagcttgccatatctctgtaatctgatccccaagttatagggatttccttgatgactcacgatgcgaaagctgaattcactaagtgttggcattctgtgcggatagcccactgctcggtttaaaggacttcgtccgagcaaatgcacgaagtgtcctattcggcttgtgccttgcgagcagatacctggagtcgattccatgtgtcaccatcgagtgatgccacgtcagagtgcagaaatagggataacgtttcccccaaagtctgtaagggacttccgaagttgcgtgtagactttattcgacctgtctttgcatttggatgggtgacacgtgtcaggcgcgtctgttcgcgactcgatgttaggctgactgggcgtccattcagttttcggctaataagtgctctaacacaattaatgtttcgaaatccaattttctctcaccacgtttgacggttgcacttgattgcctttgatttcccatattcactttttgggggaaccgaggcgtctgaggtttttcgaaatgattatcctttttcgttgtttgcctataaataccattgagcatttgttcacaaactcattttcaccaaccttctttgctaagtaagttcagagcgaaaagagaggtttttagcttcgagtttgcttatgtgattttgcaagaactgctcgtttatcttggcttaacctgaatccaaacgtttgatgcttgatgaccacattcctaaagggacatgatcaaaacagtcgtcgttctagtcatggagaatcggttttttgaccacatgctgggatggatgaaacgactcaacccagaaatcgacggtgtagatggatccgagtccaatctagtaaccccgtctgacccgaactctaaacgggtcttcttccagaatcaatccaactacgtggacccggatccgggccacacattccaagccatacgccagcagatattcggctccgttaacgagagctccaccgagccgcctccaatgaatggattcgcccaacaagctttcgccatggaaaacaccaccgcttcggctcaggccgtcatgaatggcttcgacccggatatggttcccgtctataaagctctaggctctgagttcgccgtctctgatagatcgttaagaaagccttcgatgatgctgagcattcacagcagattctcttatagggcgtgaagaaggaggtagacgttactttcattt

SEQ ID NO: 240705 - DNA, 859 bp, Cannabis indica
attaagattaattttattttaaaattaaattaactataattattaattatttttttacaatttattaccaaacaagattcttttagcaattatttttttacatttaaattattataatatttgtagcaaacatccttataatttaaaattataacacataatcttataattttaaataatttcatatacaaccttataatttaaaattattacgcttataaccttaatttaaaatgattatacctaaatatttaatttttatttaataatttatttaaaaattcaaaaattatattcaatcaagattaaaatctaacaaaaataataataaaaaaactattataaaactaatagagaatgctctggtgtactgtaccctcccatttttttataagttgacatgtttatatttcattttacttttaagtttataactttattaattttagctagtagctagagtcaatgtgttttttatctttcataaatttacacacccacatatcaatttcgtttatttcttcttcaccaatcgatatcacccatcatctccataacttttttcaatgggtttctacctttacaataaataaaatcaacaaaaaaaatatatgtagactattattttttctctcattttctttatagtatttttcatgcttaaatctgaaggttggtcttttcttctttcttcttcttgtgtttttttgttcatattgtgttctcaacacaacaactactatatagtagtcttatggtttagagctaataaatttatatattaggagatgacttgtaataatttagatgatatatatttaatgtcatctttgttcaatttcaagtcttgtatttattt

SEQ ID NO: 240706 - DNA, 1466 bp, Cannabis indica
atttttaagagttttatttagggcataaaacccaacatcgagaccttgagtgtcctgaactagaacttgcttcatcttgtatcggccttctcctttgaaagaggttagatacacgccctctatttagatacatgtatacatcctttctttctgatcgagaaggacgttgagggtgtcttagaggtagcctgcttatcctgggttggtttctagggtttctctcaattctacaagggattccctgattcccaggtcgaggtcgtgttgcgtcctcattcctgcgagaagcttctagtaaatcattttgtttgttcccttggttcgtaaatccttaggatccttgaagaacgtctcgccattgctcttgattatttgtctgaatatccattggaacatcccttgtacccccaggttgctctttttgggtgttttggggatttccctagtttgtttcctgtctcctggttctggaacctcgaggttttcctctctttccaactcagtgttttgtcggttagattcggctaagcattgttgaagttttctattttctaattccactaatggtacatacctagttaggtcataagcatcctcacttctaggcacgtatctggcagaattattggtatcttcattcattctttctgaattttgatcaccaccaccatcattcctccttgatcgtgatgttccagtagtatggattctctgagatcccattggctcttttccagggcgacgtgtggtttcttcaggacgatttctattgttttgattgttatcagtcattgagtatggatacactttttttgtgagggatttttctaagttttatcactaaggctctcaatgaaagcacaaaactgttaacgcatacttttgttaactaaaattaaatagccttttagtaataaatattctacaaaaattgataaataataaaagatataataactctagatatttttacgtggttttgtagttaaaatctacgtactccacgagtccttcttattagggatatttttagagtacaaaatataatatctgatattgaataataatgattctttctcaaaattgttgtcccttttctcatgaaatctgtctctatttataggagtataggttgacaattatttattttgggatagatttaaatataactttaaataaaacgtggacaattcccacgtttcatttaaatcacacgtgagataatactaaataactacccaaccgttctttagttttatcctttagatggttattgctgacgtggaaggttacatcttctcagattcgagctatcttccttgtccatcttaataataaaataaaaacactaagtgttgggaatgtttccatctcgctatgtcctctttgtggcttttgtaatgcgagatgatcttctcgctatatataatgcgagacagttttatgttgatacattcattctgctc

SEQ ID NO: 240707 - DNA, 694 bp, Cannabis indica
ttttgtagtagtggcgctataagccacaagaattgagagcacttttacttggcaaagaatatatataggtcccatatatattctctctttttttcctttactcctttaatttatttggttctttttaacaataagcatatatactcttcgtatataacttaatgtaactacaggttatttatttatacctttcttccatacgtttttattattcctgatcaacttctttacttataagttataacatcattttattccgaagtgaaatttacgcttaatatagaggagatgagaccgtagttatgtctagttttggtacgtaaactctatcaactcctaccactctttcccttgactaattaatattaatatttttcatatatttagattgagtaatcaactacggtaatcagcctattagtttccccaaattaataatgcaaactgatatttattactttttttttatgaaaattatatatatatatatatatatatattatgtttttagatgtgtgtagcaatattgctttgatttattgtgtttattttggttacatgcagcccaacacacttgaacaatggatgatgaacattgtagatggcagttgggcggctatggagagattaacaataccaaatgtcgtatatgcaacggtgatattttcgactctttctacgtctgctaccactg

SEQ ID NO: 240708 - DNA, 1184 bp, Cannabis indica
caaaaaaaaaaaagtgccaccaggggcaaaccattgtcttggccaaggggccattttctaaaagagaaaagggacataaataaataaccaagtctacatgctgggggacttggacagatcttcttcttcttcttcctcgccctcaccattttcttcctccatcctagtcttctcgcaaagagctaaagtttcctcctcctgctcctccaagaagctggtgtctatactggggttcgccatccaagcccgatacacggtgcgaaaaccaaccttgtcgcatcattcaacggccttgacttctttttcagcgagcttcttctcaaactcatcggcttgagctttgacggtcttcttggcctcctcttttgccttctcggcttcctcttttgccttctcgacttcctcttttgccttcttggcttcctccttcgatttgtccacttctttattaaggcggatattttcctgttgggcatcgtcccgatgcttactcacaaccttgcattgggatagtaatttgtggacctcgccctctaagtattcgagccgctcagagagtagtcgattggaaacaaaagaagcaaaagaagcctaaagaattgcaaacagatgaatatgaaacaggtaaaaaaagaataatataattataataacaaagccaacgtaccatgaagttataatccaagctcattgaaagcatctcttttggactactaagattgagaaaatcccaatcagagggaagaagagtttgaagtttgcgctagcaggcaactccatatgcttgggcaaatccaaacccgacctcctctgctgcggccgacaaagtctcaatggccttgctcgaagaagcagtagtgggggttgcctcgggacgaggagcattggcgtaaaaaatgactagaggaggaacttgttcttggatctcgttgtcagagacctcgagatcgatgggctcgaccaatgatttcttcttatgggcggtggttttcgtttgcctcttgggaggagccacttcagcagctgtagggaccccagggttggttgcccttttcttccctttccggtccatcatatcttcataacccatgtctacaaaataagacaaagcgttacaatgattaaaaaggccgatgaaaaagggagaaatataattttccacctaagggatttaccaaaatcac

SEQ ID NO: 240709 - DNA, 1024 bp, Cannabis indica
cagttggcttcagatatggttagtgctgaaattgaattcgtggttggggaactacgtaacctgacacttcagtcagatttgtgggaaagaatcaaaaagatacaattcaaagacactgagctagttaaaatatgggatgaggtattggtgggttggcctaaggacttctcaatctcgaataatggaatgttacctcacaaggctcgggtttgtgtaccgagcagtgatgagcttaagaaagagatacttaatgaggctcatactagcccttattcattacacctgagtaccaccaaaatgtaccaagacctgaaactctattattggtggtgtgggatgaagagagatgcaatggaatacatgtttaaatgcttaacatgtcaacaaatcaaggcaaaaaatcaaaagctggcagggttactacaaccattagcacttcctgagtggacgtacgacgatgttacgatggattttttggttggtttgcctagaaccacgagaatgtatgattgagtatgcgtcatagtggacaatttcacaaagtcagcacattttctgcccgtaaaaacaacttatacagtggatcagtatgcaaaattgtatgtgaaagaaatagttcaccttcatgaaactccaaaatccattattttggatagggattcgaagtttacatgaaaaacctggataagtctttagagagatatgggtatgaagccattgttcactacaacttttcaccctcatactgatgggcaatccgagaggataattcatatattagaagatttattgtgagcttgtgtcaaggactttgaagattcatggagtaaatacttgcctctgatagaattctcctacaacaacaactaccaaagtataatagggatggatccctatgaaatgttatatgggaggaagtgtcgttccccaattcattgggaagaaaatggggaaaagaagtatttagtgttggaaatattttaccaggatctagatttactaccaagtatgtttcattaacatc

SEQ ID NO: 240710 - DNA, 1234 bp, Cannabis indica
tagaggcttaggcttagacttagttgcttagaatgaggcttagggtttctagagttgagttaaggcttttatataggagagcttaaaccctaatttactaataaaataagtagatatttacatattaaattgattaaatataaaatactaaaatgccccttaaacatagatattttccatctactttattgggttgttgaggcccaattcgtagtctaactcacaatctacgtgtagagttgtgcacagaatcctactaggtccaatcctgctggccaagcacctgatgggagcaggctggctgaccttgtgttgtccagaggctggctgaccaggggttgttggtcagccgccttgaggtggctggtctgttacttgttgtcctatttgagtgtcgggaccccattggctaaggtgttgacttgaccttcttgttagtgagctatatagccacatggtgttgatcttgtccacgtaagcttgtcacgttaggtgggaaaaaattgggttaacatttgcccccaagtccctgtgaagacgtctgtacggataaggacttaccaattaagttggaactaatgtagcctttactgaataggtgtttctgcatttctagtcttttaaaatacttactcttgtctgtttgagctcatttgttgcagtaaactagctgtttttacatgtctctttgtcgagtatgtgaagcaagtgaaggagtggtcccatagatactatttaagtccttttggggggaaactcttcttcacttttcactctctcactataatataacttttgaagaagatcattgtttctctctagagggccgaacccacgtagcatcattctcttggggttttcgagctattttgacgatccaagcttcccattttcttcatcaacggttactagtggaaggtaagctttcttattcctatcgttcacttgattttgccatgaatgcatgaactttgttctttgctttgaatgtcttatgattcccacgttagattgttgtcctttcagtattttgatcgatatgatagtcttagaatacgtaatgtgtgatttctagacgaaaaagatctaattttgaccttcgttgtgattcttggctctttgattcacgaagaacacaaagaacgtgtttgagttcttgaaaaaaaacaagctcagatcccgtacacatcttggcccgccaatgaggtcttgtttaagacctggccggccaagg

SEQ ID NO: 240711 - DNA, 866 bp, Cannabis indica
gataactaatcagattgtaaagagttttatttagagcataaaacccaacaagaactccatcatctcttcttttgttatcaatgcgagtcattgggtgggaaaagctcctactacccactggtctaccataattcttactatgatttcccctaaatggtggaaccagagggatttaggtctcgcacccccttctgagcttgttgtccacccccaaatggtgaaaacccagtcgagattctgtaccctacaccaataactctttttctagttgtcccttgagtacctctccttggaaagtcactgtccccttctaaagttaccttcttgcccctgtctgtactattttccaatgcaaccctactgtaatgatactttgacactagattcctaagcagagggagcctcggatcaaaataattgcggataggaatacctactttgatccatgacccatacaggggaacatccttgccaattggtggatatgcaaactacattggtctatcacatttagaataagtatgagcaatgtacacacagttgaaacacaatggatggagcttaagatatttgaattgaatccattccttcctaaagtttgaaggtagaaaccaaccacaatccgatgattaatgagtaagtacacctgaaacttcgagtatcctcttttagtagttgtcactctcgataacaaactatcaaaatcaatatactcacccattaattttttattttatttttttgcaatgaaatcaatgtttgcccatgttaggtatggagtcagaagaccataagcctcatcccaatatccagcttttgccatattaacactttgttaataaccatcttcaggttaatccctaata

SEQ ID NO: 240712 - DNA, 655 bp, Cannabis indica
aggaaaactaaaaattggaaaaatggaaattcagttttgaaatgttttcaaatatgatgaaattcttcatacatgagtaagaggttaattttgactaagtgtcttaagatttacttggatatctattgattgaatataattttagagttataaattttaatttattgcagttactttttgatggctgacttatccataaaattgtattattttgtaactggattctcagatgagctgtgcctaaaagggctcatgcataactgtatataacttatcaagtaatagctgtataatcagcataaattataaatttctttacgttttatattaattgcaattcgcatagaaaattaagagtaattattttaattgtaattttactgtgcaaatgcttttgattgatatctaattttcaaatgaactgtatcatagggctcataaatggcaatgtaaaccatattaggtaataggctatttaatcaacattaattataaatatttattactaattatgttttatattgtataaggaaaacctaagatatctacactattttggaatacacgcgatttgatcataatttactttaattgtaattcataaaattgctactaatctgtcacatgagctggtgtgtgaaagggctcattaata

SEQ ID NO: 240713 - DNA, 1048 bp, Cannabis indica
ttacaagaaaaataaattatttacaaaacaaataaaaatccttggaagctttgaggtctccatcttcatagagggtaagttctctacacttcctcttacaaatttcttacaaatttcttacttgaaatttgaaatatgatgaagttttttgcacttctttttcgtagttttttccatggctaaaaatggcgttgaattctttggatttttgagtttttgataaaatatgagtgtttgacgattggattctgtagcataggctatgtgtaatgtgtttttggttctggtttgatgtaatttggtgagaaaatgaataattttgaagctcttgattgattgtgttcttgaatattgaagatctccatgaacatgaaaaaaaattcattctccctctatttttccaattttgattctcataaaaggggtaaaaatgtatttgtggggatgtgatacactttggaaaaatttgttggatgatcatgagtgacggaggtatgaagctcggccttcattgttgaaaaccaccccgaggtaccctattgagggttgggatgtgtaccctgtgaaccaagcttgcaccctttacaacattgataccctgaggtaccccataacggggtcagggtatgcaccctgagacaccccctttgggggtcggggtgtgtataccccgtggcttggaggtcagggtgttacccctgagttacccccttggggtttggggtgtgcaccccaaagtaacttaatttttttcattgttaccccgaggttggggtgttaccccgaccttggtgggtcggggtacaccccgagtaagaccctctatacacatttttttttgcagctatcgaggcatcacctccaagtgggggtcggggttgtacaccccaagaccaccctatgggaggtcggggtggtacaacccgagaccaccaatggggggtgtgatgcttcatgacgaccgtaaggtaacttcgcgaattgaagacgattgttgtttttcaacctctcggggtcttatatacatgcttccatgtgttgtttttgc

SEQ ID NO: 240714 - DNA, 618 bp, Cannabis indica
catatgatgccacatgggctgtgacatagctctccaacatcccacacttaattacaccactcaattcccgagtaaagtgtactaatatgtcttgtgagccaattttgagcctgataacttcataattgagctatgactatgagacacacttagatccgtcttaaatatatctttccaatgcaaaaaccaagttatttggataacaattgtgagagtgatgcccattttaccgaagggtagtttgtgctattttgctcaagatgtgagcactaacacggccagatggcggttctcagccctgcatgttctcggatccccacggggtgtgttttgactttattttttttttatagtgaatcatattttgggggtcccaggatcccaaaacctcattttgatgtttgaaatcctaacgagagaccatgccatcagtcgaggccaaaagatggtagtggttagccatagcttgtgggaagtcttggatggtatttctttcttatttcattcatatggatgctagaaaactactttggtcacattggttcttggctaattggtcaagagagcacagatggtagtggtcgcctatgagggttgtacacccttgggtggcttttc

SEQ ID NO: 240715 - DNA, 1644 bp, Cannabis indica
ttttttttttgtgttcttttctctgcaactacagcgccatcctcaactctctctctctctctctctctcttttactctctttattagagagagaaagtgctcggacgtgatagcaattagtgaaattgttaacagttcgaattaaaagtctctgagttgttgactattgaaagagaaatattaatgcacttatcttttaatctgacggttgagctacctcttgaaattattcattagcatattattccttgtggaccatatatttcaacggttgtgatttattggatcaagcagaagtgattaacgtgactgttgctgcgttttactggtttgttattgctaattaattccacgacagtctaaggtgtgaacataagccacgtgacaaggaatattcacgtccaactaggagatttagcataacgtaattaactattagaaatggtaaggagagaaactcatctgtgtgaggttagtaacttgtgacgattcatcgacggtggagaatgcccaatcaaattatggaatttgacttttagaggtattgattttattttatttttcttttcgaccaacttttgggcatggattagtgcgcaatcacgggggtgagtatagtgtatacgatacgaaattagtatttttactttttccttccacagtaaccctatgtttggtatgttggaaaaatggaaggaaacataacttatgtgagaaaaatgaagagattgtaaaaatgagcgtaattggtatgagaggaaaatgtgtgaaatagaaaactataagcatggactaccaaaatttatatacccactttgtccgacgaaaataaactaacaccaaaaaaatatggatattcaagatagacaagaatagtcttttacttaacagtgaatatccacctagaataaccaattctcaaagaaaaatttgtgagtatgcaaataataacagtttaaaagtaaataacacaaaaaattatagtggttcagtcagagattagtctgcttagttcacttttagtacgagtgttttgttcctttattcactttggatcaccctttatataaaaagtaggtgttcctttagattataaaacttccaagttatgactgtttattacattaattacatttaattgaaaagcgaaatgtttaaagaataaatgaaagaacaatttcgaccgttcttgattgatttcttgaatgtatgcgacttgggaagttgtatatcagccgctcatcttccaagcacacgagcttgtaagctctctacagtattcctttgcatataaggtttttggacctaaggtattctcagggctatcttatgggtggatgcatgcgattaccctgattgcatgtatgggcatttgtgtatagaacataaaacctgcgagttcttagtgagttgtcgtgcatctgtcttttggacagggcatgcataaagacgcacactacaaaaaactgctacttttagtgacaactttttagtcacaacataatttttttgtgactaaatgtgacttttagtcgcaacaaaaactcacttgtgactaaaacatagtatttagctacaagttattactaatttagttttagtcacaatcaatattatgactaaaaacatatttagtcacaacaa

SEQ ID NO: 240716 - DNA, 1030 bp, Cannabis indica
tggagatcggcatagcttttctgatgattgtgaacaaccataagtctttcttagattccctttatcttttcagtggtgtactagtgataatttggggtttaatagtgacatgctcatctagttttgcccaacacaatggcgttctgcatggtctcccatataaggcctcataaggagccatatttataatgtcttggtagctattattgtatgtaaattccatatagtcgaactatattgtctacataaagtcgagctagcctcgtaagcttgtaatccttactgattggaataaaatgagcagacttattcaaacgatcaacaatcacccaaacaacgtcatgcttcaaaggtgtcaatggcaacccagtaacaaagtccattgtaatcttgtcccacttccattctggtataggcaaaggttgaagtaagcctgaaggtctctaatgctcagcctttacttgctgacaaactatacacttaactacaaagctagccacatctcttttcataccttcccaccaatattgtctcttaaaatcttggtacatctttgaacttcgaggatgtacaggaaatttggatctatgggcctcaatcaaaatggactccttaagatcaaggatatctgtaacaacttgccttcccatatggtataggtacccttcaccatttactgtccacccatctagtttctcaccatcctagattcgattccaaataaatcttagcttttatcttgccactgacattgcttaacttgttgaagtagcattggtgtagccactatgttagagatacaagctacttcttccacttcatagtattgcaagtagcactggtgtaacattctttcaaaactcgaatatgtgcctcgtattctttatgactcaaatagttaagaatcatagagaaggccaaaatcgaatcctttctatcaaaagtcacacattacatattcaaaaactatcatgaggatcaatataccaaagagattacaaactaacatgagaatcaaaaagtttccaaa

SEQ ID NO: 240717 - DNA, 990 bp, Cannabis indica
tcgtcgaccttaaaaacgtttaaaacgttccttactaaacttaaaaacgtaaaaacgaaactagtaggttagggttagggtttaaacttttaaaccaactaacttacccttttaccgttacgactagttagtaactaactagtaaagtaaaaaaaaaaaaaaagtatgcattgctaacaatgtaggaggtaaagctaggcggtatgctacttgaccaactttctcaagaatctcaaatggccctgtaaacctagggattaattttcctttcttttgaagtgcttcacacattttattggtgaaactcgtacaaaaatatgatgtcctacctgtaactctatgtttttgcacttcggatgtgcataacttttccacttactttgagaagcaagcattcaagccttgatcttttccatagcttcactggtcttcttaaatgattttggacccaaatactttctttcttgggtttcatccaagtgaatcagagaacgacactttctaccatacagcatctcatagagagtcatccctattgtactttgataactgttgttataggataattctatcaatggaaagaacgtactccatgaactttcaaaatccattacacatgctcataacatgtcctctaatatctaaattattttttcaaaatagccatctgtctgagggtgtaaagatgtagctttgtatccatggttttttggagactctcccaaaagtcggaactaaattttggatctctatttgaaacaatggacttcaaagtcctatggagataaactatttctttcacatataactctgcaaatggatccactaacaaagttgttttcaccaatagaaaatgtgttgattaagtcgaaaatattcactattaccaaatcaaatcatacaatctcctggttctaggtaatccaaccataaacccatactaatatcttcccaaatctacttggtaagagtcaaaggctgcacaaacct

SEQ ID NO: 240718 - DNA, 921 bp, Cannabis indica
ttcacttcattaattaatgtaaagattatttataaccaatctcaatccttttacttctttcattgtatataatgttgaacaatttaacatctgatatatgaattaaattgatcattagatttctctgatattaaatttgattaatttgttgttgttgttgttgtttctgttacacttcccaatccaatatggatgcaataacaatatcatcaatgggtgatgacagattttcaaaattacccaattcattaatcattcacatcctatcgtttcttccaactaaagatgtggtcacaacatgtcttctttcgaaacgatggaaactcgatggaaactcatttggtactcagttcccacaatctttttctccaataatattagtcatagacttattagtgcagttgaatggaaaaataatcgaaaaaaagttctataattatgttgaaaaatatttggaacatcgcaagaaaggtatgtattttatcgtcgattcagtcataactagctttaaccttaacatgaagggtacctatcaaagaagtaagactcacattttggataaatggttagcttttgcagttgagaataagattaaggaattgtatctatctataggtcgagcttataataatggtgataatattgagtctttttatttcttacctaagataatagacaatgcaaaatatttgactgttttggagttgaatgcagtgagattggaaactacttctcatttgtttagttttccatctttgaaaactttgtcgttggaaagaattcaccaatcaaatacttcaaaagatcatgatgttgtgtttaagtttttgttgggttgtccttctcttgagaaattgcggttacataattatgaatttttgcgtcgttgatgagaagcttccactacaagtttaagcctcg

SEQ ID NO: 240719 - DNA, 1412 bp, Cannabis indica
cgtggaacttcgggcttcctttcttccacggccaggatgacttcttcttgctcgtgctaagctgtccgggcatacctctctcgagctttgccggaatctccagcgatgtgcagtcctccaataatgacttgtaagtgtccatctatgggtggaggtagcagatcctagttgttttgaccttggttggtattgacatacttcttcaagtgtcgtagtctccgcggaaccgacaaaattttgtcatgtcttatttgttggtatctttcttcatgggtccgggcttcctgtacggaattaacgactgagctgccatatacacactctctatatcttcagttagaatagtgaatgcagtgtgtttggcattgtcacggggagtctgttcgaatttatcggtgaactttcctttcttcctgtttcctttcttgtggttgttgcttgaacgcttgccacttgaattgttggaatagtggggaagttgggtggatgttccagtggaaggagccttcgctttacctggcttttgctctccttctgctcgttgaatggcttctctgagcttgatgaagccttcggatcggtcaaggaaatcactcattgagtctatcggcctgttcttccttatatctttcaatatttcaccaaggactttaatgccccccagtatcgcggataactttctatcctcggttacccgcgaaactttggtcgcttgcgtcatgaatctattgatgtatgcccggagtggctcgcctagtcgttgctttacttcgaccaaatctcccagatggaatgggagctgacgtgaggaagagaattacgcatggaattccgaagaaaaggctttccatgaactaaactttccaagaccgaacttgaaataccattgctatgcgacttccgatagagtggcggggaagattctacaacatacatccgctggtactacttgtaaatccatttgcatctcaaagtacttgagatgggaaagaggatcttctctcctagtatacatcttccacgttggcattttgaacttgtgagcagtggctagagattgatctctggtgagaagggagttccgcgagcacggtctaactgaagatcattgttacgctgtccggccatgccatgaaacatatttttcaactcgtcaagctaggtctgtacggctgggcttacttgctcagcattctggtcgagttggactatgtcagcgtctttctgagtggggatttgagtatgggctctgggctgcacgatcgttgtagtattctgctcgtctgttcctcttcttctgtttagatcgttccttaggtcatgggttgttcccaacccatcgaacacagaagagcctggttgtcttagcgattgattcgcttggttgacaggtggaataacgccattattct

SEQ ID NO: 240720 - DNA, 870 bp, Cannabis indica
tggattcagaaaataacaactcatgataatggttttttacaaaattaagggaagcatatggggtcagagaagaacagtgcttgatctcaaatagacatgagagcataattaaggcagctgctcatgtatatctagaaataactcatggttactatgtatacaacctattaagcaaccttaaagcaaccttcaagaagaatgcaagcaaacttaataaaccattcttcgcaggggtaaaagcatacacatagaggaaattcaaataccatatgagcgatcttgacagcttggacaagcgtgttagaccatatttacaacaagttggatacaacaaatggttaaggtaccacaacaaaaacaacaggtatacaactatgacttctaatattgttcaatctctaaactcagtaaacttagcagcagagaactaccagtcactacactaataaagtcattgagagctttgatacaacaatggaaatacacaaacaggaaaaaaaacatagaaaaccacaacaattttgacacctactgcagagaaatagttaatcaacaactttgtgaactcattgacagagaatttaggaatacattaaacttcatgtaggataacaattttgctgtattttgttttggttttgttaacattcaataaattgattatccttacctaatctgtagataaaaccaataaacgagagcatgtttgaagtggtacaacgaacaaggtcatgggtggtcaatctaaagaaaaaacatgcagttataacagattctaactagacgaactctcatgtgctcatacttttgctgtgatgaaagagatgaacttaaatatttacaaatactgttcacagtattacacaacta

SEQ ID NO: 240721 - DNA, 710 bp, Cannabis indica
aaaaaaaagaatggaaagtggaggatttgtatcgatttcacagacctcaacaaggcgtgccccgaagattgatttctgctccctcacatcaacatgcttgttgatgctatggctgggcaggagctccttagcttcatttatgcattttctaggcacaaccaaatccttatgcacccagatgatcaagagaagacatcattcatcacagaattagggaccttctgttacaaggtcatgccatttgcactaaaaatgtcagtgcaacatattagagattggtaaatcagatgtttgcagacatgctagggaggtcaatggaagtatctattgatgacatgctcgtcaaattgctagcagcagcagaccaccttaatcatctcgaacagtcattccaggcacttgaaaaatataatatgaaactcaaccttgcaaagtgttcttttggtgtttccttaggtaaatttctaggatacttggtgacaaagcgatgagttgaagcaaacccagatcaaatacgctccatacaaaacattcaatcaccaaaatcaattaaggacgttgttatgaaaattatgtttattacgcaagtatacgcaatcaagtagtatctcacgcaagtgaggtcgaaccacagggaattggattaagtactactaaactatacttatgattctatttggtaaaataataagtttgcaatttgaaagtaa

SEQ ID NO: 240722 - DNA, 703 bp, Cannabis indica
aataaaaaatactcattagcattatggaaccaacacatcagcaagattcaacatattcaaaccaacttggataagttggttatgacagttaggatagtgtgctaaactgttttagctgtattttcttgctttactgtatcatcttgatttctgttaatagcttcttgttgtaaggtctctgaccattattcagtataaataaaaggtccaaagctcaacattattcagttgagcaattccatctttccatcgatcattttctctccaacactccattactgctctctctctttctcttctctgtttctggtcaaattctctgttgaacagtctctcaaggccacagtcaaaccagccatatacaatttcactacaagtagcaatcctgtccatgacaagtccaagacaacttcagtatggcactgtcgtttaggacatccttcaagcaaaattctagcaaaagttctatcccaaatttccccaaataccaaatgtaacaatgttcctttttgtgatgcttgccaagtaaggaagttacatcatttttcttttacacaaactgaaaataaaacctctatgccttttgaattaattctttctgatgtatgggggccctcattttatccttccaaggatggatacaaatattatctcagctttgttgatgactatactcggtttgtatggctctttcctatgaaaa

SEQ ID NO: 240723 - DNA, 1982 bp, Cannabis indica
cttatgccatggcgtgcttcaagctccctgctatcatttccactctaagaattgaatctttgatggcccgattttggtggggtgccaatgaaacaaccggaaaactcattggaaaacctggtcatccctttgctaatcaaaattccatggtggacttggttttcgttctatgaaggctttcaatcaagcgatgttggccaaacaagcttggcggctactccaatatcctcagtccttagtggccatactcctcatagctcgatatttccctcaaactagtttccttcattctggcaagggtcgtagaccttcccttgtttggtctagtataacctggggtaaggaacttctccaatcagggcttaggaagtcaattggtgatggcactaccatcaacattttcaatgatgcttggattcctggttatggtcaattgaattacttgaggtatcactcaaacgctgatatgacagtggctagcctcctcacacctgacaagcaatggaatcatgccctcatccaatcccttttcccttctgacatctccaaagccatagcagctataccccttcaccccatttcctctcatgataattatttttggtcacttacacctcatggctcatacacggtcaactcgggctaccaccttgcacacaccaaacttcatcaaaatgaaccttcctcatctgatagtaaattctccaatgactggtggaaaaaactttgggcccttcccgtgccacccaaactgaaacacttcctatggcgggtttgctatgatatcctccctacaagccgaaacctagttaacaggcaaatactacactcaccccactgcagccgatgtcactaccacgatgagaccctagagcatgctctattcaggtgccctgcttcccagaaggtatggaaattaactgattttaataattttataaatgcacactgttcttttacttgtatggatttattataccttgctgccactgaattcagtactggacattactctctatttgtttgtctgttgtggaagctatggaactgcaggaactcttggattcatgagggtatatccccctccccagatcaggtccttcgtgatgtttcagcgtatatggagcagtatacaacctgcaacaagcagtctcccagtatgtctcaagcttcgaatgatccttgccagcataacaacaactgcccaccttcttcaaccttccattatcggcttttggtggatgcagcccaagatctgcaacttcttaaaatgggctttggcatgaccatccacaccaattcaggtgaagttctccttaacttggcgaagcctcaagacggaatcactactcctttgctaatggaagcacaagcactttattcggtagtattatggtgtcatgaacactccttttatccagatagcattgtctcagattgtagtgtgttagtgaattatatttgtaacaatggaactcataatttgcatcttaatccttttgctattggaatcaaaagcttgctctctttcttccctaaagtgtctcttagctacatcccaagaggggcaaattttgctgcccatggtttagctaagactgctttaggcttagagcaggaagctttatggatgagctctactatccaaaatgctttatctcatgtaccatatacttcaaactctgattaatgaatacaggtctctttctctcaaaaaaaattgttacaatactaattagttgatctctacatatatatttttttttgtacgttatttaaacaacctcaattaattatgtctatttggtaagaattaacactctttataaaggttatcctccaaatgaaactcaattggatctccagagagaccatgtcctcatccaaaatcgttccgtttcggtaaatattttaacaaaactcttgtaagtataaaaaaaaacaattagaaatgtaactgattctttaaatcatattttcac

SEQ ID NO: 240724 - DNA, 1445 bp, Cannabis indica
gatgtgaggagcatcaagtacatactacaagcactgaaattattttcaagcacttctggcttgaatctgaatccttgcaaaacagcttgctactgcatcaacatgtctcgaggagaagttcaatggctgctgcaaaattcaggcttccaacaacaggtactcccttttacctatcttggaatccctatttcctctaaaaaaatatctgggaaagactgtgagctattggctgaaaagatgactgctaggatcaagagttggagttcgagaaatttgtcctttgcaggtcgaataactctcatcaactcagtactaatagccattcaagcctattggagccaaatgatctttatgcctaagaagatcttgaagaatatagaggctatctgtcgagcctttttgtggaaaggtcaagctaccttctatggggcaggggctgtagcttggggagatgtttgccaacagaaaaaagatggtggattaggaattaaaagagtggaagaatggaataaggctactatttgcaaatacgtatgggctattgcaaacaaccaagaaagcctatggctaagatgggttcaaagtgtgtacattaagagggaggactggtgggactactcggcttccattcactctagttggtattggaagaagcttgtagctctcaaggacactctcaaaacaaagcaagaccctgctatgtttcaggtacaaaaatattctatctcagctggttattctctgtttaaaccgagtacaaatcaggtttcttggagccatgaggtttgggcaaggctaaatgtcccaaagcatagtgttatactatggttggcaatgttgaataggttaaagacaagggatagacttgtgaagtttggattacaagtggaggaatgttgtatgttatgtaacacacaaaaggagagcacacaacatctattttttcaatgtccttttgctgtccaatgccttcaagaaaccaaatgttggctgaattggagagcttcaacattaaatctgcctatgattataaggtggattggaagagcgaaggtgagtagattcaagaagaatgtgttggctgctgtcattgcagggttagtatacaatatatgggaggctcggaataagtatatttggcagggggagctgccgagttgcagcaggctgatggagaacttgaaatggagagttaaaagccgaattatcatggtattgcccaaaaaattgaaatgtaaagatagagaatggttttatgagttgtaatagtgtaaatacaaagtatgtatagatgtattaattgagacttctaattgtaaagtgctcctaggatgtaaatggttttgtgaaatataattatctaattcatcaaaaagaaattattaaatttaaaatttagcccacaggcaattttagattcagtaaaattttaatcttcagtttat

SEQ ID NO: 240725 - DNA, 1217 bp, Cannabis indica
cgcctaaggtagttagggtgttacatttacaacttcatggggagggttttattagtaaatatcttggagttcctcattgtgttggcagggttactaattccattttccattatctcctccaaaaggtctcttctcgattaaattcttggaaataaaagtacttttctcgtgttggcaaggaaactttaattaaggctgtggcccaagccattccttcttttgctatgtcatgtttcagaatgcctaaatcgatatgccagaaaattcaaagtttgatagccagattttggtggggttcttaggggactaaaaaagttcattggaaaaattgggatgtctccaagttttttgggggtttgggatttcgtattttgtcctctcataatcaagcccttctagcaaagaaagcttggcgaatttggaatgataggaactctcttcttcactctattcttaaagctcgatacttcaaacattctaattttttgaatgctcgtgctggccataattcttcctttacttggaggagtattctttggggccgtcaattgcttaaaaagggtctgatttggaagatcggttctggtattaatgtccctttatctgcacccaattggatccctagtgttcacagtccaactctcttacatcctttggaccagtcccaagcttttgtttctttcttcattaatgaggattccacttggaatatccctaatcttaagcatttctttcctacttatcaagtagacagtatcctcaaaatcccccttgacccagtttcctctgattccctcatttggggatttcactcctctggtactataactgtcaaatctgcttaccatcttggctcttccctggcatctgcggctgctccctcctcttccacccccaacccttattttcattggtggaaaaagctttggtctctctctgtccctcccaaaattaaacatttcatttggaaagcttttcaccatattttgccatgtgctttcaatttattcctcaaaagaattcttcctcaccctaactgttctttctgtggcaacaccactgagtctgttacccatgcccttattggttgtcccagagcaaagactatttggaagtcttcaagattcaaacagtttctattagcttatcatcaaagtgatattaaggattttctccttcaggcactgcatagctatttctaaacgaggtactttccc

SEQ ID NO: 240726 - DNA, 1931 bp, Cannabis indica
tatgttccaatataccactaaagttcctcgacatagatcacaataccttataagagtgggaggattttttcagcccgttattatttggatgacactagtgatgactcacgttgatatattcaggaaaacaactttgaaataaagataaagaaaaaaaaaattactattcacacaagtagttataatttatcagaattacgaaaataagataggaaatcttacaatgtctattcgaaagaattaagcacaatttctagtccttatgaattgttttatggtatctctaatgattacttaatcttaagtaagtattttacattaatgttaaaaccagaatgctatgttgatgacttagcctagaaggaacttatcttttttagaaaaagataaatatcacaacaggatgccccttagtactaatagtaagaggttaaatgcacacttgtgtatgcattaaatcagactcctattgttgagtgggagccatcaaagacataagcaaacaaagcaacatgaagagacaattcaagaaagagactaaagtgacttatatgttagatattaggggtgattttagaatccttaaatctgcatcaactcaatatctgagatcggggatggacattacggggggaagaaatattttgaaagagtgtaaacccatctataatagtttagttccaccagtgaagttaaatgacttagttacttttaaaatgcactagaaaattattcaaactaaagaaagttcttgattattttatttccgattcattttggataaggtaagtgttgtgtcttctgcacatttagatgtacttatcaggcattaaagaattcagtatacctagaggagtactacatatagaaaaacgatgttccacagtattgtgtgaatataaaaagaaataatagtggagaaagctattacctgctacaaccttacgattcctgttatttgggcaaagccaaacacactacactttgtatatatataaagacaataggttaattaaaatgtagtttaagttttatattagtgcaagtggaagtttgttggaattttatatcctaaataaaatccatttcaatgtaatcttaatatttactatcaatagaagattagaagtcatttaagtttacatgtagttttcaaataatagttttaatatacaatttctatttaaatccataacatataattattcacaattacagtaatgtcattacaatgaaaagtaattgtgattatatgcttcaaattctttagtcccatgatttatcagtgcattaaatttacattgacgtgataatcaacgataaaatttacttgcacttgtataagtaaaaatgtcttttccaagacattagcaaaagtatactagtatcaaatgtaattggtatatacatcagactagaccgatattgacaatggaaaaaatatacataaacttaccgttatatcttttctaagtcaatatcacttagttgatcttagattaatagatcttaatcctaagatagttaggttttggcttaactgtattatttgtgttctttgacttgttcgttaaagttgaccaattggatcggcccaatacttacatcttgggaacatgatagtgtaagagagtgggagcgctaatcatacatatagaatctgttatacccgaaattcagctggaggacacgtgtcaagctaaaggagaatagcgaggcaccggagaagagtaacacataccttagcttacaataaacaaactaagtataaaagtcggattggctcgaagaacaagaatgtgagatgaacatctcactacgaggaagcttcctatagtttcatccaactaacggaagcgagactcataatcctagcaagtcagaggatttccatatacccgcaatcaacgtaaaacatatcttgtcgatct

SEQ ID NO: 240727 - DNA, 1065 bp, Cannabis indica
tacacaaatacatgactatgaagtccctaaggatttctagctcgtggggcgacagttctgtactaattaggagattgtttgttgtaggacacgtgttgcacaggagtcacgtttggcagacaaaggtgttaggggaaccgttggacaaaaggggtgtatgcaaatgcattggtagtgcgcacattaccatgatgtgacacaaaggacaatatgtgatcatgtgtccgacagatggacacgtcagtttaggaaagacgtgtgcctctcgtctcgcagtagacatccagtactcacccccagtagatgtttcactgccatcttgtggcaggcatccagaattttcatgcgaggtctgcttccaagtgcgcccttatcttcattcgaaggttttctttcttttcatgcctccaaaggctagggaggcttccaggccttgtaagaacattatgtccccaaggtaaagttctgggccttcattaggcttaggtccgttcgaggtctgcactagcgttctgagagtgggaaggcttaggcctaactttatgtggtgatcttcagattatgccacgcgtctctcttccagaaacacaaataatatttatctccaagcttccagcaattaagagtggcagaagcttacagtcttccttccaagcaaccttggagtcatcaggcacgtggacaattttgaacgtagtggaagcatttttcgttgggaatattttaccaagaatattttgtgttgaaggaaagaaaaagatgcttattggaggattttcagacgaagaataataataattcaaaatgattgatgaatcccaacattaccttttttaattctcttcttcttcctatatttgcatgccataatattttacatgtgaatcgtcactcaaaattgtataagcggttctatgttagtaagatagtaactttgcctcttttgaaaattaaaaatattgctttaagaaatatttttttcataccatttaaattaagaattatttaacataaaaagtaagataatatttcgtttcttttattttatttttttgagaatttttt

SEQ ID NO: 240728 - DNA, 1527 bp, Cannabis indica
aggggacgcaacctgaggaaattaagggatgtttggggacacggcctaggacatgtggaacgttagtcatagatcatcaaccctctctccaagttcacgcaaacccctaaagggggaacgaggtgaatcgaaccttaagaggaagaacagaacgagaagaggcaaggaataccacgaggcgtacagtatctcatactcaatcaatgcaaggaagagaagacactcgtcgtagcaatgataaaaaatgcataatgcagtatatgggtagagcaatatctgacagttgtcacaaccggtgggacctacgggaacacttgaactttaaaaaacctaatcttcattaacgacttgatcaaaaacaaagggatttattccatttgcaaatagatgagttggagaataagttcagaaggcatcaagtcagggaacccggaaggcaattggggtatgattttgttgaagaatttgagtcagaagcttcaggatcaaagagggaagacgattccaaaaggctacccaaggataagatacagaaggaacataataaatttatacccctttatgttgaatataccgagcttaatgaaactcgggaaaatttctacctcgcacatgtacaggaagtcgtttttagaaagccaaaacctatgagatacgggagacataaacgggacccaacaaaatggtgtgaataccatagggatattggacataccacagaagagtgtcgtcaattgaaggatgagatagaaggtctcatagcgcaaggacacttttaacaatatgtaaaggggcaggacaatgcccatgatcagcctgatctgcctagtaactcaagcgaccggggatcataaccttcctctaaaggaggaagggatgcctcagttatctggagagggaacgtaccacaagaagacaaggggcagttaatccggtaaagcaattacatgaaagtattacgaagtaagtaaataccggctcgttatggttcccgtatcaagctgctgataactctatgaaaatagagttatttatatctttttggccattaaatcagccttgttctcaagaatttttagtttatttttgtgacttttatttagtttttttagttttgcataaagattaattttagtgtttttagattaattttgtaatattttatcaatttaatttagtttctcattttataagtattaatctcaatgttgtgtatttttgtaaaaagatcaatcgtaaaatttggacctattaagtgtcaaaatggtcaaaatagagaataattcgaattatgtggttgatgtaattgattaatttaccaaggtccaattaaagtccaattacatttttttaaaagtttattgtatttgttgaagggttgttatgtttttagtgtgataagggtttaacaaaaaaaaataaggggaattttgataaatatgggaattgagaatatagttacttttttatggcataaataaataacactatggttttttttatttttttacatttatatgagttttt

SEQ ID NO: 240729 - DNA, 1281 bp, Cannabis indica
aatatggaaggatgcggtggtgaaagtaggtctgctagcaaagggtatcttcattatcaggttttagaatatggaaatgagagacaaaattatggagcaagggtatgccttctttgacaggaaacctatggtaatgaaaccatggaattctgtggatgactttaccaaggaggaagtcatgaacatgccaacttggattcagttgaagggattagacatcaaatactggggggaaacatcattgttcaagatggttggacaattgggagaacctctacaagtggacaacatcactaagaacagggaccgtctccaatacccctgaattttgattcaggtgagtctttctcaggaattcccgaatcagatttcttttttgatgaatttaatcatgaggttgaattggaagtgaaatatgaatggataccacttttttgttataattgctcgggtattgggcatgatactcaatcatgtcgaaagaaagaaaggaaggaggagccagtgaaacaagtttggatccctaaggaaaaaaaaaggagaagcaggaggcgcaggtcgatgaagagggattccaaaaaagttgtcaaagggaaaaaagtatcagctgaacaggaggcaagggagacaccagtgaataacagatttgaatcccttggaactgtgttggatgaaatgaataacagggacgagggggagaaccctcttattccaatggatagattactatgttggaatgtgagagggattaacagccaacaaaagcatcaagaaatcaagcaattgattttctctaagaaggttgggttggttagtctcctagaaactaaagttcaggataatagtatgggaaagctttatagtagtctatttcaaggatggtgctttactaacaataatccctggctagataagggaagaataatcatagcttggcaaccctctatgttcacagtggatataaagttttgctctagtcaattggttcattgatacattactttaatgcaacaaaaaggatgtttttatgcaactttcatctatggatttaatgaagaacagaaaagagaagaaatgtgggatgatttggaaaaaaatagcaaacggaattcatgaggcttggatcattatgggggatttcaatgaaataatgtttgcaaatgagagagtgggtaagaaagctaaatgcattccatctcaaagacttaaggagtgtatggaaaattgtgacatgactgatttgaagctttcaggtctcttttttcacatggaataataaac

SEQ ID NO: 240730 - DNA, 1071 bp, Cannabis indica
atgcaactatccttcacctctaatttaaataaatatacacattacaaataaaataatttattattttacattttaaaataattatttttgtatttttacgaaattttacgtaaaaattcctattgcaactagctctgcagcctaaatcacaaaataaaattgtataacaatccacataaaaattaccggagaaactattttaaaaatttaaaccataaattaaaaaaaaatatattaaaaaatagtctataggttccctttaatttaatacaagatataataatacaacatattttaacatttttttttttttaaaaacaaaaccctaaaaatctcatcagatcccctctctcactctatcgaattctctcgctcacctcatccctctttaaagccgctgcccactgctcagagagtggacgacgccggtgattcgctgcccagcgatttgacgacgacggagacggcttctcccctactcgctgacgtcgacggccatctcctccctaagtcgccgacggcatcttcaccaacgacggaagcgacacagctcctctctccccaacgacgacacatcttctccctcgcaaacggcagcaactcaggtcttttaactttctcttattttccccaaaaaccagtgacttaattaggtcatttttgtcccgtaatctgtctaattaacttgggcaaaagatgtaatcataatagttaatttgatgagttgaaaaatcagaatacatatttgattgtaaatatatgtttttgtgtttttcagatattaaattgtgggttggaatgaacttgctaacatttgacatcatacattaaattggaatgaattagtgtcaaaattaagtgttttctttagttttttgtattatagatatatttaaatagaatataaaagcgagttgccaaccccatgaggtgcttggtgcaagacgatcaagcaccaaggcgtcctcatgttacaaaatggccctattgtgggtgtgccatggggcagcacgccacatatagcggtataggagcggagcagggtcggcgactgctctcatcacttcctct

SEQ ID NO: 240731 - DNA, 1406 bp, Cannabis indica
gagttacccatactgacgtgtgaaagccatattttgagtaagctgaaactttgtaattacgagttatgaagaggatgcactaccatagaaaagggctacctttagtatggtgtgatagcatcgaattgcgggatcaaattgaaaacggcaaaaaataaaaatcttgccaaagacaatgatcctattttaactacacacacttatgtctgaaaagtgtgtacaagtgtgtatttctcctttactaaaattaaaatatcctcgttcacattatttgtaacttgtcttttttctctcaacatctgataagtatagtttgtgttcgagatactaattacttatcatctttaaaaagcataacatgagtatttgtctctttttatgaaacttaattagttgcatgctctagaataacttaatttgtttgtataaatctctctagttgctttgtttattcaaaaatttaaacaaaagagggttgggtgacttaacttgtgggctaaggaaatttagtccttgtttttttttttttttttgttaagtatcaatatttgatctaattggtatattatgataagtttcatttcaaagtttgagatcttattcattgtattttgtttaattgttgatcttgaatgacttttcaaccttaattggtttgttttatggtattctgaaagtatattgaatattgaatttgggaggacactttaaatggctttgaagtttatattgatggtatagttaatgaattttatgctaatttgactgatgatctacttgataaaaaatctgagtactttggtaaagtctatgttcgtggcaatttgttttcattcaataaaaatgatattgtcgaagccttgagactgcctaaaagagtaaaaaatgatgaagtgactatggatcgttacctcattcttactgatctcaatggtgaacaagtcgaataggctgctggccaaagtattcgcatcaatcatctcacttatggccatgcctctcttatacggtttgctcttagcaattggcttccaaattcaaacaagacaatggtgtctcaagacttggcttttcttctttttcgaattactttaggggaaaacatttacttggcttctctcatcatggaggaaattctttccttccaaagggataaaaaacatagccacaagcttgtttttcctaatttaatctataaagttctttcttctcagaagaatgtggcctattcgaataagactcttgcgtctaccctcactggaacaattttttaaccctcagggtattttgatggagctttccccaagcgttgtaaggcttctattagtgcacctccaaccgctcctgctgcaagttctagttctacttatgcaaatgtgtaagaagtcaagcaggaagtcatcttg

SEQ ID NO: 240732 - DNA, 1203 bp, Cannabis indica
tccttatattttgttttttcttacaatttaaatatgagaatggtggcagagtagagggctccaacaaatccactttctctctcttgaacaaatccttaatagtgctctcttctgaactatggaaaagcagtaaaattgttcgtattcataattcatatttaaaaaaaaattatatacaattaatatcttaatgtaaaaaatagtaaatttaaaaaaatttaatacaaatatattttaaaatataatagatcaaatgtatatttcattcttatttataaggaaaatgtaatctaaaacaatgttaaacttttctttatacatataactagggaactaagccgcgcttcgcgcgggtttgaccctacttttgtattttttttaagctaattaagatttttgccccttgagttttaatatgtaccaaatcatgccccttgaatttttaaggtcgttaaaaatgtctcatgaactattgagattgttggattaacgaactttttatacacgatattctttagtgacacttttgttttgagtgatgataagagagtattttaaaatatttatttgtacacgatattcttgattatatttggatctttgacctcattatcatcatttattatgattaatccttattttgtagtgactcgtaatactataatatttaattggccatgaatgaatacgtatttagaaaaatataatccgacatgtttaaacgattgttcttgactttataatatttaattggctatgagtgaatacgtatttagaaaaatataatccgacgtgtttaaacgattgttcttaatttttattgattgtcatgataaaatatggtgccaaaaggagttaccttttattaacttgactattactaattcctaatcgacgtgacaaataaaaaattgtaaatttattattaattcttagtatttattatgaatttaagtttaatatgagaattgaaagtaattattcttttaggagtctaagtttaatgtgaaaattggaatagattatgacattaatagttattttataaatataaaattagtagtaattacaaatttgcaaataaaaaagcactatttttttttatcttttgtcttttgattgacagattttggtggcgtttggtaacacttttttaatcagttttttgtttttaaaagtagaaaagtaaaaatatttttcaaa

SEQ ID NO: 240733 - DNA, 837 bp, Cannabis indica
ctcagaggaatttcgtttagggtcttgggttggtaaacatagagtgtttgaaacttcactcacagtacaggtatgaatcatgtggtctatttatctttcgttgtagcattattaatctcaatgccatgattatgatatgaatatcgtttagggtcctttttgttgaataataatggtttggtttgtcgttcgatctcaatgccatgattatgatatgaatgtaatattgcttaaaaaatatgcttctcccaaacatctaggagaaaagttaagatagttttttgagatatataataatatttcaggattatgattcggtttgtaatctaaatttcaatgactgattatatactctctgacccacccaactctgttttctgtgcagatgttatctcgttctcacccctttagttattattatattgtttttattataacactctacaaatgattccttaccattccgtctgataaagcagtgtgttgcaggtacaattctattttattttctagataaatctattgatatgtgatgatcaaaatgtaagagtattgatgaatttcatatatcatgatgtaatggttatataaatttatatataactgaactcagtgattcaggacttcccgacaccaagttgaaaaatagtttgattatttcttaatttagattttaaacattttattttgactgattctctttacaaagattctaagtaaatataatttattatatgcatatttttctcttcaatttatgtcaacatgagttgttaaagcaaagaatttctatgattaatctgtatatttctttaattattgttagagagtcccaca

SEQ ID NO: 240734 - DNA, 842 bp, Cannabis indica
attatatcagcaaactgggatacaaattctgctctaaatggtgatatttttcaacaattggctgacagtattaatgcttgttcaactaacttacaaaggtggcataatggcaagtttggtcatatgaaacaagacattaaggaggcacaatcacgagttcagcagctcaataactgtgttgcaccagattccactttctcacaaagtgtgcaatcggctgaggcaatcttggatgagcttttggccaatgaagagcaatactggcagcagcgatcacgggtggaatggctcaaatcgggtgatcgtaatacaaaattcttccatgccaaagcttcatctcgaaaatcaaataaccgtattgttaaattacttgatgaacatggcaattatgtctcttccaaggatgatattgctacggttataacacagtattttaatactcttttcaaagcttcggatgaagatcattgggccctatcgcatgttctttcaacaattccaaccacaattactgaggaacacaatgactttcttcttcatgagtttactcctcaagatgttactactgcattaaactctatgggggcggataaaagtcctggtattgatggtttttcagcaatgttttatcaccataactgggaaacagttggtcctttggtcacgcgagttgttctaaatgttttaaattgtggaggcaaccctgctgcattgaataaaactcttattactctcataccaaagatcaagaagccaaaaacaatgaaggactttcggcctataagtctttgtaatgttgtgtataaactgatctccaaggttttggctttgcgtttaaaaca

SEQ ID NO: 240735 - DNA, 782 bp, Cannabis indica
gcccatattatggaggaagattgtgaagattgtggtcaggaatgataacatcgagcttcttcaaatgagcagtgatatccctcatctttgagataagttctcaaactcctttaacaccggtgagttttgtggatgagaactcttggataaggttatatttatctgatgtgtcaaactgctcatccatcactataaaatatatttaagcttttcatgtggctccaccaacccacgcattcctaaaggaattctggacatgataaacatgatgcagagatgattggattgctcccacttttcatgtagtgcaatcttagcagaaatgctagttccaataacagcagctagttcgtctttcctttgcatagtccacgtcagttcacgtatatatgattgcatcttgatatcgtgaatatatgtgtttggcaattcagaaaggatgaaccaatgctaccaacactagtatgccagagtactgagtgtatgaggtattatatttagttatacttccaaaagtatgaactagtgctatcaacactagtacgctagagtactgagtgcatgtggtattatggctagttgtacttatagtatggattgatgctaacaacactactacgactagagtattgagtgcgtgtagtattatgatcaattgtactatggtcaagaacgtttaagactcaattatagatgtttgacatggtttatgactaggggtgttcgcgatgcagtttttgaccattttttcaaaccaacccgcacatgcgatttttctaatt

SEQ ID NO: 240736 - DNA, 704 bp, Cannabis indica
agcagaagggctaccaaaagatcaaataggctcaacaaccaaaatcttatctttttcattacttttgtcctgaaaaattagagaaagcaatacaacaaaatgaataaaaaaaatgaaaaattcgttcaaccatgaaacttataacaacaaatatgtgaataaacaataaaaaataacatcgaatgaactaaccttttgattattgttctcctacaaacatgaaaaaaaattgacaacaaaaaaaaacagaaaaggaaatcaaaaattaattgaacaatgaaaaacacaaacaaacaataaattagttctctaaaaaaataatttaaaaccatgcacacaccttttctatatcatccattttctcatttataatatccatcacagacggcgtaatgctatcgtcagtagcctggctacccatagcctttttatctgcaataccggcatcatctccacccttgtcaccaactttcccaccatcatcaaactccatgggagcatcatcattaaacaactgaggctcattaattatcttcattaagttgaaacttggacagtaatcatttgaattctacaaaaaaatgtatttataaaaaaaataacatttaaaaattacaaaaaaaatatatcagaatataaaaaaatatagatataccatttgaactaaattgtcttcagcattaacttgaacaacatcctaaaaa

SEQ ID NO: 240737 - DNA, 1258 bp, Cannabis indica
gacctttgtttccaaaacacctcacgctgtgtaagaatttctgtcaaacttttttctgcatttttcagttctgcagccgaatcctcatctctcaacctcttcaatcgtttgatattattcttgcattttttttattcgatctttgaagttgccagtatattcattaccccaacttgagagaacctccccacatcgcttaatcttcacagttattgaatcgccattactggtttcccaggaatcccgaaccacctgcaggcacatgggttcacgaagccatgcgttttcgaacttaaattgacgaggagcagccgttaagacattgttcaccagctcaagtaacaacagacaatgatctgagctcgagatttccaagttcacgagttgagctgaatgaaaaagctcaatccaatgaggagtagccatagcacgatccaacctaatttccacccagcttcctgttccacgcccatgttgccaagtaaagtgatatccaataagctctaagtcaatcaggttgcaatcagagagagcttgttggaaaccttcgactaacccattaggatatcgattaccccctctcttgtccgagtgagaagcgatgttattcatatcaccaattacgcaccaaggtaacggagattcatcaacaatcgtacgaagcaaatcccaagttctgaatttataagctcggttaggttcaccgtacataccagttaatcgccaaggacctctctcaacattattaattttcacatcaatatggtaattggaaaaacccagtacttccaaatcattttgatttctccacaggaaactaatcccaccactatgaccccttgcatcacggtaaagacaccatcaaagccaagcatcacacgaattctctcaagtgtttccttcatacttaacgtttcacaaaggaatatgaaatcgggtctcttttgacttacaaggtcttttaggaattgaacggcccgtaggttcccaagcccacgacaattccagcttaacacactcatggcgaatggtgggcctggaactcagaacccatccctaataagttttttggacccgctggcccaatattacaattcaaatcatcacccatcaccacatcttgtcccaccagccccatagcattctttgttaagtgaactggcccaccagtgttagcattaattagaggcaactcattgttgatatcctttccagtacgtctacgtttagaatccaccacattgagttgagtttgact

SEQ ID NO: 240738 - DNA, 1847 bp, Cannabis indica
attttccaattcaaacctataaatgtcaaaactatttattttttatttttttgaaaaagaggatactttattcaaaaaactaggcaaacggcagccactaaaccagcagccaccaagacaagcaaaggactactaattctgaattacattaagtaaatatgcattcccatggctcattttaaagggccctttactcaaaactctaagttgaacaatgtttctaacttccaaactaatacttttgggagaagcacaagtcaagtcaaaaaaacaacaatttctatttgcccaaatctgataataaacgacaattgttaccatgttcagtaggcgttttcagaggtcatgtttcttgaaatcacacctgtagctaagatcattgttcgagctcagccaactgtagtttccaagccaagagttcacttcttgttgcacctgcttagtgaagatgcatctatagaaaatgtgctcgtgagattcctcttcactatcacacaccgggcataaggtactttgcagcggcagaaacttgctaagaaaatcacgagtaagcagttgggtgttgatgatttgccaataaacaaatctatgttttggcagcagaaggttgtcccaaatgcctcttgagtattggactttcggcttctctacaagaaggttgtaaaatacctttgctttaagcttggttcccgtcacggcctgcctcaacttggcctcatctgtagaatcccgaagcttcagcaacttcttaaaataccagctggtatcttgagtctttgggaagctccatatgtctctacccttcaaatagatggagttgatccatttaacccatagggaatcttgtttgttggcaagagcccaaagaaatttagccataagcgccttgttccaatttttcccatcacggaagccaactccaccaagacctttaggaaggaaactttatcccaagaggctcgatgaagcttgctcctgttgccattagaaccccaaagaaaatctcgacaactcttatcaatagcagtcgtaaccttagagggaataatgaatatgctcatccaaaagttccttataccaagcaagaccgagtggatcaattgagccctacccgcaaaggacaagtttctactagcccaataattaaggttcatgttgatcttatcaagaattattccacaatcagcaaacttccatttggtaggacgaaggttgactcccaagtatttaagagggaaccctccttcttcaaacttgactagatcaagaatctgcttccttgtctcaacattaactcctccaaaaaagatttgagacttcgaattattggcttctaaaccagtagctttgcaaaagcataagatagcttcatggattagcttgaccgagctaaaattccctttgcaaaagatcacaagatcatcagcaaaacaaaggtttgtcagtcttaagtgtttgcacattgggtggtaaccgaaccctttcttcccagcaaaatgactacatagtctagtgagatactccataatcacaacaaaaagaagaggggacattggatctccttgacgcaggcctttcttgcctttgaaattgccttgaattctaccatttagcagtaaatgatagtgagtgccttccaaacaagtcataatccagctaataaagcgcgagggaaagcaaagagacctcaaaagatcttcaacgaatttccaatcaacagtgtcataggccttgcttaagtcaatcttcataataaatctagctgaaatattttccttgtgtagcctttaaagagatcttgaaaaatcatgatgttatgagcaagtaatctatttttgataaacgca

SEQ ID NO: 240739 - DNA, 839 bp, Cannabis indica
ttggattggcaaagatggttgacaactcgacaactcgggttagaggtactaaagcatatttagctccagagtgtcgaggtgaagacggagtacaaggacagtattcggacatttgggcaattggtgtcatggttttattcatgttaaccaaaaacctaaattggaacaataatctatactacaatatttccaacgaagctattgattttatattgaaatgcaccaatcttaatccttccaagagaccatcagcaaggatgcttctgaatcacccctttataacaaatatgtaaagaagagaatataattttttttaaagggattttatgttttttaattttgaataattgttttattatgatttctttttttttagtgtcatcatgtttattcacaataaaatttttaattttatttttgtaaaatctgtttaaagactaaaatgtgttaattaacatttaattaaagttaataatgtcatttttctaatgtagtataaaaacatatatattaataattagtaaaatattaatagtttgttatattccttttaaaaaaaattgagtgagatggagaaggtgatcatttgattgagatcacattttgggcttaagacccattttgatctgggccagcccaattgatagacacgtagcccataacctcataacccaactcaatttggttgggaatatctttttatttttctttttataaagaaatttaaaataaacatttaaaaaaaaaagaatagaatatgtaaaacgagggttaacgtattaacattttagtaatattttaaaatgtcactttttttaacatttatagtttttgtaaca

SEQ ID NO: 240740 - DNA, 604 bp, Cannabis indica
taaataagaatcaaaagctatttaaattgattagagagagagaagagaggtgaatccgtacaagtcctgtgtcactgtgagaagtaactgtaactttctgctccgtgctgtaatccttaactagtaaatctgtaaatcaagccaataaatcaaagacttggaaatgaagagacagaaagagaaagtacacaatagtacctttggctttcttgccaatgtcagagaataacccaggtccttttgccgccatcttcaggcccggggctgctccggtaaactcacagcaaaacaaatcttaagattctaatttccagaggcagcgaggaccgaggaggaagaagacgggggtttatacataaacccctcttccaattttcgcagttttaaatatctggaaaaaaaaaaaggccgtaaaggaaaactttacttgatttcggcataaacgtattaaatagttggaaagggtgctcgttacgagtcgaactcaagacctcccggttaataaacaaatactctggccaactgagctacgagagctggctgtcatgcactattttctttttccaaattagttcattactttttccgcaaagtgatcattaat

SEQ ID NO: 240741 - DNA, 931 bp, Cannabis indica
ttcacctttcattatttttttgtttagaaagaaaaatgtgtaaagtttcatgtaatacataaatacatcaaacatttttgtccacaaaatcagtttgctgttttctatatttgattttctaaggaaacaaccaaaatactcactttattagctcttgctattataagacaccagaacaagaacagccgtacctctcaaactacataataatgcaactgaccactcaagcagccatgtccaccacaagtacattatccacaccaaggttaaaaattactaattatgggacatttggtatgaggtttagactttatggaaatgaaaatgtaaaatttaaattaaatttgaatgataaggcatttgtgtttctcattaaaatttgatataatatttttgattgattaaataaatgttacaataaatttttgttactaaaaagataatatttaatctagtaagaaattgttatattatttataaataatataatatacatattaaatattgtaaaatatgacaatatatattagttgccatcattttgtaatatatggaggaattacttgatactatgagtaataacttccacaattatcaccaatattaagtgtgtaaaaatgtgttacatttaaaattctaaatgagttacatttaagtccataatattcatggggttatgattataaatttcaaatagtaatatcctaaacactatataaagtagtttaaggtgttcatattgagatgaaccaagtttgtatcaactaagcactttgctaaaaatcttaaaaagcttgataattaccaaagttatttcttagagagttcccttaggtggtgtttggttacaaaataaaaatagaataggaatgagaatggtaataggaataagaatagaataaaatgagatttttattcttttgtttggtaa

SEQ ID NO: 240742 - DNA, 1128 bp, Cannabis indica
acattattgaatatttatgatgatttttttttaactttttatttagagtttcagattatttatgtgtgtacattattgaaagttacataactggaacaacaccatttcagattaactcctcatctagccctaaagtttttctagccaaattatgagcattagagcattagaatggtttctaggaacatgtttaatacaaactttaagaaataaagacaaggagtgcctaatgtcatcaataacattctgataaagcttgagcaatttcgaattcgataatggcgagtggaatccttatatggtagcaccaattaatgcttgatctcaaagctaaagcttcggccatagttggatattagcacagcttgttgcaggattggacagacctgcaacaatgttgcctctccaatctctaagaacttccccaaagttaagcttgccatttctaatgctcaaggctgcaacagtgttaagttggtaaaagctttttgctactgcaacttcctgatgatggagtttttgtgggcttccctataatctgtgaggaaagagctactccaaactacaacatcagtaggagacatacacatgagattttccaaataaattattatttctattgccccagatggctgaaagagtggataacaaaataacagatcatctttttaattgtaaatgaataaaactagagaaagcatgaattttctaattatcattagtgactgtttcattaggacagttacaagaggagcaacaagggttgggaagatcttttctcaagaacagattaagagcagttgggagaatatgatgataaattctcaagagaaaactttgattttaggagggtgacacaagttccacagggtggtccgccatttcatagtgaaagcaccatctgaagaggtgagagggagaaaaacagtattagctaaatgatcagcaatttttacccagaataaacctgagggatgctgattctaaattaaaaaatcttccttaccaacactaccaataggaaccattgattgttaataaagaaattgaccctgtaagagggaggctgaatatcattcttatacatggagaatctagcccccgagatccaatgatcatctaaagttt

SEQ ID NO: 240743 - DNA, 745 bp, Cannabis indica
gcatatatgatcaagcaacataaggttccaagaaataagcagaacgaagtttccactctgcttctaagagcgtttgctgcatagttttctcaatctcagctgctcccacctttaaaatagtgaaaattgactttattaatataataagagaagattaagtttcaactaaaagatcacgtgtgtatttagtatcaaataaaagtacttgttctagactgtagccttaatttattacatttcttcttgcgctagtaatggtcagaatattacctaatacatcggtaccagtaattaggtgttgaattttttagttttggtgtaacaattccaatacaataattaatatttttgtcctctaaattttcggtactatttgatttgtcccttgccttgttcaaattttttcttataatatatcagttacataattatacatagttaaattccgtttcttttattgttaaaaattagtatttttatcccttaaattttgaccaatacaaaattttgccccctttaattaaaaaaaataatttttaaaattataatattatattaattttgaaaaataataaaaatgattaaaaattttaataaaaatactaattttacttaaacaaaaacctaaattattcttaaaaaatatttcaaactttattttatttatgaacacgtatcttaataaagcaaactaaaattattgagaattcaataaataattaaaacaaactaaaattctttgaag

SEQ ID NO: 240744 - DNA, 972 bp, Cannabis indica
attttttaattacctctttgacactcattaatactattcattaataattttttttatatatatttataagatattaaaataattattttgtatatttttttttggagagaaaagtaccatcgtatattttgtatattttaatgagtattaatggtattattgacttttatagctaatttgtaccttgtgctttggagcacaaatacaatagctagaccaaatatagcttcatgggtatgttttggtcaaatttaacctaaaatatacaccattcattaaagttggtcttaaaatcattttctttttcttcttcttctttattttcttgtttagttatttgaatatgaatatgaatatgattaatgttgtgattatgtttgtcattataaaaataacattttttttagagtgttgatggaactattttagattatgaattaaagtttttagtttattctcatatctgtttttgttatttgtttatgcaattttatgttaattattatcttgttaatgcttgatcaccattaattagtatagagattttaggttttacacttgagagatgtaattttaaattagacttagaattacatgacataagaaaagtgtgagattgagagattccattaattctatcagttcatttaaagagaattatgttgcttgattatttgattgatcaatattgaatagagatatcatgttacttaattaagttaattctatcatcactcaagagaggttaatagattatattaagattcttgaaactacaaactccagaataaagtggaataattggtaaactaagatttatagtttgaaatagggaaataaatgctctgagtcttatattctgattaaaatcattgtttgttaatttaatttttagttattttattattttgttcttaattattatttacttttagggcctattcggtaagtgtataacagtcgcattgtatt

SEQ ID NO: 240745 - DNA, 1194 bp, Cannabis indica
taaaggtaattagtaatcaagcaattaatgtgtcaacaatggcccacaaatataggacatgattttgacaactagcatcgtgttgtggcatgtacattggtatacacaaggcgccccatggaccgggcttcagaagataagcctaaatttaattttatatttgtaactctccattagagagaaaaattgtaactagtataatctatatactctataaataccgcatcaaacctacatgcaaaatttttggaattcttggctcatttgctcaagcaaatatagagtgttcatactttctgtaatccctaagactttcctagcatatcttaataatattgacttgtagactaagactaattgacgtctcaacaacgtagaaaaaccttcagtgttcttatcaatttatctttgaatcataattattggctcttacatttaaatacgtagtttttgaaaaactcggtaaacaatgacttagtcgcaaatcgggtagtttcgagtctctcgatttcgcaaaacagtaacatctccaagaactggtgaatgactttaccagaaaaaagaaattgaataagtggtttcaaaatatcacttaaacatcaaaaaatacatccccagcacgtttttctactcaccaaacatcaaggttgacgtcatatgtcaaccagggcgttgggctgtcaacttggccgctagtatcagagcagcatttagtaaaactatcataactcattcaatattgatttgattgacctgtttcaacttacgtttcgaagatatttcaatgatctattaagttatgtttcacactctaatcacaattttgaagatatcaagtctaaaatttatcctcaagagagttacaaattttaactacaacttacccgagaaagatcccacggacacgattcaagctccgaaaattggtgaccgacctctagagtcaatttcaccgttggataatcatcaatggtgaaaaatagcttaaatgtcattttcacattttttgaatattttagtattattttaataagatctcattctctataaaaagagagctcatctagctcatttttcacattcaaaaaagtgcccaataaggtcagagcatctctctctagtttctctctctaaaaatttagacctttgacccttagttaattctcaagaaaaataaaaactcaaaatagacgt

SEQ ID NO: 240746 - DNA, 1014 bp, Cannabis indica
aaaaaaaaattcctagaagttttcttggataaaaacaaacgtacaaacaaacaaataagagaattttcgagaatattagaaaatttcatagtgtggtattattttttaaatcctcaatccagattcggttagttagtaattagttgttcattagctaactcatagcgaaaaataatatagcaatcatatacggtcctttggcctatatatagaaaaacacaacatagtagagagagaagttagagagagatatctgagagtgagagctgggattggaaaattgtattgaacaacattgattattatgttggctcgtgttagtgagttaatgagtgttgaggaattagaccatggatgacttactgtgaatatttctttgtagctcttgaaattgatatctctaattctcatcaataaagaaaggtgggagtgatttcaaactggagcaggaccaagttcatattgaacttcaaatctgaaccagtaaaattctcatgtcttgttgtgtctgtaagctatttagattcatctctatgtttatgtttctggtttgatatgggttcactactttaaaaagaagtttttgcatctgtcaacgcatctcatgaaacttgttaatcgatgcaaaagtcaacccacactttttttgcttcaattatccatcgatacaaataattgttaattagcgtcgattatctatccaacgctaaaacgaaaaccaaagcaaaagataaaatataaaatatatatatacactattagcgtcggtccataaccgacgcaaaaagccattacatacactattttgcttcagttatccatcgatgtaaataattattaattagcgtcaattgtctatccaacgctaaaacaaaaaccaaagcaaaagatgaaatataaaaaatatatatacactattagcatcggtccataactgacgcaaaaagccattatatgtgccccatatctgctctttttgcactctgtcgtggcatcacatggtggtgacacgtg

SEQ ID NO: 240747 - DNA, 787 bp, Cannabis indica
tttttttatctatcacttatatattgcgtttttttaaataattttttgaaagattattacccaataatagatatatcacatttaaaaaattatcattttttttaattcaattactaaactctgtatatatcttaatctattcctcttaatttcataattcaatttactacttttcttaattttaattatctcttctcagtgttcgtttttttacttagagtttgtagaatgtgagagtcttattactaagaagaatgaagaattgataagttttatatgatttttattaatgagaagttgattattatttttattcatattttttattctattatttttcttatcaatttatcgattattaaatactcaatgtatctattgaatgaaggttcgtcttcaaaatttgaaaagtgtggcaacctcaagtgagtacagacaactttcaaatgattataaaattctatttttagtaataacttcaatgaagagactacatctcgatcaatgagttttaattcataacgccaaagttgattgatttatgtgttaatgataacataatactctcaaatatttattcagttattaacttttattcatacttaaaaaagattatttaattattcctttttataatatttcaatatctttatgttgatattgagatttttgaaggttataaaaaaagacatcaaatttataataaactagtaagtattgcaatttttcatcacccaaaaatagatatatcacgtttaaaaaattatcacttttttttttttttttt

SEQ ID NO: 240748 - DNA, 1224 bp, Cannabis indica
aaagaaagaacaacaaaacacttaaacttcaaattttaaatattatgagagcaagcttaatggcttaaaaagtatctctgtggcttgaactctatgaatggggaattctgtgttgtttttgatagagaacaacagcatgttgagttgcttgatagggaaaaaatgataacattcatgataaatacaatgtatagctctcatatcacgactcttttcttcactacattaatcaatcatcaccattactattggtcaatagtcattttagccctcgtattttcttttcttcactatattaatatgcccgcaacaccatttctctatatattcatgtatacgattgagcattcgatttcgatttgtggtcgattgatccatttgagcttcggaatggtcggtttagttgaaccattgggttgatacgattgagttgtctatatttaattcaaaatcgatttgttgttgattggattgtggattgggtaaatttgataccagactgacatagtaatgcttttcttgcaggcagagatgactctgaagcaactagaaaaccttagccctcatagcattgcacccatagctgtgggaaatgaaatgtaaaaatggacaaaggatttatgatgaatattggccaatacaggcgttataagtttgccaatatttgagacttgctgagagtaatgcgaaacaagttgaatcacagggagctttcaaaagaaattcaagtttaaattttttgcaaacttaggttgataattattatgcatataccttgcctttcattaaccctctcattatttttagactctaatttatatactattattaagtctttgcgtgtaagtggatatgctggtgattatgagaaaccatatttacaatatgttagttcattgcttgtgtgtaagtgaagatgttgcaaaaaacatactactacagttcaattaaagtcgtatttgaatgtgataaattttaacggttaaatatataaatttatatatatataatatattttcgcaaataaatgaataatgaatcttatcttattctcataaaaataatattaaacattatttttgtagaaacatagattgtttgtctaaaaaattacggaaaattatcagccaaaaatagagaatcaagttgtatgtagatacaaaacaaacgatcaatccaaaatacaatcaattcaccatttagagagccgactcgatggaagat

SEQ ID NO: 240749 - DNA, 1413 bp, Cannabis indica
gaaggctaggagcagaagacactattggaagactcgaaacagtgttctcactactagaaaaatagagtttagtgacgcacatggagagactctaaaatcttttagcgacacatcacttcgtgtcactaatgtgggtgactggaaaagcggtatttcgtgacacttcaggatgagtcactaaacccttttagaatcactcaacgcgcgtcactatagggttttagactcatacctacagctgcccttaatgcgtgtcactatatctatattttttttatttaattttttatatatatttttactatttgtttacaattattctgactatatttactttttcaagctataatattaaataatatattctttaataaataaatagcaaaatgttatacaaaatattacaaaaataattaatcaaaataaaaatataatattaaacagtctttctatatatatataaattataccatatacatgatcttaccacacatagattattcaaacaaaactaattttagaacacttaaataaatattagctaaaaaatcttactgttatgaacatatttgaatctaaaaaatacctaaaataattacaatcagttacaaaaaaaatcacaatcaatttctttgatcaggactgacgaaccccaatcccccattgacaatgaaccaccatgaattgaacctaaaaaattacagaccaattttaaaacaaataaaaaaaaattcacaatcagtttctttcaatgaccacgacgaaccccaatcctccatcgataatgaaccaccatgaaccccaaatctcggtcgagttctaacagccaagaaccttgaagctctgaagcttcatcgtccttgagtagccctgaaacttgatgcttcaaagccccatcttcaacgaaccgccttgaaactcaaagtttcatcgacacaaaccttcgtcgacctgaggaaatagagaaagagagatctgcacagggacgaagaatgcaaactcgaagctccatcgacacaaaccttcgtcgactgagaactttgaagctctgaagcttcgtcgtccatgaacaatacccttcatttgtgtttttgtacaactggttgctgtagttaaggttggatctgggcagaaggaaaaggagaggaaggagcagtaggcaaagagatgaaagaaagagagaggaggcaaagagggaggaggcggagagagagatgaaaaggctattaatttaaaaccctaaaattgtttttaatataagtggcttttttttttctcttttcagtaattatttttttaaatgtccttaagttttccagcgcatagtgacatgccagcaattacataagtgccttttaattatttttttttgttaatgtccttactaataaaaattaataatatatgtatttt

SEQ ID NO: 240750 - DNA, 1266 bp, Cannabis indica
aactaagcggtctttacagtatctttctggacatggtcctttcttgagccagttctcctgtcgttacatacttaacgatcgggtccatccagctcgacccttgttcattgatagtcactacttctttggccctaatgctaggttccataaggtgttcaacaggtaccacccccagcttctctatctcgttatctaaggaaagcttagccagccagtctgcatgggcatttctttcttatggaattcgttccactttgtatttcttaaactcctgcagcaattccctaacaacccatacataagcggccatcttttctccctaggtctgatattcctctgatacttggccgacctccagttgcgaatcactgtacacttccacactgttggccttacagccttagcaaatttaaccctgctatcagggcttcatactccgcctcgttgttagaagccaaaactgtgaacctcagggtagccaggattcttaacccgtcaggagagatcaatgctatttcgacccctgatctgttttcatttgacgctccatcaacatataccttcaatttaggcaaatcctgagccggcacactggccctggcctctgtctcattacattctacaacaaagtttgctagtgcctggcccttaatcaagatgcacagaatgtactgtatgtcaaactgacttaactccatggctcacttaaggagtctccttgaggcctcaggcttctataagacttgtcgaagtgggtggtttttaaataccttgatggagtgagcctggaagtaaggcctgagctttcttgatgcaatcaagagacagaaagctagttttttgatcagggtatacttaatttcggctcctatcatgcgtttgctgacataatacactgggtgttgaatttttccttcctcccggcctaaagctgcgctggccatgttctcgcaaatacctagatataaatataagtcttctctgtgaactggttttgataacagtggtggcttagccatgcgttcttttaatatcctaaatgcttcctcgcattcttcagtccattcaaacttttgatatttgttcaagatattgaagaatattggaatgcacttatcagttgagcgggagatgaagcgactcaaggcgacatccttcttggttaagctttggtcaacattatgtctgtttggggagggcatactcaataaggattgtattttttggggtttccctctatccgacattgagtcactatgaatctta

SEQ ID NO: 240751 - DNA, 1007 bp, Cannabis indica
ttctagccatttcctccatcaagaaatggcccattttgcaagttgacatcaacaacgcttttcttaatggagatctccaagaagaagtttatatggcattgcctcctggattctctccttctaacacagaggacaattccaaccttgtttgcaaacttcataaatcaatatatgctctcaaacaatcttcaagacaatggtataaaaagctctctgacgctcttttaatagcaggtttctctcaatctgcagccgattacactctcttcacacgcggttctaatgtcgacttcatcgctctactcgtttatgttgatgatattatcatcacaggcccgaacattgatcttctccaccaactacaagatgctctcaatgatcaatttcaactaaaagccttaggtccacttaaatactttctgggttttgaaatcgccaaatcagatgacggcgggttcttatctcaacgaaaatatactctacaactgtttgaagatactggctacacatgcagtaaacctgccaagactccaatggatcccagaacgaaattcgacaatgaacagggacaccttcttgatgatccttcttcatacagacaacttataggcagacttctctacctaacactttcaagacctgatataacattttccgtcaacacgttgagtcaatttatgttatctcctcgcaccacacacatgcaagccatccaccatttactcagatatctcaagggaagtccaggtcagggacttctttacagctcaaaatcttcactacacctcaggggcttctccgattcagactgggctgcttgccccaccacgagacggtctgtgactggtttttgcatattcataggcgattgcctaatatcatggaaaataaagaaacaaaccaccgtttctaagagctcagcagaggctgaatatcgtgctcttgctagcaccagcagtgaaataacttggattcaataccttttagctgatttccaaatcaatcaa

SEQ ID NO: 240752 - DNA, 1270 bp, Cannabis indica
tggtaaaaaaattagggatgcttgctgagtggatagatgaagtggtaaaatattgagatgttatatcattagagggaaagaatatcattctaggaaatatgtgtgaatgctatacagtagcattgatgctatcattatttttttaataaaaaattattgttgctaaaaaattaaataataatgtgcgagatcataattatgatatttttgaagagtgctatactattaaagtaattttagaagttagagtaccaaaaataatgtggaagagagataaaataaaatattatatttttagatgataagaaaatttttagatgctcttagttgctatgtgggttgctatatgaatttttataaaaatgcaaaaaaaatgctttagaatataaaaaataaaaaattcattttttaaaattacctattcttaccaaaaaaaattcaaaaacaaactttctaacgtaaaaatacacaaccactcctcaagcggccatataaagaaaattggagtgtgtatttggggtgatggggtctaatcccagcaatataactcaacatgtaatttaaagatgcttcttttttgatagggttgtgcataaatcatcaaatttaatgataaccgaccgatccaatgacaacataccgtcaaatattgaatatctaattgtgatcagatcagattggatgctattttttaaatattcaattggatcgaattggatgttggatggggtgtccaaaaatccaatacattcaacatccaatcaaattaattagtatttttatttagtttggatgagtaattatattttatattgttataggtaaaatatatatgtatatataaaaattaaaattaaaattttactctttttttcttggattgtatggatcgaatccaatctaatatatactggacctaaaatattagatggatttaatccgatcaaaaaatactaagtctaaaatattaaataaatttaaattaaaccaataaatatatatgaaagaaatccaccggatagaaccgatccaatctaacatccaatatataattggatcagatcagatggtaaaatctaacatctaatatataattggatcgaatctatagacctaaaaatattaaatataatccaaattacataatattgatacacatataagtactcatacaccaatctaagccaaatatcacaaatatatacacacacaaaaattaacacaaatacctatctaatctcccaattaattctaacacttaattaaccat

SEQ ID NO: 240753 - DNA, 860 bp, Cannabis indica
gagttcttaaactcaaatcttgccaaaacctcaatacaatccacaaaattactcaagatcaacctaaacaaccttaaacaagttttagaactttaatttaaacatcaattatccccacaacatcaaaattcctaaaaccatgcatcaaaaccttatttaatcttaagaattctaaagagaagaaggctaaagaataataccttaattacaagctttaaatccctttagtgttctctgaattcagctaagaagaatcaaaattcttcgctgagtatgagtgtggttcgaaggagagagagaatggtgaagaaggaagtgttctctaggttattctcttatttaaatcttactaacattaataaggaaaataaaaacaataatattaatactaagctgaatataccaagcacacaaaggacaaaacacttaaacaaatgactaacatgcccttggtaaacgataacgatctaatgatttaaaaggggtatcttggtctttcctaaaccccaccaatttcccgacacttctgacgcctaacaatgacgtcctgctaatactaacatcccaaatcataaaaggtgactctctaaaggcccaacgttagttccactgcttccgaacacaatcgcatattacaaggaatttacatatagcataataaacatatattaactcaaataaatttccacaataagcatattataaatattaattaaatctcaagaataaacctaattatttaataattcgaagtgttaatcagaagcagctcttacaatcttcttcccatattttaagttgatgataaccggatcgtaggtccatctttgaaaatactgtctttccctgaagctgatcga

SEQ ID NO: 240754 - DNA, 762 bp, Cannabis indica
ctttttcacactgggtcggataaaccctaaatcaagcattccttgaatttgtatttttagctccttcagttctgatggagccattctacatggtgctttcgaaacaggttctactttaggtgccaaatcattcctaaaatctatttctcattgtggaggtaatcttggcaactcctcgagaaaaatgtcgagaaattctttaacaactgactacttcaggcccaaatgtttcaggtctactggagtcaatcataactgctaaaaatcctacacatccactgtgtagtaaatctctagcccttaagactgaaataatcgggatttgagacccttgaacagatccaacatagacaaatggatcttcgtcgtccggctaaaaagttgtcattttctgcttacaatcaatgctgggagaatacttggacaagaaatctagcacaaatatgatatcaaattttgctaattccaactctactaggtcaacacttaactccctatctttgaccctaacgggcatagacctaattcaccttttagagataaccaactccccgctaggcagtagggttccaaaccctcttttaataaaatcacaaggcctacccaattaattaattacccgtgttgccacatatgagtgtgtagccctagagtcaaataacacagtaaaataggagttgttgacaagaagctgacttgtcaccacaaaaggactcgctgcagcgtcagcttgagtgacagcaaacacctgagtaggtacgg

SEQ ID NO: 240755 - DNA, 1019 bp, Cannabis indica
gactgacgtccgcactcgcacgcttcttaagaaaacttccgagaagatcacccatcctaaaattgccccaggccaagcacgcttaaccttgaagttcttttgtgatgggctaccgaaaaataagatgcaccttgttgatatagatagtaccaatcaatccattcaaaccctcttttaactgtgtagtcccatacctacacagtctcagaatcatcccacttgaccttctccaggcggtgtgggattgcacagcttacccggtatttccccttaattacggatgatcacaggactaccgactatcacaaaacatgcaaatcattcataaattaatctcgaataaactaaaacatctaaaaaaatattatttttattaatcatgtaaaagcgagaaagatataggaggagtgctttttaatttttttgtaagagagagatagagtgttaataaaatatgagaaaaagtgtgaaagtaaaataatcatattttaataaaggaataaaaaaaattaattaagattttttttataaaatgtgatcaattaaaaagaaagtatcaaattgtttgagtgtgaatgacaagaaaatgtaaaatagagaaaaagaaatataataagtgtttatattttttttattaaaaataataaaataaaattgagagagtaaaaaagtgttggaaaaaaagtataaaaatgtatattttattatatataattttatatatataaaaataaaaaaaaatattagtgtgggaaaaaaaataaaaaaagagagagatagaaaattggaaaaaaaaaatgaaaaaaagtcagccaaaaacgaaatgagagaaaaaaaagtctctgaaaaaagataaagacatatatgggaaagaataagaattttataaaagttttaattaataaaaaagaaaagcgtaaatagtgagagaaattttttttacaacgatatatttttatctattttagtatttgagagaattttttattctaaattttttttatatagtcatatacgtt

SEQ ID NO: 240756 - DNA, 992 bp, Cannabis indica
atgaggcggtgggaagcttatgcaaggctatataaaaaggttgatttcgattatgtaaccttaaattattacccgatttgaaagtcgtccttaattgcagctttgcatgtttttcgcttccaggtgaccgatgagtggtggtgtgaaccaggacatggtgattggtgtacttgcctagaaaaatacacactctcgagacggtatgtaccacaaggtatattctatcatgtcatattctcagaaaacgaaacaactattaatttttgtcggtgaaaagtgatcaaaatattgtctttcccatgcagcaagatcaattgggcgcttgctgccgacctttctacaggtcattgatttgacggacgatgaagagtctgactactgggctgttgtgtccgatgtcttcgatggtaaacagctcgattattatacatcaaggccgagtttaaatgctgtgacatggagctccatggagactagcataaataacaaggtttgtctaacaacgaatatgatattgttgtgcactcaagcaccaacaagaacacaatgcaagaagaaatagacttagaacattaaaccagaaaatcatcaaacaaaaaaaataaaataaaaatacagcaagaaaataataacgaggttcagtcacaagttttggataaaacttggacctaatccccgggtagaaacaactctattggctgtgatatctttattgataaatggcaaagattacaacttacacaaatggagaatcaaggacacaaagtactctaatggtgatgcacaccagttacaagaaaagagctcaaaagctgttgaaaaacttgaaccagaacagcctaataacaccctcaaaaactgaagagaattcatctcacaatagctctcttttatctttgtgtattatcctcactccaacttgatttctctctctctttttttgttgttgttgaatttatatctatatacagcagtaggttagtaactactta

SEQ ID NO: 240757 - DNA, 1320 bp, Cannabis indica
aagggagttttatttggaaaatctaaaatgatcttacgatcacttgtgtgagtactaagatagtaaaaaccccctactgcattcttcctcgcttgaatagccttgacagagtaaagatactctatttcaaagggagtaggcattcccatttcaagattttgtatagaaccttcaaacttgcgaggattctgtatgaaatggggcaagcccaagatggtttataaagtccttgaaatagtctcgcagggggattattgctccagccgtgatgtgttcgaggttccaagcgcctatcccagtcaagccacttgtattggtcttgccactggccccctcagatgtttcgcgagtaagacacactggtggataacaactgaactcactagcaaccaccgatctaacctagcaatcttgcttatattcaataccataagtccttagggtattacctacatagtctctgatggcttgcacctttgactctatttgctcagcctcgaaggtgacgttagggtccttgggagtctttgatttacgtggctaagaaaacataatttcaaagtccaggtcacctggttcaaaagcaatcctgacgttgggtaaaaactaaggcttagctaaaggaatagaagacaaactaggaggttcaggccaagcagcgtctcgcaagaaacggcatctgccttctataatttcttacaagaagcgtatgtagcgactaccaatatcttcttggtgggttttcactaagtgttccctaattttagcatcatttatctctaatttagatttaattctgggtttgtatgggatggcaagttcagtaggacactctatttttaaatattctggacgataaacttctgaaccagattgagacatttctgcagagagaaagtaatcccaattcctggatgaaatttatcaaaccagaagttggtaaattggagaaactcgaaaaccaacgttctgcctaaaccctaacattgacccaaatacaattcagctctaaaattgctagaaccaaatgatgtaacaaaggtgctaactaggaaattagtaattaaacccagaaacacaaaattaaaagcatgtaagaaactaaagagaaaagtcactgtttggagttggttttcgggacgatgagtggttttgcaatcgacaaaacaatggacttgaagtcgaaaattaaatcggacgatattcgcaggaaaaatgttaatgacaaagatggcatgcaaggttttgggctaatctcggtatggtttttttcatcagaaaagcttgaaaaaatttcagagtttttgaaatggcaaaggt

SEQ ID NO: 240758 - DNA, 1358 bp, Cannabis indica
tcccttaggacctttttcaaagcccccaactccgcgttcccctttgtgtattcggccatagcataattgtgcttggaaatccgaagcagttgtctctcttcatcagtatgaacgggagtcaagagtatgttgggaggcacagtatattcctctgcctcaagggctatccctgagtcagagctgggagccggagtatcgaccctcttgggcttcttggtagactcagcctccaccatcttgcccttgcgcttccggtccaaaggggccagaatcttgccctcttcttcttcttcagcctccccatcttcatcgatcaagacaatttggcctaagggaacgatcgaagaaaacctccctagggttaccgtcaggtcaggtgcttgaggcaaggcggggtcgggattgtacgtctaggcaagagttgccaaaagctcatccatgggcctagctagtttaggaaacaaacaaacaagtgtcaaaatggtcacgataaattatgcacacaagaacaaagcagtaaaactaatcctacccagaaaatctaattcagccctagcaaagtcctacactataatactagcttcgtcatccccaagaatggtgtccgaggggagaaaccagctggaagatagataggctgaatgatccaaaaggataggtgcgggaggccgagaccccatctgggactggcctagaaaatgacctaggtttgaaaaataaaagcccttggcatgatcaccccattgggtagggggcatcttaaatctaaggagacgttcgtcaaactctataggtctacatcgagattaatattgagcagaagggagatgatgaataactaagggagacttaccagatctggaggtgctggtgtcaggagccccagtgttgggaaccaggagcagtaacttgggccggtaaggcacccgctctttaccagcctctacccaaagagtcctcccggcagcggcgtgagccttaatgtaagctagctgttgttccctcctaaagaggtacttctggtaccggtcctctgcagaggcgataatgtctgctcggagtaccttttcgacatccggggtgcgaatgttggggcaaaggacctcggagaagttgaagtcgtccaccgattggctctccgtgataagattagccttcctgcagttcaccgtcgtgactaagtcccccacattaagaccatctttgtcatatgtggagaagaccttcgagagctgaaggaagagttgggtaggagcagtgcggtgcatcgggagaatcctgacccactccatgagcagctctgggcgttccacggcttgaaaacctggagagaaacaaaatcggtgacgatactcttt

SEQ ID NO: 240759 - DNA, 1214 bp, Cannabis indica
ttctctcatttctttctttaagtgtttttcttttattctcactaactctctcttctttattttgcatgtacaactaaaacacaacaactttgagagctcctctctcaatcctgggtctgcggctttctggtatctctcaaaacttaagagattggtgagactcttccctccttttatagctttaggtttagttgtaaagtgtgtaacagaatttctgttgcgaaacagaaattcgattacaccaagttgttaatgttgttgtgtctggtgagtgggtaaagccacgagccttttacttgtaattttcatcttctttgtaaaactgtaaaacaagtggtccaggggagatctaatttaacaatttccaccttagatttctcctgggacacttgttcttatagtgcatcattcttcaagggtcttagctcaagtggtaatggtcatccaccattaacaacccctaataagtccatgtagtgcttgaacttggttaggggtagcaccgtagtagcaatatcagatgggttctcttctgttgggaccttttctatctgaacaattccttgtgtcactttatctcatataaagtgatgcttgatttccacatatttggtcatgtcatgaaagacaggatttttgcataagtggatacaactttggctatctgagtagacaataggttcttcattaagtagctttagttcttctagtagtcctttaagccaaatagcttctttaattgcttcagttacagctacatactcagattctgttgtagataatgctaccacaggctgcagttgtaccttccaattgatgcaattcccccaaagtgtaaagaaataggcagaggtagatttcctactatctctgtcacctgcatagtctgcatcactctacccagtgatcattctgctcttgtccgttcttttgtagtttaatccaacttctgtagatcccactaagtagctgaacaaccatttcattgcttcccagtgttgcttacctgggtttgccatgtacttactgagtacactaatggcataggctaaatcaggtctagtactgaccattaggtacataactgatcccacagcacgagaatagggcacttcactcatagcttccttttctgctacagttttaagacactggtctttgcttaagtagcactgattgttcataggttgcttagtttgcttggcacttgtcat

SEQ ID NO: 240760 - DNA, 712 bp, Cannabis indica
ctcaagccggagcatagatgttacaaagataatcaactcgcactccattcaaagcctttgtaaaaatatctcttaattgttctctggttttcacatattctgtggagatcagactttgttgaattttctcgccaacaaaatgacaatcaatttcaacatgcttagttcgcttgtggaatacagaatttgaggtaatatgaagaataacttgattattacaccacaattttgttggaatagaagttttaaactcgaattcaatcaaaagttaataaatccatgttacctcacacacagactgtgtcatagctttatattctgattcaacactggatctagacaatattttgtttcttactgttccaagggatcagattgcccccaacaaatatataatatcttggagcctgcccaatctgcaattaaaaaaatactcaatctgggtatgtccgtgatcgttgtaaactatacctcgcccgggtgctcctttcaagtaacataaaatttgctttagtgttgcccaatgataaattgttggagaagacataaactgactaacgacactaactgggaacgcaatatatgtacgagtcacagttagataattcaactttccaactaatctgcgatatttcttaggatcttcaaatagtttctcatcacgtgtaagatgcacagatggattcattagagcactacaaggttttgttcc

SEQ ID NO: 240761 - DNA, 624 bp, Cannabis indica
ttttaaaatggaatagccattccaccaaaatggtggaaagagcattccattggaatgccattccaatactttaaaatgcaaccaaacaaaggaatggaatgaaaattatttcctttccattccattccatttcattacctccaaccaaacgtcacctaagttcctattttagttgttcttcttttactttttaggggtcaaatgctcttaatttagtattaatgatttaatttttattgtttttattgtatttaaggttagtgaatttttttgtctttaatttattaattacgttttcttcttttaagttcttatttacaatttttaatatgatttgtattatttatgatctttattattttaattatttactttttcatttctttttatttacattatagtaagtttttttatcattaattttattaattattatattggttaagtctttaattacaatttatgtaattgcttgagtggtggcttttttgttttgacattcttaaatattttttggtattatttatgattttttattatcttaattacatgatttttctttctttttatttacattacataaaattctctattgtagttgctctttttatgagtcaaattatc

SEQ ID NO: 240762 - DNA, 947 bp, Cannabis indica
atatgtttagtgcgagaatgcataataggattggcagccattaagacagcactttggttatcacaccaaatgactggaacatgctgcaaatgaataccaatctcagtgagtaaagcttggatccaaactaagtcagctgtggcattagcgaggctgcgatattcagcttctgaacttgatcgagagacagtcttctgtttcttagaggaccaggacacaatgttgggacctagataaatgcagaaaccagaagtggatctccgatcatcgggatccgaggcccaatcagcatcacagaaaccagtcacggttaaagttgaagctgatttaagatgcagaccaagatcaattgtgccagacaaatacctgagaatctttttgaccgttttccaatgagagtcaagaggagcttgcataaactgagacacacgattcacggcataagaaatctcaggtctcgtaatagtggcatattgtaaggcaccaacaacactccgataaaaatgaggatcatgaaaaggatcaccatttagagcagagagcttttcaccaccagtcattggtgtagggagtgaattagcattgtccatcttagctttgacaagaagatcaagaatatatttcttttggcacaagtggagtccctcagtagtgtgagctacttcaataccaagaaaatagttcacaagacctaagtcttttaaagcaaacatctgatgtagctgctgaatcagagaagagagagccgaggaagaactcccagtcactagaatgtcatccacataaaccaataaaaaggtggaatgagcactagtgtgtctgtagaacaaagaaggatcagccttagcacacagaaaaccaaatgacaggagcacatgtttcaacttctcaaaccaagcacgaggtgcttgccttaagccataaatggctttgtgaagtttgcaaac

SEQ ID NO: 240763 - DNA, 955 bp, Cannabis indica
atatttttgtcaattaaatatgccaaaaatggaattaacaaaatcaattttctctgatcataaatgctaagtacacaatttattcaatcaaaaaattaataaatttaaatactattttgaattgttacaataatatatctaatttatcaatatatatgatatatatgtataaatatattcatcctctaacacttttaatcatttcacgaagaagaaaagttgtgtaattctaattttccatccttcatagtcaatccatgtcgtatgttagctgcaccatcgaaaaaaaaaaataagaaacagattcatcaattaaagatagcatatatacttaaataacttactttgtatagtcaacaaatatgtgatattcatagcaaaatcgaaatctgtgagacaaataaaaatgtagaattgattgatcaaaagaattaaaccataaaagtaatatgaattaattgagttaatttaataagcatagagatatacatatatagctttctttgatttctctgcattagagtttgaaggaataatgattgttggagaagaaaacaataatcacgatcgtattagtaggagaagaaaatgacttagtggggtaattacatgcaacactttctaaaaagtagttacctcctttttaatatctattttaattttttgttaaaatataataattataattagtgacactttttaaaaaagcgtgatcgattttattatagtgcaatatgagacaacaattattttagaagtgttgccttatgacatttaagtttgttattcaaataaatatttttattaacttaatattatctggtaacacttattgtatatgtttctaaataagtattttaataaatttgtaacacttttttctcatgtgttgctaaaaaagtgttgcaaaatattctttttgtagtagtccatggatgaatggtttacaaatcat

SEQ ID NO: 240764 - DNA, 2711 bp, Cannabis indica
ctagtttgatcacatgggtaagtttagaaccttattatttagggttttgggtttagtgtttgaggatttagggttttagggtttaggggtacatgtaaaaaattttaggatttagggttaaaggtttagggtttagggtttaagggaccgcttcaagtctcgacttcaatttcgggtcacatggtatgatttaaggcttgggagtgggtctgggtccgagtccttatttgggtctaggtccgtgtttgggtttaggtccgagtctcggtcacaaatccaaatacccacctcatgtttagtctagtttgagttcatgtacggatttgggttttggtccaggtctgggtcttgctccaggttcgattccctgatttagacaccgattatgggtttggtccaagcctcgtttcttgggtcttgggtcacaggccaaaatcaagatcctagtccagttctagctcatgtcttgggtcatggttctagtgtcaggtggaggtttgcgtctaggtttgggtcttgggtcgtgagtcatgggttcaggtcctcgattcaagtcatggtccaaggtcccagtctgggttagggtcccaatctgagtgcaggtcccagtccgtgttcggtactggtccttgtcttggttcttggcttggtctaggtttgggtcacaattcggttctcaggtctaaggtctaagtatcgggtcacgggtcccgggtcctgggtcccgggtcccgggtcccgggtcccggtcccggtctcagtcccggtcccggtctcgatccctgtcccagtcctaggtcccggtctcggtctcggtccctgtcccaggtctcgatctcggtcccaactcttgagtctcgatcctattcctagtccagttttctagtcctagttctggatcaagtttgggtccagctcccagttctggtttgggtttgggtcccagtctaggtttcggtttggttcctcgttgcggttcgagtttgggtctctgtttgggttttcatttgggtttgggttcaagtttgggtccttatcgtggttgttgtcctattcttagtacggttatagttccaattgcgatttcgagttcgagtttgggttcgatgttaagttagggttggagtcttggtccgagtttgggttcgggtctgaagctcggtctaggtccggatcgagctttgggtgttggttagggggctgggtctgggtccaggttcgggtccgagtcacaggtttttatctcgatttgagttcgggtttagtttcgggtctaagtcctgattctgatcccggtctgtgttcgagtttgggtcttggtgcaggactaggtttgggtcttattctgggtctgggtcttagtttgggtccagcatttaggtctgggttttggttttgtcttggtatgggttcgtgtctaggttcctgtcctggtgtgggtcctgtgcaggtttcgcgtacagggttgggactttagatttcgggtctaggttaggtcctggttatggttcgattcccggatttacatctgggtctgggttctaggacctaggtcctggtctaggtcccccatccaagtcaagttcgtaggtcctagtctgggcctaggatcgggttcggttattgagtcttggttttagtccagatcccagtctgggttcctgtctaggtctcgatcctagtcttggttcgggttcaggtttgggtccttatgagggtctggatcctggtctgggtcgcgggtctaaggtctcagtgcgggtttaggaccacatcatgtcaaggtcacgattcgggtgctagtctaggttcgtgtcccaagtctcaagtcccagtcgtagtcaaggtctcggccaaggttctggtatgagtttgggttatggtttcggttcggttttggtctcaggaatgggtcctagtcacagttcccgttctaattccgggttttggtttggttctaggtccgggtctgggtccaggttgcggttggggtccgagtcttagtctgagtctcggtatgggtttttcgaatcccgatcagggtccaggttcgggtcctgggtctgggtcccaggttcgggtcttggtcctaggtttgggtctagatctgcggctaggatagggtctagttcccgtgtttcgatctcggtcttgatctgggtctgggtcggtattcgggtccaggtctaggttcgtgtccatgtcatgtttctgaatcaaaatttatgttaggggatttttttgggtctaggatcaagtatcgagttcgggttcgggttaaagttcgagtcgcaatcctagtctgggtttgggaccgggtctaggtataggtctgggtctgggtccgagctcgagtttcggggctgggtactggtctagtttcaggtcccgttctgggtttaggtcttggccacgaccccagtcctattagggtcttggccaggttctagtacaagtttcggtttcgtgtcctaggtcacggtcttggtccaggtcctagtcctgcttcgggtccttctctaagtcctagatcaagacaccatctatgggtcttgtccaagccccaatttccagatcccgacacaagatctggatcccaatcacgggtgccaatctggtttcagttcatgttccaggtcctggtctaggtctcggtctagttctgggactgagcttgtgtgcaattccaggtcccaatcccaattctgggt

SEQ ID NO: 240765 - DNA, 1597 bp, Cannabis indica
tgaaccatgcaacatttaaatgtttatttttgatctatattaatagtaaattttgattatattgaaatgagttttatttagggcataaaccacaagttccacttggatgttttttccctgtctgtgctatggctggaggatacatccttcttagccttggccactgcatggctataacattcccgagcagactgtttgtttcctcttagacaccctaccctattctttgttggcaacttcaggcacgagtgaaatattgacgtgagagcctttaagtcatacaaggccggccggccaagcattacattaaaagctgaaggaacatctaatattaggaactgtgccattacactcatactcgtggcagcttgtccaactgtgagggggagacgaatttgtcctagaggtgcgactccttgactggagaaaccatagacaggctggaggcatggggttagatcattgagttggagtcccattttttcattatcgatcatatttctggccaccattttattggctgtcaggacttccacgaccagctggtcgttgtgcggaaatctaattttgacagcgtcttcatcgttgaaggttatggtcggctctcctgctcgtggaactttcggcttcctttcttctacgaccaggataacttcttcttgctcgtgctgcactgttcgggcatacctctcccgagctttgcccgaatctctagcaatgtgtgggcctccaacaatgacttgcagatgtccatctactggtggaggtagcaaatcttggttgttgtcgttcctctgaccttggtcggtcttaacatacttttgcaggtgtggattgtttttccttattaggaattaaattttgcgcttcaagttgtaacattaattagtgtcgtggctgtagtctccgtggaacaaacaaaactttgtcatgtcccttttgttggcatctttcttcatgggctcgagcttcttatacggggccagcgactgagttgccatgtacacactttatatatcttcaattagaatagtgagtgcagtgtatttggcatggttctcctggggagcttgttcggatttgccagtgaactttcctttcttcccattcccttgcttgtggttgttgctggaacgcttaccacttgagctcaaatttcttgggcagtggggaagttggagggatgttcctgtaggaggagcctttgacttgccaggctttttctcaccttccgctcgttgaatggcttctttgagcttgatgaagccttcggcacggtcaacaaaatcactcattgaatctaccagcccgttcttccttatatccttctagagttcactgaggacttcgatgccccccagtatcgtggataactttccatcttgagttacccgtgaaactttggtcgcttccatcatgaatctattgatgtatgcccggagaggctcacctggtcgtcgctttacctcgaccaagtctcccaaatgcaatgggagttggcgtgaggaggagaattgtgcatggaattacgaagagaaggttttccatgaactaaactttttaggagccaacttgaaataccattgctgagcagctt

SEQ ID NO: 240766 - DNA, 719 bp, Cannabis indica
aatcatatattatcaagtgactatgtttggagtagtctgctgaaagatatatgtagttctaatcttcttcttgaagcttcctacaggctttgctctagttcaaccttggttagggtaactgtgttttcccttttgtctcttcttctcaaccaggtttgagcttctctgtgtttttccttttaattttttgtttctttctgttttcttctttagttttccctgcattaattacccccctttttttccttactcccgaagaatcctctctttgttcctgttttggcctcattaattactccttccagactcttgatttaatagcataatacgtcaccctaatcattatgcatctctccctaatttctcgagctcagccgctgtttaatgccatttctctctcacacctgcatttaattatggcggctctatcctttcagcatttaattttcctgcacaaactatacttattccgctcctcagctcgatctcatacagataaaccaaccgtcacttggtttccctccttctcatacccaaaacccatcattgcatatcatctccgaatccagacagtctctctaagcattgaagagatggctcagacaccggttccatcttcgaggcggcccttctcctctaggtactctattctgtggcttctttatttgattgtctatttagatgtttactccctttgactatccctatcaccatcgctt

SEQ ID NO: 240767 - DNA, 1857 bp, Cannabis indica
aaacccaacaattcttccaaaatttctccaaatatttttccatctttaaacccttcgcctggtactcacctagaacttcattcacaatcaattgcgagtcactatagcatataagaattttgacttttaatactttagctattcttaaaccagcttacagagctttgtactcggctttgttgaatgaagtgttaaatcggaatcttaatgcgtagtgaaatttaaagttgtctggtgagatcattatcactcctgcactcgagccattttcatttgatgctccatccacagataatttccaagttttagtatcgtgcatgacatgtggatcttcttcggagactatccctttaattaggaaatcggccaaagcttgaccaatgattgatgttctcgggtggtaggttatatcaaattgtcctagctcgattcaccattttatcaatcttcctgaagcatcaagctttgataaaacttatcttaatggttcatccgttaagacttttatgggatgtgcttggaaataaggtcgtagtttgcgagatgcatgaatcaagcatagggaaagtttttcaagagagagatatctcgatttcgcccctagtaaccttttactaacatagtaaatgggttgtttttgctttccctcttctcgcaccaaggctgcactaattgcactttctgagacatctaagtaaaggtataaagtttctccagttattggtttggccaaaactggaggtgttgaaaaatgtttctctatgtctttaaaagcttcctcgcattcttctgcccattcgaagttcttattacctcgtaaaacattaaagaatggtagacatttataagttgattttgaaataaatctgtttaatgctgccattcttcctgttaaggcttggactttttttggcttcgtgggtgacgacttctctattaaggccttaattttctctagattttcctcaatgcccctcgcattaactatgaaatctagaaattttactgaggagactctaaaagaacacttcttcaggttgagcttcatattgtactttctaagtatttcaaagcattatgcgaggtcttttgtatgatctttcacattttaccgactttaccaacatttcatcgacatagacttccatatttcttccaatttgcttttcgaacagtccattcactagttgttgatatgttgccccagaattcttcaatctaaagggcatgactttataacaataaagtcccatgttggtcacaaaacttgtatgttcttgatcagggacatgcattttgatctagttatatccagaatatgtgtccgtgaatgtcatcagctcgtgccctgcacttgcatctaccaactggtcgatccttggtagtgggaaacaatcttttggacataccttgtttaagtctaaaaatcaatacaagttctccaagtgtcatttggcttcgggataagaataggatttgaaatccacgaggggtagaaggccttgcgtatgaaatcattggttaataacctgtccacttcttccttaagtgccccttgtctctcaaagtctaagggtcgtctttttggtctttttgttgggtaatttggatcgatatttaaatgatggaaaatcactttagggttaatccctatcatatctgaatggctccaggaaaattgatcctagtttgccttcaaaaaatttgttaactgctcttttagtttttcatccagatttatcccaataaacacacatttagtgggattgtctgcacctaaaataagttcttccagttcttcaattggttttaactggtttttctcgtctaggactctagggtctagatcctcttctt

SEQ ID NO: 240768 - DNA, 1284 bp, Cannabis indica
aaaaattactagaagatcatagaaacagttagaattaatgaatttgtactacttattttacatttttaatgaaaggtgtgcctagatcaaaattttcaaagatgaaaatttgaaacttcattttaaaaattaaaaaaattgtattctctaattaaaaaaatttaaatatacatatgttttatacttaatattacttttacaattaatatcatttacgtgtgcaagtagtatatatataaatataaacaattatgggattcttaatatataattactaatagaaaaatttatgataatttttgtaactaatagtaatacatttagctactgattttttaatcacaatatataaaaaataatttataattagtcacaaattttattataactaaaaataaaaaaaaaaaatataataaattatcttgaaattaatattcaattatgtaaatcgaaaaggttttttttttttttaaaaaaaaagaaagaaaaaggagatcgatttttttcttttttttttttgtaaatatggtgaaggattttcgtgaacgtaagccatacgttttatattaatccttttgtacagctttccaaataaaacaaatgagaagggtcttccatatttatagaaggcggctcacatgccactatcaatcttagtaatttataaaaacctagcagttgctattttttagcataattttgttcaaccaaattcaatttcatattatcttgtttttatagtgtatttaatttttattttttttttaaatttaatccaatccacacaataatttaaattcaaattcaatttacaaaaatatagattaaatcaattactttaaattgattatttttttaatattaaattatttaatatttattaaaaaatattttttttacataattaataataaaataaaaaattattgttattttatatctacaacaacaaattaaaatgaataaaataataaattttttaaaaaaattatatgtaaaaagcaaaaattaatttagtttaaattatattttttccatataaattataataatagaatgtaaattaaatctattaagtttttaaatatatttatatcatatgtattagattcttaaataattattttcttatattaaaatattaattgtatatataattttttaaatatacatataaatatgtgaagattatattggattggttctgtggacctttaccctctaacatatatgtaatctacctaaacccattacaccaagtgtactattatttctataatatca

SEQ ID NO: 240769 - DNA, 1775 bp, Cannabis indica
acacaagaatgataatgaacaatacctttagaggcatagaaagaatgcatgttgagttctttagcattgtcggagcgaatagcttttatgggtttcgaatattgtgtgcaaaccatgttatagaacatgagaataatggattgcacatcagatttatttttaagcataaaagtccatgtaaagcgagatttgtcatcgacaatggtgagaaaatatttatattcttcaatgcttatgacattgaagggtccccaaatatccatgtgaataaggtcaaatatatcatcaacaaaattatggtttaatatgaatggcaacgttttttgttttgcaatatgacaatatgtgacaatgctggttttttgaaacatttgaaccagaaaagaactttttattgattgtaatagaatgtacatggagggatgaccaaggcgtttgtgtcattggtctccattattacaagaaagtaaagagtaagtagaacttgcaataggtatgaaatcttggagaagaacatatagctttccaagtcttttagctgtcccaatcaccacactcggagaatgagcctgtaatatacaaaaatcatggtgaaaatagaccatgttagccgtgtcactaagaaggaatgttggaatggacaataggttgatgttaaaggttggaacaaataatacatcataaagaatatgttgtggatttatttgaactgtaccaattcctttaacagatattcgattgccatcagggagagtcacatatggtggaaaatcattgttagaaaaagataaaaaaacaagattttgtaaaacacatatggtgagttgctctactatcaactatccaagaatgagtatgaaaaaaagattttttaccagccatattagaagcggcagcatcagtagttgggtcctcacggggctgaccttgacttagttgttggctgagaagagatatgagttgttggcattgggtggaaagatcaatggtagtgttacttgaggtgttctcggctttattggcagtaacatgattggcagagaccttgttttcctcagatttctttttatctccatatcccggagggaaaccatgaaggaaatagcacttgtcaacatagtgccttggtttgccatagtttgtgcaagagggtcttggtttcttggggcggctaggattagtaaaggatgaaggacgagctgaggcagccatagaggacaaatccgaggatgaggaaccaagggttctttgtctctcttcttgaacaatcatggagaaaacccgagagagattgggaattggttcaatgagtagaatttgagcccgaacagaagagtaagactcattaagacccgttagaaattgtaaaactggattttgattgtagtaatcaaggaacaatttcattgcaccacaagaacaagtggtgttgggttggaattccttaagctcatcccatatggacttgagctttgtgaaatatgtggtgacagattgatcaccttgctgcaaacgggtgagttgtgtttgcagctgaaaaattctagggccattgccctcattgaatctttcttgaagatcatgccacatgtcggtgggagatcaaagtacataatgctttgtgcaatctcaggagacacagagtttatcaaccaagacatcaccatgttattacatctattccaagaattgagtaagggattaccagaaatcggccgaggaagggttccatcgataaatgcagacttgttctttgctgtcaacgccattgttat

SEQ ID NO: 240770 - DNA, 535 bp, Cannabis indica
aaccttccaatataacgagaagttatttttgccaaacaccgagcaaacgaataccaaaaatctatttaggaaaaaattaaatattaactaaataaaattaaaagtaaatatgttataatatcacatatatatatataatatatattatataaaatatatataacatatgttataatatataacatatattatatatacatgttaaatatataatatataacatatattatatatatatacatttacacatacactaatttatcttaggattttaatatatatatatatacatttacacatatacacacatatataaattaatctacacatatatatcattacatatatgtctatatacacatatttacacacaaataacctaaaaatactatacatacacatatttataaacaaaaacataaataaactaaaaaaaacacatacaattttaaacacaaatttacacacaaatttacacaaaaaataatctaaaaatactatataaatccaattgaaaactaaaataaataagcta

SEQ ID NO: 240771 - DNA, 643 bp, Cannabis indica
ttgtggtgagttgaataacccaagaacaagcaaggttgagatctgagttccattttatgatgattatatggcctcatgtgtggaaagcaacaacagccaaacggtttcaagatattatagtcaggttttttcttgaagagacattcataaggactaatatttcctatcacaggagtgggtagtctgttgatagtgaatactgcagaagacattgcatgccaccaatattccatagataagccagcttgagccaatagagtgaggccggtttcagtgatgtgtctgtgctttctctcagcacggccattttgttcactagttcttggacatgggtgttgaaaatggatcccttgatcaattagaaatcgagcaaatggtctatattctcctccccaatcagcctgaatacttttgattggaacttgaaattgcttctccacaagactcttaaactttataaacacatcaaaagcttgattttttgtagttagtgggaatgtccagcagtatctactgtaatcgtctaaaaaatgcacatagtatttgaatccttctttagattcaatgtgggagggaccccacaaatctgtatgaatgagagcaagaggttgattggctctactagtggattgtgtaaaaggga

SEQ ID NO: 240772 - DNA, 399 bp, Cannabis indica
cccagttttttcggtttcccaccttatcccgtggtggatggctgattcggattaatgaagttttttttgcttgttttttagtgatttagattgctagtttctgttagtctttcgtctacttctatgttagtattcctgttggtctatttagactttcgtttgctgtttgctttagctgttccttgtactttgtttgagcgtttagctctgtgtttgtttctcttcggctatttaagcctcttaatcaaaaaaaaaaaaattattagtacttttgttatgtgacaagtgcgatgtgataatgtgtagttttggctctttattttttttggtcacaattatgccacgtaagcataattgatatgttgacgggtaacctattaattaaggagtataattagt

SEQ ID NO: 240773 - DNA, 886 bp, Cannabis indica
ttaaataagtttgattctttatcggatcataaaaccccactttccgaagagctcttccttctcttcgtgatcgaacatcaattgcaacgattcgataaatgggtcattgggatagatgtagataaaaaataccccccccccgagaaacgtatacgaagttttctcctcgtacggctcaagaaaattcaagttatgtttatgtagagaattctaatgtcaaatatattcataaaaaaattaaatcaattagaccaagaactgtctttctttatagttaaatacttggttattattctttccccaacaaaaaaattattcgtatttgtaatttgaactctcataactcaagttgtataactcgcaaaggaaatcctttaaacagtttatttattgagcggtctctaatcctccttttgtctgtctccgttcaaatctattttaattcttcatttaaatcgagttctagttgttgagacaattaaaacggtatttccttgttctgggatcctttatctttgccttgaatcgttgggtttagacattacttcggtgatcttgaacatttcaaaatagcagcaacataccattttgagggatttctttctatcaaagaatcatacgaatggttgattcctgtgtaatacacttttacctttgaatttaaaacttgcttgaagtggactctttcgatttttctataaaaaatttacttacaaagttgtcccaatttattaattgatactaacctatgactctggcctccgagaaatgaatcaatacgttctgctcaagctccattatggatgatatggtttacatcacaacccccggttctagtggaacagaagaaatgatgttgagtcaagagcactttaattcctatata

SEQ ID NO: 240774 - DNA, 2022 bp, Cannabis indica
tgtcgttgtggtattcgcatcttttgctgggatccctccgcgaactgtctctgtacagaggaggaggcctctagtagtgcgtattttggcttgtggcgaagtgcactcgctcttgcatgtccgtcaactccgtgtactgggtgtattggggagtatacccccttttttgacgcttgtactctgttcgattgccgccttttaaggacctcttgctctgagagccttgagcaggtccggttaggctcacagtaggagcagagtgagacgggatttgtccgcttatccctgaggggttcccgtaatgcgaagatgcgggagccaaggtttggctctaattgtatcctggggtagcggagaactgtataccgcttatttgtggagtagcctgaggtagggttcctgagagttgaactccgggtacatatcctgccactccagttgggtagtatcctccgtaggccactatttgggcttcttccaagttgatgtactttgggactctcttctgaaaatcctggaggttagcagctccttcttgttgtaattcattccagaatggggttcctgtacggattccagcttgaagaagtgcaagctgttgtctgtcatcaactttcttagtttttgaggcttcttccttgaacctctttatgaaatttttcaatgtttttgcgggtagttgcttgatgttagtcaaggcactgacttcgagattaatctttctcgctgcgacaaactgtctccggaaactaacttgcaacttgttccagcaatccacagatcctagttccaactttttgaaccattcttcagcggaacaactcaacgttagtggaaagaataaacacttggcatcattgctgactctcataaccgtcattactcgattaaactgagacatgatcgctggggtctgagcccccggtgtaggctgccatctcgggcatcttaaaatttttggggagctctgcctccaaaatgtgtcgggcgcacggctcccgatcctcacaatcagagtctcagtcatccccttttagcctccgggagactcgagcaatgtctttactactattgccaactcagccataattccttcattcagcgttcctgcggagactgccggcatgtgtttctttttgtccaagtgatcctgcaaatcaccatgcttttcgttaatttggtgtcttaaatcaacatgagggtatcttcggttccctcttcctttctccttgggttcctggtgcacagaaatgcctttcggtcctcttgatcctgagggccaagactccctttttggagtctgcccctctgcggacctttccctctcgagaaatctgagcgaaccttttgcagatcttgcacctttttctttctccctaggatggaagtaggggttttccgttgattttcttcatagggataccgtataggacttggttccctgggcttgtgcttctgagtgcttggagaggaatcttctggcatttcctcaagtcccactgggatggccttaaggtgtatatggatccctgctgtctccatggctttttccataacgaccatcacctcttgcatctttttattttgttctttttgggctgcgatctcagcatcatgatcagcagcctttttccttaagagcagtggctccgtgtaacagccttcgttgtaagcgtcatattcgtcaaagttttcctcgtactcgtcatcattggcctcctcttgctcctcaaaatccatgttgactcttgaggccacttcctcgtcctccagattttgagcatcttgaggaggacggggctgatgtgtgttgcgagtttccaccattgttgccagtttataaggttattgtctgttgaagacgcttccttcagctctcaatgaaagcaccaaaatgttgaccgaggtattcggcagccaattaaataatatatataagaaagctgtataaagtttaatgcatgagatttttacgtggttggggcgttaattagccttagtccacgagtctttgttattaat

SEQ ID NO: 240775 - DNA, 1157 bp, Cannabis indica
tgtaaagtcatgaccgttgggatgaccgtcaaccataagggtggtcatgatcgttagagtcgaagttagattgtcacccttacccctagcttgagtaaggtaggcatccccaagaaggaagaatgttgggctaacaccttcgtaaccgaaattaacaatcaccacacacctacgggagtcaaatgagtctagggggtatatactactacccttacctcaactgcaatgatctatatggggtttagtctaggggtacaccccttaacccctaagggtttagtctaggggtacaccccttaacccctaaggggttagtctaggggtataccctaccctctacacccacatggctcaagtcaggcattttaccatagacataatgacattctcaaaggtatatggggacatccacattacaccataactactgacaacgtacaaggggtcttgggaggtcaccccgagatgacgattgccacccccctcaagttgggcctcgggggtaagccaacgatgacgattgtctcccccctcaagtttggtcttggggggtcaccccaagatgatgattgtcaccccctcaagtttggtctcggggggcacccaatgatgaagattgtcaccctcctcaagttgggtctcaagggtgttgccccaagtatgagcttcatccccaaaggtgcttgacgaccatgtaacacccataagagatcctcgtcgtcagtaactctttcaaatgttcaaatcccacgaaaggctcaaagatagttgtcaacccacgaaaatagcgagatattatcataaaaattagactttaactaccttcaaaaatcaaggagacggttgaggtagctccacatttgttgcgtctcctgaagcgaaaggcatcgaccctctcccctaacgggtcatccatgacctgggtggggaatccacgattttgaacacttagaaaaatgaacaattatcattctttgcagttaagagtatgttcttaacatttgcaactcagattagtaaaacacaaggggagcaggatattaccgacatttgtgcctgaacctctttaaatttcggtgtctttctttatatttattgcatattctagtatcattaatgaaatttattgtaacgaatttgatttaaatctcatttat

SEQ ID NO: 240776 - DNA, 774 bp, Cannabis indica
ggtagcgtatcgcctagccttatcaccagcgctgtcggctgttcataatgtattccatatttcaaagttgaggaaatatgttttaaatcccactcatgtcttgagttatgaagcccttgaagtatagttagatttatcctacgaagaacaaccaattcagatccttgatagaaaggagaaggttcttcaaagcaagaccgtcgctttggtaaaggagctctggagaaatagcaaggtggagaaagcgaccttggagctagagtctgacatgaggactcaatacccagagctattcaggttagatttcgagggcaaaatccttttaacgggggataattgtaatgaccgcattagtaatttggattagtaaaagcaattggcagtaattactaatatttttataattgtttataaatttaatttaattgtgggtctcattgttagaattgggcattattgttataatttctcaattccggagattttattaaactctagagtattatttgacttatatgtgaattatgcaatttttgtaatttttattcggcggcaacagaaaatgcgatggatggctagtttgatcacatggtaagtctagaacctttattttgagtgggatgtgtgttggagaaaatagaataccgaggttgagcggggttatggaatttgaccatcttacccctagtcttaaaaatgcctaagtcataggttatgggggcattttagtaatttgtcaaggagtgagtagtggcttccttaggtgttgacacc

SEQ ID NO: 240777 - DNA, 988 bp, Cannabis indica
accaagagtcaattttcaccattaaatcattctcaatggcaaagatcagtccaaaatgattttttcatatattttttttttgtaattttttattattatttaaatggatatcatttcttataaaatgagagcttctagttctttttttacattcttctaagtacccacaatgtcagagcatctctctttactttctctttagaaatttgagccccacactttgtaagctattgtaatttttgtgagatataaaactcgaaatagacgcagatctattaccatcgcgtcatggggagtgaataaatttgttatatttttcttacttatatttaactctcattgcattctcatcaatctagcgagcaagtttaagtaaatttttgtgttaacacatgtcatcaccgaatttggtctttagttttacttacaattttttggcatggcgctgggtttcaattttcgaaaaaaaaaattggtttaattgaaaaaccggtaaaactaccaaaaattataccattaatttcggacggtaataatttctcaaccatcgattataaaaatcgtaattgaccagttaattataaaattaataaaacctaatcataacggaccgaaattcactagtaattttagcatttctttaaggaaaaatcacataaaagttttacattagagaagttgtatagcgtttccacctgttgccttatctagtgaggtgccagttggcacacttttcattcactctaaataaaaaagcaacacagttttattttgttttgttctccttttcttcttttaaaattacaattacaaggacacacgatagtttccagtcaccatagtagctagcttctactcctagctataccttttccaccctaataaagtaatattatctctaaaaattgatatagagaattgttaaagaatattatatttttattagtgtaattaaataattggtcttatattccattcaaaaaaaaaa

SEQ ID NO: 240778 - DNA, 1213 bp, Cannabis indica
gcgatggtcggcttgttccactttttggcttgcggttgaggacgggcgcggacttcaagaaagtcatctctgcgaggacaaataaaagataagtatgaataactttcaaggcactagtctataacgtgggatatgttacctaatgttggccgagaggtttgcttggagaggcgtttgtctatccgctcttgttgtttctcagatggttccttgtacactggctctctttgaagacttgcgttctctggaatcagcttgtgttctcacagcttggcagtcgtacacaataatctccaatcgcgatcttatacaggaaggctcccaagaacttcagctgtctctctgcgggtcgcgtcgagtgtaggtcaagctggtctatctgtgaagataaaaaagagcgggttagcatggaatctcaaggtaactcaaaaaaataactaagtcaggaaacatacgacatactaggtcggcggttaaagtcagtcctaatcccaggaactttgaatatataaaaccacttcgatttccaatctcccatattggaaaccatgccttctaccccattaatctcagaggtggcccatttgctgaaacaatagaaaccgttatggaggcctacgctctttatatcgtagaagtagctgaactcttctaccgtgggtgccctatgtacgtactccatatacatcgcatagaaggctagggttgtgcgataactgttgggggtcaattgaaagtgagacacatcataacacttgagaatggccgcaatgaaggggtgaaaagggatcgataccccacatcgaagaatgggtattgagactaccacatcctctgtcggaataatcgctggattggtaaaggaaaggtgcgccctctgagtaggtttaggtcgcaaagaagcgagtcgcaggaggttcagtcttgtaaaggtagtaagatccgatttggtgaccctcgagaccaagtcctcgcatgaaaagggctcgttcagctgagtgttgtccaccgaatcagtcccactcccttctgcctcttcttcttcctcgcctgactctcgagctggggccgcccaatcatcatccatctcctcgacctcgacgtcaggggcatgcctggagtggacgagataatcgcgtgctgacaccgtagattcgctgtctccaatctcaatggctcctggttcagcgagctcctgcaccattctctcgat

SEQ ID NO: 240779 - DNA, 816 bp, Cannabis indica
aagctaacggagcaaccaccaaaagaacttaaactataaattaaaaataatatataaattaattctctcgaacttatgatcataaatttgtaaatcaatgtgtacagtcgaaaaaatatagtgaagctcttttgacaaacgcgtagaactaagagtttgatattattattaaaaaaaaaagtttgatattaaagcaccatatggccaaatacttatcttctaataatttatattttttattcttctttttaaatagaaaaaatatacttgattttaggtctcggtcaatatgatattgccaattcaaagaaaatacggtaccactagcatttttttttttattttttttttgtaaacaaagggaaaattccatagcaaaaaactcaaaatcaagtacctaatttagcaagagcatagagttgggtttgggctaagacagactaggtccacatctaaagtttgcgctaggatctaccagccgagagggccaaaaaaatatcctttaaaaatatacatattttaaaataaggaacccacaataatttttattttcgtaaagctcacctaatctcaaaaccgattttgacatgaaaattaatattataggtctctattaccactaatgtttgatgagttattttttttttttaaaagaaattttattaattagaaatttcaactccaaatagggtagcaaattaattggaacatgctttaaactgaaacgtcgatcagaaaataagataacagcttttgtaaaattatgagctactaaattattagatcgttgaacgaaaaaaaatatttgtaagacta

SEQ ID NO: 240780 - DNA, 541 bp, Cannabis indica
aaatgagctaaatgcaaacgaaaggcgcaaatttgtaattatgatagaaaaatcatataagtgtcataatttgagaagtaaaaattctatttatttttaattaaaaaaaatatgcttaattagaattaaaatatatattatatatacctgctgatttcactaagctcctctttgtgcatggattgaattagattaaaatctagctttgcaagttgtagcaatactttattatgtgaggcatctttttcacacatcgaaataaaatgcttagcatgaacatttactagggtctttcttaagggtctctctagggctcgagatatttcttttgacaagaaatcatcgtcatcatagtgatctttttgtctttgccaaaaactcaatcaagtgtgttgttgtgaaagcaagtgcttcatcaagtatattttctacaacacaactcaaatgtgaggcttcatataggctaagcaaaccaagagtatcacttaccaaatattttttaaagttgccatcttcatctttgaatttttcaaatatatct

SEQ ID NO: 240781 - DNA, 932 bp, Cannabis indica
ttgatttgggttcggggggaggttcaggtccatatttcggtctcggttagggtctgaggttgggtacggttttcggttctgatctgcgtcgaagccccagtccccttcaaagatcccagtccggttctagttcaagtttcaattttggttcccgagtgtgggtctgggtctgggtatgtgttcgggtcttggtttgagttggagtttgggttcgggttctgttctaattcccagattcaaacactgactacgggtcaggtccaatcatcgagtcctggatcccaagtcccgaggtgggtcctaggtcatgatttggggctgggtcgggtccttgatcctgatccaagttctgaggcccaagttttggtcccagtttggggtcccaatttcgggtttgggtcccccatctatgtccaggtcctaggtcccaatccgtgtccaagtttgtgtttcggttcgggttatggtcttgagtcctggtctgagttcaggtcctagtttgcgtttgggtcccactcctagtgtgggtccgagtttcagatcccaagtccgagtctggttcttaggtcctgcgtccagccccaatttttgggtctgggtctgagtatcgctccgggtcccggtctttgtttaggtccaaagtcacaggtcccgatccaagtcctagtctcgatatgggttctagtctgagtttgggtttaggtttgggtcctgctaattcccaggtctgggttctagtcctagacctggtctgattcctattccgggtctgagtatcgtgtttggatgccagtttgggtccaggtccgggtctgggtacagacctgggtccggggtctggtagtctaaacatactacgggtaggtcgtgaaacctcaagtctagtattcggatctcggtcgttattcaagtttaggtcctaaggtcttggg

SEQ ID NO: 240782 - DNA, 1469 bp, Cannabis indica
gcccaaaggctcgtctccctctgtctaattaaaagctcatcgacctctgcccagctcgaaggctcgtcgacctctgcctagctcgaaggctcgtcgtctctacccagcccgaagactagtttttgttaatcatgtttttcattaattaaaccctttaatcagcacatgttggcacagtaattgagaaaaatactatagtgcacctaagctagtaaggcgttacagttcttgtggcttgctatgtcccccgttatcttttagctaatcttatgtttttttttgcatcagttatgattccaccatgtgatgggggccatattcatgtccacatacccgaaatcccaatctatggagttcaaataaagaagctaccatgaaaaagtacaagatttttataaagtgttatagatatgtatggtataagtcatttaaccaaaattcatataaaaatacctcttacctataaaaacaacgtcaatctagaaacagttttagttttggcctagtggtgtctccacactgaattcatgaagtaatttaatccagttgtggcctagttcctctttaaaatagtattacaattaagaaaagagtgtatataaccactattgattattgtgagggtcttaagcaccaaaatggtaccaagaactactagaacaaatttcatcacatacagccagtcgtactcttgacagtcttccagttctttcttcaaatgatgtaagctaactagttgcttactaacaccaaagagttgctcaatctctttgatatttttttctcgctcatcataatatgctcacccccgtcctttatactcgttacttgtcagaatacactcgatgtttttgggattttgtcatccatatatgtttagaattgatgcgatggtgtccacattcccaaatatccattaaagtaaaaaaatatttgacgtatggactatcctcctttatgcaagaaccaaattgaaaacgattatggcctccttcttcttaggcataaaacacttacaaattctaaaaagctgatcaaaggcacgccttccatgtactaccaaatccaccacttcttgttccccatcattgttgtgcttcactattttctcctcgtttgcattgcttcttcgtttctttaatgttttacaaatggcatctttttttgcttccaattgtttgcgcttcctctcattttcaattttttgcttttgtctctagggcatgatcgttagttaagataacaccctgcaaaatgtgattaaataatttattattaccatttcaatcattgttacctacacaataaataatatctttattataaaacagagattgtacataatgtgagatatacgtacccattatattacctatataaggtactatagattacttttgatggaaatggcaagctttggaatgtcaaaatgtattgatatgaaagacaactttatccaaaaaaaaaaa

SEQ ID NO: 240783 - DNA, 957 bp, Cannabis indica
tacccttaccttttaagtaagtcccccatatgaatcaatcattgactcccctatgcacgcattaagatttttccatcgcctcctgacgcacgaaagtattaccacgagtcaaccatcgatactgtcccttcgcatcttctaccaccgccgatgtccttccacctcttctgccaccaccatcaacactatacagttcaacaactccaattgcaactgccaacgttattcgatattgagggtgcattaacgttttctttttaaatttgtattagtttgtctttaattgtagtttctccctctctcaatcttctattttcttctattttgtatatgcttgtagataatatataatgcattttaagtgcttgtttaaataactcaaagaagtcgtagctgacctataaccatgtccatccaatctttatatacagagataatcttttatctcattcatataatgaagattagttcttagttagaaattgaatatatgaatatttttttcatttaacataaatgaaaggtacaataggcacattacttataaatgtgggtatatatataaatgaatataaaaaaagaagttaaaaattaaattggtttagttaaaaggggtatacaatctaatttctttttttttcttttctttcatgatataccatagcaaataaaaataatataccactctatttatttattaatatatcatagcacataataaagatataccgtacaaaaaaaaaaaaaaaaaatacaaaaaccttaaattaatatttaatagttttttttttctttctctccttcacgatataccatatcacatacaaacgatataccttagactaatatgaatataccataaaattaaaataatatactattaaatgttatttttttccacgatatacaataacatatcaaaactatattctgcaattataaatataaatacgacag

SEQ ID NO: 240784 - DNA, 797 bp, Cannabis indica
cttgaatcttcattatttatgatgaaggtgaagattcctagagcacattttgctgaattaaattgaaaacaacccaagttgacaaaatgttaacctaggcacagggtccagtctcaggtgccaacttgggcattgggtccctcttttgccgcttcgaaagttttgtttggtccctagaaacagttgattctcaatattttctagagatagagatcatgctcgaaataattttataaactctagttttttgtagcccatgttggcaaattgtcaacctgggcgcatggccagccccaagtgtcaacctgggcactaggcccttttttatgcctaggaaatgttattttttctttggaaggacctatttcaacatttttaatgaagaaggattcaatgtaaaagttagaccttcgatcggacatttggaaggtgcccagattgatagattgtcagcctaggcactgggtgctcggggccctaggacgttgggtgctcagggccacagggcggttgttgcccgggtgctcaagaatcaacttgctttgaatctgattctaatgcctcaaacatgtccatggtatatctagttgatgtccatagtgggttggattaaagttgttaaagtctaaacttccatcccagagtcaacctgggcgcaggtatagggtcccctcacaggttaaccgttatgacttgagtctactcaactctgtgacatcatccttcatttcacgtgtcaaacattaatggccatgacactagggaaagttttttggttaacattttccccaagtcaa

SEQ ID NO: 240785 - DNA, 806 bp, Cannabis indica
gatcaatctagccatccatcgcattttccgttgtcgtcgagcaaaaattacaaaaattgcatatttcacatataataatacccctagagttgaataaaatctccggaattgagaaagtataactctaatatttatttctaaatattgaggtccacaataattaaattcataaataataataaaataacagaaattagtgctaattgcctttactaaaccaaattactaaagcggtcattacactatataaagctcaagtctatttcgaagacaaagaaaaatagaagagaaagagagaagtaagaaagagctaatcaaggaaggagatcttgagggctaaagaccatactttcatggtcaattgaaagtgttgagtgttgaagagcctattgtctagaatgattcttgttgttttgtacaattaattggtgttagtaacacattgattcatattggagaagtttcttgagagagaactagagtaaaactcaattcaaaaggataattgccttgaatttatctgtttaattttttggtttgcatttattttgatttcggtccaaaactcattctgtttctatgtgtttgatcatttaactagtttgagtatgtatactaaaaaaattgctaagagtatgtgctttaatttaaagtataacattttaatttatgctcactttttctattactttctttttgcatattttaatacatgtaaaaatttgttatggtaataactaataagatgtatagggtgctggtgtaaacattgatttgtgtaacacaattttttgatttatcaaaaa

SEQ ID NO: 240786 - DNA, 631 bp, Cannabis indica
tggatcggatgagaaaaaaaagttggattggatcggatgcccactcctagtattttatgtaaataaaatcataaaaaaatgtaaaaatgtttaaaatttcgtacaaccgcatttttgtaatttttttgttatttttgtgtatttgtacaatttatatagttattataaattatattgaagaaatataaatatttgtttctaaaagaaacttaaaaaataacttggatggtatgaatttatgataaaataataataattataataattggaaccaatgtatatgatataaaaatatgatgatgacaaattaaatataggatttttttacaaaattatctcctttttattttatattataattgtcatcatttttattatatttttactgtattaagttttcaaaaacattatcttaaagttttaaaatcacaaaaatactatatttcaggtgtaaaataaaaatacaactaaaaaataattgtagaatacctaaataataacatgaaagcaacaataaataataaaaagatagttataaagcagtgaaaaaataacaaaacatcgacctcgttgcacaatatcaactcctcaacttatttaaggagtaatatataataaaaaaaaataaaaa

SEQ ID NO: 240787 - DNA, 791 bp, Cannabis indica
tggtttggggcaggggcagtcgaagagcggggggggggggggggggggggggctgaggcttaccggggacggtggtgtccgcccgagttgggtgagtttgtgctgtcggttgacgcgactgtcactctgggtaaggggttcgctgggtttaggggggttattcgaggagttgaaggtgtggtgtgggcggcttgggctatgggtggtgtcagggagtttcaactggtggtggcggaactccttgctatgcgtacgggtctattgtgggctgccaggttggggttcaattagttggtgagagtggaaacggattcttctgtagttagctcttggataaattgtcgtgattctattattatgtttaaaccaattgttgaagagattatttctcttttagctgttgttggtggtggttcttgttgtgccattttgcgtgatgcaaatggtgtggcccacgcactaacaaagtctgttactagttcgatagaggttcatttatggactgatgcttatcctaaatttattagtgctcctgtaacaactaatttgatttaatttaataacatactttctttcaaaaaaaaaaaaaaactaaaataaatgacataataatttagatataacaccacaattcttaaattatccgtattattttataaaagaacccaccaaagagtcctatcaccgagttcttatattataatatgttttttttttataacatattatattataatatgttccattatatatatttgtttaataaccattaatgggtattacccatgaat

SEQ ID NO: 240788 - DNA, 875 bp, Cannabis indica
ccatgactcaagagtcactcgacatgcatgctcaagagtcactcgacagcatgctcaagagtacactcgccatcaatgatcaatgtcactcaacatgcatgctcaagagtcactcgacatgcatgctcaagatcacttgacatgcatgctcaatgtcacttggccatgcatgctcaaaattcttgaccatgcttctcacaaatgtcactcaactagcatgcatccttgagatcactcagcatgcatgcatctatgaggtcactcgacaagcatgcatcctgaagtcactcgactagcatgcatccttgaggtcactcagcatgcatgcatcctcaagtcactcggcatgcatacatcctcaagtcactctgctagcatgcatccttcaggtcactcgactagcatgcatccttaagttcactcgccatgcatgcatccttaagtcactaggcatgcatgcatcctcaagtcactcaacatgcatgcatccttaagttactcgactagaatgcatccttgaggtcactcagcatgcatgcattctcaagtcacctaacatgcatgcatcctcaagtcacttgacatgcatgaacttctcactcaacacaggacatccatgacaatgtggctcaacatagtaaagctctcccaagtacggggagaatgaagcggaaaggtacaatcataaggacaacgtgtgcatgtgaggaccgtatgaccacgccttctgtaagctctaaaagcatggaagtacgagcagtgggagcatcgctcctacataccctgacgccctgaccaccaggactttgcagccactactcctgcaacccaggaccaccgacaccagacaaaggtacgaggtgcaagaccacctc

SEQ ID NO: 240789 - DNA, 831 bp, Cannabis indica
tcctattagtactagaagtagggttttgaccaagttaattagttaaattttgaatatattgaactatatttctacttcaaatagaactatatacgtagctataaataataataagtggagatttatttcagttaatttcatttcgacgtacttaatttcaaaacaattaaaaaccttaatttgtattatatatttggatcaaattaatcttcaattaattaatttaattaattaataatggcgccttccatgaaactgaaactgggagatcgagtagaagttcacgaacgcggccatgcatccagcggcccatactttccggccaccgttatccgtactccgctgaagatgaagcctcatgttacactcctgtacgttgagtacggaatccgtacatcatcttctgatcatcataatcccttggagaatccccttagggaaatagtgaatgcggacaacgttaggccgccattgttgccggcgaaggagctggttgttttcaaggaaggcgatgatgtggagtttttctttcggaacagatggttccgcggtgtggttgtgagtgtgaatgtagaggggttgaggtacactgtaaggttacacgattcaactcgaccaagtgtaatggtatgtttacaccacaatttaaggcttcatagagaatggaataatggagcttggaacccacctcttccacaagattgtgttgattttattaatttgcagatgaggactaataaaataaggaccaagaaggacccattgaaggtgaaggtgaaggtgaagagtatgaaagtgaagatctgcagtactactccaattaaggacaac

SEQ ID NO: 240790 - DNA, 826 bp, Cannabis indica
aattaccatctccctccttaagccaacattcccttgatttttgcttccaaatagattcaagacgtttttctacttcatcaatctcaagcataattgatccttccaattcgacattctccttagaggggattcggttttgaacttcgatcaaaagacgttccagggcctggagtttgaattgacaatgcccaaaaacttctttattccatttactaagggctttggctgtggaaagaagtctgcgactcaacatgaaactatggaaccccataatagcgatgttccaagcttcctcaatgatttttcgacatcctgggtcacgactccaagcatcaaggtagcgaaaaggcgtcttcaccacttctctgtccatacgagtgtctaaaacaatggcaccatggtccgaatgcctaacagcaagatttctaacccctgcttttttaaaataagaaatccaggcagcagacacaaccacacgatccagcttctcccgaattaatcttttccagttttggccattggaccaagtaaagatagcccccacaccctccaagtcgatccctcccaatttgaacatgaaatcacgaagaccctggccttccgctctggttacggggcggccaccacatttttcttcagccgagagaatggaattgagatcccccataacaatccaagggctagagtaattactcatagtcatagataactcatcccagaaatccaaacgcagagcacgacagggaggagcataagtaaaacaactaatccattccggggcattcctatcttcactaaaacggacaatgatcttatgaaaatccgc

SEQ ID NO: 240791 - DNA, 705 bp, Cannabis indica
cagcatccttttgcagtatttttgaaatcagaacccgggcatgtgaatcatcatagtctttgcagtgaactttgattggaccctcatgttagtacagatacgctcgggccacaacattgtcgatattgtcaaagcagagatatattagctgatcaagggccccctggtcatcgaaattgtatatgagaggtggctcgttgagggaaacaaactcctcagcataaatttctggtcgaccctcatcctcacgagcgtattgttgtggaacagccacctctccttcttcctcttgttgggcaatgtttttcttctgtttaagggatttgattttggcttttaatttatcaatctccttctattgccgagtcacaacatcagaaacttcctttttcttcctgccaaacaatttagatgccctggtaaggaacctgcaaatcattaaataaaattagctatgatttatttttcataactaaagaaacaacatttctgaggtactagcatatctagcagccctgacatgtccaggatgctttggtatctcgagcgcctgcgttaggatattgttttggccatggacgtgaatttgtccctgagtaagtagttgctcctctaattgagcctaatgcacatattcaagcaattagtatatgaattatatatactaactcattagtagtactcaattaaggattaatatatact

SEQ ID NO: 240792 - DNA, 858 bp, Cannabis indica
accaaacccaagaaaaaatgtaaaggacccaggtctttaagttgaaacacagagttaagttgctgtttaaaatctgaaacaacatcatcattattagaggtaattacaatgtcatcaacatagattaatagggcgagaaaaatgcctttatcatttttgatgaacagtgtgtgatcagaaagagactgggtgaaaccagtagatagaagataattgctgagttttgtgtaccattgtctagaggcttgtttcaagccataaagacttttggttaacttacaaacaacatttgggggaatttgtcccttgggtttatacccttttgggagtgtcatatagacagtttcatttaaatcgccatgaagaaaggcattgtttatatcaagttggtacagagaccaattgttaatggccgcaatggcgagcatgagttttaaggtattaaactttgcaacaggggcaaaagtgtgaagataatcaataccttgtttttggttgaaacctttggcaaccaatcgagctttacatcgatcaacggagccatcagcattgtatttgattcggtatacccatttgcagccaatggcatggtgaccatcaggaagagtgacaacaatccaagtgtcattggcttcaagagcatcagtttcggtatccatagctttttgccatataggatcctttgctgccattttgtagctggtaggttctacaaaggtatgggcagcgagagctgctgctcgaaagtgctgtgtcaacctattgtaagacaaatatttaatagggtgagcagtagaagaagcagcagtagtattgcaaatataatcagaaagatgttttggtttagataaaagtctt

SEQ ID NO: 240793 - DNA, 991 bp, Cannabis indica
ttagggcacaaagcccaacaatatatagtttctaaatttttcatagttttttaattattgtatattacagttattgtctacacttacatagttgactagcaatttttcttaatttattgtgtaataaaagactttttaagtagaatgtttgtttattttaaagtcaatgtcttatctttttattttttttatattttgaattacattacatttagaatttttaccttccgaactttagcatatgcattattgtccctcctaaatttttcagcctattataaatggttcttgaacgattcagtattcattgtattgtaaattgatacttcggtgaagttttgtcatacatgacaaacaaaatgaagatatagatgcttagccaattgtcatatcaacaccatgtgtataatttaacattaaaaaaaaataacattatgttttttaaaactaaaaatcaattggttattaggaaaattaagtaaaactaaattaaaaaaataataaaattattcttttcaaattaattatacatgtggcattgacatggaactaacgtaacaacttgctaaaaaattatgtcatcattttgtttgccacgtgtgataaaacttgacaaaatgaccaatttacgatgctgtgaacagtttagggactatttttagcgggctaaaaaattcaggggcacaatgcataggtcatagttcagggacaaaagttttaaatagccttactattattgttttaatcttaatgggtacctagtgggtacaaatgggaaacaggaacgaggttgagaggtgcattacctgcttattactcaatttctatccttgtattatattaaactagtaaactggtcacgcttcgcgtgcggctgtttataaaaattttaaattatatatatatatgtttgggaggaaaaaaaaataaaagaagtttaccatttcaaggccctataaaaaggaagtcaatgagattgatatgatacaag

SEQ ID NO: 240794 - DNA, 740 bp, Cannabis indica
aaataaaataaaaaataaatttttaaaataagggctataatgaaaaaaaaaaaaaaaaaacaagagggtatttacataaatatggggaaaatttagctagtttaaataaacatggtaatgaaacttaataagaaaaaatatggtatttaaaataaaaacttaacatgtatggaatatgccatttgaattgctattaaaaaaatattaaaatttcgtttatattttttaaaaaaaataaaactacattggtcgccgaaaatgagccgaagtttgctgtcggtgccgagaaagtcactggagttgctgtcgacgtcggaaaagttcttcatcaagaaatcagtttcttggtaattttctagtaatttttctagcaacaatgcctatttcgacgactttttcggagtttgctgttggtactggaaaagttgccagagtaactgtcgttgttagaaaagtcgtcggagttgctgccggtgcccaaaaaagtcgtcagaaaaatgaccaagaaactagtttcttggtaatttttccagcgactatgccaattccgacgacttttttaaagtttgttgtgatcgttgccggaaaagtcactagagtagccgcaggtaccggaaaagtcatcagaatttgtattatcgccgaaaaaatcaccaagaaaatagtttcttcatcaagaaaccggtttcttcatcaagattattgcatggaaactactaacaaaataaatatataattaa

SEQ ID NO: 240795 - DNA, 797 bp, Cannabis indica
caaaacgatcaagaactacccaaaataacagctcccacgcatcggatcggagtcgtcttctccaactccggtgtaccgttgttaatggagtcaaaaatagaaaatttcgtttcagactttaaagcttcgattcttcacgttaaaactgatctttgggtcccataaacttaaacacaacctcctttgatctccgaaacaacttaaacacgttcaaattcgagtccgtttcaagaaccgtatttttgaacataaacaacggtgtctgtcgaaaggtgcgattacagaccttctaaccgcatttaaaactcctctaggatgaaataaaactcaatgcaataatctagggcagcccaaaaactttcaaactcaacaacccaaaatctcacttttttttcatgctcggtttcgttcgtcccacggcctctctctttcgttgtctcaccaccgtttctaaaccctttaaaccctaaacaatcatataaacatcttatatatagtcctaaccctaacataaccctaaatcaacaacttaaaattttaaaatatataatgtatatgtatgtatacctactgtacgtacacgtacgataataataattctaataataatattaataatatttaaaataataataacaataataataaactaataataataatactgatattaaatataataataataaactaaataatatgctataatatatttacctatattattattaatatacctataataatatacacaaataattaaatattcaattttctccaataatttaattatttat

SEQ ID NO: 240796 - DNA, 830 bp, Cannabis indica
tttgtttcaatccatataagatttgcgaagacgacaaactcgccctaacttccccctagcaacaaacccaagagattcctccatatacacttgttcctcaagatatccatgaagaaaaacatttttaatatcaagttaatgcaacgaccaatgatgagtagctgccatggaaatgaacaatcgaatagatatgagtttagcaacaggagaaaaagtatcacagtccactccataggtttgagtataacccctagcaacaagacgagcctttaagcaagtaattgttctatcttgattgaatttaaccataaatgcccatttgcaccctatggcctgttttcctgaatggaaattagcgccaagtctcaagtactatttgaaactaagccattcatctcttctatcattgcagcaaaccaaccaagatgagacattgcttcacgaacagttttacgaatagtgatagaattaagggaagcaataaaagagcaagaagaagagaagaaataattataagaaacaaaagaaaaaataggatatgtacattggcgtttacctttacgtagtccaatgagaaaatcatctttgagttctagatttaatgacgaggatgcaagtgcagggcatgaaacggaaggtgatgtgtacactataggaggcctaagaagtgatggaggtggcgaaggtgtaggcattgactatgattgaggcaggtgaaggaacaagagactcgttagaacatatatccagcgcataagatgtgaccgaatgtaccaacaaattatcatttttcccctgacgagtagcagtaggtgaagatgaaaataagg

SEQ ID NO: 240797 - DNA, 2100 bp, Cannabis indica
aacaattttaattttaatgacaaagtggcattgaattatatatatttcatctatttttatatatgtatggattatatataaatattagttttttttcctagatatattaatgttagtttgatacattattttttaacataataaaaaatgatatgttgatatttttattaaaatattaaatattatacaaagataataaataatataattatttttttttgagagaaatataattatttattattaaaaataaacttggtccacaatattttaagcggcaaattccaaaattttccctctatattttcaatttcctgccttaattagaacttattcagttgagccttctatcggcagtctctcttcttcttccccaaatcaacctctctgttagcttcctctcacaacctccgctcaccgactctccctattctcaccccgacagactaaacccaaccctaaactctgcttcacacccaacggtgacggtggcccaaccccaactcctacctctatcggcgactccaaccccatttgaaccctaaacgaaccaaagaggttcattttctcacagccatttcgcaccatctctggccctctaagatcaattttgcatccaggtcgtgtgctccgtctcttagccctgctgatgggagtacaataattgcttcttgttctgaaggtacttctttcttttatactttatgcatttttcatttggttgtttgaacctgtaacccttgttcgatgctttattgggtaatattgtcatggtgactggtggccgtaacagattgtgtgttggtgttattaagaactgagaaaaacataagggtacctttgagaccatccacgttaaggatgctcttggtcatgagttttctacccgtcttggaaatgtgtttaccattggtaagggaacaaagctctggatctctcttcccaagggcaagggtatcaagttgactatccttgaagaagctaagaagagactggaagcctaagctgctgctactgcttgattttaacggtagcaattacaaattattgtctttagattcaaacaatttcatcttaattttacagtttgtttttccttcactttctttcagttattttattaactctattttgtgcaaataatctaaacaatgtaatgttgattaattaaaattgaacatgagaaagtcttattaatagggtcgattgatgtagctgtagtcttattaatgatttgaacaatgtaatgtaatgttgatgtgcattgcaagacatttgttcgataaaatgtcagaaagggagcattttgatgataaagaaatacgagaaagcaaagaagcagagtaagatcaatgaaaactctcatgaagcaaccttccaaattacaagttttatttttattcgtttctatttttcttttctttcaatcaattattcaatattcattttatttacatcagataaatcaaattcagataagcaagttggcttgtcgtgagttgagcttggaatagtttgaaagttctaaggatgggagctaacattgtcgtcatgattcatgaagaatattaaaaggttgccattgagagttttatggcaatactttcgattaaataaacttcttatacttatgtgtaaatttctcttatttttttttttttcatttctacccgttcttgtgtgtgaactttattttatttggcaggccaacatcaagagagcttattgtgatgcctagcaatttctagtgaacttaattttattcttgtacacatgggaatttaagattagtaatgcgatggttggatggttgctgcttctagtaattattattcttatagacaaatttaaatatttgaacttaagatttcttttcgcataatgtggtgactcagtacactttctggactgtgtaggtacacatgcccatagcaggtccacactggtctttttgttcatccatggtgagccactgtttgttggcaaacattatcaggatacggcaatttcagacttgatcattgttgcccaatcagagacctcaacttggaaaagccatatatggtgagaaattttttcattcttttcgttggtttgcat

SEQ ID NO: 240798 - DNA, 1669 bp, Cannabis indica
gtaaatttatgcaaaactttcagttcttgaattatcacataaagggaaccaatatttgtatttgttaggaaagtcaggattctataattgtagatcatattcccagccatccacattattaggatcccaaaattaaagctgtaagaagtatcttctctgagaaattttaacaagtgaatcaaaaaatctaataacatgaacatgagttcatgattacttaagatttaggccgatctactattgatcatcattttgatataaattaggtctttatagtaaacggtaagtttgataaagtcaagtttattcatattggtccttgtcttctataatctctattatatacatcaccttcacttagatgtcatactatataagtaatccgaatcgagattacttgcaccgaataacgggtatcaatgaaccacactagtaaccattgattaaagattcttaaattttaatatgttgctgactgctttattcatggctaagtgatcttaattctccgtacaactacaagtcacaacctcatgtatgaataatttttttttgatatttatatatatataaattattcaatattaaaatattaataatttaacatttatgcttacataaaaatgtttaacttttattaattatcaaaatatctttacaagttttttagggtataaaccctaacacattgatgatgatctaatagtgaaattgactctggagtttggttgttaattttcagagcttaagtcgcgttgcgggacctactttgggtaagttatagcttaaattcgtaactcccttggggtgaaatttggatttgataattttagaattgcgacggaagtgtcagacatgacttgatatagcattgaaatagcttcaaaacacaatttgaaatcacgtcaattgtatcgatattgagtgagttatagtcgttttactgaaagaatgttcttggcctagtgcccaggttaacatccaatgcccaggttgacatatgacgtcaacttggacacgattcgtaacaccctactagtttaggcctgttatcgtgatttttatattaattgtgcaattcattgctaatcaatgtgtttgtcaaaaatcgtaattaattaaaactttacttaattaccctttacttaaaataaaatatactttataaaagtcgggatcccttatttcaaaagttacaatctaaatacaatatattaattacaaaacttttcgcctagtgactaatcaaaatgcaacctgctgtcccgaagatcaaacactccaggtctaacctcctcgatatatacaatcttcacttgcttgacctcactgctgttcagccttagctttgcccttacctatccatgataataattgtgagttaacactcagtatgaaaagtataatcatattataacataaacttgattataactaggcgcccatacacccaattataaccctatcccacgtcctacgcgtactgagtctagaacgttcacacgatagtactattgaccataatattagcctatactcggtactctagtcgtaccgatgtgatagcatcaatcaatatttaagccaaacatatattcattgatatccaatataatgttagccaaagatatgtttccaagagggggtgaattggaaattgaaactaatt

SEQ ID NO: 240799 - DNA, 1160 bp, Cannabis indica
taaataactataatgtatatgactagcgatgtttatcaaaccgtccacactgcacaaactgcttgcaccacaccacaccgcacaaaaaatgcaattttgaaattttttgcgatgcggttgcaatttgtattttcatcaaaccgcgcggtgcagtgtgatttacggttttgaatttaataatcgtggttcaaactgcactgtattatatattacaaaaatactaagttttacattatgatttgtcttttcacatatgagcaactcgtatgattacaaagtccaaatcatacaattaaatttaagggacatccatataaattattttcattttttatttttttttaattttttattcttaacatattattattgatatgtatgtatattatataatttttagaaacaattcaatataatgacttgattagtatatatgttatgactttaacagtttgataagatagtttttttcttgtttaattgttgaaactttattagactaatattttatttttatttataagtttgataatgatgatagtgtaaactggctaaatcacaacacatttttgcagtgtgattttcgcagttttaaagtcttacggtgcagttccaatttgagaaattgtaaaaatcgcatatgtattttgttttagaaaatagtctaaacctatcacccgcactgcgaacacccctatatatgactatgaaaaaattaaattgaaaatttttttgcatgtcaaaataaataaagaaagcattagtggaacccttttaagagatgaattgtggaaatatacaatattatatatgcacactataaatgttagggtgctactacagtacaccctttgaaaatagtatattgatgtattctctaactattttgatatctagaagaatattttagtctaatttttttatagtcgtgtacattataattatttaagacatcctacaaatttttgataaaaaaagttcttttttgtatttttacagaattttacatagaaactctaatttagcaatgcaacctaaattgcaacagaaaattatctagaaactcctattgcaactagcgttgcaaccactttagaaacacaaactgtaaatttgaaaaaaaaattaaaaaaataatatatggagtaattctcttattt

SEQ ID NO: 240800 - DNA, 1194 bp, Cannabis indica
ttgtgtgtttttacttttctgcactgtttgtttttctggtttattctggagttacagaattgtcttctgtagctacagaaaaactgtttcagcaccaatttcattattccatatttaattaaacatttaattaaataataaaactgagaatattaaaatacggaatttcacttcattcttcattttttttaataaaaaagtcatttgtataaaagtgaaaaggataaactctttttaataaaaaagtcacttgtatatgacaaatcggaaatttaagtctttaattggttgttttcttgtcttgtgctcactttttcatgtagtagtttacttaattttgtattattattttggtgtcttatcgtgtaattaagtaataattcttagagtgttattagagtgacaaaattatgatgaacatgtctttttcaatctaatgtacatagtttgactaacataatatatattatatattttttaattataattggttctcagtagttgtgtgttgtaagtttttactcattttgttgtgtaaccgattctatttaatttatgtctcagtgttgttgaaaaaaattccttattttatttgtatttttttaaaattataaccagtttatacgttattgtttgtttttttactcattttgttgtggaactggttatattttattttatgtatcaatatttttggaactgattctctcttatttttttttttaattataactgaattctgatttattatgtgttatttatttttagtcattttgttgggaactagttttattttaatttatgtctcatctaattttttatttagctatttcaaaatggctattgaataatttatttcaaaaactgaattttgatttaattaattttaggaattggtttttaatttagttattttggaaattgaattttgatttagttaattcaaagaaccagtttttgatttatttattttatttaactgatttttgtgggtaagtttttatcttggttattttatggaactaatttctttatcttaaatttttaactagttgattaatataaccagtttctttatcttatattttgggttactgtgtatttttatttatttatttgttatgaaactggttttgtttagatttatgtcttagtatatttaaaattgatcccccacttttttttttttttttt

SEQ ID NO: 240801 - DNA, 739 bp, Cannabis indica
cccaaaagagtagggcttataatattcacaaccatcacaccaaatgaggtggtgtaaggatggttcaagaacagatggagagagaggctgaccaacaaattattgaatttgatagatttgaaatctggaaaagacttcacataaacccgaaaggcgaggtggagggcccaactgtagaaatcattaaacggattgtaagtttaaagtttaatttcatttgtattaattgttatgcttcataatttatttctaactctatttgttttgtttataggacgaattacgcaagcaagtggaagagggttttgtacaagtggaaggtaaaaggaacgtgctgaccatggcgcttgggacagttgagcatggtgggcgagttcgagccatgggtttcggcgtcacctaaaccaagtatttcaacacaccacgccctaaaagggaaaacgccgatgggtcaaactaggcaccatctgatttggagagacgcgtgcgcgagacaaaggaaagcaacagaaaggtgcgggataaagtggatgagttccttcgtcttattagttcccagcatagcagcgttgcatctggttccggtgttggaggagcatttaatgagcaaccccatgctgaccttgcctccgatccagtagcacaaccaccgggtcctgtcaatgtctactctgtaccagatctcatagcacaaccatcgggtgctgccaatgtctttactccatctccactatatttt

SEQ ID NO: 240802 - DNA, 785 bp, Cannabis indica
aacacccgagcaggtataggtttttcctctggcttcgactcttctttctttacccgagggcaatctttcttgaaatgccccaccatgccgcattgaaagcatgtcttccggttgcactctcccagatgatgtttcttacaacgtgggcactcagggtaagagtaaccatggcgtccacctctaccttggttcccacaaaattgcttgctctgccccgaaccaccagatgccggggtaactttcctcttttgatcagtggtggaatcaccaccatccctaccatatgtaggagtaggaaaagtgggggttccaccaactttcggagtcacttggggctcctgaaggaattttaccgcaccctcagctcatagggccttttcaaccatttctaaatatgatgttgcttcgttagtagtgatcacaagatcatgtctaatcttcacattcgaactggccaagtacttttctttcttactaaaatctgttggcacaatacccacggcgagctcggccaatcgatcgaactttgtggtatacttagtgactaacatcccctgagtctgtactaactcagtgaactctttccgcttagcactgcggacgacttcattgtaatacttagcgttgaataactccctgaattcttcacaggtcataacagtgacatcccgggtgagggtcacgaattcccaccacactagggcatcttcttggaactgaaatgtggcgcagttcacccgatcattaccaaccacccccataaaattcagaattcgctcaatcac

SEQ ID NO: 240803 - DNA, 801 bp, Cannabis indica
agggacacacttgttgtggactttgatacaaatcttcttagtgctgctatctggccagttaaactctataccttcttaatattcgtggagtatttcatgtccaaaagggcttggatcttctcaaggtttgctttgattctctgggaatttactatgaagccaagaaacttgcctaagttatctccaaacgagcacttgagggggttgagcttcatcttgtattctcaaaggactttaaagcacttgtttaggtcttctatgtgcccccaacctttttggacttgactaatatgtcatctacaaagaactccatgttatggctgattaggtccttgaacattttaatgacgagatggtggtaggttgctgttgtattttattagcttgaagggcatcaccttgtagcaatataggcctacacctgttaggaaacttgtgtgttcctggtcaggtagatacatcttaatctgattgtaacctgaatatgcgtccattaagcttaggatctcgtgaccagctgtggtgtccacaagctggttgatccttggaagtaggagataatcctttggacaagccttgttgaggttaatgaaattaatgtacactccccacttgttgtgtggtttgggtaacaatacgggattggaaacccaaatatggtagaatgcttcaatgatgaagttatttgcacacaacttttcaatttcatccttcaatgctcgtgcttgatgcttgctctttatccaatagcctctatttttgttgtattggatggaagtttggatatatttagggcgtgag

SEQ ID NO: 240804 - DNA, 718 bp, Cannabis indica
gccttggacatatctaactttatcgctattttttttccatttccaaagcgacctttcctcttacaatgaagactttcaaagccgatgatagcattgtcttgtataattctaccaccaataaaggcactttggtttgctgaaactatggcatccaaacaagttttcattcggttagcaagacattttgagacaactttatataccacattacaaaggcttatcggacgatactaggtcatttttgttggctcagaaatctttggaatgaggcaaataagagtttcattaatggggctgcaatcggcattgttattaagaaaagacccggtagaccatcttttccgagggccttcaaagggtggatttggaacatggcagatttcacttcgtcactagtaaatggttccatcaacatgacattatcttctaggctcactcggtttggaacacaacgagaaagggtctcttgaatctcaacgccctcatttgctgaagaaaagagctttttgaagtaagaaatagcaatgttctctaagtcttcgtctttggtcttccattgttgatgttcgtcaaataggccctctattgtgtttttcttgcgtctattggaagctttataatgaaaaaacttggtgtttctatccccatgttttaaccaaagtgcccggcttcgttgcttccaataaatttctcttttttcctccacacaattaagatc

SEQ ID NO: 240805 - DNA, 997 bp, Cannabis indica
tctcttataatatgttgagatttagatcgttttaccggggagaaatgatccattttgatgattctgtgcccaagaaaatctgaccagaaagaacaaaatcaatacttcaacacttgaatcttttgacaactacaagtttaattactcaacttagaagaaaaacacaatgaaagcaaaacaatacagagtaaattaatgtgacattatagaatctggtcattgaggtcaaatatttcggatttgaacgagtttaagttgtttctcggagcaaatatttcaaccttcgagctgacatgacccggaggccaagtttattagtgttttttgtaatgaaacttacatgacacctccaccagctggaccgatcgctttgaatagagacattgcagccatggatatgccatttgccgctcctctttggctttgactctacaaacattcattgaaatgtaagaataaatacacaaaaaaattgcttccaaacatttaacaaagtaattaagacaagataattaccacagctcgattttgtagtagaaacaatcccgttgtaatgcacacctaatcgcgcattaaacaaatagcattgatcaaagttcgaaatagttttataattttatcttatcataaattggtacatcgccagaaacacaacacttacagatattacattctttaacatagccgcaagatcaactaatagtgtgagtgtgagtccggacaactttgctatgaaagggtaacttgatagcacaactatggtgatcaccttaatttcgaaagaaaaattcaaagaagttagaataaatttgataaaaaaacataagaaccaaaagtgtttttgtatagagatgaagaaatttcgagacatactgctccaattcgagccaagtgtacaggtccaaaactcctctcaattgaagggtacaaaaatagctgaaaaacaagcatagcaaaccctagaaaatgatagaacaatgattaatgttagtctttt

SEQ ID NO: 240806 - DNA, 931 bp, Cannabis indica
tttcataattgtaaacgatacatgcttttacaaaaacaatatttttcttttaattttaaagattttaaattatatatatatatcaaatacggtaattactttttgtaaaaaatatggtatatttgtcaatacttttatttttaaattttttaatcacatacgtaaaagtaaaatttttatttttaaaaatttatttttgaaaaacaaaaatgtattttataacttattttttttttaatttcaaaaacaaaaaataaaagtatattctgtaaatttcgttttcatttttatttattgattttatttaagttgttttgggtccgaggttgggaccgggggtgggtccaagtacagggccgaatcctaatttggttttcaaggtctaaattggggtcagatcagtctaaaatattgataaaaaatctgtttaattttaatttttttttttgaaaaagtggctttttttaaaaaaaatttagattcttaattaaaaaattaaaaagtaaaaacaattttatagaacatgattttgaaaagtgttttcatttttttaattttaaaaaccaaaaactaattaaaaaaatattaccaaacgtaccccatacttttacaaaaattacatttttttcccaatatatattatttattattatgtttgtttagcttatttcttgaaatattatcatgtttaattaattaaaaattcaaattttaaattatttatatgaataatatcataaataatcctttttggtttaaattctagttacgggccaatacaatacaaagtctgtccacaaaaaatgcaaaaaatgacatttattacaaaaaacgacacaaatggtgaaacgacagaaatatataaaatgttaaaacgacaccaattatataaacgacattaattacagaaaacgacacaaatggtgaaacg

SEQ ID NO: 240807 - DNA, 985 bp, Cannabis indica
ataaagactagagccaaaaggcaattaaccttcagaagagttcgaagtaaaacagtaattttataaaataattactcattcagcagacaatctataagagataactaatgagtattttgtcaaatttttgttttattactagatagattttttttgtcaaaaaaataattttttcttttttaccaaaagataactaatgagcattttttccaaaaattttgaagatagttagcatgtaatttgatgtaactactacgagaactttgtcatttaaactatatcacagtaactttatggaaaaaacttttttgaagagagaaacaaaaaactattcctcaaaataaaacgttacaaggtctaggcaacatcaaaattgcatggttgaaatgctgcactctaatctaatttggattagaatagctagaagctacataaaagggtaacctgtgaaggatactgcaccgtcatcatggacaacctgcagcacaaacataaactgattgtattaggaaaaggaaaacagccatttactggaacaacattttcaaaagctcagcctaagcatatcaaaaggagaaaaggaaaatgatatatttcgttcatggctttagtagcaaactagtagtagtaacaagccatcatcaatttaagaatgactcagagaatagttatctgcctaacattaccaaccaggatgaaggtaggaattttcaatctcacctcaacaaaacccatctgtggactcttacatcatagtttaaaatatatacgatgtgcaaaacacaatctaatacttgttcaatttcatgacaccaacaaatatacacaagaaactatgaaatcattatgaatcatatcaataaaatgaccaacaaacaaaacaagaaacaagcagagcagttaagatgatacaaaaacatcaacgctcttagattctaacaaaatgttagggcattaatatggggagaagggaaataaataactt

SEQ ID NO: 240808 - DNA, 2030 bp, Cannabis indica
gcaggttggaggaagagaagaaaacgaaagaggaggagcttggggtcgaggttgagaagcagaaatctgaggtggtgaggctcagggagaaggtaaatgccttagagacagctggtctccagatattttatgacttttggaaagctaataccaaggcaatctttgattacctaggcgcttcaacagacatgtttctcgactactgcgttgcacaggcgccctacgaggagcccgaggcgaccacttccacttcacctaccgatcagaatgttgaggctccttccacttagagtgacagttctcaggccccttcaaatccagctaacccatacaaatagcctgtaactcctgccgtctaagtgccttctttttattatccttttgttatatgttttttaggctaataggccttctcttaagacaaggtgaccgaccaagcggtctttaaacttggaatatatttttcattttttgaacaactagctgaccaggcagcctttaatcccaagtttgaatgcttttgttattcctaatgaatttcatccttttttttttataatcatcgtgcaattgtatttgttttgttttttaccaaatgctttgtacatgtataagtgccccccaagtgatcgagcagacttataactcttggtcacttattttttttttacaagtatgcttttttgtctgttcgggttttgggtacgacaaaaccttttatacgcactggatggtaaatttataacatgctaatgaactcgactcaattttaatttaaataaacatctttattcatttattggtcagaaatatgtctgttaccgtaataacttacatcaaagctattatgctgatctgatttgatctttagcttaacatgaataaaaaaaatggcaaaaaataaaaaatcgtactttcagaggtggtcatccgacctgagtacttgaaaattttatccgaacctttggacatggtccgcccaaaaggccattcagttaagagtaaatgttcttttatttcgtacttgatatggtcatccgacctggtacttttattggtagtattttcttaaatgtttcccgttccaataccttggtaccagaacaagttgcatcttttcatcatacttacccaatatgtatgcccctgattctagaacttcgaccacttgatatggtccttcctagtttggtatgagcacacctgccgtactgtctttggtgttcaaaaatactcttcgtaggaccatatctcccacaaggaatttctgtgctttcacttgtttgttaaaataccgagctactttttgctaatgtgctatcagttttaagtttactgctgtttgtttttcatcaatttcatcaagtgattctgcaaggagtacatgattggcctcttggctatatgttaatcttctgtgggacggcggctcgagttctacgggtagcatagcttcatatccatatgtcatggcgaatggagtctgtccggttggtgttttctcaattgtgcgatatgaccatagaacttcaagaagttcctccggccaatttcctttagcatcttcaagtttcttctttagggtctccttcaatgtcttgttgactgcttcaacttgaccattcgctaggggatgtgccactgcggagaaactttttatgatcccatggtttgcgcagaaatcagtgaatgattggctatcaaattgtttgccattacccgagactatcttgtacggtaattcgaatcggcaaaatatgtttttcacaatgaagtcttgcacttttttttacgtgatggattccagtggctcgacctccgtccacttggtaaagtaatcaacttgaaccactgcgtactccactctgcctttgcctttgggaaattgtttgatcaggtcgattccccaaatggcaaaaggctagggactttgcatctgagtcagtttgttgggccgtgcctgaggtatctttgaaaatctttggcatttatcacatttattaacgtaggccttgaaatcttcaatcatt

SEQ ID NO: 240809 - DNA, 733 bp, Cannabis indica
actatttttggggaccaaacagaactttcgaagggccataactgggacccagcacccaggttgtcatattatcaatctgggctataagtttccatattgatggttaacatggtaataccctaaatatcgctataacatgaaaatctagggttcccaaaactgccccaattggtaaactggatcttaaccggaaaattggtttctatacatgctgccagggggaaccggtcgaccgattccacagggcaatactaaaccggtcgaccatttcagtacatgaatcactaaacacttcataaacactcaattctaccctaactcagatcatactttccaaaatacctaaataaatcacaacaaacatctttcaaccaaaaacccaagccataactctcagaattcaattttatcattaaaggcccaagtttgagttttaaaactcaaaccttggttcaacatacttacaaccaccaaggacaagcacactcaactcctattaacgtaaaatcaatttagaaaataaacctcaagcaacttaaactcaaacagtaccataattacaagttcactacacaatagagctcaaaacctagaaaacaaaggcatagaggaactaggtctcttacctttgaattcacccaagagaaattctttaaagcttgctgaaatcctcaagaacaaggatgaaaagggttggatcctgctggttttctagagagagagaaagagagag

SEQ ID NO: 240810 - DNA, 1000 bp, Cannabis indica
atttatatttaaattaaatattttattatatttttattatttaatgttttttattttaaatatatttaatattaatttatattaaaaaataaatttaaaagtattagaggcggagtgctccgccgctaataatagtgtcagattagtgttagattacgaatctgacactattattagcggcggggtactgttagtccaccactaattattgttaatagtgaccctttattaccggcgaaacgcgcctctaaagatctttaccagcagatttctcaattattaccggcggacccatccgcctctaattcttatatttgttgtagtgggggtgcgttagaacaaaaattctccagccaaacgaaggctcgattgcttcaactcaaaggccaattttctcatgtgaacaaaggaaatctttccatatctgagtatgtggaaaaacttcagacaatagctgatgcgctcactgtggctagagctccagttcaagatcaagatcttgttctacaggttctaaatgggttaggtactgactttgactctgtggtctctgggatcacagcaagaagcgacaatctcaccatcgatgaagttcaagccttgttactcttgcatgaaagccgattggaacatcatcatcaaatgaacgatctgtctatgaaaatgcaagccaatcttgctttcggctcaggaaggtcaggtggtattcgaccatattcctcaaacagatctggataccaagaaacctcctctcaatatcaaggtcgtggaagaggatactctcgttttcccccaaacagactcatttgtcaagtatgcttaaaaagtggccatactgctcctgtttgccgttacagattcgacaagaattggcaagttcccaaactaggtgtcaacaatcctcgtgcttatctcactgaacaagactttgattatgatcctatggcctatgctactactatggttcaagattttgcagatgattgtcaacggtttgctg

SEQ ID NO: 240811 - DNA, 764 bp, Cannabis indica
tagaacagttgataagaaactaacctgaaattactaaaaaactatctttaactttggtttaggtaatggccaacacccaaacatggagtgtttttgcccttgttctggttcctccttctgtagttgtggacaatccctcttaaagtgccctaccaaaatttattggaaacaagtttcacggttacactctcccgaatgatgcttcttacattgagagcattctggaaaagtatagtgaccttcaaggccacactgacccgatttcctacgaaacctcttcttctgactcgaacccactgatttagttgcagtttttctccttggattaaccaaagaaccaatgtcacttccttcaagattgaaagcaaaagaaacaatatccttaccaacaaccaaagttcctcggggctcttgaaaaaactctgtaatactcgcgactcgatgggtatttatcacttctagattttacaacctaattgaaagtctgtgcgtcctatattttccaccagatggttccattcagttaccggcaataaactattctactggcaactctagaatcaatgcaaccggtacttggaagtccatattgcttcaatctcctaatctcctcctctaactgttaaatcttagcttccatctttatgaacctttgctccaaatctagcggagcctgcagtgaatttttgtaaccacctctgtaagttcttcctcagcttctaactcggccttgagaactaggggggatctgttgggttttatgc

SEQ ID NO: 240812 - DNA, 1473 bp, Cannabis indica
caaaactcttcggtttctgtgtaggcgtggccatcattggccgttggattgggcgactctaggcattccgattgccacgtgtcgtgatcccaattaatgagggatttgggtatttaaaccctctgattcgaatcaaaaatcccccattttccctcattttctttaactcccttaacttccttgttccctctctttcagagaatccatcaaaaacttccataaattgcccagattttcgcttttctttgtgggttttttctcgattctccagtgctgtcgagggcaatcgtgggaacagattaccagaactaaaggttagttttcaaaacccactgcattttgttttctatttgagaggaaacactatttttctgggttttaacatgtatgagagggtttaggaataaatgtttgtagggaatacgtatgaggctacgttttttaggtaagaaactgggtaatttcagaaaaaatgacctaaaattggcataaccgtgtactgtataaaaaatgcttgaataggcactgcttcatgttttgaatacacgcgggtattcggacgaacacttcgaatactcgcatgcttgcgagacttaattacttctgattgtcacttagatctttaggattttgtattctgtaaatctggttgtgagaacattggctaagtctttcaaatggtggatgtatcacagtattctaatggtcatatatgcggttatatgttccttgagatactgagatacacccagccatttgcgacatgcgctaatgttctaataagcgtactctttggctggtagatatcctcgaaacggtgggagtacctcagtaacttcagggtcatgcttgagaacgcatgccccttgagtcactgagtttctcccagccgtttttagaggtatatcgcttagctcaagatgcgtgacttattcgcaggttgcgattttagttggactccttgaaatggtgggtgtctcctcgtcacctcagggtcatgccgaaagatgcatgtcgctgtggttaccaggacactcctaaccattttttgggacgtttttctatttgcatatttagtattcgctctgctcgcatattgcgatagggtggtcagtattcgcgagaattcggaccattctctcaatggaattttatagtttatatgcgggtgagatcacttattttgttttttcacacattcaccatgctgaaaagatcttctatctttctgatgagcgacctgtcggatagtcagctgcttggctcggggggcaatgcgtttgacggtgacgaggaccagagggaagatagctttatcccgacttcgatctcagaagaggagatcgcacctactgtaggtatagaattaggtccgatgtcttccgcagacatcgagagaatggtgcaggagctcgctgaaccaggggcaattgagatttgagacaacgagtctacggtgtcagcacgcgatta

SEQ ID NO: 240813 - DNA, 1367 bp, Cannabis indica
ataaaatagattacattgaaatggagttttatttaatgcataaaacccaacagtatattatgtgttgtaacatttatttaatctctttgttgatcattgtattatattgcaatagaattgtaacgtcttgattttcttccattgtaataatatctctaacaattttgaatgtggaatcccgacttataaaattttatgtgtatatctatatatggttataattggttttatatggttaaagtttaaaacaagaagttttcaagtttgagtgttatatattttaactttatattttaaataattatattgtaataatagagttgtattgtcttgattttctttcattgtaataatatatctaacagttttaaatgcggaatcccggcttataaaattttatgtgtgtatttatatatggttataattggttttatatggttaaacattgaaataagaagttttcaagtttgagtgttacatattttaactttatattttaaacaattatattgtaataatagagttataatgtcttgattttcttccattgtaataatatctctaacagttttaaatgcggaatcccggcttataaaattttacatgtatatctatatatggttaaagtctaaaacatgaagttttcaagtttgagggttacatattttaactttatattttaaacaattatattgtaataatagaatgtaatgttttcattttcttccattgtataatatctctaacagttttaaatgcggaatcccaacttataaaattttatgtgtatatctatatatggttataattttattataattacaacatcatcactacaaatttttgaaacaattcgaataatttaaaacgccgaaaataaatttaaaattttttgaacacgagtattaggctggaatattaaaattttaattttcggtactgtaaattattcaaaatttttcaaaatttacatggatgatattgtaaccataatgaatatcgctataaaaaaatatttcggcatgtaacttcaggcgtgaagattgactaaaagattgtaagaggatgttataattggaaatcttaaaaaaaatagagaagtgctaattacaaactctcagttaaactccactattaaaatcacatactggaattttttttttcaattttttcgtagtggtattctttatagttacaatatcatcactataaatttttgaaaaattctaaatagtttacaactccgaaaacagagtttataatattctagtctatcacccgtgttcaaaaaatttcaaatctattttcaacattgtaaactattcaaaaaaaatttaaaatttacaaggatgatattgtaactataa

SEQ ID NO: 240814 - DNA, 1755 bp, Cannabis indica
atactggtaaactttgccaattccctggaaaggacataatacttatcaaaggtgtaagcataactatcgctgattatcatgctagtctaaatccagtgaactgacaaatcagggaactaaactttcgaacatataatgaagattatattccactgtgctgacaacactataatcattaacaaatacatatgttctggacttaacagaatttataatcatgatataaatcatgtgaaccatgcaacataaaacgttatttcttagcatttttaataagtaaatatgattatattaaaatgagttttatttagggcacaaaatccaacaacatgctcttgaatctcgctgtccgaaacctcgagataaataagcttgaccgataacttcttcctttgagcggtggttttcctttacttcttgggaggaaccacctcgtccaccgccaagctctcgaactcatggctgatcacaaactgattaccctttcctgcacattacagcacttgtgagccaagcccaacaagacagtataaataatagcaaaataattataataataattacactttatacattacgccattgtgtatatactatgacactacacttagtatcacattattcaatatataatgatgccattataatgaatgtctatattgcatagacccacgtgttacactcacacgtctattacatctatatagtgtatacccacgtgttacgctcacacgtctattaatgtctatatagtatagactcacgtgttaagtgcacacatctattaacgtgtatatagtatagacccacttattacactcacacgtctattaatgtctatagagcatagactcacgtgttacgcccacacgtctagtttatatttaaggccttactagggtttttgtctcggttatagttaccgagtttaatctgattatgtcttactcacataaccctactcaaatatacataatccatacattatgctcttacggtgatttatcatgatgatgtttattaggtctaacctagttatgtcttatacacataactcttgacatgtatacatatattcaacaccttcaatatatactcatacatatgaagtttttagggtaataatcctaacttgaaaagccaattctttactcatacagtagataatagtatgctcaaaataatgcatattcagggtaataaccttaattcgcaatatatatatatatatatctttagggtggtaaccctaattcacgacaacataactacttaagataatatccctaattcacaacataaacacttatggtaatgaccctacttcatgacacatacttttttagagtaataacctgaattcgtgctttcatttgattgaccatattatagattaattccacattattactttcatattctcatatatcttagggtaataaccctagaccacattattacaaaacaagataataaccctaatctcgatttttcactaaagcacagtataatatccaacatgagcgccacagaacttaactctatgtgctcactactgtcttacctggtaatccaagtatgtggagattaaaaaaccccggctgtttctgagcaagtagcggtaatcctagtcacacattcaagggattttgcaaataggattaatcccaaaattcaatttcacatcatcatataatttgcattccaattatagataaacatatagagcccgaaacgagctttccaacaatataa

SEQ ID NO: 240815 - DNA, 1325 bp, Cannabis indica
gctgagagaaaacatcagcatctattgaatgttgcccgtgcgttattttttcaagctaatatgcccataaaattttggtccgaatgcataatgactgctactttcttgataaatcgcactcccactcccttgcttaagaacaagactccatatgagctgctatttggaaataaaccagattactctcatttaaagaattttggttgtcttgtgtttgcttccaccctcactgctcatagaactaaatttgctccaagagccaagccttgtgttttcttaggctatcctcaaggtgtaaaaggatataaactctatgatttaaatagcaaacaaatttttatttctagaaatgtctatttccatgaacacatttacccctttaaaactcttaatactgagcataatggtgttgatcctttttttaacatggtttttccttctactatgatatctaacacacctgtaagtgattttcctacagatattaactcaaatagcagcaccactaacataccacaggaacaaatggaaacatcgcatactgctgaacaacacacaactgacagcaacaattcctatcctacagcaagtcaatcaccattgaacagaactactagattgcatagtactgaacaacacacagcagacagcaatgatacccatcctgaagcaaatgaaccatcactgagaagaacaactaggcagaccaaactccccacatacttaagagattatgactgcaattccatcttgcataatcaaccttctacacctcatcctcttagtaagtttatttcctatgataaactttcaaatactcataaatcttttatcttggctgtcacagctctctttgaaccacgcaattacaagcaagccagccaaatcaaagtgtggaatcaagctatgcaaactgagttatatgctcttttgaagaacaaaacatggacttatgtcaaactcccaccaaacaaaagggctataggatgccgttgggtctacaagattaagttcaatagtgatggatccgttgaaaggtgcaaagcaagattagttgctcaaggtttttctcaacaagaaggtttagatttttttgacactttttcaccagtcgccaagatggtaactttcaagctgttacttgccatatcagccattcaaaattggcacacactacaactcgacatcaataacgcttttcttaacggagatctcaacgaagaagtctacatggtcatcccacctggtctatctctctccaacaatgacagtaatgaatccaaccttgtctgtaaattaaacaaatccatttacggtttaaaaca

SEQ ID NO: 240816 - DNA, 556 bp, Cannabis indica
ttcacaaaatttatgctcaaactaaatcagtcacaagctcaaaaattgtagaattaatgggcaattgtaaatgataaacacatcttatgggtaaggaagtaattccattcattacaaataaagaagatctgataaaacaatgtggcaggagcatttaatgcgtttcacttaaaggaagagacagaattggaaagacaaagcttgacaatcatagaaagcggagcataacttgagaaattagaagcaaagcctaaggaactcgagaaacataagcgagcaagaaaatcgtgcaaataggtgaggaagaatgaatctatgtggaccaatctgaacaaatgaaaggaagtgaactaacaatcattcccacctacaaataggaaaccacatcgttcaaaaggaaggaggattcttgcttacaccaagctaatcaaaattctgttagaatacatcttgaaaacattctaagctggtgaaactgaggaacaagagagtaataatagaaactaaggggaaattgtataaattgatagaaaaatatatctcaactatgttaaac

SEQ ID NO: 240817 - DNA, 1161 bp, Cannabis indica
aatggttaaattgattgaatatggatgagataaagtcttgggtttgtgttcatattatgtaaatgtgatgtattcacaatgttcattcaacataattgtatttgttatatttaatttagtttttagatgaaatatttatgtcaaaaggagaattatgaatatatgtaaatatatacttcttttttttttttttaataaactaatggaattcaatgacagtttcttttcttgcatgatttttttattgtgtcatacatgcttcattctagttaagagaatataacctaataaataaatgaaaatgaatctcaattctgatttgttaattatcattaataaaaataaatatattgtttggaaaaataataaataaatatagatgtccaagaagaataggaaaattgcatttattttatattttaaaaaaagatatgagaaaaatcatgtattttcattttaggccatacatataattgtggctgaaaaggttgagtatatcctaggtgtagttgtattatttttgtcctacttcaacgaagggataattatatcatgaattttttgtgcccttcatgcatggtagagattttcttatatatatatatttttttataatttaagcgtttatatattacaattatgttttaactgggagtcaaactcagaacctccaagacacacactcacttacggtggttgagattttcttatattataaccttataattctactttaaaatgtgaaatcatttttaatagagaaatgcttaagagcataccatgcataatatcctatatcgttatatgaataaataatggtattgcataataattattggtttttgttgaaagactttaacttagttttgtttttctttttacaccaggtttctcatacttttaaatttttttttatttattttaaatgtattgtaaaatacttaatgaattttaattagtttctaaaatttaaaattaattaaaatagtttttaaaaaataattatgagttgacccaacaattagattgcgacacttgttatattagtcatcaactaacagatcttaacagaattacattttagaaattttgggtacttattaaaaaaactagtatcgaggcagtgcaatgcattgcactgatttttatatgcaaagaaga

SEQ ID NO: 240818 - DNA, 1713 bp, Cannabis indica
aatcatacaagctgcatcattatttgaaaataacttgcaattttattgataaatgaaattggcgacaatgccttattacatcactacgtagcggtatatgattaaaagtaaagcaaatctaaaagaaaagactaaacactaataaagattctaagtcgcttacgggcatacccttagcatgaatgtcactgaagagaaactgttattgataatatttgcggaggtgttggccgttccaatatcggggtactggtataaggttcatgttagagtcataccggtcgagcctatacgtgccggggggtacaacttctgtaatttcgtatggaccttcccaatttggcccaatactcctgctgttgggtctttagtgttggccaagactcgcgtagtactaaatctactaccttgaagcctctttccttaactttggaattaaagtatctggttactttttgttggtatgctgctaaccgtatttgtgaggcctccctacgattctccaatcggtccaacgattcacccattagttggtgattattgacttcgttgtacgtcattcgtcggtggggcggtgggtctagctcaaccggtatcatcgcatcatacccataagcaagggcgaagggggtatccccaatcgctattttttctgtcgtcctatacgaccacaaaactttaggtaattgttctagccagtttccttttgcctcttcgagttttcttcaaggtgtgcttgaaggtcttattcaccgcctctacttgcccgtttgactgggggtgcgaggtcaccgagaagctctttactatgccatgtttaatgcagaaatttgtgaacatgacactgtcaaattgggtaccgttgtcagataccaatttatagggtaatcgaaacctacatataatgttcttgaccacaaagtcaagcaccatcttggatgttatggttgctagtggatcggcttctgtccactttgtggaataatcggccgctactaccgcatattgcactcctcctttgcccttaggcaattgaccgatctagtctataccccaaatagcgaaaggccatggactctgcatttgtgttagctcgttgggtggagcccttggtatttttgcaaacttttgacatttttcacaccctcgaacatattccatggagtcttctatcatggttggctagaagaatccttgccttagtatcttcttggataagctttgccccccagcgtgaataccgcaaaaaccttcatggacttcttccattagtcgttgggcttggtcttgatgtacacctcgtagtaggggcattgagtaccctcgtcgatacatgacaccatcaatgattaggttccgggtggcccttcttctcattttctttgcctcgtttttgttggtaggaagtgtcccttgttctaagtaagcgactatgggggtcatccatgattgagtcgtatcgagtaggagtacttcttctttggtgcggatgcttggctcgggtaagtattctattggcacaaggctggctttatctatcttttcactcgttgccaatcttgccaaggcatcaacggtagcattctcttctcgtggtatttgttagatggtgtacttttccagttgggcaagcaattcttgtattttgctaaggtaggctatcatcttttctactctagccatgtactctcccaaaacttggtttacaaccag

SEQ ID NO: 240819 - DNA, 1054 bp, Cannabis indica
aggaaggcccatacctggtacttaccaattccatcaccttcgcactgttttattgccagcatgaatgataacgagacccctgcaaatcatgacgcgggaaaaaacttctctagtgaccctgaggcatgcttcgcaatgggaagtacggaacaaggggaatcatcgaagaggaaaacacgaggcaaaaacgtatcgtccattaattcaaggaagaaacagagctcaggagttaagacacgaagcaagagaaaggcagctttggaaactcaggaaattatgcaaggaaacttgggagatattcttgcaaactatgtggaaatcccaatcacttatgttcagaattttgggcaaggcgaggaggcggccgaaagcatgcccccacctccccaatgaggtgcttatcttggaactgcagagggcttcggcggccttctgcagaaaggactcttcggagtctaattcgagacacagatgcggatatcatctttctcttggaaactaaggtgagcgtggactttatggttaatgtagctaacagactgggatttctaaatgtttgttgcatacctgcttcgggattggctggggggttatgtattgcgtggagaagaatacaagttactgtaatggagactttgaatttggggtttaaagttaatgttttgtctatgattggatgtgagtcgtggatcttattctgcatatatggtcctccttatggagccttaaagcaacctttctgggatcagatgctagaaaaggttcaggaatgcactttgccttgggccttgatgggagatttaaatatcattctggaggctaaagagaagataggaggaagaccctttcagtccaacgagggaaacattttgacggaatttttactaaactctggtgggattgatctgggatttgttgggcctccagctacttggcagaatgctaggaatacgacccaacatatccggaaatgtcttgatagagcgattgccgattctcattggtgtgttcagtttcctaatgcatcggtctgtcattttcctatatatggatc

SEQ ID NO: 240820 - DNA, 1513 bp, Cannabis indica
aaaaaaagttaaaaactgcaccacccgcaccgcgaacacccctacctcggggccctggggctccaagcacccagcacccaagttgacaatctgtcagtctaggcaccttccatgtatctgatcggagatcaaacttttgcatcttcttcgtcttcatcaaaaattggaaaatatgtcatttcagagaagaaacaattatgtttgggtgacaaaaatagggcccagggcccaggttgacacttggggctagctagcctagtgaccaggttgacattttgtcaacctgggccattttaattggagtttttcaagaacacttctgagaatcttctttgttttcaagagatattaagattaaactattttcggggaccaaaccgaatttctaaaaagccaaaagggggacccaacgcccaggttgacacctggagctagccctagcgcctaggttggcatattctcaacctggcctatttccaatcaagttcagtagaaagtcttctaggcatttttttgtcatcagaaataataaagattcaagcaaacttgggaagaaaattacgatttgagctcttggaaacagggcctaacgtccaagttgaactagtgctaggcctagtgaccaggttgacaatcagccagggatgctgccttgctcaaatgccaaatctgatgcgaccattgaatctagaatggttaaaaacgaggtaggaaacctcatccataagttcagaagccttggaagtatgaaaaacgaaatctcaagagctcaggagtaagtaccctgcgcccaggttgacaaatggcgtggtgtgctgggttttgcttatttgaatttgacactattttgatcgtccgtttagttttttacaatgacaaagatccatgaagtcagagaagtcaaattcataaatttttatttctcatttccagctcacctagaaatgaagagtttgtagtctctcatttccgtaaaatagcaacatctctaaaaaatggtgaccaactttgccagaacacaaaaactgactaagtaatatcaaaatatcatttaggcatctcaaagtacatccttgggatgtttttacacttacccagcatccaagttaacgtcgtaagtcaacctggacgttgggatgtcaacctaggtgctggatgtcaacctgggccttaggtcatgaactaccttcagtaaaatagccataactcactcaattttgatttgattgatgcaattcaacttgcgtttaaagctaatttaatgctctatcaagtcatgcctcacactccagatgtaattgtgaagctatcatcatcaaatttcaccccaagggagttacaaaaataagctccaagttacccgtagcaggacccgcatggctctgaaaaatagtcatcaccactagaagctaattttcaccattagatcatcatcaatggtcaaaaacatcttattgtatttttccctatttttatgggcctcctcacttaggagagctcctttagctcattt

SEQ ID NO: 240821 - DNA, 1118 bp, Cannabis indica
gtgacacatgtatcatattttataatctgggtgaatgcttctgtaacaccctaacaattagacatgttacggcaactaattataaaaccctaatcccctaaatcgggattactagaaagataagagcggaatatttaaactgtaatctaaatcaaaatgaaaataaaacttgtaataactttaaactttacaatcaaatgtgacatgtttcgggatcccaaaaatctttacaaaatattacaagtcttttcattagccggcctaagcggcaaaattagagttacaaaaaaatacattgctggtagaccccaaccacatgtacaagcatcgccaagctttcgcactcatggctgatcagagacagatttaccctttcctgcacagtagagcagcgtgagccaagcccagcaaaacagtaaatattatctggtattataattaacatatcacatatacaataatgacattcgtaattgtctatttaacatagactcgcgtgtttcgctcacacgtccatttatgtctacatggcatagacccacgtgttacgctcacaagtctagatacaataaggccttagaacggttcatcccgattctggttcccgagtccaacctaattatgccttcaacgcataacctacatctcaatatatatatatatcacataattaatggtgccaccgcactatttgtctagtatatagacctccgtgttacactcacacgcctgtatatgtctatgtggtatagacccacgtgttacgttcacacatttatttataataagggcttagccaatgacaatgagtcttaatcgtaagcgataattgatataatatatataatatgataagataaatagataaataataaacacagagtttttaaagaggtttggccccgagcagttcgataatagcctactccccttgattcgtattgacttaagaacaaagaatgcattgattcttctcttagagctcttacaacaatatctctgagtatactctcttagatgatttttgttaggttttttgccctaaataaaaccaatttcaatataatcagatttacttattaataaagatcaaaaataacattttatgttgcatggtt

SEQ ID NO: 240822 - DNA, 1024 bp, Cannabis indica
tttcaatccatcccacttatttttcagctgggctctagtgtaatctctttcagttgcttttttcatatttgtaatcaagttttgatatccaattttatctaaataagtagtaggacgatgcccatcatcaacctctttgatacagaattccaagaaaaaattcacactctcagaattccatattgctttacctcgtggtactgctacatcacttttagtacaaatatttttttctttctccatctaattaaattaaaataataagttttatcaaaaaactaaaaagtataataatgagtcataaagctaaagactaatccaacacgaaaaatacataataactatgatgaaagcatcatcatcatcctaatttacttgggtacctaaaaattttctcataaataaggaacaattttatcataaataaagattgcattaagatgcaacaaccataatgtattgatgactaattactaataactcaagcaaccacagggaggaggagacaaaagaggtaaattagggtctaacaaaattaaattgaaataaatgtcttaatcctaaaaagttgatgactacactgtagataaaggtgttgcatattagaagaaaaataatttaaaaagcacattcccattaaattttttcgccttataagtgaggaaccactgtcaggggtacccaactatgttagagaggcagcacaagttttgctaaagagaggagagaatagcaaaaacaaacaaagaaaggaaccggacccttgcaactgaaaacatcatgtgctcatcaattcccaagaccagtactagtaagtagtaaatagacttctaatactttctaatagtttctgggtctccgataggttcttattgtaaatatgcagtaatgcctccctttcttgaaagtaactattatagtaagacctatatatatggtggtgaagtatatagtaaaagttgtcgtaattgaataaatgaaattgagttttttagtggtaatatactacatattgattattttt

SEQ ID NO: 240823 - DNA, 1794 bp, Cannabis indica
atgtctcttcaagaaaagacctgactataatatcctgaaacctttggttgttgttgttttccacacatgaggccatataatcaacataaaatggaactgagatctcaactttgcttgtttttgggttattcaactcaccacaaagggtacttatgtgaacaccctgatgggagaatcatcatttctcggcatgtttccttcaatgaaacaaattttccagcccaacctgagtatccagcagctgacaccgagcaggtacatgcttctcattcatctccttcatttacttttcacacttctaatggctctcaatctaatcctaatatttcatctaatgtgcatgctaccactgctccaccaacccgagttctctccaatccaacacctgtcctacacacggttgacaccctcccacaaaccagaaatatcaacaccagttccaccactatcccaccacatataccaactccaccaaccattcaaccaatagaaaccacaaatgactatcccctgccacctataccaatcacaaataaccaaaccatgccacctgctatatccactcaaccttctacacaggtgttggaaccatgcaatgccaccaatgtccctccctcaccatctaccacaaatattaggactcatcctatgaaaaccagaagtcaaaatgggataactaaaccaaaatcatacttagccactaaatttcctcttcctgaagatctcattccctctgagccaaagaatactgctgctgcaatcaaaagcccccaatggttcaaaacaatgcaagatgaatatgctgcattaaaaagagcaggtacctggtctcttgttccttacaaaccaggcatgccgattatcagcaataaatggctgcacaaagttaaactcaatgctgatggcagcctagatcgactcaaatctagacttgtagcaagaggttttttacaaacacccggcattgactatgaagagacattttcaccagttgtaaaaccagctactgtcagaataatactcacacttgctgtctctctcaactggtctgtcaagcaattggacattagcaatgcatttctaaatgggacattacaggaaactgtttttatgacacaaccagaaggctttgttgaccccaacaaacctaatcatgtatgccttttgcataaggctctctacggtctcaaacaggctcctcgagcatggaaccaaactctcaaagacactcttacaaagtggggttttcaagtctcaaaatctgacaactcactcttcatatatggctcgggtactcaactgattattttgctagtatatgttgatgacttccttgttacaggaccaaatgacagtcatattaccaaattcatcacccaactacatcagtccttcaagctcaaagatcttggaaatgttcactattttttgggtgttgagattttcagagacacaactgggatgtatctttctcaaaccaaatatataactgatcttcttgtaaagctaaagatggaaggagcaaagccatgtttgaatcccacaagtgccagtaccaagttgtccttaactgaaggagaaccatttgctgacacaactttatatagaagtacacttggtgcccttcaatatcttactcttacaagacctgatgttgcatacattatcaacaagctaagtcaattcattcatgctcccactacaattcactgggaagcatgtaaaagacttatgcgatatctcaagggaaccattactcacggcttacacatctcaccagcttcttcttcaaca

SEQ ID NO: 240824 - DNA, 746 bp, Cannabis indica
gcctcttcttccctctacattctttgagatcatcagatcttcagaccaaattggttatctttggcatcgtaacacccaaacgggcaccaccagtagatgtagcaccccttgaaacgtcgatttctctctctgctattctcggtcagacctatgcccaatcgtctaccaccacagttcttctcttcttcctcaatgtctttgcaggtcaatggtgcatgagggtttggagtaggccatccattttgcctcaccggactttgaagatcggcgagaagcaacgatctttagattctttttctgaggtcgttttcaccatcatcgttgtccttgctagaggaagccttcgatctaatcccacacaagacatctgcaaacctttgtcaaaattcaaaaaaaaaaaaaactaatgagttcggcacagagagagtttcagctggtaaaaattagggtttttttaattttattattttattttattttaaaaaaaattatttcaaaatgggttagtttttggtgtccaattgacagggctagagtgggggtggctagggttggctggggtcggctgagaatgctgacagtcgggatgtggttggggtcgtggtggtgctccggtcaaacattgtggctggttgaagaagatgaataagaaaacaaataaaaaggaaatatataataataatataaataaataaatttataattttaaatatatttttactttttattttattttaaattatttt

SEQ ID NO: 240825 - DNA, 1025 bp, Cannabis indica
attttactattcacagtataaaaaaaaataaatgggcctggacagtttaaaagttatttttgcagtgtggcagtatttttattaagattggagcaaaagtcagtatttttataagtttccctttaatatatacatgaaaaaaccccaaaagaaaagtgacaacaagtagccctatttctacgttttatttactcattattttgtttggacaaatgttatccattggatttcaaaagcaataattttttgttcaatccaatggttaatatgattcttgaggtttcacgtttcacatccttcaaaattatgtgagtgacttcaaaatttgccttaatcatatgcatgacaagttttttatgtggctacatgtagtgctgtaaatacgggtaaggccttttaatatgatacaaaattaatacgagcctcgaagtcaagagtatgattaggcacaaataaatgtggacttgggcataacacgacacgatgctacaaattagcacggtacgacacgaaaactatgtccttaagaatgacattatacgataaacatgaaagacacgacacataaacacgaatagactaatccaaaaagttcaacccacaacaagtccgaaaagcatagcttggcatattaaaaaaccttataatttattaataataataattataagatatgaatttattacttaaaataagataaaataataataaaacttaaatataatactggatattataattctataattaaaattattaaaatataaaaagttaaaattatatattaatttatttagagagtgtgatataaaaacttaagtatttataagtaaatatttaaattctcatgttaataatttttttatataattatttgtaaaatattattttaaaggtaaataaatataactaaaactttgaaatgtacatataatttagtaacggtaaaaaaatatattttaaaaaataaaacacaaatttaagcccgaatataaaaatagaatggtttgtttaagaaatacgga

SEQ ID NO: 240826 - DNA, 1167 bp, Cannabis indica
agaggcaagagtggcttggttttaaaattgattttgaaaaagcttacgatcgggtggagtgggacttcttagacctagtctcgtgtaggaagggattcggggaaacatggaggaaatggatcaaaggttgtatctcttctacctcattctcagtttttgtcaacggcacaccaaggggaaagtttgccgggtcacgaggactccgacaaggtgatccactgtctccttttctttttatcctggtggcggatgtgttagggaggatgatgaataaggcagttagttcaggcaatgtttctggatttctggtagggaaggaaagagtccatgtcagccaccttcaattcgcagatgatgcattattctttgtcgataacgagcagtcgttatactagttgttgcggttagtagaagcattttgcgctgtatctggactgaaggtaaatatgagtaaaagtcaactgttaggaatatgtacagatgaaagtatcgttgcaaggtttgcaagtagaatcagatgcgaagtgggaagatggccacttctatatttaggtcttcctttggggggttcacctagaaaatggagcttctgggaaccagtactgaacaagtgtgctaaaagactagatggacggaaatgtgcattcttatcgaaagggggtaggttgacgctgattcagtcagttctatcatctctcccattatacttcctatccctatttaaagcacctaagtcagtaattagaacattggagaaaatgatgagagacttcttttgggaaggcagcgaatctacaggtggggaccacttagtggctcgggaggatgtttgcaggcctcgggatgaaggaggtctaggaattgggagattggagttaagaaacaaaagtctgcttatgaagtggttgtggagatttccttcagagcaaaattcgctgtggcacagggtggtggtaagcagatacggtagagctgataatttctaggattctaagaatggaagtcgtttgtctcccaaaggcccgtggatggatatctcagatctatatgatgagtatttgggcttggtacaattcaaaattggaagaggagataggattcgattttgggaagacatttggattgatgattctcctttgattactgtattccctgacttagcagtaa

SEQ ID NO: 240827 - DNA, 1189 bp, Cannabis indica
tttttttttctttctcttctctctctatttatctttttatattttttattttccaattctctttctctctctctctttttctatttttttacactaatttttttatctttatataataagtgtatattttattttattattttatataagtgtatatttttatgtaattttttctaacactttttcactctctcacaaaaattttattttattatttaaaaaaaatacaaacacttattatatttttttttctctctttcacattttcatactattcacactcaaactattacatgctatttttccttaattaatcacattttattaaaaagtcttaattattttcttttaacatttactaaaatatgattattttactttcacacttcgtctcatatttttttaacactatttctctatcttacaaaaaaattaagaacacgcctcctatatctttctcttttttgcatgattaataaaagtagtattttttagatgttttgtagtttattcggagttgatttatgaatgatttgcatgttataacaaggttgatgtcttgttatttttctattaatttatagttattttattgttattttaatgttgttgtttaggtgtgttaattcgaaaatcatttattggtgacgtgaacatcaatatttgacgcatggcaagaaagatgacatctcgaagttgagtagtcccgagccatagcagtcgaccagggaggggtccctagcccagcccccaggttgactttaagaactccataatggaagttcggacttcaataaatcctttccaacttaatagatttcagcattttgtaccatgaagatatggagcaaccaaatctagaccccatgagttgaaaagacacgaaccaacacctcgaaggtcaacctgggcacctaaggtttcactcaacgcctaggttgacatccttaactagaatttcagttttcaaaaccgtcttagtataaatgggtcaaactttgtattggaaaatgaactagatataccacaaacatatttgtagtattagaatcagatttagagaacgttaattttttagcacccggagcacccagcgcttgggcacccagcacccaaattgacaatttatcaatttgggccacttccaagtatcagatcaaaaatttgactcgttcatcttgctcgtatt

SEQ ID NO: 240828 - DNA, 1367 bp, Cannabis indica
cagctagaggacttagagttgaaatattggggccaaaaatctttgtttaagatagttggtcaactaggaaagcctataatggttgatgaggttactagggaaagggataagctactttttcctagaatccttattgaagtttcaatggagcaagagtttcctgacctgctctattttgaaaatgaatatggagccgatgtttctgtggtggtcaattacgagtggaagcctattctttgcaaacattgcgaaggaatgggacacaatacggatgaatgtaggaagaaggagacaaagaagcaagaatgggtggtgaaagggaagaagaaacaagagaatgaagcagatgggaaagatgcagaggggctccagccggtggtgaagggttggaggcctaaaatttagagtgataatgctgaagcatccacttcgaatcagtacactgtgttacagaatggggaagatcataaaatgcaggagatagaggttcaggtggcagatgggagaagtgaagagataataactagaggagggggagagcctcctctaaacaatggataagatactaagttggaacgtccggggaatcaacaaccaacacaagcaaatagatgttaagcaatttattgctaaaaataatgtcggtttggttggtctcctcgagacgagagtaaaggcttcaaatcttggagccttatacgttagaatgttttccaattggtgtttacagcaaataatgcttggcataaagggggaagaattttagtaacatggaatccattgagttacatagtagacatactattttgctcaagccaaattgttcatctttcggttacaaccatggataataggaataagttccttgtttcttttatttatggttttaacaaggaagaggataggagaattcttcggaaataattagagggattgagaacaaatgaaccatgggtagtgcttggtgattttaatgatattcttgagaatgggagagaattgggaagagagctcattttaatccgacaacattccgtgaatgtacaataaggtgccaattagaggatgttaaatatggagggagtttttttacttggaataatagacaacaaggagatgataggatatattccaagatagatagagttatggcaaatgctagttggttgaatcagtaccctgttgctgaagcaattttctcgcaggagggcctctttgatcacacccccgcaatattgacgatttatccttcacttccaagtggtaggaaactgttcaaatattttcgaatgtggtcaagttgccctcaatatcagaagctagttgctgaaagttggaatgtatcagtggtgggaactaaaatgtat

SEQ ID NO: 240829 - DNA, 991 bp, Cannabis indica
tctttgatatctcttctttgtacatgccaataattagtttcaagctttttaagcttttagtaactttttgattctcatgttagattgtaatctttttggtattttgatccacatgacagttttagaatgtataatgtgtgacttcccgataaaaaaaattatttttcccttcattgtgattcttcactctttgagtcataatgaacatgaggcacatattcgagttttaaacaaacacacatttggattcaaaactaaccttggctggccttggaggtcttgcttaaaacccggccaatcctaggacttaatcatgggagttggctagctctagggtttcaccctataaagctagccagttcgtgcctgggtttggtgaccttggccagttcttggctgagtcatgggaccctagacgaccctttcaaggcttgggaaccctggctggcctgggccttaattccaagtgggtggccaactttctgtcatcttttaacttcggcaagaatcctgtcatggccctgtaggcaaatacaaatttagtctcatacttggttcccttagaaaatctgtattaaacttaataatgagtctattatagtcgaatgttcaacttaagactcaacatttgtccaagttgttacacttgagacttgtacttcgctgatacccagccttgtataatgacagggtttggcaagtacccttgggtacggttgtctagagttttgtctatggcttggaacctacaaggaactctacctcttggcttagaacctgctaggatctctgccttagccttagcccagtacatggttcctataggaactttgtcgggttcttatctatctatacggttcttgcagggccttggccttatgcatgtgaaccaattttttattcatatctgccttaaggctttcatgtcttgcttttggcctatggcactctactttcgaactctactattatttagccttaaagcctttta

SEQ ID NO: 240830 - DNA, 823 bp, Cannabis indica
tctagatcttggaattgtaccaacacccgaacctggaaccatttcaaagacctagacccgaacctgaaccctgacttacgctaggacctgcgacctaggacccgtgacttaggaccttgaccagaatctagacccgtaccagaacccacacccagacccagacctagaacaagaccaagacccaaacccaaacacagattgaaacctagaccaagacccaaacccaaacccagacccgggcccgaactcgtaacataactgagactcgaacccaggactcggacttggatcgagatcaggactgggacccagacccagactagcatcgagacctgaacctaaactgggacaagtactcggactgggacccgggagaaggatcgggaccaggacttgagaaccgaaccgtgacctataccccgacaaggtcaagacctaagacaaggactagtacggaacatggatcgggagctgcactcggactgggaacctaacccagaccgggacctaggaccctaacctgaatcagggacatggaccaatgactgaggacccaagacccaaaccttgacttgagacctgaaccaggacacaagacatgagctagaactggacttagatcttgatttagacccgagacccagtacccaagacgcgaggcttggacccgacccacagtcggtgtctaaatctgggaattggacatggacccggacccagacccggaccagaactcaaactagactcgacatgtggttggtgtcttgatttgggaccaagactcggacttaaaccaaaagacgaacctagacccagaccagga

SEQ ID NO: 240831 - DNA, 1979 bp, Cannabis indica
gtttggggttttgcagttttggcatttggggttttggggtttggggaattgttatgggaatgggctggggaatgggaatgggaataggaataaaattggaatgggaatgggcatgggtcgaggaatgggaatggggattgaaaataggaataggaatgggccaaggaatgggaatgggacagggaatgggaatgggaacgagaatggaaatgggaatgggtcgaggaatgggaatgggctggggaatggaaatgggaatgtgaatgggaatatgaatgggaatgggaatacgaatgggaatgggccagggaataggaatgggaatgcgaatgcatataagaatgggaatgggaatatgaatgggaatgggaatacgaatgggaatgggaatgggaatgcaaatgggaatgggtcggggaatggaaatggcaatgctaatgggaatgggattgggaatggggatgggaatgggaattggaatggaaataggaatcggaatgggccagggaatgggaatgggagtgggaatgtgaatgtgaataggaatgagaatgggaatgggaatggttatagaaattggaatgggctatggaatgggaatgggaataggaatgcgaatgcaaatgggaatgggattgggattgggaatgggaataagagtgggaatgggccaggaatgggaatggaaataagagtgggccggggaatggcaataggaatgggaatgcgaaggcaatggaaatgggaattgcaatggcaatgggaatggggatggggatggggatgggaatcggaatgggaaagggaatgggaataggaataagaatcagaatgggaatgggaatgggagtgggaatgggccagagaatgggaattggtgttggggttgcggtttagggtttacgatttacggttgctgttggggttgcggtttagggattagaggttagggtttggggtacggttggggctagggctacgggtaagggtttgggatcaggggttcaggggtcagggttcaaagttcacgattcagggtttagggtttaggggaatgggaatgagaattgaataaaataaaatttataatgcataaaaaatttgataaaaatcattaaatttttttttctagttacatgataattgtcgttccttcaatttcgaaaaagaatattcattccaccaaaatggttgaaagggcattctattggaatgacattctaatactttaaaaagaaactaaacaaaagaatggaatgaaatttttttcttttccattccatttcattacctctaaccaaatgccacctaagggtctatgttcacgggttagggttcagggtgttggggtttgtggtttgggttctagcgtttaggatttagggtttagtgttttacggtttaagggtttgagggtttaggggtgtggggtttagggttcaggtttcaggtttcagggttcaggggaatgggaataggaatgaaaataatataaaatttaaaatgcataaaaaattgataaaaatcattaattttttctaatgttacattggaatggtcgttccttctgttatacccaaaatcctgctggcaatttagaggatgacacgagttaaccttagagaatacgaatcaacgaatgtaatggcagatactaatttctaccctaagaattgaatatgaagatttctttcgcgtgaaattttgtaaaaatggccccttaattaaaaaattgaaaatatccttcttaaaagggtaaattttaacaagttctttctttactcttacactcgttagtgttctattaaaatctcaccctacacatctcaaaatttgtcaaaatttatgaggatgaagccaaaaattttgtgcatatattttctaatggacacgtctcgagataaagtagttttcatgcactaacaataattttaatcgaaacagtgaaatgtggcccggacccatagtagaatattttt

SEQ ID NO: 240832 - DNA, 706 bp, Cannabis indica
ttatttgtgcagaaggtctatctactttgataaggaggtttgaaagtaatggttacattaaaggatgtaaagttgctaatggtgctccaactatctctcacatgtttttttgccgacgatagttacatatactgtcgacccacggagaatgaagctgatcatgtgcttcagttactgcacttatttgagttggcttctggtcaacaagtcaatagagccaaatcgaccatcttctttagtgctaatactccattggaccttcgagacaagctttgtgcaagattgggaatggctcctactagtgatcaaagtttttatttggggttgccttgtatactgggtagaagtaagaaatctatccaaaatttccttcaagagaaaatggaaaaaataattttaagttgggagagcagatttctttctagagcgggtcgtgagatattacttaaaacggttgctcaagctataccgtcttatgctatgtcggtttttctccttcctattgaaacttgtactttgcttgaaagattgatgtctaaatattggtgggggatctcttcccaacaatctagaggaattacatggatgaaatggagtcgcttaagtcgtcacaaaagtagtgggggtcttgggtttcgtaaccttagagactacaacttatcactacttggaaaacaagcttggcgcttgcttcaggaggatgatt

SEQ ID NO: 240833 - DNA, 1831 bp, Cannabis indica
caagttgaagcactcaacaagacactcaaggacaacctaaagaagaaacttgaagatgctaaaggaaactggctagaggaacttcctgaagtattatggtcataccgtacaaccgagaaaacaacgaccagacagactccatttaccatgacatatggatattaagctatgctgcccgtagaactcgaactgccatcccacatgagattaacatatagccatgaagccaatcatgtactcctcgcagaatcacttgatgaagttgagaaaagaactgcaacaaacttaaaactgatagcccatcagcaaaaagtagctcagtattttaacaaacaagtgagagcacaaaaattctttatgggagatatggtcctaatgagagtatttttgaacaccaaagacagtacaacaggtttgctcgaaccaaactgggaagggccatatcagttggtcgaagttctagagtcgggaacatacaaattgggtaagtgtgacgaaaagatgcagcttgttgtagtaccaaggtattggaacggggaacacttgagaaaatactaccattaaaagtaccaggtcggatgaccttttcaagtatgaaataaaaagaacatttgctcttaagtgaatggccttctaggcggaccacgctcaaaggttcggataaaattatcaagtactcaggtcgaatgacctcctttgcaagtataatttttattttctgcaatttgttttgtttatgctaagctaaagatcaaaccagatcaacataatagctttgatgtaagttactatggtaacaaacatatttccgaccaataaatgaataaagatgtttatttaaattcaaattgagtcgagttcatttgcatgttaccaatttaccatccagtgcatacagaaggtatgctcatacccgaaacctagaacagagaaaaaagcatacttgtgaaaaaacaagtgaccaagagtcaaaagtctgcacggtcacttggggggcacctatacctgcacaaagcatttcgtaaaaaacaaaataaaaacaaaataaaaacaaacatattgcacgatcattataaacaagggatgaaattcattgaataataaaaacattcaaagaccgcttgagcggtcaccttgcttaaaagaaggcttactggccgaataataaacacattagcctcagccttgagctcctcctccatggcctttttctcatcctccaacctgcaaagaagggtccggagaccctctctttcgtcttgaagacttgtaacgtccagagacaaagaatcaatatcagcttcaagttgctcggttgatggcgtctcctgcagttccttggtcggctcgacaacttttgtctcggccgctagaagtttcttattgacctctcccagctctatccgcacagctccaagttgaacccgcgcatcctcggcacctttttggccaagtccacttctattcgtattgtgttagaaatggcaaggttcttagcagtagtcgacttagctcgggaataggcgtaggccatcttcaaaccagtctttgcggaaaaaggcattaaaatccaaactagtcaaagaggaataaaggaaaaatgtttgaaaagacttaccctcgaaagttctttcaagacttctcccataacaagctccaaagacaagtcattatccgccccagccaactgttcgttcacctctgggaccaaccagctcacatagtggttgagcatgtctctgcctcttttggtctccgtatgcaatattaaaggtgcggtaggagccttgacttgttccgtcccgcttctgatcagctcggatccaccctt

SEQ ID NO: 240834 - DNA, 830 bp, Cannabis indica
ccacgagtctttttttatttattgagagttcttatgcagagactgttcttggtgaatctctctctctcttctttactccctttgattccgtaatggatcgatcgacccctttttccttttgttcaggggtatttatagagttttgtaaggatcactagaaagggatcacttgtcttttaagtgtcagcctcttaggggcaccaattcctagtttatataaaataggacatacatgacctatgtcgtaggtatcgtaaggattaggtgagagtaatctttatccttccttgattgatgtgattcttcataatggagtcgtcactagactcgttgattatcatgtaatcgtcgtaaaagaggattacgccatctgtcaaatccttctatggggattctgatacgtttcccccatgccgcattaaatgtgaaatgactgttcgaacgagctcttcttctcccggagatgtgttgttatatttctagctcccgaagagtaaaggcatgctttatgctcctctccaagggctcactctttgagatgtactttcctatccattcatgactcaaccaatttttgtcggtgaggtgttcttgaaatccacgttgcacacgcagccgctgccacgtattttgggaaaaatccgaggcagcaaccacattttactctacatattattaaattaaataatataacaattgttgggttttgtgccataaataaaacccatttcaatataatcagatttactagttaataaagatcaaaaatcgcattctatgttgcatggttaacatgatttacttcgtgattatatttaatgtataaattc

SEQ ID NO: 240835 - DNA, 1137 bp, Cannabis indica
ctttaacaatcatagcaaacacccgtgaaagattaggaatgggttcattgaaaagaatttgagcacgaacagatgcataggactcattcaagctagtaaaaaactgcaagacttggttttgattgtaatattccaaaaacaatttcatggcaccacaggtgcaagtggtgtttggttggagttctcttagcttatcccagatggatttgagcatggtaaagtatgaggtgacggactgatcaccttgttggagacgtgttaattgtgtttgaagctgaaagattcgaggtccactgccctcattgaatctttcttgcaaatcatgccacaaatctgtggcaagatcaaagtacataatactttgtgctatcacagacgaaacagaatttacaagccaagacatgaccttgttattgcaacgaatccaagaatggagaaggggattacaattagcaggtccaagaagatagccgtcaatgaacacggacttgttcttttgcagtgagggccattgtaatttcttttttccaagactagtaattagctctattaagaatggtggaaaccaagaccaagccaggatgatccgcggtgctgaggaagaaaggacttgagacatcttcgtgagccaatctgtcgactagtgatgaacgacgagtatgaacagggggttgaggaatgtcagcaactggatcaggggacgaatgagctggtgcaagattgtcttgttcattctagattcgtgttcttggattgggattttgtcgaggtgcaatagaggtatctacgaatggtggtgcataagcagtatcgggattggactctgattggtggttctcagacgtggatgggggaatgccatcttgagaacgagtggtgggtctcacaattgaagaagtggcttgaatttctgatgatgccatatgagtgaaaacagagtaggagagaaaagctttgaaaatgctttattattctgaatagtatctgataattacaatataaatgaggaagataatatatatagatagggacttgagttagttagagaaataactaactgggctgctacaacagaaaaataacagacccaaggttggttcaagatgatgctaattaggtgtagtatcgtaatatatc

SEQ ID NO: 240836 - DNA, 861 bp, Cannabis indica
tataaaaatgtatagactactccacagccaaatgatattaaaattaagccacatacatcttatcatacaccttaccctatctgactttttaaccacactttcacattctcatatagcatcagagaaaaataaaaaatatatgatcaaaatttacttatcgattcaaaaagaactaaaagagacactagtgattcaagagctaaaagagtcatttgtaatagagttgtccaatttgtgagaaaaataattactattttgagggaagataaaattgataacgtgtacaaatttaataccttatataaaatacatataggatactacactcattgcccttaattttaagattaaactacatatattttactatacaccttaccctctcctactttcctaaccacacttccacattcttaatattgtgaatatttaattatgtctttgactgttggtgttgatggcctcccaagtatatgacttcaggtggtgttatttaggcaacttgtgctatttgcctacttcataaaacttttttcaagtacacacttcttgttatttcaagtaaacaatctaatggcagctctaatattctcagtgcgtttacaatgaataaacttaaaggcatggacactattacaaagagacaatatataattcaacaaagagagccaggctaacccattggcagtccatttccaccctaacatcaacaaaaccaagatgataacagagaagaagaccattagggagataagacagagagttacaaattgggattaagaaatcagataagatggacttatctctatagtgactatgtatcttattcaccacaacttgaccatctgtctctacttcaag

SEQ ID NO: 240837 - DNA, 1626 bp, Cannabis indica
tgtataatataatgtataagataatattgtataccaccactgataaatacccgaataggcgatattcattaggccaagagcaccccctcgagtaaaagcttccacagctagttggccaaaatgaggatcccaaatcgttcaaaatgcaggccgctgtcccgaagatcgaacactccatgtctaaccatccgatatgtacaatcttcattcgctcgcactcactgctgttcagccttagctttgtccttacctacacatgcaatcagtaactgtgagtctttactcagtaagaaaagcataatcataacataaatataaaccaaattacaattaagcgtccatacacccaatcataaccatatccctgcatcccacgcgaaactgagtctagaacgttcgtatgatagtactattgaccataatatcaacctatacttggtaccctagtcgtaccgatgtgatagcgttaatcagtacttaagccaaacatacattcattgatatccatataactctaaatatactgatattgctatttcaatgtaatctagcggacaaatattaacatgcacactaaacatgtattcacatatgcatatcattatactagtcttacctcgattccaaattcaaatgtgccggtaaacttgagtggaactgctactcgatgatttacaggccccaaagtcacaatattcgtaaaactgataagtgatactctaaattacttttcagggactttaaactcaaaagtaaatgtttccccattgatatctagcaagacgaagtcttaagcatcgaggaaacacgagaaaaactacgaaatgggaaacctgcctaaaaaacggtaggccgtctttttgggtcttgcactaggaaaaacggtagcttgccgtttttcactgtagaaaaacaaaagacccccaaatcgaaccaaaactaccctaaaactttcaataagctccagaacacctatacatgtcataatgaattatttctaagcaataaaatctccaaaaaacacagtaattcaaaaatcaccataactcaaacttggtcaacaccacaatcaaacatcaaatttacatcaaataagcatagacaacttcaagttgacctcaaaaatttatactaaagttcatccaacctaaaactactacatcaataaattgcatgtcaaagctaactaaaacatactataatcaaagaaatactagggtaagagcttaccataggatcacattgtcggaattattttaccaggatctagatttactaccatgtatgttatttaacatcctaattatgaatttctaaaacaatgtaaataaacacatataaagtttcagaaaccttacagtgggtgcagcagaatattaatggctccttccactcagatctctaactcttgtatcctgtctgtagcagggtatcaccaaatctgagcccgaatgtccttctcttgattctggactcttcacagccttacacactatgattgagataccacttgatgtatgtgggcactcactctatcactcaaggtatgaaaatatgaagagaggaagagaagggttggtttgaaaataggtatagaatatatatggctcaactttttcctgaagg

SEQ ID NO: 240838 - DNA, 1718 bp, Cannabis indica
cccgatacgtcgccaggaagaaacccacaatgggttcaatctatgccataaccaggcaatttcatatcactgacgcccgtacctacgcctaatatgtcgtcaggaatattgcatcacctaatcaggtgagctcgtaccgattcttgttattcatcatatgtcactgatgcccatacctacgcccggtacaccgccaagaaaattgcatcacctaattaggtgagctcgtacctacgctcggtactcatcatatatcactgacgcccgtacttacgcccagtacgtcaccaagaaaattatatcacctaattaggtgagcccatgtatcacatgcataataacatcacattatcaatactcaaccaatcagtcttttcattatgtaacaatattaattatattacgtacaacgtactatgcagtacaatatacttttcttacctttaattcaggttcatacatgtcggccaacccaagtggagaactatccccgataatctcggccctatgtcacaacaacggtaaactaataagtgtttatcccaaaacactgcttaatattcacataagacaatttagggttttctatcaaaccctacagtataaatacactaaaataaaacttatattttggctcttaaacatataccgtattgtagagctcgttgcaagcttcgaaacggtatatagaatgcataaaaaagacacccgagtcaaaagttatgacaaaaatacgatttctaattttgtaggaatttctaaaaactatgaaactcgaaaaatctcaatttttgcactcactaaaacactaccaaaacttatccaaatcactccaaacttcacagggcacatatataccataaatattatcattgctatacaacagaaattaaaatcgaacccttaaatgaaaaacaccactaacctttggactaagctttaaaaagttccaaacttgatttttaactcaaaatcacctcaaattcaacaagtaaacatcgatactagtcccataagtaccaaagaataattttacgaagtcaaaatttaactattctaattcacgaaactcctatataaaaccaatcgtttttagcttaaaacataattaaaccataccttaagctttccctctttaaggatttgctataccgctactaccggagcttaaatcgctaagtttttggttaaaaatcgaagaaaatgaatataaaaaataaatattttattagaacggtggatagagagctcatacgtttatgttttagttttaagaatattacatatatatgtatactgataagtatacgtttttatatatatatattaataataatattaataatattattaataaaattttattattgatagttatcttatcatttcttagccactaagaaatttatatttttaaggtatttggttaactctgagtactctaaaatactctgatatttctatttatagggattgctctcatgctttatgatggaaatgctgaaattgctaagtgttgatatgttgttcggattatccattgctcgtctgggagggccttgtccatgcagatatatgtggtgttctactcggaacatcttttccagaccagtatggagaatcaattccacgtgtcaccagcatgtgatgccacgtcagagtgtgaaaattgggataacatataccttatcgctgattattatgtcagtctaaatcca

SEQ ID NO: 240839 - DNA, 903 bp, Cannabis indica
gtattactatttttttattgttaagtgtcaatttagcccgttaagtgacaactcagaaacttgtagtgacatatttctttagcttatttaatacgtgatctaataatgtgtcaccacgtgtttttgaattgacacttcaatcaaaaaatagtacaattgtaacaattaacaaaatcataagataagatatttttgctacctttttttattagggtcacatgtgtaacaattgtaaatattaaaagaatttcgccataaatatcccgtaaaataaaaatgctatggtggaaatatgttcaaaggaaaaaaatcaaggtttagacaaattatttcttgttatagtattggtatttagacatctttagagcacttagaaataagatataatagactcaacaaaatagttatgggtgattcctacaatgcatcctcttaaaaaatgtgtaatggtgcacctctatttgtttcggtatgcagaaaattttttagtctaattgtttttataatcacatacattataattatttgagatattctataaaattttgagaaattcagaataatttataaaatagaaaataatatttaaacagtctatttcatatacgtataaaataaaaatcatgatttgtttaatttaattttttaaaatcttgcaagttgtcttatataattacaacttgtattatcaaaaaaaataaataaaaattttttctctcgaaaccaatattagtgtattaatatattccttttagaaaatacatagaattttctaatagttataatagcttaaaatatgatgttggtgattctacaatacatccccttaaaatagatgtactgatgcaccctctatttatttcggcatccagagaaaatatttagtttaatattttttttata

SEQ ID NO: 240840 - DNA, 942 bp, Cannabis indica
atattatgtctcataaaaaaataaaaaaattgtgtttttttatggacgtggatcttcattcaaccaaataatgtcacgtcatgatttatggttcgattagttggtcgtataagagtagtaatatattaaataataaataatactatattttgataaaataatatattgtattaattattacaatccaaatttttaataaaatgtaagttgtattatttaatacataacaactagtctgtattagtttgtattataatatttacaaagaatttggagtcaatctcaatctttgaattagatctagggactgagaccgaacctgaccctagaccacgaacttgaatcccgaactcaaaacctgaacccgaccctaaagtcagaccacagacctagacactagactccaaatctgaacccaaacctagatttggacccaatacaacgtaccaaatgagcatttagtccaatttattattaatacatgccctatgtgaaagggagaataacaacgctattacattattaattaacgtgataaattatcgttcagatgttgtgattaaaaagtttttagctaaagatattagttaaaaaattataatttgttgtagctaaatgtgtttttagatataatatttattgtgactaaaaataaattaataacaacttgtatttaaatactatattttaattacaaataactttttattgtaattaaaaattatatttaattatttaaaatttatgttgtgattaaaaacttatcggtaactattttttcgtttgtttaagaagtttcattttcagtagtagtgtgtatattgctttttttttcttctctttctttaagggtagtgtgtagtgttgtattgctttggaatactaaaaagaatctttttttttttcttttttttttaggataattgtaatttgctgatgaaa

SEQ ID NO: 240841 - DNA, 852 bp, Cannabis indica
gtaaaattaattccaacagtacgttcatttgattttgccattttcagaggttctagagcaaatgctgatgtctcgtttttttaccttattaatgtaccttttctgcgcactgtgttgtttcctgcgaggtgcgaccctccaaaaataactaaaatatgctcgccctctactgggggaggttgtatccttagattatttgggttattggactgattatgttcgtttcattgtgtcctcacatactgtcttgaatatcctcacgagattaggttctcgatttcatttttcaacggacaacaatcttcagttgtatacccaatgtctctatggatacgacaatacttacttgtatctcgcttattcctcgcatgtctcattgggtctggtctgcgaaatgcaacccgattttcattggtgaggtagatatttttccgagtcacatttaattcagtattcactgaataaataggaacatactttttatgtttcttttgcttttttttatccttggatgagtctcttgattcatcattccttttagtattcgaaccatttagattttccactttagtagtcacaatgctcactgttgctatactagtgctaggtttatatcccgagttggactttaacagattgatttcattctgtgcctcttcttttcacacaaaaatctgtgctctttcgttgaactcgttgatatttcttacaggatgtccttgcaaataatcccataattctccccttgtagttgacaagtcagttataattctagcctaaagggctgttaatcgaatgttgtcattcaagtttctaactttggctgcaaccatactaaaatgactcaagtac

SEQ ID NO: 240842 - DNA, 1424 bp, Cannabis indica
ttcggacagtatcgaatggggcatgatagaagcgttggcacgttgacttggtgttggcatcttgccacacatgctaccttggtcacgagtgacaaggtgagcgtcagtgttgggatttgtcttaccatggtgggaacctatggacagtgcgagtatcttggctagagagcctcgatgcatggatgcactcatggatgcttgcgagcatgactcggcgggagttgttcaagagacggaagtgtgcacgaggcacacggtcgcgcgaaaaatgagcccattgttactcggatggttggaaggctgaccttggcttagagtaatcaaggtgccgcacgggtgttccgctgcctgaaaaggtgagcccgtgacagttggtatcagagccaagttcatctcagtgggaggtgaacctggctggcctatcctagagagaatgtaggggtgaggaaggatgctagaaacacaactaccacgtgcaattgtggagaggcgcaacaaaatgtttgaaactcgttggcataatacaagattgaggggatccatgatgtatgcttggtacactaggccaagtttgcctgagtgacatcgtaatccgcaggttgcgcttttgttgaaaaggaagcttgtcggcaggggtgtggaagtagtgcagggaccgtcagattcttgttagtcacgacagaggtcgagagttgatgaccgagatggttcaaattagggtagacatggaatgcttcagttgctacattgtgtgtcgagaggaatgcacatggagaccaagggggcagatgccgcaatcgtcagaggatggttgtacttggaggtgttcgcatgcgaattttatttgatccatatggaagcgccgaggtagttgagtggaatgtgttggcttgtaaagttgccagagggcgtaagtcatacaaaggcatcgatagagatgcgaagttgtggaatgaatgcatcgaagaagccagtagggctgagaagaccgagcgcaagcattgagatggcgctagagtttatgtggaggccagagggtcgtgccattgagacttagttagtcatgtttgcctgcgaaggtcaagaagggtgctagagtttgcatgaaggccagagggctgcatcattggaacttagtacattgtgggagccagaagggcgtgatgcaagtgtgaatcagttggatgttgagcggacattgcatgcatatggaaatcgacaggggtgctatatgagatagttgactcgagagtcacatcctgcgggatgcacttttagatgacatggtgtgcatgaagagttggggcggtcaggcattcgcgtgtgggcatgttgtcgaggacgccaacagatgaagtgggggagagaccttcacggttcactcaaaagactagttattcattacaagcatcgagatgagtatc

SEQ ID NO: 240843 - DNA, 1045 bp, Cannabis indica
gaaagtcatagtagatccggcgtagatggtctgcatgggtgcttttaagatgtctccttcaatcataggcacatcctgttgcgagaataatgcgataattaaggcactgtgtaccagacctgctgttgtcttgatctcagagaaatggttgatgtttctcaagataacccagccaatgtcaaatgtcattctggcaatgatagcataaactatgacacaaccctcatagtctaatgatgaagtatgtgacgtcggcattattctggcgttgacaaaatatgtccaggctctggcttccgagttaagttgcgactggtagaggaacttttggtttgtgtttccttcaacctggaatcgagttccctcttgccccaactcttgtgtaatggcgtcatcagtgaggatctccttatttagttcgattcttctttcatcttgatcctctctcagtgtaggaaggctaaatgagttgtttatagcttccacagtgactgacacattcactccccgaacatagactgtgttgttgtcccctctgtatgggtaatttgcaacaaaatcacacactatattctgattagcatcccccacatgctctgcaacacataatctctgccattgcctttatgcaatctctcctctgatgagttcatacccctggtcccgctcaaaaggtgcatcttgaaattcaaaacccctatctcgaattacactccagtttatcaatttctcatatcgtttcgcagcttggtgattcacaaacctagtgaattgttgagaatgatcttcttgaagattaggagtatgtgatgatgaaacttgcatgttgcggttgggctcgggttttggttcttttagttgccataccaatcaactagcaaaaaatctaatttttggtggaaaaaaaattcggcagcacctcccctatattttcctctttccccaaactaattttcacagcagaaacttactcccaataatttctaccaatagaaataacaaatatcctgtaacaccctaactagcataggcgtattacgtgatt

SEQ ID NO: 240844 - DNA, 1688 bp, Cannabis indica
ataagggacatgataaagggcttagctggcccaaaatcatcagaccttgaactagataggtcaaggggctctccattcttggcatacattaatgcctttcccttgcctaagtttaagatgtcgacatggaagatgtatattgtaagaaaagatcctcttgcacacatcaagtaatttgagatgcaaacagatctccaaaaagcactggtgatgtgcgatgctagatcttttcagtgactctatcagaaacaacccagtaatacttcaagctggctccaagaagatccaattcttggaatgaattttccttagaattctacacataattctcgtcctcgaggcagaacatcacagctggaagaccttgtcaaggtgaaacaaagacaaggcgaacctttgaaggattatattcataggtttatggccaccaaggtcaaaggcctaacaaataacggccatactggggggcatccttccattgagtgacttctggaaagatatctagaggaccttaaccaacaatatgaaggagttccttgaacgagcagacagcttcataaaactggaggaagtcatcagacaagctcagatggagggcaagtcagcaataggtagtcttaggatgttgtacagcctcaagacttcccaaacatgcatgtcagtacaagcagtgccagccaaccctctagcatcaaaaataccaaaggcaaccacaataacaatagttctggccaaaatagtggcgaaaaaggaaagttcaacacttgccctacaccacgaaaccaaaaggagaaggaggagaagtacatgtgcttcaccctcctaactgataaactgcagacaatttacatggctacacaggctactgtcccatacaagaagcctcctcctatcagaaggagatgagcaagagggacatgtcaaagttttactaatttaacaatgatttcgaccacgacactaacgagtgtcaaaacttgaagagggagattgaattcttcataaagaaaaaaatccccacttgcatcattatgtgcagaacgaccaagctcaggcacaagctgcccagaatggagaccttatgccaccaccaatgccaggtcacttagaggtcataattggcagacgccatattgcaggcgagacaagcaatgccagaaatctccaacacgaacctagaagcgacatcttagccatcgaagaaagaggcttcaagcaactcaagcttggaaaaaccaccaacccccttaaaaagggagatgctgcccaggtcagcttcccacacaatgaccctctagtcattattgcacagatcgggaacatgatggttgctagattatgcatggtggataacggagcctcctccaacatccttttcaaatcaacttatgaaaagatggggctccaactaacaaacctaataccttgcacccaagtaatgtatggcttcttcggccaggcattgcaccaataagagtgttgatggcacaatttgtagtaattgacatgccatagcctccaatgtgatgataggtcggccaaccctatacgaactgaaggcgataacatctatctaccacttgtgcctaaagttcccaacaaggcatgtggtaggatgtttaaggggagaccaacagtctgctcgacattgttacaacctggctttatctaaagccaagaaagagaag

SEQ ID NO: 240845 - DNA, 886 bp, Cannabis indica
tttagcaagtaataaagatatgtaaaaatacaaaacaaacacgaatcttaaataatttctaaagtttctaacaaatcgatatcagtgtcttgtttaggcgagagtcaaagatatcactcattcaatagagttatcagctcatctaaaatagacactattttagcaaccttttattcaattgaaataagaatccaacgttgtctcgtttaggcgagagtcaatgccattctatttcatgagcttctaccattgtttcatacgttgtaagccctactcttagcagtcactataaggtggaccattgttaagaataaaagacttacaataatacttatctttcgagattctatgatattaaattgctaatgaataaacatctattagggatgaatctcattaaaacaagaactatgtagaactaataatggaggtcgaatatccttaaagctaaagctcattatttttaaaagaaattttattttcatttgatatctatttatcttaatattcatatatttattaattaaaattactaatttagataaatctaaatataaattttaatttaatatttataaattataccttagttagatctaaaaataaaaaatttattttccatccttattattaaatttcaataaatattatgaaaaatacttaatttaagttagtccaaaattaattaagattaattttcagcttaaatctaattttttataaatatatatatctaattaaattcgaaatctaatgtatttaaaaatgtattttcaaattacaccttaaaaataaaataaaataaatttagaaaaaattattctaatttatgttgataaaaaattaataaataaatgaattaagtttcaacataaatataattttc

SEQ ID NO: 240846 - DNA, 1247 bp, Cannabis indica
gtcaggaggtagtgacctttggttgtcccatcgagggtcttaaaaaatgacgactataattattacatttcatcctacctatggtgccacgtcacgaaactcttcggtttccgtgtaggcgtgcccacggttaaccgttggatgggatgaccttaggcattcctgttgccacgtgtcatgattccaattaatgtgggttatcagtatttaagctgcctgatatgaaatgattcccttacttttccctctaattttcattttcctcatttcatctaaaacttcaaagacccaaaaccttctcccatatttctgtctttcctttttgaatcttttgagtttttgaggcggttgaaaccaatctcaggaagaatcgtcaaatttcaaggttagttttcgaaactacttgcgaattttggtttccgattttgagagaaacactctgcatttcaaatttttgaggaatagaaaatgcatgttgttcatagggaatacacatagacccttatttttctgctagaactgggtaattatcagaaaaaatagatctgaaattttataatcgtgaattctaggaagaacactttgaatattcacgtctttttacttgctattttgaatactcgcgattattgagatgaacatcttgaatactcgcatgtacatttccttaggaattctggagatttggtcactccgacccattattaagaactttaggtttttctttatattctttgtgcatttttgtgcgggaacactggttgggtctttcaaatggtgggtgtgtcgctgtagcccaatgctcatgcgtgcgatcgcatgtcccttgagttactgcgaaacccccagccatttgcgacataaagccaatttttctctttccttgcgtaaccacgggtttcaactggtaggttttctcgaaacaatgaggagtttccgttagcccaatggttgtgcgggaagggtaggtcccttgggatacaggagactcctcagtagtttcttgaggtacacccagtaattttttgaggcactctactaactgcacatgtgcgatttacaacttgggaaggttggctggattttctcgaaatggtgggtgcatctcaatacttcaatacccatgtaaccgacatggtcattagcttattgagagacacccagccatttcttgagaggtcaaaccaactttccaaggaaatcttatattttttgtgcgtgtgaggtcacttgtattattctcgcac

SEQ ID NO: 240847 - DNA, 1050 bp, Cannabis indica
atgaataatatcacaaccttgttttttttggtcacacttttttttagtttttagtacttttatgtatgtttcttattcaatttgtcacgaatacaatgtcattattcttaaaaaaatcaaataaaataaaagcaacaattacaaatttgtgtgtcaactcttccactaagatttatgtaaattattgtcatgaaaatagggaaaatgttgagatacacctctttcaagtgctttcgccttttggtacataattatttaaaaccatttataaattttgaatttttttaaataaagtttaaataattatgtatcatgcgtataaaaaaaataatcaagtgtgaaataaaatatttactttattttcagcattgtaaattattttttaaaagaaatttactggtgacgctaaataactacaatgtacacattcattaaaaagaaataaactaaaacattatcctaaatatcaaatcaaataaagaggtctaccaaaacactattttaaaagaacataatactattcatcccttcagatgcatcccgacaaatcactcgggccagatggtatgacgctaggtttctatcaaaaattctagccagttgttggatcggatgttgtatctcaatttagagacttctttgatcaatgcacccttccttttggtttaaatcacactaatattgtgctcgtaccgaaaaagaagcagcccactgttatgagtgatttaagaccaatctcgctttgtaacgtgctctataaagtgatctctaaagtgctcgctaaccttttaaaatcagtattgtcccaagttattttggaaacccagtcgactttcattctcggttgcctaaactcataatatcatggtagcttttgaagtcatgcactaccttaaacgtaagcgtaaaaggagagatgtctatatggctttgaaacttgatttaagtaaagcatatgaccgtatagaatggagctttcttcgcgaaatgatgtcaagaatggggtttcatgctcgtttcataaatctgattcttgccacagtttctaca

SEQ ID NO: 240848 - DNA, 1177 bp, Cannabis indica
ggatttcaaaaggtccaatgaacctcgagctaagttttcctttcttaccaaagcgcttgatgcctttcataggtgatactcagagaaataccatgtctccgatctgataataattgtctcgtcgctttggatcagcataactcttctatctgctttgagccgcaagcattcgcgctttgattttatcaactgcttcacttgttctctgaacaacctcgggacccaagaactttctttcacccacttcatcccaatgaatatatgatctacatttccttctttataaaagctcataaggccatcccgattgttgcctgatagctgttattgtactaaaactcgatcaggggaaggtactttacccatgatccttcaaagtcaagcacacatgcccgtagcatgtcctctaagatttgaatagtcctctcagattgtccatccgtctgaggataaaatgtagtgctaaactttaactaagttcccatagctcgatgcagactcccccaaaatcttgatgtgaatttcggatctctatccgaaacaatggactttgggacaccatgaagacgaacaatttctctaacatataactcagcagactgatcaatggagaagttctttcgaacagggaaaaagtgcgctgactttgtaaacctgtccactatgacccatacaaagtcgaactgtcccgtggttctcggcaagcctaccacaaagtccatagcaatgtcttcccatttccactctggaatattcaatggctgcagcaaccctgcaggcctctgatgttcagctttcacttgctgacaagtaagacacttagcaacatactcagcgatatcattcttcatgcctggccaccagaacatggccttgaggtcttgatacatcttcgttgaccctggatgaattgagtaaggagtcgtatgagactcattcataatctctcttttaataccatcatccataggcacacaaacacgattcataaatcgtaacattcccttttcatccactataaagtcactagttttcccagctgaaaccctatctcgggatttcactaactctggatcttgcaactgtgcttctctgattcgctctaaaagagtagattgcagggtaatattagccaactgccccacaaccagctcaattttagctcgagtcatttcat

SEQ ID NO: 240849 - DNA, 920 bp, Cannabis indica
agtcgggcattcatttctttcttggtattgaggtgacaactaccccaacagatcttcatctgtttcaaactaaatatgtttgagatcttctccacaaagctgacatggctgaatccaaaccatccaatacccccatgattagtggactcaaactctcaacttttgggagtcttcctgttgataatcctcagcaatatagatccatagttcgagctttacaatctggttatcaccaaacttgaaatctcattcagtgtcaacaaagcatgtcaattcatggccaattctctccaagttcactgacttgctgtgaagagaatcctaagatacctaagtggcaccatggaccatggcattcatctcagaaaatcagaaacctatgagctcagtgcattttgtgatgcagattaggctagtgatccccatgacaggtgatctacttttgaatatgcaatcttttttggccccaacatcattgcatggcaatgcaaaaaacagcatactgtctctcgaagcaacactgaagctgagttttacagcctggctaacactgtcactgaactcacttggttacattctctattcactgagctacacatcacattaccaacttaccattggtgatcacacctgtactaagtttgaagggacatgttaggacagtttgttaaaatagttagttatgctagttgttaggttggtagttaattcggttaactacctaactgcctattgttgcacttgattcattgtacagttctttaataatgtgtatatatacttgtaaagttcaaaatcaataagagacttctttctttgttttcctttctctctatctttcttcttcttcttcatgcttgttttattcttcagcaactatgtttaataggttgaattcctctcacaatgattactatgtg

SEQ ID NO: 240850 - DNA, 812 bp, Cannabis indica
agatcatcattcaaagcatccgtaatggtagtaggcaaaagatcaaagatttcctgatcataaacggggttactagaagaataaatagtcttgaaattttccgagaagtaattaccaatatcaaaccgattgttgatccaatgaaccccatcatccgaaatcgctccaatccaatttcgtttccttctaacaaccgtggaggcgtgaaagaatcgagagttacgatcgccttcccggttccacagctccctagatttttggaaccagattttgctttggcgagcattaactccctcaatctctaagagaatatccgcttccagcttagaatttttggtggagggaactctttgttgaacttccaaaagagccttctcaagcaccttcagtttgtctttacaaaagccaaaatgatcacgattccactttgcaagacgtctccgagtattagcaatccgagccactaattggaagctcttaaccccgtggacaaccaaattccaagcctcccgaataacctctttacaagttgggtccctagtccaagcatccaggaatctaaaaggtttctgaaagctgtcttgatgaaagagcagatccaagaccaaaggcgcatgatccgaagcacggatcggcaaagctttgactccggccttggggaaccgaatcaaccaatcagtagagcccaccacacgatcaagcctctctttaacaagattcggaagttgtctcttattagaccacgtaaagaaatttccaacgcaccctatatccactccgccagaatgtaacaagaactcagagaacaatcg

SEQ ID NO: 240851 - DNA, 1060 bp, Cannabis indica
ttcatggtgtctttgagtgtcttgttgactacctcgacctgaccatttgtttgagggtgtgccactatggagaaactttttataattccatgtgtcacacaaaattagtaaacatctggctatcaaactgttttccattgtctgaaacaatcttgtgtggaagtctgaaccgacatatgatgtttttcaccatgaagtccaacactcttttagacatgatcgttgctaagggttccgtctctgtccactttgtgaaatcatccactgcaacaactgcatattgtaccccgcccttacttttgggcaactgtctgatcaggtctattccctatatagcaaaagaccaaggactttgcatctgtattagcttattgggcggtgcacgggggctctttgaaaatctcttgcatttatcacatttctttacataggcatttgaatcttccatcatggttggccagaaatatccttaccttagtattttctttgatagactttgtcctgttggatgattgccacaaaatccatcatgtacctcagacaagagtcgtgcgacctcttcttttgttacacatctaagtaatggcatggagaaacctcttctatacttcacgccttcaagtatgatatactgtgcaatttttctcatcatttttcaagtttcgttcttgtcgtttggacgttctccagtgttgagataagctcgcacaatttatgctgggctctttaaagaattgtattgggactaagttggccttatattttactgtgctgcttgcaagtcgtgccaaggcatcagcagttgtattttcttctcttggaatttgtctgaggatgtaacccttaaattgtgcgagcaggtcttgtatcttgcttagataggccatcattttttctcctcaagccacgtattcccctgaaacatgatttactaccaattgtgaatcactacacaattgtaccttccgagccagttttagccccgctatgagtgcttcatattctgcttcattattggaggctttcaacccaaatttgattgctccgtgtaggtattgcc

SEQ ID NO: 240852 - DNA, 530 bp, Cannabis indica
ggagtaagtttcttgcttgggctgaataccattataatactagccatcattctgctattggcatgacaccatttcaggctgtatatggtcgacttccaccatctatcccagcttacactaggggtaccaccaccattcaagctgtggaggaagatttattgtcacgagatgctcttctgcagcagttgaaagttaatctgcagcgtgctcaacacagaatgacacaacaagctaacaagaaacgcaaggatattgagtttcaacagggagatttagtgctggtcaagctccaaccgtatcgacaatcaacagttgcacaccgcctgaatagcaagctttgcagacgatactttggtccttttcccatccttgctcgtcgaggttcagcagcttatactctcgaacttcccccaagcagccgcatacatcctacttttcatgtgtctctcttgaaaccattctatggtagcaatccacctaaatgctatccattaccggagtcaagcgtagccaacaaaccgttgatggtt

SEQ ID NO: 240853 - DNA, 1346 bp, Cannabis indica
atggtttcatgttggtttatgttcttatgtgatgaatgtttgcgttgtacgataatccagccaacccaaggcccaaccctgcgcccacctctttctggtatcgaggaatttcctaaggctgggaaaaagatcttggcttcaggaaatgggatcttttgatgatgaggggaatgacgtctgtccagagatcaaggctctctacatgtagccggtctttcttaagctatgtgtagtcggtctttctccgagctacgtgtagatggtctttttcaagctatgtgcagacagtctttctcgagtttataggcttcccctctcatcctttgcttaggaagatgacttaatggtttgtccctagtggcattttcgtaaagataagtttgtaaccaattctaggtttttcttatcttaaatgccttgtactgttttcattcgaacttaatataattgtgttttcatgcatttttattcacagtgtaaacaactatattttaatcaaacgtatattacttctggatgtttccattgttcgtaatcttcctgtttaagtagttagtagtctacaaaacttttcgattttcgagaagttgtcaattctgcctcgttgtagcagtaataatctgccttaagcaaactttatatactttaatggttttatcactttgtatattttcaatctgctcatatgaataattatattatctatccattttctatgtataagtacttttaaccagacattgtgatgcctcgttttgtactttcctagcttgcgagaactgttagtattcaatcttatacgcgagttgtaacttttgatttttctttcccgtcggataggttataaatcaaaaattatagttgtttgatcccttcttcgtcaaaaaggcttgatcaaggtgttataacgattcgactcctttctcgtcaaaaaggtttattcaggaagttataacggttcgactccacttttgtcaaagaggtttagtcaagaacctttaaatttaaaaaaaaagtttaaatgacgggtttgcattatacaatgtatttccaaattaattccggttaatcatacataaatgccccttaagtaatttttaaagaacaaaactttgtaattacttaatataaatgattccctttattcataacttaagattagagtttacatcagtaatgcaagttacatcatttatttattggtagtagggtcgcaaatattctaagttccagtagttctttattagcgagccatcgagtcgacccaatttataaactccgactccaactactactttgatgacatatggaccctcacaattagggttgaacactcctgcagatgc

SEQ ID NO: 240854 - DNA, 870 bp, Cannabis indica
gccaagggccgactcaacacgaagaagatatacaataacaaactgcagcaagctatttttgagatcagcagcagtatttggagcagtgtcatagtgcccaaacacaagttcgttttctggcaggctgctaatgaccaacttctaacccgggataaatttgctcgcttcaaaattgtcctagacagcattgtttgtccggtttgtggggctgaagctgagtccaacagccaccttttctttgattgctggctatctcagcaggttctctctcggatttgtggttggcttgggacaaccaattggccaagtgactttcaagagtgacaaagatggttagtgaagatcaagaaggataaatggcagcgagtttacatcacagttatggcagcaacaatctacaactcgtggagcaatagaaacaattgtatatttaacaattactcgagcttggtttggaagattgtacaggatattaaagacaatgttttttatagattacaagtagcaaaaaaagggagactaaaaaatgttgaaaagagatatatagaaagtttatactgtaagtagatttggggctttgctgccttgtttgcttaggttgtaattgtttgtgattaatgaagatttttccttcttgatcaaaaaaaaaaaattatataattatttgtaaaatattattcaaaagttatataaatgtaactaaagctttaaaatatacatataatttagtaattgtaaaatatatacaaagtaaaagtacgaatttaagcccaaatatgaaaacaagctagcctttttaagaaatatgggccaacacgagtaaagcacgacacgaatccggatacaatacgaaaatatcgagcctacggg

SEQ ID NO: 240855 - DNA, 796 bp, Cannabis indica
tcgtgactttgatagtgcaagcgcgcgccagcggctcggcggcttgtcttctgacggcggcgaaggtgacggctacggatgctgtggaaaagggaattgttgattcggcgcacgatagcgcggagtcgacggttgtggcggcggttggtttggcggagaagttggtggagaggaaatgggatggtgacgtgtatgctcagattaggatggaactgttctctgaggtcttgggtgagattcgcctaagcaacagtgcatccaggctatgattattgggctgggccgcctctcgcaaaggcccatatctctatctaaaatctgtatctataaaattattaataaatatattaataagggtaaatatgtgagatattactcaaaattttatatgtttaagctgtataaatttaatgtttatttttaaagttataagtattaatacttatacggttaaaaataaatattaaatttacgtggcttgtaaacataataaaattttaaatacttattttactatttaccttattaataaaatactaaagtcatccctactagtacgactcagtcctcacatcaggggacttgacttgttgctattcaggttctgtttttataaatatgtgtgtttgtgggttttgttaagataagtttcgtgtgctgtttttttggtgattaagaatgagaagtgtgctaattataaatctttattataatttctaaattagtttttttaaacagaatttttgatatttcatacttaaaaaatttcaaacttatttttataaaaattaatatt

SEQ ID NO: 240856 - DNA, 1077 bp, Cannabis indica
ttttaattgttacttttttttttccctttatactatattttaacactaaaatataaatttccattaatttttaatatgttatacaatgtagaagaaaaaaaagacgcccctcacttacaaaaaaaaagtgtcgccctcccttaacttatatcttgggtccgccacttctaggattgaatttgttatatacatgatcatgtttcttacaagttgtttttttttataaagagagggagagtgtgtaataccctaggattatgaaatggattagcgaaaccctaattagataattatgtattattgagaaattatatcattatataatttgatatatgagaaattatttaattaataaaatgttaagaccctgttggtgagccaggggcattttagtatttttgacctgagaagggtaaaacaatagaattaatttattaacgtgcttataggactatattattatatagtatgcctgtgctattttttccaagtgtgttctaacaggttggcgcggtatagtcacaaccgggtatttcaggccgaactaggttcggggccgaaatacaattctgggattaattattggcattatatttatgtgtgagaaatctgaaaattaattgggtttatttatgtgtgaaatgatattttttcccttaagtgtttatgtgtgtgcattttggcccttggggcaattcggtctttttgacccttgatttacatttaataaaagagatgaattttgaggaaaatagagttgattttctgctcattaccctcagcccaaccgacccctctctctctctccctaattctattttttccaaactttaattttgttggaaattagtgtgaattggtgctaactcttggagcttggatttgggcgttgttcttgctaagttttgaggtagtaattaaaatttttaatttgaatttctttgctgaaattgatggagtatatggcttgtatttccttgaatgcatgtaagaagaatcatctttgatttagataagttttagcctttattacatgcctatatgttatttgttgagctttagatggaattttagggt

SEQ ID NO: 240857 - DNA, 1908 bp, Cannabis indica
attgttaacatggtccatgtatagtgttttgtcttgtcttatgacatggtgtgaagagttcgtgtttcgctgttagttttttttcgagtttttgatttgttttttcagtgtgttctcttgctctttcgagatatggaagacgaatatggtgatgttaggatggaagaggctcctatgggtagattggtgtttgatgatgaggatcctgaactgtccgaattcgatgatcgatggtgtctggtgggacgtttcctcacaaaacgtaacatcgatttccaggcaatgcaaaacaaaatggcttctctctggcaaccaggtagaggtgtttatgtaaaagaacttagccctaatcattatattttccaattctaccatgaggtagacattgaacgtgtgattgagggaagtccatggacgtttgatcgtgcgccactaatctttgtgcgggttaatcatggtgagaattcacgtttactagcattggatacgcttgatctttgggtccaactccatgacttgacatccaagtttatgtctgaaaaagttattaaggatgtgggaaattatattggttcattcgttaagtcggatccaaataatttccaaggggtctggcggaattacttcagaattcgcgtttcaattcgggttaacttaccacttcataggaatatgaagttagagatgaggagtggtgcttcatgtaccgttaatttcaagtatgaggatctaccaaccttctgctttatctgcggaattcttggccattccgaaaggttctgtgatcgtctcttcgatattcctatgcatttgatcgagaaaccatataaccttgaattgaaagcacccccgcgtagaagacaccataatatcggcgcccaatggttgcgtactggtccggcgcctaatcctggtggttcaacttctcaggcgagtcatcaacggtccgataatgggggcagacagagcgcacctgttcagccgcaaaatcagggatcaaatattcatattcctgcatttaggggattctcggctggagttttggggagtcataatggtcatgagatatctggtggtaatagtagagatttggagagattgaagggtgcaattaatggtaatgctatttatagtgatcctttccagttggcagattcgaaaaaaaggaaaacagttttactggagggtcctcttgggcctattgggtcaacttctaaagatcttgcttctaatgggcctaatgaaatggagtttactgatggtgtcattattgaaaataatccttcaactgtgattgacacggatacgggtaaagaagctttgggctcaaaaggtgatggtatttcaaaaaacttgtttggggcgggttctggttcacaggcccgccagtcattatgaatgttctaagctggaattgccgggggcttgggaaccaacgggcttttcagttcctaaaagagattgtgtctcataagaaacccaattttgtctttctttgtgagacaaaatgtaacaagaatagaatggaatgggtgggtaatcagttgggctttgaaggtatttttgtagtagaggcccaaggctttagtgggggcttggccctgttgtggaaaaacaaagatgagggacagttgttggggttctcttcgaaccacattgatctcagtattaccatcgatggctgttctccttggaggctcacggggctttatggggaacccaacagaggccgaagacaacatacctgggatctttttagagaacttgcaagaaggtatgactctccttggtgtattataggagatgttaataatgtcatgtcccaacaagataagaagggcagcttaccttatcctagatggctactggaaggtttccaagcttgcgtttctgattgtggtttgatcg

SEQ ID NO: 240858 - DNA, 858 bp, Cannabis indica
aatgaaaagaggattagatatatagtgggatcgataatttgaatcactttattattatcgtttcttaatccattttatttgtgagtggattcaaatcccaaatcattttattgtgattatatttatagtgaaacgacaatgccatcaccaaaatgacataacacagcaacaaaccaaaacgacgacgttgattatgatcacaaagttttgttctattgatcaaaatcatagcaattattcacattcatatagctccaagaaggaaaaccgtatgataaatatcatgagtaaagtgttaaagctttttagaaccttaataaagataaacttgtttatataattaggttgttattaaatcaaatgaactcaattaattaagccaacagataaacctagtttcttatatataagagaaaaaaattaacaaaaacatattgtatatatgctcttgaaactataatccaaaacatcatagatggataagatcaggtgagaggagagatgagttctaacttgactacaaatgacagagcttttaagaattcatcaatacattccatcatttttctttgtctaaataatcatacttgtatcatttctgtgtaaaataaaataaacacgcttacgggagataaatttaatttttattttcgacattattaattatcccttaacctatggtgtcacatatataaaaatacaatataaaactataactataattttttttttcagatgatagtgtgttatatatgtaagtgttgacgcagtttttcgtcaactgatctaagaagatcgtaaaatagaagagggtaaatggggctacgtctacttatagttttattgattagatccaac

SEQ ID NO: 240859 - DNA, 865 bp, Cannabis indica
gtgctaggtttggggtcgttttgtgatgttggtgttatttttagtatggcctgtaagaatctgaattccggttcatccccaagcgacccccacaaaaccgatttttccggttggaaaccggtctatcagttggggcattttagagttacccagtttttcatgttttcgtgatatttatagggattcccatgttatacgtggagaggaaaacttttaatttgattttaagtccccaaaaagtgacttagcgtgtcgctcaccagttttacaaatattgtcatttaggggtctgtaaatcatcgagaagttgttccactcaggttgactatcacacatgaattcaaaaacgagataagattagtataatgatatgcatatctgtttacatatttagcgtacatgtttattaagcatgttaaattacatcaatagcggtatcaatatacgtagagttgtatgggataccgatagatgtatgtttggctcagatactgatcgacgctatcacattggtacgactagagtatgactagtaccgagtatatgctgatattatggtcgatagtattgtcgtatgaatcttctatactcagtaccacatagggtgcggagatagggttatagttgggtgtatgggcgcctaattgtaatccaacttatatttataattatgattatgcttttcttactgggtctgtcgactcacagttattatttacatgtgtagataagggcaaagctaaggctgagcagccgtgagagcgagcggatgaagattgtacatgtcagggcgattaggcctggagcgtacgatcttttggacagcaggctgtcttttgtatagtctctagacgacaacttttgt

SEQ ID NO: 240860 - DNA, 1880 bp, Cannabis indica
agattgtcagcatcattggtcatgtggtgagtcgcaccactgtccaagtaccatgctgttgagaaatctggtgtggaattcatctcagataaattggcttgaggattgtcattggaggttgaagaagatgtagaagcagctgtatttccctgaaatgtaatgtcaaatcggtgatagcattttaatgcaatatggccaacacggccacaaagttgacacattggtcgatttcctcgacctcctctgttagagttattggatcgacccccacgatacgcaccacaagagcctcttggagggtatgaacctcgtgtgccactgagatgaatattggctaaatttgcttaaatgttgtgaagtgaatctgttgtatgctgctgtatgcgcatttcttgactttgcaacatgaattggacctcaggaagagagagagattcagatcgagaggtaagattaacaatgacaacttcatactcagaaccaagaccaccaagaatataaagaaccagatcatcacctttaattgattggccagcagcagcaaggttatcagcatattgtttcatctttaggatgtaatcttcgattgacagggaccctttctttgtggtttgaagaagattttgaagttgcagtagtctggctcgagatctcgtggcaaatagttggccaaaggtatgccaaatctcagcagaagtggcacaatgaacgacatggccgagcatgtgttcagtgacagagttcattagccaatgcattaggaattggtcaagacgaagccattgatggaaagcagggttgggagaattacctgcaagaaatgctggtggttgaggatttgtgccaagaatgtagccatcaagttcataggcacgaacaacagcaagaaccagagatcgccagagagtgtaattggtgcgatctaatcggagattcaggggaaggaggtgattgttggggaggggaatttgagcttgtggttgttcgattcttgcatcagctggtggatcgatttgaactccaggaccatttccattatcgccattgtcttcttggtttgacatggctccgataccatgtaagaactctcaaatatggagttcagactttgagcaaaaatcagaaagaaacagagaaaaatatggaagtgaattaaatggaaaatgaaagctcaatctgaaacatagattgagtgtgcctttatttatattagtttcagtacaatacattgaatcaagattacaactaacttaagcctaactacctctaactgacttaaccgaaagtaactgataacagaataactaactaattgttatattccaacaatgcatattatgcataccttaccgtataataattttcttggccaagaaaataaccaagaaaataaatgagataaaaaaacaagagctggcaatttttctgaaagaacttatgcataagattttcatctcacattgatatcaagaacttaaatggatgatattatcatagtgaaatttgtcaaaataataatgtgattaaatagaatatgctcttgaatccttagaataaatttgttataacaaaatagcataacagaaaagatatttgctccttagtaagctgcacaacttttgataagcatataggctaattaataatagcttctctctttaacttaagattaagaacgtgttataaaacagaaagtaagtaagagcatgtttggtattgttttctattttttgttttaaaaaattatttttagaaatgagaacaaaaaatagtttttgaagtttttaaaacacaagtcatgtttggttagtgatttttaaaaacaatattgaccaaggtaaatggtttttaaaacagaaaacaacattttgttgttttca

SEQ ID NO: 240861 - DNA, 578 bp, Cannabis indica
agtagagttaaaatattactaaagatagggaaaacactccagcagaggactagatgtttgctctgatgggccctgataaccttaatacattcagaatggattattaccctctcccaagactattttattgcagtgttcacagccaaatatatgacttcaaagacgtatacttgtgcaaaaaataaaatcctcactcacaaaagacctcaaaacctcatcatccttgactcatagcaattccaatgttattctctatcacatatgcatcagagaatatttcaatcatatcaaaaattatctatccaataagttggcatgttttccgactcaatactcctaacaaccccaaaaaaagcttgaagatttatgaaactttcgcctaacatcagtaatcatttgggcaatgttgtaagtcaccctttgttttactataacaaacaatagatgcatataatattaagaaaacttacaaaaatatggaatttgagtgaatttttataaaaataccgtcacacgattttttttttaaaatactgtattttataaaacacagtcaaacacaaagcagaacaactcaa

SEQ ID NO: 240862 - DNA, 1492 bp, Cannabis indica
tttgaaaatcacacagctgtgatggatctgtttttaccgggtcgatgcatacgtgtattaaatacattgtaaggcatatcgttctgtgacatctcgctgggaacatagcaataataaccatggtagcgagctagagcttttcccatgtctttccgaggttgataatgtatatctcgacgcttctgcgattgaagacaaacaatcgcagttcttggtgccaagatgaactttaccagtcaacatcatttgagtgtaggcttctatctaagagagctgacacgaaagagcagtgaatctcaatgagatatctgaagtcgagagtatgccttcttatagcgagatggatgcctcttcattcgttgttcaagttcattcatctgttatgcttagtttttataacgtacattatacgctaagtgttaaaacagtcaagatgtctcgtttacttttcttcatacgtagtgaggatggcgcctcgttttgtacttatgacgtagaatggtttctcgtcaacgcgcgagacaatagtttgtatattcttatctcgcttaagactttatagttagcaagttgtaaatatgctctatcagctctccatttaatgagttattccattttaatatcttcaaatataattaatattatatttgttgattcgtattctaccaagttaacacgtgtccttctcttaagtgccagccgaatttcgggtataacatatacatattttaatagtgatatatataattctgttaacatgatatatatatattttaagaattaatttagtattattataattttcttgtggtatgtaattttattagtacggtatattaatttttagtgatgtgatatatcaaatcttgttgtatatatttaattatctaatatatttattcgtttttgttacaatataataatatgcaatactaaaaaaatttatgtaactcaatttagttattattatatatgagtgcactcttaatgggtattacccatgaatgagtagtattagaaaaatttaaatttttatacttaatttttttattaattaaaaaaaattctcatttttatattatatgggctgggattatgcaatcggttagaaaaaaagaaaattaaaaagaaagttttttaacaagaacataaataaaaaaaatgttaatatgagttaagtattttgtatataaatattttttgatataatttaaaaagaggtatttttaataattttttttaattaagtagctaaattaagcataaaaattaaaatttatcttttattatttattatgggattaaaatctaatggtataatatttttaaaattaatttttatagttaaatttaaatgttatttataatacctggagatatatagatttggtataataatttcaagggttatttgtgggcaaaaccccctacagtagggaagtttttgcaactaacccccaattctaaaatttttgcggtaaaactccctaaa

SEQ ID NO: 240863 - DNA, 1035 bp, Cannabis indica
gtgattataatctattaatcccgttaatcggggtctaaaagccaagtgatttaaaataaataataaacttaattaaataaataacatgcaattaacatacacattttactttaagctaaaataatttaaagttacatatttgggacccgttaaaattatttttagaatattacaagttattttgtacatgccgaccgaagcatcaaaatagaatttctatatagtttttcgttgaacccaaccctcgtcgtctagcttgactgaaacatatacaagtcatcctcaaagccctcaatttcatggctgacccgacagtactttaccctcgctgcacaatagagcgcccgtgagccatggcccagcaagatagaagattaaacagtatgataactatagtactaattacattttattagtaggccactacgtatatattgtgccaccacaccaaatcacattattccatagataataatgtcactataattaatgtatatgtagcataaacctacgtattacgctcacacatctcttttacatttaaggccttactaggatttgtctcgattctaaattttacctagttatgctttacacacataactctacttagataaacaattgatatattattgcctatttataacaatacgcacttagagaaataaccctaggtcatgatttcacaataataattgaatatcataaaattacgccaccacattatattctatgtgtttagttcactatcttaccttatttctaatgtatgatgagaaatccagattcacaggtgattctgaccaagcaccggtaatcctagtcataattcttgggttttacaaactatggttaatcccccaaaaattacatttataaatatccacatataagaatccaacactggaccatataatagagctccaaactagcattctaacaatataaagaacatccaaaatgaagttcataatcaaaagttatgcacaaaataaaatctcaaaaatcacactcgtcgtcatcaggtcgcgacta

SEQ ID NO: 240864 - DNA, 1270 bp, Cannabis indica
aagaagaagaagaaggaaagagggaaaatacagtgaaagatagagataattaatagaaagaatctcttacattgatcaactggaaagcacattatatacaactcaagattacaacaataaagcccaacaatactaacaaactcctaaccgaaaaccaactgctagctaacagacaagagcaactaactcagagacagttagaagctttaactatcttgacacaccccatcaaacttggaattggtacattctttaatttcaagtttgtctttaaactgattgaactgtgagcttgtgatggctttagtaaggccatcagctatttgagcagcagctggaacatgttaaatgcacaccatttgttgggacaatttctctctaacaaagtacaaatcaagctcaatatgtttggtacgagcatgcaatacaggattagctattaggagaattatgcacatattatcacaccatatgataggaggccaaggtagctgtatgtgaagtttagagaataaagagtgcatccaagtaatttcagaacaacttgagccagacttcgatattcggcttctgtgctagatcgagaaacagtgtgttgtttcttgcattgccaggcaacaagattgtggccaaagaagatagtgaatccagacgtggacctcctgtcgtctggatcactggcccaatctgcatcacaaaatgcagtaacatcatactcttgtgatcttttgaagttcaacctatgatagatggtacctttaaggtatctaaggattcttttcactgcatcccagtgagtatgcagtggatttgccatgaattggcagaccttattcacactatatgaaatctcaggtcttgtaatggttagatactgaagagctcccactatagacctgtataattgaggatcatccactgcatcaccaccataagcagaaagttttaaaccacttgtcatgggagttggtgttggtttggcatccatcatttttgctttgtatattaagtctcttacatattttctttatgacaaatgaagaccttcctctgtgttttgaactttaataccaaggaagtagtgaagttgaccaagattttttagagagaacttagaatccaaatcttttatcaaggttgcaatgagctcaaaatcactccctgtgatgattatatcatcaacatacacaagtatgagtgtaatagatttggaagtatgttgtatgaagagactgtggtcagattttgaggagacaaagccaaaatctgt

SEQ ID NO: 240865 - DNA, 788 bp, Cannabis indica
ttccaaaatagaccacataaatttgacttatttatttgatgacccaacacacattttatatatacaattgtgaccctaataaatttcgaacaaagtcttcaaaatcaccatcctcaaatgaagaatttggtgagtcattgtgtgattgcgatcgagaactattcatttctctcataaatttttcaaacattagttgcattgccttccatttcgcttgcaaagcatcacatttggcttcatactatgctgttattttactaatttttcatccatttcagacttcatttcttctttcattttatgcatctcttgtttcttggctgccttttgagttgagccaaatcgttgtaaaccggaaagtttttttgaacctaaaatagatgagaaaattcatcttcatttgttgaagtagctccatactatgctgttataacctcatcattatattttgcctaaaaagattaaataacacatgactttatcaatattattagaaaattactagttcaattaaggtgagttccaatcattcttaaagaataccaacttaagtaaaaagagaaaccaaacttgtcatgacaccagaagtaatatgaaaatcgtacttattcaatcaataagaacaccatttatacctgtaaaaacagtctaaaaatatacacttaacatctcccacaaagctacaacaaaatttttttacaacatcaatttcaatgtactcttgagaaaagaaaattataaaataaaaacaaattcaaaaagataacttcattaaaattaaaaagaaa

SEQ ID NO: 240866 - DNA, 1005 bp, Cannabis indica
taatattgatagaattatatagatagttattttagaaataccgaggtattttggggtactcagagttgaccaaataccctgaggttaaagatttcttagaagttaagaaataataaaataattataattaataaaaatttatttataatattaatattatttttattattatatataaatataactgataaatttttaacttatcagttaagtttatatatgttttaaaacataagtagaagaccaaatgaaattctcttttttggtgcgataaaaccctcctcccctttaatatattttctttaattttcagcctgaaacctagtaattctagctccgatagtagtgggatagtaaatcattgaagagggaaaacttaaggtaatgattggtttcgttttaagttgaaaataattggttttatatggtgactttgtgcattagagtaggtatggagattatgacttcatgaaattgttcttgggtagctatggtactaatttaaatttttacttattgaatttgaggtgattttgagttcaaaatcaagtttagaactttttaaagcttaagttcaagctttaatgtcattttccgttgacgggctcgattttaatttctgttacgtaagaattattgtatatatagtatatatgtgtcatgtgaagtttggaatgatttggataggttttggtagtgcttcggagagtgcaaaatttaggatttttgggccaaaaaaggtcagccatttcttgaaattccaaagagaccaaaaatcgtattttgtcataacttttcactcaggtgtccgttttggacgttctatataccgtttcgaagctggtgacaagctctacagtatgatgtatattttagagataaaatataagttttgtttcagtgtatttataccacagggtttggtagaaaaccctaggttgtcctttgcaaatattaagcagtgttttgggataaacacttgttggtttaccgttgttgtgacat

SEQ ID NO: 240867 - DNA, 2567 bp, Cannabis indica
aaatacttactcaaagagccttcaaaatccattacacaggctcgcagcatatcttctaatatttgaatcgtcctctcggagtgtctatcagtatgaggatggaaagttgtactaaacttcaacttggtacccatggctccttaaagactttgccaaaactttgaggtgaacttcaaatctctatcccatatgatggactttggagccccatgtaacctcactatttctttaacatacatgttttcatattgatccactataaatgttgtttttgctagtagaaaatgtgctgatttggtaaatcgatccacaacaacccatatggaatcgaacatcctcttggttctaggtaacccaaccacaaaatctacggtgacatcctcccatttccacttaggaagagtcaaaggctataacaaacctacaggtctctgatgttcagcttaatctgttgacaagtcaagcaccgagatacatattctagtttctaccacatccttcttcatcttgcaccatcaataaaagagttttaagtcttgatacattttggtagtgccacgatgcaatgaataaggagtggtatgagcttcctcaagaatctcatttttaagttccacattgttcggaatgcaaactcgagttctgtataatagcatcccattacctaacactgtgaaatctttagcttgaccagctaaaacttcttctcgaatctttactaactctgaatcagctagctgagcagctctaattctgtctaacaaatttgattgtagcgtcaaattattaagtttactcacaaaaaactcaatatctaatctaaccatgtcatcaacaagctagggtgaaatcataaccatgctagatacttgtccgggacccttcctgcttagtgcatttgccactacattgaccttcctaggatggtaaaggatttcacaatcataatccttgactagctccaaccactgcctctgtctcatattcaaatccttttgagtaaaaaaatatatgagactcttctggtcggtgaaaatctcacacttttctccgtagagatagtgtcaccaaatctttaaagcaaaaaccacttcagcaatatctaggtcatgagttgggtattgttgctcatactcctttaactagcaggaggcataagcaataaccctatcagcttgcatcaaaacacacctcagaccttgtctagatgcatcacagtaaaccacgaacttctcctgatctgatggtaatgctaaaactggagctatgatcagtcgctgctttagctcttgaaaacttgtttcacacttgtttgtccataaaaatcattgattcttttagttagttctgttaagggcattgagatcttaggaaacccttcaacaaaccctgacttcagtgactgtctttggccttggccaatctctgactaattcaatctttcccagatcaaccatgatcccatccttactgacaatgtgtccgagaaatgacacttgggatagccaaaattcatactttttaaatttggcatagagcttgtgttctcgtaatctctgcaaaaccatccacaaatgttgttcatgctctgcttctgattgggagtacacgaggatgtaatcgataaatactataatacatatatcaaggaaatcctagaataccctattcatcagatccatgaaagctggcggagcattggttagtccaaaggacaaccaaaaattcataatgcccatacctagtgcaaaaagcagtctttggaatatcttcctctcagattctcaactgatggtaacttgatcgaagatcaatcttagagaagattgtcttcccctggagctgatcgaacaagtcgtcgatcctaggtaaaggatacttattcttgatagtaaacttattcaattctcggtagtcaatgcatatgccaagcaatcggtctttctttctaatgaacaacaccggagctcccgagggtgacacactgggtcgagaaaaccctaactcaagcatcccctgaagttgaatcttcaattctttaagttttgcaggagccattctataaggtgctttagaaactggctccgctccaagagctaagtcaattacaaagtctatttctcactgtggtggtaaaccctgaagttcctcggaaaacacatctaaaaactcttaaaccactttgatgtcttcaggttggattaatttaggtcgagtggtatccaacaccaccactaaaaaccctaggcacccaccttgtaacgaatctttggcttttaataccgagatcacttgaattcgagatctctgaactgatcccacaaatacaacgattcctcgccctaaggttggaagatcaccatcttctgcttacaatcaatactagcagaatacctggataagaaatccatcccaagtataatataaaattctgctaaatctaattctactaaatcagcgctcaactctctaccttcaattctaaccagcataaacctaacccaccttttggagataactaatttttcgccgggcagtaaggttccaaacccttaatcatatttatc

SEQ ID NO: 240868 - DNA, 1610 bp, Cannabis indica
ctatgtaagtaaaaggttactgggggcagaatctatccccctctagaaaaacttgctttgtacctagtccacgcgtttcataaactacaaccatacttccaggcgcaccgcataaaagtgttaaccgatcagtccttgagacaagttttatcaaagccaaatgcttctggaagattgataaaatggtcaattaaactggggcagttcaacataacataccatcctcaaatatccatcaagggccaagccttggccgatttcttgatagaaagaataactccagaagaaattccacatgttcagcgagatgcagaaacctggaagttatacgttgacggtgcatccaacgagcagggttctggtgtaggggtaatattaatatcgccagaaggctttaagtttcactatgctctgaggtttcaatttgatgcatcaaataacgaggttgagtatgaagccttgattgtaagtttaaaggtagccgaagcattgaaagtcaaaaacctcatttgccatagtaattcacagttgattgtaaatcaggtcctcagggaataccaggcagaaggcttaaaaatggcgaagtatttagagaatgttcggaagaacttggaaagatttgattactttaagattgaactaattccgagagaacagaactctaacgtcgatgccttggaataactagcctcacaaaacgacttggatgggttgaacttggttctggtggaggtactaggcgaggcaagcatatgtgaaacagaagacgtcgagatgatagacaactctcctacatggatgactcctattatcagttatttacttgacagacaacttccaaatgataaaaacgaggcgcaaaaactattgtattaagtgcctctctacacaataattgaaggcaaactatatagaagggggtactcgatgcccctacttcggtatgttctccctgcagaagcgaatgaaatcatcagagagattcatgaaggcttttgtgggaatcatgcgggttggcaaagtctgtctaaaaatatcattaaacaaggatattattggccaacgaccaacgaggacacccacgagtttattaagaaatgtgataagtgtcagaggttttcacatatacctcgcatgccgccaacagaactaagaatgatgacctcgccctacccattttctatatggagaattgacttaattggggcatcacccattgggtgaggaggatctaagtatgcggtagtagcagtcgacttcttcacgaaaatggatggaggttgagccccttttattcataacctgtaagaaagtcctcgactttgtcataaaaaaacaattagtactgtaggtttggaaaaacccacaaaaagaaaaggaaacccagtttgatggcgacttgttcaccgaatttcgcgagagaaacaaaattatcaagagcttctcgtcagtatccaggcctcaggcgaatggacaagtggaagttgttaataaaaccttaaaggatgctatcaaaaagaagttagacgctgcaaaaggcagatgggttgacgagctacctcaggtactctgggtccacagaactaacgagaaggctgttgggtttatgc

SEQ ID NO: 240869 - DNA, 1019 bp, Cannabis indica
tatcattgaggaccctttcacaagccatgtctcttggagcaatagtgaggacgtgggatgtttgtgctcgtgtcgtcatttccaagcatgcgcagagaagtggtggtggcagcttcagttccaagtatgagacttgacctgcttgagtgcaacttgatcatatgcttatgtgattaggattcaccacatctgtagtgttcatgggaattctaattttgagtggaaagtgagtatctggacctacagtttgtgggtcttgagggcgacccaaatatgcagatggtgcaataagagttcttcttgtgttgaccatggcgcttgattagatacgatattcatgctctcaatgaaagtaccaaacttttgaccacaaaaagtgatcaactcacagcgggatcgtatagatctgatgcttacacgtgtttgcacaaacaagaatgaaaagtagtaaacacacaaatttgttatagaggttcgacccccttgtgatagggggtaatgacctactctccttttagttgtattaatatcgagggtaaatactatctagatcactatagatggaatctgctatagcacccttaggaatactgataactctagaaattagagttattttcacatttttttaaactaaaatttctttagttcttaagttttaaatttatttagtgagttttgaattatttttgaatttattagtgctaccgaaattcggcgagcacattagaggaatcaatcatcgtcctagaaaagagccactgagtcctgaaggatctttgattcatcacttgaacagcccactagctctgagaaaaccaagtattggggactcaggctcgaagggcctaggataaacaacgaccggtctcttcttaatcaagttgatgaggatggcgtctacgacccgacgaggtacatacctatagttgagttaaaaaactgccatcttagacaccgattggagggagcaaaccagcgtaatgctgaactagagcgtgaaatagccgcagtcaggg

SEQ ID NO: 240870 - DNA, 1145 bp, Cannabis indica
tttttttttaaaaaaaatggttaagatataaaattttcatctcttattaagtctttcgaggctcggggagagttgcatggatgtagggtgtgtaatggagctccggttatatcacacatgctctttgcggatgatagctacttgtattgtaaagctatcgaaaaggaagctttgaatgtcattagattgctgcagttatttgaacaagcctctggtcagcaggtgaacttagccaaatccaccatcttttttagttcgaatacgacagaatctgtcaaagctagaatgtgttctcttttgggtatgattgaggccccgccaaatagtctttatttgggtcttccttgcactatgggtcggaataaaaatgctatccttggtttccttaaggataagatggaaaagagaattttaagttgggagggtcgtcttttatctaaggctggcaaagaagttcttgtgaagacagttgctcaggctcttccctcatatgctatgtcggtttttcttcttcctgttgatacttgcaacaaacttgaagggatgatggccaagttttggtggcggtctgatagttcaaagtcacatggtgttcattggaagagttggcaacatctgacaaagcataagcattttggtggtctgggctttagagacttaagagattttaatctctccatgttgggtaagcaagcttggcgcttgattgttaatgagtcttctcttgttagtcgcttatacaaggctcagtattttccccgaggctctttcttcaacgctgaacttggtcacaatccaagtttcatttggaatagcatctttgatacccagaagcttgtcttatcgggtgtgcgttgcaatattgggcctggaacttcaattaatatttaacgggatccctggttacttgacgcatccaatccctttgtaacgactcagctggtggggttagatgattgtccagtggctagcctgatggagagtcataatagaagctgggatttggaagtgctgaatgatttgtttaacatccgtgatagagatttgatttgtaagctccctatttcttcagctccttctgacttctggtgtgacagtcagtagtcccgtgatctgtaaggggaaataccgggtaagctgtgcaa

SEQ ID NO: 240871 - DNA, 794 bp, Cannabis indica
agaagaagaaaaataataataagaagaaagaggatccaaaaataatatagtagaagaaaaagatacacagatagaaatcctaaaatacaaatgcagagtagacaaaatcctttaccacactgggaaggaaaatgtagtggcagatgcactgagtcgaagaggtccaagtcaagtgtataaattgaaacaaatctctccaaagttagctaaagacatgaccaaatcaagaattgagtttgtggttagaaatttagccaatattacgttacaattagatttgttggagaggattaagattacccagtagaataatccagagatgattaaatatagggggaagtctgaggctggtacaacaaaaggatttttcagtgtcaccaagtggaatgctaagttataaagatagggtttgtgttccaatagatgaccaaattaaacaagaaatacttgatgagtttcataccaccccgtacgcactacaactggaaacatcgaagatgtatcacggtgtttaagtgatgtactagtggacaagaatgaaaagtgatgcagttgagtatgcatcaaagtgtctaacttaccagcaagtaaaagcagaacatcagaggctagcaggattacttcagcctttgaaggttcctagatggaaacgggaggatataaccatagattttgtggtgggtttactgaagactacaggaatgtatgactctatctgggtaataacggatagtttttctctgtcagcgcactttctaccagtgcgaacatcatatactatagatcaatatggt

SEQ ID NO: 240872 - DNA, 1300 bp, Cannabis indica
actattacttggaacaatatacattaatgggatagttggaaggcaaaacaaatttctatagtagacatataaatattattaggtaaaggagttgaaaaaactgatgagatttctttatcttcaaaagtcacctcaaacaaaagtaggagagatcataacaatgctctcattatagaaatctaataaattgttataaaaagttgtaataaatccatgtcatacctttttaaaaggatttaagattaccccataagagattaatcttatttccatggtaataatattcctatccttaaaaacaaacataagaatgtataagattactattcctattaaaatattacctcataccgaagtatcataccctctaagataatagctatcctagatcatcaaggattagatttgttgaatgctattgttttcgtatcgaaaacataatcaaaaagggaaaaagaggaaaaaaaacagacataacagaagagtagacattgaaaaactgtggcagagattaaatatgtttaagtttaactaattaaaagcttattaatctttagacttgttatgactatcttcaacttcaacaaacaagcaagcattgcccaagttacatcataaccagataaaacaagtagtatctcaactaaacatattcatatttcagtagcttgaagcttgagtagtcacattcccaattacaaagattaaaaaacctgaaaaactttttgccttttagtgttaggaacttaggatgagacatgtcataataaatagaattcacctcaaattgttaagatgtagatgtgtctcatctcatcgtcagatctatcattatcaggttggccactccatttatggtttacagcataaacgactattctacaatctacatacaaacactgcatatataccttatctatttattactctcacattcttttccaactccttacttaatctaatagctataattagcctaagctagcaaggaatgatattttataattaaccaaattttctttctcatactttgttccaaacttagtataagtaacaagatttgtaaagctatgtcttttgctttttttagctctattatacttaaataatatcaagagaatattgtattcctccaaatttttttatgcctccgaacatacatgatcatcctcatcaagaaaccaaaccaacattataactgtgcaagtgagacattgattacatggacatagacgtggacacactactaagcataatatctaacagaaatgatattcgagtatgagaaataaagttgtta

SEQ ID NO: 240873 - DNA, 1638 bp, Cannabis indica
gaatctttttgtgtagattaatttaataaaaatattaagataattgtgtgtatgtgattcatgaatttattaactaacccaaaggtgagttaatatttggttgaatttcatgcatatttatggtgataaatgtgtgacaaatataaggtattttgtgtgaataatatgttagtttaaagattgcatattgtttgacataatttattgtcaatgtttgatcactacaataagagtaccacttacaattaatattactttctaaagacttaatattaatattgtgtttggtatcttgagatggaattaactattatttgaatttattattttatttgggttcttatatgagcatgttatttatgtacttgtattgttccttttagttgttgctagtgtatctggtaaccttacttccgtatcagtccttaatggtaataactttaaggactggaaggagaacattttgattgttcttgactacatggatcttgaccttacattaaggatagattgtcttgctcatcttatggataccagtacctccgagcaaaggatgatttatgaaaagtgagaccgttcaaactgcatgagtcttatgatcatcaagtgcggcatacctgaggcttttaggggtgcagtgtccgaggaggtcactgatgccacaactttccttgctgaaattaagaaacacttggcaaaaagcgataaggcaaaaacaagtactcttttgaagaaacttatttccatgagatttaagggcaaggaaaatataatggagtacattatgaaaatgtctcaccttacgtccaagttaaaggcaccaaagcttcagctttcggatgacttgcttgtacatttagtgcttatatctcttcctccacaattaagtcaattcaaggtcagttacaactgtcaaagggagaagtggactcttaatgagctcatttcattttgtcttcaagaggaagaaagactgaagcaagagaagactgaaagtgctcatttgacaagcacctctaaggataagggcaagaaaaggaagaatgatgttgctaaggataaaggtcttgcacataagaaacaaactcatgctaacaatgatgatgcttgtttcttttgcaacatgaatggacacgtgaagaagaaatgttctaagtacattgcatgtcaagaaaagaaatgtacatttcttattttggtctgttctaaggtaaatttagctttagtaccaagaaatacttggtggttagatttttgtgctactactaacatcagtgtttcaatgcaaggttgcctgagttaccgaaagctaagtgatgctgaaagaagcatttctgtgggagacgacaaatcggtgaatgtggaagtaatagggcattttaggttgttgttaagtactggttactatttggacttaatagatacttttgttataccgtcatttagatagaatttagtttatgtttcttgtttggacaaattgggttattgttgttcatttggaaataactgtttaactttatctattaattcaaatactgttgaaataggttctcttatggtttatgacaacttatatttgcttgacacctttgcttcttataatgaaaccttgaatgtggaatcacgtggtactaa

SEQ ID NO: 240874 - DNA, 746 bp, Cannabis indica
atggtatattaatctctagtacttatattttttttttcttgtagtgtaataatcaacaattttactcaaaggatcaactgaatgtggttcgacgtgagtgggcgacaaatttaaacaactttaaaatttagagaaaagatgctaaatcaatattttaaatttatatatgcacattttgagctatattgttgtaattgattttattcaaagagatttggaatttttatttgtactaattagtattactcttgaatttgtaaacttttaatgcagcctacattttttttttgtttcttctggttttgtggcttttaattaattatttattatggtatttgtttataaaaagaaaatactcatataacaacactagtcatataagtgttgctagaagtctaactagaaaaattaataaagcaacacttataataaaagtgttgctatacatgacttttaaaaagttaagtatggtaacattcttaataaaagtgttgccaattattatatacattaaaaacatttagcaacacttttaaaagtagtgttacaatatattatttttaaaacattaattatcatcataaggcaacacttatataagtgtcatcttatatactaactttttagcaacagtctaggagacaacacttttataagtgttgtcttttaatttcttttagataaataaaagtgttgctagaaattaattttgtagtagtgaatagagacgaaaactcacaaaacac

SEQ ID NO: 240875 - DNA, 958 bp, Cannabis indica
atacaacggtaagattataatatctttaccaagatcaatatttgtcctaatccaatgtatactccatacatacgatactagcatactcttccaatgtcctggaaagaacataacacttatccaaggtataagtaacctttatcgatgactaccacatcagtgtaaatccagtgcactgataaaccatggaacataaacttttgtagcatataattacaattaccttccactatgttgacatcactgtaattgtgaataactatatgttctagatttaacagaaatcgtatattaaaccttaaacatgaataatacatgtaaacataaatgatttctaatcttccattgataacaaataggattatattgaatgggtgttatttagggcataaaatcctaacaaactcccacttgcactaacataaaactagaagtgcatttcaatcaatccattctcttgatattcatatcaagtgtagtgtgtttgactaaacccaaataacaggaactgtaagcctatggtaagcaactgttttatccgccattacttcctttttgttcatacaacattatgtaacatcgtttttctatatgcattacttctctagggatactgaaattctgtaatgtttattaagtgcatctgaatatacaaaagaaacatccctaattctatccaaaatggaatagagataaaacagttaagaactttcttcagtttgaataacttgaaacattaagtttcttctagactaagcgatcaacattggattctagtattaatattaatgtaaaatacttgcttaatattaagtaacaattagagacaccataaacttttcataaggactaggaattgtgcttaagtcttttgaatagaaattgcaaaaaataattcatatcttatcctcatccaaataataatgggttgaaagtttaaaatcctccaactaagata

SEQ ID NO: 240876 - DNA, 1011 bp, Cannabis indica
taggatgttaatgaaacatacatggtagtaaatctagatcctggcaaaatatttccaacactatggacctatattttaaagctccaataaatacttgattattatcgatctaatcaatagaaaaaccttgtttattaattctatcatttctccactataattttaaaattgcactctttgacgatacaaaattatatttataaaattcttacttgtagtccgttgatataaccaatataagcagttcgccctccagttattagttcataattagagttagtcaaaattactattttacccttctaaatatctttttactccttatgtaccattaattcaatgtgaacagttaatttataacttactatagatttagatccaactgttaacactctcagaattaacactataagggaactaatattcaatcaattaggaaagcttagatttcactattgtataacatgtttccagccactcatgttaagctcccaaaatagaaattttaagaattatcttctctgagaaactttaacgagtgaataaaaaaactcaatgacacaacaggatttcatgtatactcaagattcaggttgatctactgatgatcatcgttgtgatatgaataagggtgacaatttatgttcgcatgtcgtgttcatgtcgtgtcgagacccatgtataacatgtttatgcttgacccgaacacgacccgttaaataattgtgttagaaaatgaaacccgaacatgacccatttataaacgggttgacacgacacgactcgtgtaaccccatttataagcatattttgtttaaacatgccaaccaataacacatttatgaagtattcaacacgtttataactcatttatgacatgttaaaatactaaaataattttaaataggtcattaacgggtcaattttgtgttagtcgtgtcaacctgaacacgagccgtttattaaacgggttagatgagtcgacccaaacatgacccgaacccatttaag

SEQ ID NO: 240877 - DNA, 1015 bp, Cannabis indica
agaaaagatatatgcatgcggaatgatctgaatcttaaatatatatctatatgttattttacggaaaaataaatgttaaaagcaaacaagagcaaaagtcaaacaaggatgtgagaaagactgttggggtcatcttcatacaataatttttgtattgttgcaaaatgtttgaaagatgagtgcatgttcagtgtatatttcaattaattattttgaaattattttctgtttacatcattcattgcgattcttataatattaaagttaattaagatttttaccctttaaattttcacatataccaaattatatttttttgaacttttctaaccgttaaaattttttcctgaactgttgagattatcgaatttaaggacttttgtccaatttcattcaattttattaatttagtaattgtttatgtacaatatcatgctcatcagattttaatatttaccaaatagttcttctcgtactttcacatgtgtcaaatcatgtcctctgaactttcatccatgttagacttttcttactaaaattgaataaaaatccttaaatttaacaatctcaatagttcagagaaaatttttaatgaccaaaaaaattcaaagtgcatgatttagtacatgtcaaaattcagatgttaaaaatcttaattagcctaatattaatgagtgtcaaaataaattttgtatatctcaaaaagtaatttacttaaatttgtctaacttgaaaacgattcaaagttaatatataaataatctatttttctcaatttcttcaccttaatcactttaaaatatgagaattatataaataggagctatatatctataggcagattcttaaaagaggagattacttttgttccagttatttccgtattttaataaattatatgccaattttttatacgacattgtatattgtaattataataagcatcttgttgtgtctattttcaagaaattttaaataccttttacaacataaaaaataaaattcaaaataattt

SEQ ID NO: 240878 - DNA, 627 bp, Cannabis indica
tacttaatttaaatttataatagacattaatgttagtggagtgtaacttcttttaattttaagatgatccactatgtaaaaaataaaactacccactatctctctcttaatcacaattaatatcaactaattttttaacaaattgtgcaaagcctccaatagtactccacgccatatatcttataatagttgagcatcatcacttatgatcatcaacattattcatcattttcatgtgagaatgcttgtcaaatttaattatggcataggtattatttttcaatgaaagtaatttattttattaacagcttatttctttaattattttttatcaaaatttttccttttctttttcatcttcttcttaacacattattagtttatttggaggttggattataattttgttgaaattattatatatttatttattgatttaggcaaatacattccacaatatatattatttataccattttcattttttttacagagattcttcaagaaagacacaaaatggaatggagacaactaatcaatcttggagcttcaaaaaatttctagtcttagaaagaatgaaattgctacagatagagatagatatatattacatacatttgtaccctc

SEQ ID NO: 240879 - DNA, 1122 bp, Cannabis indica
tttttttttttttgaaataaaatgttcgacctcccggtcattacaaaagaggtttataagtatggaagaaacatttaaacaaccataccgattatggataaaagtttacttaaccatattatgggtcataaagttataagtcgctacaggaaataaacaactaacaaaagatgaagcaattcttttacaaaagctagaatagttcacaatttttcatctagagtcctctccattgagagtgttgatcactacctttgagtcgctttccacaattacgaacttgcaacccttatcctttgtcgtttccaaagccaaacaacaaacagtatcctcgccacaaatagcatcaaaaaaacctaaccttgcagtagtcacccaagccaccacaccatggtagtctctagcaacaaccacaaattttggctatgtaatctgcataagagtaagcaatagagttaatgtattgtttcacattatccaaattgttattgtgtaccatcatttcgagctctccatatagtgttgataacaataaatgcatgaagaaagacctcatcaatattgaagcttttgtttcgaaagctctaaatgaatttaatctagtctcacattagagtacttgtttcagagacagaaaaaatacaccatgaggaggaacgccacaagtgaaaagccaaaattacaagtgaggaacaggtactccatagattcctctttaaccccacagtaggaaaacatgtatcatcaatgtggaatctcttgttcagaacaaattgaattgagaaagtactagaaatgatactccactaaaaaatcttatggtgttcaatgattttgatattctagagcctgttccagacagatggggcaacctcactatgggagcccgttgcagagcttggattaaataaatcgatttactagagaatcaaccatttactttccttggtctagacccaatgttttccctctagcctgaaagtctgctcccttttaagatagcagcaataatttctttgtcaaacatgcagttcaatttttgagtgccccaattaccattatttgttagaaaatcagctattttactaaacttagacggtagcaatccattcgattttggaa

SEQ ID NO: 240880 - DNA, 1241 bp, Cannabis indica
acttcgtgcgacaaagttagtaatatgggacgagactccaatgacaagaaaacaacacatagaagtattggataagatgctacgagatataaacaatacaatcaaaccctttggcataaagataattattttcgggggagatttttgtcaagtgttacccgtggtccgtaaaggaacgagactagagcaaataaattctagtttgatttgttcctacctatggccgaccctgactaagtttcaactcattcaaaatatgagagcaagactggatccaatgttttcagattatgtgttggctgtaggcaatggcatgccaccccacacaattaatgacaccatacatataccaactaatatgcttgttccttatcatgatgacaatagttctttgaatttgttgatagaaaagttttccacaacattcaataatatccagataatgtgtctactatgatgaaccgtgcaatattgacaccaaagaacatctttgtcgatgaaataattcgttgttaataggaaggttcccaggagaagtacacctctactacagtagagatgagacaatagataatactgagtaatcggtaatggaagaatttttaaatgctctaactctcaatggattccccccatgaattacaactaaaaaagaattgtcccatgatgctgcttagaaacattaatccttctgaaggtttgtgcaatgaaactcgtttaatatgccggccattcgaccaaactatcatagatgctgacattgctgtcggacaccatatcgagaaaagagtgttcatttcaaggatactattcctgccaaatgtagattaaaatagtgggtttccattcaaaagaactcaatttccaatatgattaagttttgcgatgactataaataagtcacagggacaaacattggattacgttgaaatctacttaccacaacctatttttttacacgattagttatatgtagcaatatcaagattaaagacatcttcgacagttagagtcttgatccgacttgtctcaacttttcaacaagataagaactccattaaaaatattgtgtacacaaaattattatcattatcatgtttaaattaacctcttcaaaaaactttctaagtgactatgtaattagcattcgtaaaattctaaatgtttctaataccactctaaatgcttttaaaatctaaggttatatgatttccatagtaatattattttgcaatgttatt

SEQ ID NO: 240881 - DNA, 1002 bp, Cannabis indica
ttttttttttgggagaatatgtagtatcaaggatttggagttctaattcaacttttatactacacgatatttattaaaataaaaaaacctttaaaattccttttctaggcatgccatagtggaagaacttgcaaaatttggagccatagttcacacgtgttgtcgcaaggaaagtgagttggagaagtgtttggaagaatggagaaagaagggtttcaaggtaactggttcagtgtgcgacgtttcacaaggagatcaaagagagaaacttatggaagctgtttcatcaattttccaaggaaagctccaacattcttgtaagtttaatgatttaattgattcataataatatttggaaaggattatatttcttttatatatattgcaatattatattccatatatacatattatatatatatactaactactagcatatttgtttacagttctattagagtttttattgactaattattaatttaaatattaatattattaaatgtaattacttttaatcacaatataatttgtgagtaaaaataaaaaagttataattaattataaatcacaattcttatattgtgactaaaagatctattgctaaagatattagctagtcacaaaaattacaatttgttgtgacgaaatatgtttttaatcacactacttgttgtgattaaagctaaattaataacaacttggatctaaatattatattttagctagaagtaacattttgttgtgagtaaaagtcatatttaatgacaaaaaaaattatgtttatgactagaagtagctaagtgaccattcaattatatttcttaaatatataaaatgcaatgatctaatttaaaatttatttatcaaaaaatatatctaactaattttattaaataataaaataagtaaataagtttagatattttaaacaatcaacaaatttgttataaaaaaataattagttaattgaaccaacgcttaatttaaatttaaattaag

SEQ ID NO: 240882 - DNA, 1805 bp, Cannabis indica
cgcctaaggtagttagggtgttacaaaaaacatgtgcttattttaacttaaagaaggaattcaagcgaccttcctttttaaggaattcggtttaaaatgtatcttgttttaagaaaaaattatgaatgttaataaacaaaacaaacaagatacaaacatggcacacagtacatttttttggggcacacacgttttaggcatatgatacccccaagtgagatgagaagtgtggatgtttccaccttcctggtcacttgttttaaacatagcttgtggcctaaaaacgcaatgtataaattcaaatgtaaactattttttgttttgatttcatgatgcccgagggccattcttacaatagtgaattacatttacctttacataaaaacttttgaggtttcatcaggatcttatgtcctccgcctattggtagtagtgacgtaagtggtctgcatttcaggaatgaaggactctcgatctgcccattctcttcaaataaaaagtaccttggcctacattcttgagtatctcataggggccttcctaatttaggcaaagtatccccactcccagttctcgcaaagctgggaatactcttctaaaaacaagatcgccaacatcaaatgtatgactcttcacctttgaattaaagtgctgggcaatttttccttggtacattttgaactgaacttgtgagtattcccgaagctctttgatcaagtgtaacgactcttggagcagggaatggttgtgggaagggtcgtaagtatcttgtcgatgggaagtgttgacttaaaaaagtgatcaatcggcagtgtggtcatatggatctgattctttccatgagttacacaaacaaagaatgaaaaataataaatacaaagatttgttatagaggttcgaccccattgtgatagcaggtaatgacttactcccctttagattgtatttataccgagggaaatactatctagatcactataggtgggatctgctatagcacccttaggattaaaaagtatgaatcagtaggtagatcttaagtgttggacagcctagggtgttggacaacctagggtggtggacatcctagggtgttagacaaccttaggtaggtgtgtgacagatgaagtgagaagagagaaagagagccctattaggcgtgtaccaaagagagattgagagaagagagaatatgggtttcagacttagagctattttgaggctaagtgacttagaggcaacttaggtttctagactactacaaacttaggaggcctaaaccctagattataagtttaaatttagatatttcataggttgttagataattactaaatactaatgtgccctccgatctgaatattattcagccattttgttgggcttttaaggcccaattcccagcccatatttgttgtccacgtgtagagttgtccagcaaagccttacagtgcactcctttgccggctaggcccctgtgattgctagggtggccggctagggttgccagccagggtgctctcccaaggctagccggctaggcgtggctagccagctcctgagagggagttggtctgttgcttaatccccatttgagtgttgaagtcttcgtttgctcaagtgttgacttggccttccttttagcaagttatactgccacgtggcactggttctatctacgtaagcatgccatctcataaggacaaaaattgtaataacatttgccccctaagtccctatgcagacatcaggtcagatagggactttctagctcttgtcttatttgtagtagtctctgttgtgta

SEQ ID NO: 240883 - DNA, 1509 bp, Cannabis indica
aggttgactttttgtcaacgtgggccatttccagttagttctccagaagtttttcgatcatattctccgtttttcacaaataattgagatacgagtatttctaggaatcattcagaaccatttagtggcaaaaagctcgacccagcgctgaggttgacattttgtcaacctgggctatttccaatcaatttttccagaaagtgttttaggcattttttttccaaaaagttttttccgaaataacgaagatactaatgatctcagggagcaaattagatcttctatgggttaaaacatggcccagcgcctaggttgacatgggcacactaccttacgtcgaagttgacatgcaacccggttcacatgtttttgctcctcaaacacgaattttgttccgggcattcatcttattttggtaaaaaaaaggggtaggagaccttgtttgcaatctcaaatgtcgtagaagtattgaaacgagccccaagaagtcccccgagaagcactcaacgcccaagttgacgtatggccttgtgtgctgagttttgcttatcatattttgattatgtctcaagcatgtgactattttttcattgttaaatttgaattcacactttgatatttcacccagtcaacaaggccgagtattggcaaaatcggaaagtttcaagtcaactttattccaccaaaaagcaacatctccaataacacgtgaacaactttaatagaactaaaaaattagctaagtgatgtcaacatatctcttaggaatcaaaaaatacaagtcagggatgttttttcacttacccagcatccaggttgacgtcataatgtcatgaacttggacgatggattctgaacaaccttcagtaatacagtcataatcataactccctcaatattgagacgattgagacgattcaacgtgcattttaaatctctttcaagtcatgttacacactcatatcacaattatgacgattttaagtccaaaatttgtgcccaagataactgtaactttttttgctaattactcaaaaataatccaacgaacgtgattcaagctttgaaaattgacaattttcatcaagagtctcagtttataccattagatcatcatcaatgactaggatcatcctaaagtaattttttcattattttattaatattttaatagacatccttccctgtaataggagagctccactagtttattttttttctttcatatttttcacaatcttctaagtccacataaggttagggcatctttgtctactttctctttctagtagttagagctattgcttttataaatttcttgtaattctcgtgagtaataaaatctcgaagtagacgtaactctattattgttgtgacatggggagtgaactattataaatctcttatgtctttctacttatttgcttaaatttatttctcttcttgccaatctaatgaacgagtattagtcagatttctttgtcaacaaatttatttatagagtgataa

SEQ ID NO: 240884 - DNA, 743 bp, Cannabis indica
agttttcaatcccatggttagggcacttcatcaatacatccttgaatctctcccaagcttcgtaaagagatttgttgttatgctaggtgaagttattgatgtcagatctcagcttggcgatctttgcacgaggaaagaactttgaaaggaaatttagggccaattcctcccaagtgttgacagaattgggtggtaaagataccaaccaactcttggctcgctcccttaatgagaacaggaacaaccttagcctaatggcatcgtcactaactccattcaccttaaatgtctaacagagctcttcgaagttagcgagattcatgtttgggtcttctgttgacagctccccaaattggacggaagattggaccatctgtagtatggttggcttgatcccaaagttgttagcatcaacaacaggttgccttatacaggatctggcccctatcaagttaggaagcaaatagtcctccaggctacggtcattgtggttgcgaccattagcctggtcatctacaactcctctatcgtttccattgttgtcgacattggcattgtcagccatatctacttcttgttcaatctttattgcagctctttcccatttcttccttcttcttacctgtctgcaagtcttctctatttcaagatcaactggcaatctggcagttgcaccttcacgtctcatagactagttgaacttgaaaaaaaaaagataagattttgaaacaaacagaattagt

SEQ ID NO: 240885 - DNA, 1882 bp, Cannabis indica
acagacctcgttgacctcgttcaaaagaaagtcacatgaccggagaccgtatggaagacccaacaggagcctgcgtcactcggccatcttaggagtaggggcaggtcttttcgagacagctatcaaaaacaaagcaaaattataatcagctaaaccagaataaaagacatggactaatttaactaagtcttgtgtaaatgattacttacgtattatgcggaaagtgattgtgccgatgggggagagaccggtcgtccagaagaattcatctttaaagagagttttatttggaaaatccacaatgatcttacgatcatctgtgtgagtcccaagatagtaaaaacaccctgctacattcttcctcgatggaacagccttgacagagtagagatactctatttccaagggagtggggcactctcaattcaagattttgtaaaaattcctcaaacttgcgaggattttgtatgaaatgggattcatttgaaatagggcaagcccgaggtggtttaggaagtccttgaaatagtctcacaaggggattattgctccagccctgatgtgttcaaggctccaagcgcctatcccggtcgagccacttgtactagtctcgccactgggcccctcagatgtttcgcgagtaagttgcattggtggataacaactgaactcactagcaactaccgatctaacccagcagtcttgcctatattcaataccacaagtcctcagagtattacccacgtagtctccgatggctcgcacctttgactctattagctcatcctcgtaggtgacgttagagtcctagggagtctttggtttacgtggcttggaagacataatttcaaagtccaagtcacctggttcaaaagcaatcgtgaccttgggtaaaaataaaggcttagccaaagcaatagaagacaagttgggaggttcaggccaagcagcgtctcgcaagaaacggcacttgccttctgtaatttcttgcaagaagtgtctgtggcgactaacaatatcttcttggtggattttcactaggtgttccctaattttcgcatcatttatctctaatttggatttaggtgctgaaattctgggtttgtatgggagggcaagtttagtagaaccctctatttctaaatattctggatgataaacttctgaaccagattgggacattgctgcaaggagaaagcaatcccaaatcctggaagaaatttatcaaaccagaagttggtaaattggagaatctcaaaaagctacgttctacctaaaccctaacatttacccaaatacaattcaaccctaaaattgctaaaaccaaacgaggtaacaaaggtgctaactaagaaatcagtagtcaaacctagaaacacaacattaaaagcatgtaagaaaataaggagaaaaatcacttactgtttggagttggtttttgggacgatgagcggttctgcaatctacgaaacaacgaacggtcagaagatccctctgaatgcttgaagtcaaaaattagatcggatgaaacttgcaggaaaaatgttaatgacaaagatggcatgcaaggtttcaggcaaatgtgggtatgattttttctacataaaagcttgaaaattttttagagtttctgaaatggcaaaggtagtgcaaaggtggttccttttttcattttatactcttgggttaatctccgttagatcagggagacaattgatccaatgggtagaatttgaagaagaagtggaaaagatggtcattaaatgctgatgtgcatcgaaaccacaaaactgccaaaattagagaacatgtatttttttcaaaagggattatgacaaaaataccctttgtaatcattttaaagcacttttcattaaaaaga

SEQ ID NO: 240886 - DNA, 1394 bp, Cannabis indica
cctagatccgaacttaagtaaaaattaaaaataaaaatgaactttatagaacacacttttgttttccgtttttaaaattgaaaaacaaaagtagttacaaaacgcatttttgtttttcaaaaataaaatttttaaaaacaaaaattttacttttattttgtaattaaaaaattaaaagttaaaagtgttaccaaacggcacctaagtattctaaagaacgtttaaatgcctgaataacctaagtgtgagtgtcaagccaaaataaaagggcgagtgttatttgtatattgtggtctaagtctaacataagtgttgttaatattaataaaaaagctattcaagtatcttgtgttgtgttattgaacgagataatgaaggacatggctagagttgaaatttagagaaaagccagacgaaataaattaaaattagggggagggggtgaatatccaaaaattaatggaaggagtataaagcaaaacgattgtggaaattggggagttcaactctaatttttcaagtttaggggattgatcgttctaaatttcaaagtttagagagtttgactacaaattacctttcatataatattaaatcaattttatttaaatatttttatagttctaattatgaaattattttagttaaaatgtgatagttagtagtcccatgatccgtaagggaaaacaccatgtaaactgtacaatcaatatcatctgggaaggtcaagtgtgatgattctgagactgtgcaggtatgagactacacagttgaagaagacttaaatgaattgattggtactacctataatatgtaaatgttcagatctataaatacacatgctaatacaagtgtataaacgaagaattttaatatttaaagaaaacttttgttgattcaaagagaagaactcaaatagtgaaagcgtactttaatccatagatagtgatgatcttaatccatcttgtagaaatgatctttgtagtaattttgggtaataatcttccaagaaaataaatatttaaattttctaattttctctcttgatggagaaaatgagaatataattgctcttatttcttgaggatcactagtactaccattaattatattatttggatcaaacttcaaataccaataaatcaatacatatgaacacatattaagaattttaatccaacaataaaaccctaattagttttaagacggaatctataaaaggatacatttaatttttcagtcaatccactaaataggaaggaaaaaaagaagttgtatttttttataatttcttttggttaattatgaaaaaattaatctctaatttcctctcatttgttgtatttactctaccaaacaaagtaaaagttagataataaatatgataatgagat

SEQ ID NO: 240887 - DNA, 1440 bp, Cannabis indica
ctcaataggatgatgccttggctttcttcatcaaccttgcgatttatgttagtcaaacccacaataatctcattaaatctatcaatattgtcatctaaagaaaggaaaaaaaaattattctaaaaccgtataatctttctagcaaattaatcttactaccaattgatggctttaagtataattttttaaatttattctaaaattcttttcctatcttctctgcgatgactttccttcgaacactatttgatagatacatgatgatcgtgtagtaaaccatctcctccatttctactttttcctcttgtttcttttctaccaataacttttcgtctccaagaacctaggagactttttggtacattaggattcctttcaaactttctgtccatagcgtaaagtccctagttccatcgaacttctctaattcaaatctcgtcattgatgacattcaaagtttctttaagaatttcaacggaatgaatcttgattatgcattcttgatcgattactaagctttgatttgtgaattttttttgaccaatagtgtagaatcaagttatcaaaactttaaacaatcaaatgattagcaatgacaagattaatatatcaagaacaacaatcgaatgcaaaataggagagaacagagtatggaaaaccaaaatcagtaaatgtaaaaaaaaataaagaaattaacaccaagatatatactagtttaagtcctatagatcaatgtgatctatgactctactccatttctggaacaccactggaatactctttattgattgagcaaaaatatgcataatacatacgagacagattctctgatgagttctcaataagtgtttcaactctgacacttcaataagtgtttcaactctgacacttatacccaagaattttctttatgtactataaaattcttcttacaaacccaaacccaatctctctaatttctctatacctctttctctctacctctcaatctttcctctctctaactctcaatctcaatttaaactgtgttctaaaatccgtatcttaaaataacaagtcaatgtggtatttataggcttaggatcaagatcctaaagtcaatggctacaggaaacgaggttgttaagttagttagaaataactaacttaaccaactcctctttgagcgaagtctcgacgccagcttcactcttagtgcatccagaaacatatacgagcttctaggatcacagaccaaggcactcactaccgaagcattcggataggatagagccaactagagtcgactttctagaacttccttctaggcagaatatctagttgtctggaactcttttctagaggagggctagctatcctgaagactgaatccaaagtgggcatgatagtcatctgggaactccatttcggactcaaatatcattccataagactccttct

SEQ ID NO: 240888 - DNA, 802 bp, Cannabis indica
acccggtgtttccccttacggatcacgggactactgactgtcacagattattaccgccaatttttgaggttgagtattaatctgcatcaaccttatgtttttggggacttttaccgcaattatcccttcacaatatttgttgtgactaaaattaaattagtgacaacttgtatctgcatattatgttatagtcacaagtaatattttgttgtgattaaaagttacattttgtcaccaaaaaattatattgtgactaaaatgttgttactaaaagtagcagtacttttttatagtattaattattacaaaaattttattaaatatattttttatactaaaactttttgattagcaaagattaacgcaataatttaaaaaatatcgtaacgtgccttaactatagtaagactttacatttatttaatattctcaattcttagtcaactgggcattgttatttgtatatagtatccccacgtaaaaactatttgaggaattagttataagaagatgagtaattacttcactttcattcaagtcattaccgagatagaatctcaagattcttaccatacacactcagctgatctatttctttctatacaaatttcatattattattgatgcagagactagtgagctaatgtatatataccatgagtataacgttgttttctcaagtataatatataaattaatgtaggatatttctcaaatatatatatatatatatatatattccaagatatagacttatgtgtgtgagtgtgagttggcctagggtaaaataatgttattgttg

SEQ ID NO: 240889 - DNA, 1014 bp, Cannabis indica
actagaggagtagttattattattggtcgctagttgttgtgtggtttgagtgcttcttaaaccttgatgtcacgtgtactaagtagtatttaaattaaattgtttcaaaaagtattgtacatgtatcatgtcttgattttaaattttgaaagctttccttatatttctccaatgtaccacacgtttcttatatataaacattagggtaactatattttgacacctcattccatgaatagttcaaaactactcatcaagacctattatttaagacttataaaattataacttaactatttctcaatgcttcatatacaaactatttatttcttcaattcctcatgccacacatgcatatatttatgcaaaatattttatcactaaatttgtagcatccaccatagttatctctaatagtcaaagtagtaaccaaaaattaaaattatatccgacttaatctatagtccaactataatatcaacataattcctatagcttgaaagataccatagtcaataacacattttatgaaatcactatttccacatcgagatattaagactaatgtaatatagaaaataataactaaatattttagttattacagcatagtaaataattaaattcaaaatgacatttaatttcactatgtcatatttaaaatttacattatcttatattatgaatgtttgattaaataataaataatttaatttgaaagaccaactaattctaccatgtcatataggagtgtttgtcaaattcaatctgcattattttgcttttagtgcattcgatctgcgctaataacgaattttatattttagatccaatgcaatccgcgtcatagctcaaatccaatctaattcaatcaataaaaatacgtattagatcagttattttggatttgttattttttaatattaaattatttaatgtttattaaaaaatattttttttacataattaacaataaaagaacacaaattaatgttgttttatgctccaacaaca

SEQ ID NO: 240890 - DNA, 1030 bp, Cannabis indica
tgttttgtctgagcatggagattcgaattggatgtgaggtgaatagtactcatgttatcttaatgcatagctggggctgccagtagtgaaacatcaagttcagttaacatagtttcgatccaagagacttcaaaacaccattggcaagagctcaatattcaaaatcagtgcttgcctttttgttctgatgaggaccacgagatgagatgcaaaccgaaaaaatacagtaagcactagtgcttctgcaatcatctaggtaggaagccaatctgcaacagtgaagcaataaagattgagagtagagttgggttgaatcaaaaggcctaggtgggttaacccttttagatggcataagactctcttggcaggttgaagatgagttgtggtaggagagtgcatgaattgagaaagcttgtttacgagaaaggcaatgtcggaatgggtaaatatacaatattggaggacaccaatgagacttcgatattcagtggcatccgtgaggggagaaccatcatgaagggatagaggagagagaaagataagggtgtatggacgggtttggaatccaacaaacctgttttggttaataagtctcgtatgtatttggtttgagacatatggagacctgagggagagcgatggacctagatgccaagaaaaaatgtaatgagccaagatcctttaccgtaaatttggtatgtaagtagtgcaacaaagattgaacaagggtaaaagaggagcccatgatgatgatatcatcgatataaactaagatgattaacatgctgccattagacttgtaaataaacatggaggtatcggcctttgaagcatgaaaaccctattcttgaagagtcatactaagattgaaaaaccatgcctgtatagattattttgaaccatagagggactttgaaaacttacacacatgtttaggagattcaggatcaatgaagccttctggttgagtcatgtaaacagtctcggtcaagtttccgtgaaaaaagaaggtattttgaatatcaatatg

SEQ ID NO: 240891 - DNA, 1284 bp, Cannabis indica
ttgtaactgttttaactgactcttgattcttgattgaacttgattcttgtatacttacacatataaataaaaccttaagctcactaaagacgtgaagcttttcctgtcttcatttcaattttctctctgttctctctgtttgcctttcatggtcataccatctggtatttaccttcattgaagattgttaagcttctacatggtatcagtctcctcctatggagtcttccaatccttccagtcctgcggtctccgccggtgcaaatccaagaaacacagttcaaacccctgcttccactcccccaatctggaatccattttccagttcgttgtctttatctctcaccatcaaacttgatcggaaaaattttctgttgtggaaatctcaagttgttcctacggttattggccatgaactcgatgacatcttgtttgtcggcgtccctcccacacagaatttggttacgggtgacaccaatcctctctatcttcaatggaaaaagagagataagctccttctctcttggctaaggtcctccatgtctgaagctgttcttgcttctgtggccaatcatcacacttcgtatacagtttggagggcctttgaacagaagtttgctagccaatctcgtgcgcgtctcttgcagctcaaaggacaattctcccatgttcagaaaggtaatttgtcaatttctgattacattgacaaagtccaatctcttgcagattctttggccattgctggatcatctttaagctcccaagatattgttcttcaacttctcaacggtcttggacctgaatttgaccctgtggtatcgggtataacttcccgtagtgattctttatcaattgaagaagttcaagccctcctcatgtctcatgaatgtcgtttggagtatcataatgccatgactgatctctctattaaaatgcaagcaaatcttgcacttggtgactcaagatccaaccattctcgctttcccccaccagctgctcgaggaaatgcctctcaatttaatgcaagaaccatgggcagaggtacaaatcatccctacataccaccccaggctcgattaatctgtcaaatatgcctgaaatatggtcattcggcaccagtttgccactaccggtttgataaaaactgggctccttccaaacaggaactccttctcctcgtgcccatcttactgaagtggatatgccccatgaatctcaggtatattcttctgctatattacctgattttggtgatgaccatgtttggtttgctgatacaggcgc

SEQ ID NO: 240892 - DNA, 1586 bp, Cannabis indica
aagtgatattctgcctcaccggacttcatcacccactgacatcgcccaaaatgtccaacgacgggcttctttgccatctcctctgacatccttcgaaagatccatattggtaacaggcgatagccgacctttgatctgctacttccattttctttgcaggtgtttgaggttctctttgtgcaatcggggacttgcgatgtcaagtttggagtttgcatcttgcttcgctgggttagatatggggttcaggcttcgctactggttggccggcttggtggggatcgcagatttgatcgaacataggctgcgctgggctgggcttggatttgatttgattttgttcagatttattaggttttggtttaatcttcatttttgttttttgttatctattctcagatttgctttagaattttttatctatgtacattgtttggcattagtgttcaaacccatttgattattgagttgatttttagagcacattatcacaattcaccattgaagttttggtttttaacttttttttgtcatgaaattaacctgcaaaaagaaaagcaattgaagttttggattttaaatttttatgcctctcgtaactaatctgccaaaggaaaaaaatagaaatcttttttatttcaatacaagatattcagtttattttttattctaaataatattcctatttaagatttagtatataattgatgcattaataagttaattaaaattattcataatatataaaaatttaaattaaaaacattaaatattatttttttagaaaaatatttaagatagtggcccttgttgtgggtctctatatctccacaaataacaataaagtataaaaaaaaaaaaaaaaaaagaaagatatagtgacactttttgtgtgttgctgttactttttagttctgacaaaatctgactttaaatgcttatagtgacgcgcagagagtgactataaaagggttcagtgacacgcgtgaagtgtcactaaaacagtctttccagtcaccctcattagtgacacgcggtgaaatgtcactaaatagatttagagttactcaatgtgagtcactaaatcccatttttctagtagtgaggcaaggactgttcaaggagaagctaacaaaagacttgaattctgtgatgaatgtattgtggggaaggcttgtagattgaagttcaacaaggcagaacacaccaccatagaaaggttagcttatgtctattttgatctttgggggccatctaggattccaaccaaaggtggagcacactactttatgagtattattgatgattgcagtaggaaattctgggtgtatttgttgaaaagcgaagatgaggctctaggaacctttgatacatggaagaggctactagaaaactagacagtgaacaaaattaaggtactaagaactgacaatggtcttgagttgagttcaaggaattgtgtgccacaatgggaatcaagagacatatagaactgtgatcaaaaccactcagcaaaatggtgttgctgagaggatgaattgaaatttgattgagagggttaggtgcatgttactaggagctggttt

SEQ ID NO: 240893 - DNA, 860 bp, Cannabis indica
agcctcaatttaatgcacaagggaaagacatggctaaaacctccacctctaatgatcccattattaagggggttaacgccatcacaataagaagtagtaaatcttacgaagatccatctataaaaaccactacttcaaatctaaaagttgtctaacagggaaccgctcaatgctcaagccaaagtatcgtttccccaggctcttagacctgttgggaaaattcctgaaaaattgagctgaactccttgagcacttgacacaagtgaagattaatcatcctttgctccacttcgtaaaacaagttccaacttatgccaaaatcattaaggacttgtgcactgctaagagaaagcaccatgtcaaggagactgctttcctgactgaacaagtgagtgtggtgatcgaacaaaagacactgccaaaataaaaagatcctggttgtcccaccatttcatgccaaattgggactcatgaagtcagccaagctttgcttaacgttggcgcgagtgcgaatctcatgccttactctgtgtatccgcaacttggtcttggagaaatgaagtcaacatctattgcgctacagcttgctgaccgctccatcaaaaagcctcggggtattgttgaggatgttcttgttcaaattgagaaattctattaccccgtggactttcttgttcttgatacccaatctgtggtaaacatgggataaaaaattcctatcatccttggaagaccattccttgccaatgcaaatgctttgatcaattatcagaatggtctaataaaaatatcatttagaaatatgacacttgaggtcaacatctccacattgggaaacaactccaagaggatgatgaatg

SEQ ID NO: 240894 - DNA, 1200 bp, Cannabis indica
gggccatccaattcattaaggatattgttatccaaaagaagcccattgtgttgtttctttgtgaaacattggccaagaaggagatggttgagaagcttcggatatgtattggttttgaaggagcgtttagtgttgatgctcaagggaagagtgggggggtggctttactttggcgagatgctgaggagtttcaattagttaggttcggctctaactatattgatggcattgttcataatcgtgactatggtgagtggaggttgacggttatatggtgagcccaatcgtagcttgcgaaagcgtacttgggatcttcttcgttcgttgaaaactgagtgtgacttgccgtggtgcatagttggggacatcaacaatgttacttcccaacaagataaaaatggaggtaatctttacccgacttggttgattaatggattttgtgatgctttggatgagtgtggtcttcatgatttggacttgagtggttatccttatacgtgggaaaggggtcgaggaactgattcttgggtggaggctcggctcgatagagctttggtttcacagagttggcttgctaaatttcgtttggccaaactctataacatggaagtgtccacttcggaccactgccctttacatttagttcctgtaaccgagaacattcatgtgaataatagagttttcagatttgaaaattcttggttaaaggaaccaatgtgctttaaagttgttgaagatagttgggaattgtcctccggtctctccattacagaaaaaatacgggattgtggtactgttttgcttgattggggaaaagattacactggtaattttggcaaaagaataaaggcttgcaaggctgaaattaaacaatggaagaaagggcgagacaccgagtctgttgatcgttacaaagctgctgagttgaacttgaataatctttatctgcaaagagaaatattctggaagcagaggagtaagcagctctggctacgcgaaggcgatcgtaactccaagtatttccatgccaaagcaacatcacgaagacgttcgaatgttattcataagttgaagaattctgatggtgaatgggtcggctgggaagatggcctccctaccgtgatagtgaattatttccagcatttatttatgcattcggatggtgattattcttcgcttgtcaactgtgtttcccaatcg

SEQ ID NO: 240895 - DNA, 1547 bp, Cannabis indica
taatttcataaataatcatgattaactgctaatttccaaattaactaagcgggctttacaacacctattacataataaagaatatttatagctattcataatcaacaatctcagtgttaaagcaccctaatcatacatcattatgaacactcactttcagggcttcataaagcactctaattcatatatgaccataaccacttaatctcagtgcttcataaagcactctaatcttacatccctataaacatgtattcttacctcccgtgagtcacagagactctgcaagaaaagagactaatttcataagcaatataaaattcattcagtcacattataacaaagatgtatccaattacaactcatcacataataacatgcttaattcatttcacaacatcataatctcacaatcctggtacttcataaagtacccttaccactcgttaaccacgagccacatatgtcactatcgttgcctgatacagcaaacgataagtaagaaacctatccgcggtttcaagaataattactcataacggtaatcattgtttccaatcctcaccactcgttatccacgagctgcgtatatcactatcattgcctgataaagcgaacgataagtaggaaacctaaccacggtttcaacgagtaattactcataatggtaatgactgtttctaaccttaccactcgttatccacgagctgcgtatgtcactatcgttgcctggtaaagcaaacgataagtaagaaatctatccgtggtttcaagaatgattgctcataacggtaatgaccgtatcttaattcattcacaacaacggtgataaccaagttcttcccttaatcataagcaattcaaaaacaacaataattgtttcttatcattacctcgattaccatcgagtcacaacaaatacatatcgttaacctcaattaagattaagtcacaataaacacataccgagatcttgatcacaatccagactgtaacaatcataacattacaatatacggtgcttaatacttttcttacctcaagtccaaagtcaagtatgtgggccgatctgagtggaatgatgcacgaccatctcaagtcctatgtcacgacaaaagtaaatcaataagggtctatttcaaaatactgtctaaaatccgcataaaataacttagggttttctaccgaatcttatggtgaaaataccctaaaataaaatacatcttttggctctagtctatgactcatactgtagagctcttcataagcttcgaaacggtatatagaatgtcaaaaaaggacaccagagtgaaaaattatggctaaaatacgaaaatcgacgattcctaaaaattgaccatccgaaattccggttggtgcagccctgtaccatctggaattccggttcactacagcaggaactcgaaaatttcagctcttaaaagtcccaaaacttgctccaaacccaaccaattgttcccaaacttcacagaacagtataataaccacaatacaacatatccaagcttcaaaacacaacaattcaa

SEQ ID NO: 240896 - DNA, 838 bp, Cannabis indica
cttttcatttagaagaactatatgacaattttaaatataaagaaagataattacctttgctttccatttggagcatgaaaatagatttaatgtagaaaatattttctgaaacaaacaaaaatcgaagactttatgtgtacccctatatatatacctatatatatatttagaatgactgagatcatatgtagaaagaaaattattataaataacgtagtaaagactcatacgttgggcacatcatgatcaaacttattctaaactcttatgtgtttaatttcatttgttttagagatatgatgttaatccacatacatgttagtaaatctagatcctggtaaaatatttccaataaaaaatattaacattaggcctcagatctgagccataattaaatttctaatccctatagtacgaaaaatgatggagaatcttttagcctcaaaggatcgacacaattagaagcaaaagaatacgagttcttagatattgatttagacgattccatatcgagaaattggagttgatcagcggacaatcaggtgaccagatcgttgaggcctccacgccattggaggacaaaggcaaagtaggcaagagtgaagggaagaatagtcaagagcaagaggatacgagaagcgaatgattgcgaagaagatgaaaatgaagaaattgaagaagatgatgatgatgtagagggtctagtagccaattgagaagctagtgctcagacttgtcctcagccaggaggcaaacaaacaacgttaagaaattagagaaggagagagaggcagagtgcgaagagagaaagcagagtggtgagagagagagagagaga

SEQ ID NO: 240897 - DNA, 1075 bp, Cannabis indica
aagtattctcgtcaatttctatagctgtcaccttaacgatcgtcacagaacggacagaataggtggtggttcgaaacagtcgctaatttccaattcccaattaatggtttaaaaccatgccctatactataggcgatagtttaaaattgtcccctataccctattatatgcaacatttttaaaccgtgccatacagtacaagttatgatttttaagtttaaaatatttttttcagcgacagttttttcaatcgttacattagaaacatatagggaaaatactgattttctgccatttttttcctgcgttaatttttaattttttttacaaatttatatagtcacaataattaagacaacgctaatatcatctaaatatatttaaaaatctatatagtaacaataattaaactaacactaatatcatctaaatatatttaaaaatctatatagtaataataattaaactaacactaataatcatctaaatatatttacaaatgtatatagtaacaataaattgaaatatgtacacactgatcaacaatgcaaccattgtcgctctaattttgcattcacgtaaagaattcaccgatcatgcataatatttatctcgtcatttgtgtacgaaatggagaacttaccctgtaaaataaatataaatattaatcaataaaacttattatcatatgatttaataaaaaataacattcattataatacttattaattatttcatcagttatgtcaattctaatattggatcttctactgtcatgaaatttttaataaatttcatgacgtagtatctacattattgtcatctggctgttcaagaaatataagagttatccactggataggtctatcaggtcccttgtcatttgattgtaaatggtgaatgatctacacataaagtaaagttagcatatataaatttataaatgtaaaacacgcttatatattgggatgtttgatatagaactcacatggatatgatgaattctaaataatctggtatgttgccattccttggatccaagtacgccaccatctgcgtacttggttggatgagt

SEQ ID NO: 240898 - DNA, 1420 bp, Cannabis indica
cgtggtaaccacgtgacatttcaagagttattcttgccccttttcgcgcgtggcaaggtgtgtttagacaaaaaaggtggaatgcaactggcaactaaatgacgtgcataaaaggacctcaacatttttgtgggtcccaggctgatcgtacgggacttctcatctccctagctgttagatctattgcaagaattttgaaccgttgatctttcataggcatgttctctttttgaaatataaaccgcctttggtggtgttccttttactccatttactcgaagctctattttttctctgcaacttctttttcttttccagacatcttttgcatgcaagaagcgttagatgatttgatccaacgattactcgtcatttggacaaaacttttcccagacatcgcacccctttgattggaccatcgaagttcttccttaggggaaacgtttgattttaaggttaactgcgaccgctacattgactagctttcgagcttttaggcaggctttcttgacacgccacttaaccctcctgatttgacaagtaagtgaactaaccccttgtttgagtttttggcataacacatttagagcaaaaggttttttcttaggttagggctaggactgttcgcgtgctgaataacaagatagtgtgtacgaaagaaaccccatccttgcattcgttagtcatttcaaaaggtttgcttttttcctttgtagcaatggacttgaatcaagaccttctcgtaagtgcgaccatatctatcaaaggtgggtctattccatctgtcgaaagatcttcagtgggacatgatcaaactagggctcccatggtaacatttcaacttgaggaggccttggaaaccattccagaaaatgaacccaccgctgagagagacctccctatggacactaggagaggcgaaggggtcgaaaatcctccaacgatgtaggcccgtctagagtccatttgggaaatggatcagaaatctaacttctttcaatctaatgggatgttataagtttattctgaattgttggcctccgtaacgtccttggactaatgtggcacatgcttttcgtcattggggaatctgcttccattagtgttgatgggtttagtgcatggagttggtcccacatttccaatggcactcaccttcccttggtgagaaattattttaagactctaattgcaaaaatttacattgcaccatttcagctgatcctttcatcatacagcaggctctaggctgggtggtatgtgttctgtcaaatcaacaaactggaggttcctttcctaaggagatcctttactttcatagtgtcaaggctaatcccatgaggacaaatagaacaaagttgggattcttttgaatagataagcgcccgaattcttactatcctgtatgtcaaacagatcg

SEQ ID NO: 240899 - DNA, 688 bp, Cannabis indica
atctctgggtattcctgaacaagcgccgataatcctaattacacattcttgagatttcacaaatagggttaaccccaaaattcaatttcacatcatcacataatttgcattctaattacaaataaacatatagagcttgaaacgagcttttcaacaatgtaaagaacgtccaaaatagagtctcaagtcaaaagatatagccaaaacaaaattggaaaaatgggatggctctctcctaagttttcgctgcgatgaccaaaaattcagtcacaggttcaaaaaacctagaaaactaatttttaaggtctaaaaatgacaacttttttatatttttgaacctcaaccaaaacatatccaaaactcgaacaaaaccattcataaactcaaattttatatctcacaaaccttacacaacaattctaagccaaaacaaagctcaaaatcactttcacaacatacccaaagcatgaacataatctacacattacacatgattcaagcttgaatttctaagccttcaaaccttcaaagggaacccaaaaattcaagcttaaaacccaaaaattcaacatgtgaaacaaccctaaaatctcacaaaagtagtctagatgcactacacataatctaagcaacacatacacaccaaaatatcacaaatccaataaatgcatgataacatgcatcaatt

SEQ ID NO: 240900 - DNA, 1175 bp, Cannabis indica
ttttatattgtgtataccccaaaatacatagggaacatccatcttcaacacctacggactgaaccaccaaagcaacagcaaaacagtcagaaaacaagtatttttccagtcaaaacgtaaatatttaaaattctaactaggaacaataacataaaaaattactaaaataattgtaaaacaacagaaaaactacaaaacaaaataaccaaataaaatcacaaaaaattactataccttaataactcttttgccagtggaaactatcataacatgatcatgagaggaaaccttcaccttggaaaatttccccttaccctaaatacattaaaaagaaaaataacttagaacaactaaaaataatcgttaaaaaatataaaaatcaagtacataatactaaacaccgaataacacatacagaacaacaaaacatatatttaacaaaatcagggagtgatgaacaaaattctaaattgatatctaagactcaatatgcacaaacaaaaaaattaaaaaactaaaactgaaaaagaaacttaagaagttgaagaaaattttgaagatgatggagatgagaagagtaagaactaatggtaaccacaattgaaaaaaatgtggatcaatctttcaaataaatgaaaaaaaaaaactgaaaaaaaaatacttaagaagaagaagaaaattttaaagttgatgaagatgagaaaatcagtaagtaaggagtttggggtaacatgtattcaactgcttttttttcttctaaaaactgtctcaaaagaacaagccagaacaacaacaaaatgaccgttaaaaatatcaaaaatatgaatacaataaaaaaaaaatacaaaatacaaaacaacaataacaacaaagaaatgaacaaaagacataaatcagagaaaaaaaacccagaacatctacaacaaaaaagagaaaaaacctaaaataactgaaaaataacataaatacttttagcactttgggttcgcaaaattttcatcaagttcaaaataagagtctgaatctttaatgatcggtttcgaacgtttaatttttttttttttccaaagaattaacaacttattttcttttggaatctacataaaatgtagggctatggaagattttttgaaatttttctttcccattggtaatttactaagaagaagaagaag

SEQ ID NO: 240901 - DNA, 1138 bp, Cannabis indica
attatgattaatgtgtatgttgagtttgaaaattgatcaaccgacagcggggtcgtgcagatctaatgtttaccacgtgtgtacacaaaaaagaataaaaaacaataaacaacaggatttgttatagagcttcgccccccttgtgataacgggtaataacctactccccttttagttgtattatactgagggaattactatccatatcgctataggtgagatctgttatagtaccctttaggattacaatgtatgaatcggtgtttggcagaactcaagtgttggacagtgcctagggtgtgcagcctaggcttgggcttgtgaaagagagtgaggaagagagagagtgtgtggcacttagagagtttgagatttctagcgtagaggaggattaggcaacttattaggttttcagctagaggttaaggcctttatataggaggcctaaaccctagggttacaactcaaatcccttaaaaatacgatagttagctaaatatttacaaaagaccaaaaagcctttagattctagatactttttagcctctctgttgggtttttggggcccgattcacagcccattcttgctgtgcacgtgtaggagagtcttgtgggacctaaagtgcaatccttggccggccatggccttgtgttggccaggatggccgaccattatgttttttcctagcttggctagccataaggtcggtcaggggttgttagctagctcctgagagcaagttggactgtcatttgatccctgttagagtgtcgaggtcatcgttggctcagatgctgacttggccttctttttaatgagttgtactaccacgtggcgcaggttcttccacgtatgtatgccacgtcatgaggacaaaattgggataatatttgccccctaagtccctatgcagatgtctgaacggataatgactttaccagcaagaatgatgttgtcgagactgcagttacttttgctaaaataaaagtggtgttgaagtattttgtcttgattgtttgttcttattgcaatagagaaataactcatttatgtgcctatatgatgagtcggtcaagtgagaaaaatgggggcccacatgtacataagtgagtttagggggaaacccttttttcactt

SEQ ID NO: 240902 - DNA, 582 bp, Cannabis indica
tttgggcatttcaaattttcattaaagagagaaatgaaagatgattgaatggtacctttcaaattgagggcgatcctaacacggaaggagcaagaacttctccagtaggaatagagcttgagcttgggttggtcacccccggttgcagtggcctaaaatttacacatttaaaaaaataaataaataaagattccaattttgttttgtgagagcagaattagggatttaccataagggataaggatgaagaacaagtgaggagtgagtgttgattaagtcggaagtcggaggagatggatggaataaacgatgctgttaaatttatgttttttttttttgaataattaaatttatgtttttgtcgttgggtttcgctactcagtcgtgaaatctaggtgcaaatataagtatcacgtccatataaatttaatttaataacattatatagaataagtttatagtagggacattggctttatttcttagtatagagacatcttatatttttcctttttgaacataaacttgtgcttgaaaaggtaaaacagaaaatacagaaggaaatttcatattttggcccta

SEQ ID NO: 240903 - DNA, 1277 bp, Cannabis indica
ctgattgttctctttctggcctttatcaaagtgaggttatatcatccatgtgcatatttttgattgcctttcagatgccctacaccatttccaagttgaaacttcatgcataggtgtaaattgaggtaattgatttttaaatcatatagagatagttggcctaacatgacattgaatgcgaaaggtacatccattagtagaaattgttccataattgtgctggctattggagcttttcctaccatgagcggaaggtgagtgtgtctaagaggagctatattttggttggagaaattgtacactagctgtgtttagggaactaagtctttgagttggagccccatcttctcatatgttgtcttaaaaagaatgtttgaagatccgtacactagcgaaaaggtcctagtgaccctaaaacaatgaaccataaagttgaggatgtcacgtggacatcccagggactcaacttgggtccaacatcaatgttgggtgcccaggttgacatcatgtgcgccttctcgcatcaattttaattcatatcaactacttatgggaaaatgcttagccattgtcctaagatacatgaaagacatgcccaagtcaagtttcagacttaggagataagtctacaagaaacaacacctgggcaccatgaagccctattgggcgcccaggttatacatatagttgatttggacccagatgaaaagttgggcgcctagggtgacaactccccagtcactagatgcccaggtttacataaccacacttctggtggttccgccaatccgattacaattctatcttaggaattattcttgtttagctcccaagacaagatatgagacttggaatcaggagaaaatagtgtccaagtagtgattttagtccttaggtatcaccgagcgttagcatgcaagcacactgggcgcccaggttgacattgggctaaggcttaatgttttgtccttcaaacaacagctttattctgggtatcggtcttatttttccccaaaaagatatgatttgaaggtttctgaaagtcaatatctcatgtacatgtgtcatgcacaagtccaccgacacccatatgcactagtgatcagccggatgtcacctagtcatcactagcgattcaccgggcatcacccatgcatatcaagtaaaattgccaagagaactttcccaaggtcaaaaaataatctaaggatagctatcacatcaaccaagtatctaaaaatatgtctaaagcccaagaaaccaagttttgggtgcct

SEQ ID NO: 240904 - DNA, 864 bp, Cannabis indica
ctaacctgaataactctggatattgagtcctcatgctggactctagttcccaagtggcttcctccaccttgctattctttcagagtactttcaccaaagttatggtcttgtttcgaagaactttctctttcttatcaagaatttgcactggttgttcctcataggataagtcgcattgttgttctagagcttcatagctcaacatatgagttgggtttgacacatatttcctcatcattgaaatatgaaatacattatgaacagcgacaactctagtggtaaggctagccttaacactacctgcctgaccttcttgagtatctcaaatggccctataaaccaagaccctaacccctctttccaaagcgcctgatacttttcactggtgaaactcacatgaaaacatgttctcctgcctgaaatgcaatgtctctatgcttcgaagcagcataacatttttgcctgctttgcgaagcaagcatccgaggcttgatcttgtctattgcctcattcgtcctttgaactaactctggacaaaaatacttcatttctccagtatcttcccaatgaattgaggatcgacttttcctaccatacaacattttgtagggaaccatccttattgtactttcttaacgtcctaatctatagggacaccacatttgtgattttataaactagtttaatactaatagattaattaattattaaaaattgcgattatattaaaaactttactaaaataaaaccctaaaaaggacattataatgacataaaaaaagcgtgttctgaggatccctattattaaaagctttacaaaagaactatatacgatgatacctaaaaacataaaactaaaataca

SEQ ID NO: 240905 - DNA, 660 bp, Cannabis indica
atttctgattttttgacaaaaaattccaatacacaaaggttaatgtcatatttataggtatatttcctaaatggacctaattgatacggatccattaggataattttttagggtatgtaaaatcttactgatgggataaaatataatataatttgagctatttggtcaagtaggtgaggcccaaattagattgagttgcatttcgtacacagtcgtactattgacagtggcaggaggggcataaactgtcgtggggaataagaaatgtcaaagtggtgggtgtttacctaaaaatatgatttccttttcgttgtagcctttccaaggatggggacaagccacttgattttttgaaatcgtgtcaaagaagtgccatgtaggcaactttctggacacctagtgatttcgaacgtcttttcgctttttgttctcgaatgaccccttggggtgtccaccttgagatcacgccgttttcctgttaagtgtagattgttgatccgaaacttggtgtccagattcgttgctggaaaaagattatggaaatcagaccatccaaccagctttgcccattcttgatgaataggttggataagttaaccttcacgggccagtaaatgggattggtataatggttcaggtgctagatatatagaaagataa

SEQ ID NO: 240906 - DNA, 1039 bp, Cannabis indica
atatagtattaatgattatttattgtaattattgttacattgatattttttaatttttaaaatttttttttctagtgtaactctatttagttataacctcccaattagaatataatttacttggtcccaagtgtattcttggatagaggttctactgtatttatatttttattaatttttaatattcctctcattattattactatgattattctaaaatggtattcatctcattattaataatgtatttattatatttattcatatataatatcaaaatataactgttcacattaaaaataagctaacactcgcttgttagattgacgatgaaataagacatgaatagagtaaataaagagacatatataatttatagtagctcactcttcatatcgctataataatgaaactacatctactttgagtttttttttttctcacgagattacaagagagtttactaagtgtgaaagctttaaatttctaaagagagaacttagagggagatgctttgaccttatggaaactagtctgaatgtgaaacatgagctagatgagctctccttttatagggaaagaagtcatattaaaataataacaaatattcaaaaaaaaaatatataaaaaatacatttaagctattttgaccgttagtgatgatctaacggtgaaattgactctagaggtcgttcatcaatttttggagctcgagtcgcgtatgtacatgccgttttggtaagttgtagttaaaatttgtaactctcttgaggacaatattggacttgatatcttcagaatcatgattagagtgtgaaacatgacttgatagagcatgaaatagtttcgaaattcaagttgaaccgcgtcaacctgattaatattgagtgagttatgactgtgttactacatgttgctctaataccggcacccaggttgacattcagtgtctaggttgatatatgacgtcaacgtggatgcttgatcagtggaaaaacgtgttgggaatgtattttttgatgcctaagtgatattttga

SEQ ID NO: 240907 - DNA, 1146 bp, Cannabis indica
ttctcatgaaaacatttcgagaaataaaaaattgattggtgttaatgtcaaacaatttatatcctttaattccttggcggtatcccatgaaaacacaagttcttccacgaggtgaaaatttagttctgtgcgtagtgagtgttgaagcaaaagcaaggcaacctatagttcggagatgttcataactcagtttcttgttgaaaagacactcaaaaggtgttttatttttaagcaaaggagtaggaatccgattaattaaaaaaacagcagccgtgatacattcactccagaacttgatagggaatttggcctgaaaatataatgctcgagccacattgagcaaatgttgatgctttctttcagcaacaacattttgctcaggtgtctcgacacaagtaaagtcgtgcatgatcccatgttgagcaaacaattctttgaaaactaattcaggtgcattatcagacctgaaattttcaaagacacagttgaattgtgtttgaacataggatagaaattgagggattatgttcttagcatcagatttgtgctgcatcaaataaatccatgtaaaccgtgagtggtcatcaacaagagtgagaaagtacttgtgattggtgtgtgaggctatgtgatagggtccccatatgtcacagtgtattagatcaaaactacgatttttcagattattattgctctgaaaagagagtttcttttgcttagaaattggacaaacataacatggtttatttttatgtaaagcagaagtgttacaatgcaaagttttcttgagaagatctaatcgcttatgagacaaatgcccaagacgagaatgccaagtctcagctgaaatggacatgacttggaagggatctggtgcctcatcaaggatatagagataattgatattgctaccttttccaatcatcctccggttggctttgtcctggataaaaaaactatcatatttgaaaaatatagtgacaacagtgttctttgtcatataactggtagagatgatgttatatttaaaatttggggcatagagaacatcagtaagaatgatgttgttattgagaacaatagtgccactttgattaacataaaaactattattgttaggcaaaatgagtttagtagctggtattt

SEQ ID NO: 240908 - DNA, 1012 bp, Cannabis indica
caatgtactacttggctaattttattctataaaaagagttggtgaaattagagttagtaacaaaatatataatatatttcatattcatatagggaaatctctctcactcatcctcttaccatggccaaaatgtattcatatggagcaatattcctatttgggctgctaataatcacaagtttagacaaaacaggtcatctctatcttaattttataagcaaatttaatcctacatatatatagtactagagtattattattattaaaaaaatgtacataaaattggaatctttttatatatttttacgtaattttattttgtttgtttgttattttttttttttggaaaaaaaaacattattttcatgttgttttctcgtagtaataacgtgaaaaaaattgcacctttattaatttaatagttagttagagggtatgatttttctatattatttacactaattttattaataagctctatgataatttttatactttaagaattttgtgggacacctggactagaagaagaatatatagttcctccctaacataacttgaaactaaatgttagatgattaacaaattgagtagcacatgttattgctagatattcttgatttttattttcgcatttttgagtataatatttgagctaatttacaagctttattgtattcagaatgttaatattttaataaagttactttaaaactaaatgtaattaatgcaataataataaataaataaattgaaagtcatggcggcttgtcacgaaaattatctttcaaccaagtatatagaagctcaaactcttctattggctttgatagtggagttaagatctagggctaattatatatcatttgtggtatatattgtcaagtctcttaattgctaagttttaatttagttccatagattgatctacctagcttaaatgatttaagtacttattaaataatcattaattaatctctcatttacatttgagaaatgttaaaagatacca

SEQ ID NO: 240909 - DNA, 1260 bp, Cannabis indica
tcagaaccaaaatgtctgcttctgcatctagttccaagtcttccaagaagggagcggtccaactagccaccctggaagaggtcatgaggggccccgtggctcaggagaattttaagtcccgtgccaacggttgggaggcggacaagctccactccacgctgacttgtgcccaccagctcgaaaagatcgtgacggtggcaggcatcaagccatcagcctccgggaccttccaccggctgcttcgggacgaggagacacccaatcacaactatgggggcttttgagcttggagccagacccatctgatgtccggggctatgctccctcttcaggactattttgttaattttttagtttttgttggcctcgcgtcgtatcaactgattcctcaagcataccgcctgctttcaggcttattcattttgtacgctgcccggagctggggttcgcccagtctggctgaaattttatatttttacgaacttgtatccgtccccaaaaagggggacaaatttaaagatggattttatggacttcggtcccaccctttgaatgagggcccagtcccttttaattaccagaagtacatgaaggagtaccgccaccgcttcttcttttcctccagtttccaggccatggaccgctcggagcttcttacggagtgggttaggatccctccataactgcggaccgcacctactcaagtattcctccagcgggctaagactttctctacttacgacaggaaggccctcaacgttggggacttagtcacgatggagaactgtcgaaagccaagctgatatttgagagtcagtcggtagatgactttaacctttccaaggtcatctgtccgaacgtaaggactccggccgcggaaagagcgctccgggtagatataattacttcagctgaggagcggtatcagaagtatctctttagaagggagcaggagctggcttacatcaaggcccagactgcagctgggaggacccttcttctggaagctgccccggagcggaggccctccaggcccaagcctttggtttcggttcttaacactggtgctccaaatgccagtacttcaggttccggtaagtctcctttagttattcaccatgtcccttatgtccgagagtatactcaatgtaggcccgtaggatttgatgagcgcctttgtaagtttaggatgccttccactcggtggggggatcatgccaaagactactatttcttccacttaggccatttcttgggtcg

SEQ ID NO: 240910 - DNA, 1592 bp, Cannabis indica
tttttaaattaaaaaaatcatcttagccacatatctctctaacaaacctatcttgggagaatatcatgtttcctctaaaaaggttctccttaaaaaaaatattaataattttttttcccctgcgtcaccgccttggccttcctctccctcaccattatcgtcctctacaggtccttttccccatgctctgatgtttcttttttatgttttagtttttatttattggttgggacattttgtctataacaggttgacgacttcgccacccagacgaaaatggttgtcggccacaatctagaatgtataggcaattggttttaaaaggatctaagagggctgtttggctgtgttaatttgatctgaagagggttagatctttgtttggttgcgagcaagatgacttcgctaagcagagagcttgtatttcttatacttcaatttcttgacgaagaaaaattcaaggagaccgtacataagtatgcttattgtttaatgatcctttgcttttattagtttcatttttttttatggaaaataatatatttgatttttttttattctttctgataaaccatatatttgaatgctgatataaaatgaatgattgtggggttgttaggttggagcaagagtcagggtttttcttcaacatgaggtattttgaagacatggtaacaggtggcgagtggaaagaggtagaaaagtatctgtctggttttacaaaggttgacgataatagatactctatgaagatctttttcgagattaggaagcagaagcatctggaagctttagacaagtatgtgtttaaggttttattgaatcaggaatgttggattttattcatttgcttgattgtattgttggttacacatagtagctctttttgctgatccttctggggttggtaagaattaaattctcttctttcatttaactacatgattatcatttaattattttcttaacgtagttttcatttcattatccaaagtaaagcttatgttaagtgatttagtgaactgaaatatgttctgtcatgcaatagaaatagttatgctacaatagaaatatgttggctgtgtttcagtaattgtgtttttaaaagtaagaatataaaacagttttttgtcattttaaaaatttaatggtatttaaaacaagttttttaaaactatttttagatttatatatcaggtatatatctcctctatttattagaattatatttattcaaatgttttgtttataatagtattatatatcctcaatatataacaaagaaaaagaaattaaggaattatatttgtcaattaatttgataagcaactttcaggtagaactgagacaaaagatttttcaattacattggcacaaaaggattgagctaatttgtttccaaaagtttgaattattacgactaatcaccaacaatctgaaattagaggtatgttctatttgaattaatttattcattgggcttatatatttgtgtatttttttttttttgtgtatttgtgtatttatgtgatttttttttatgaattactttttttaaaaaataaatatgtttatataaatttaaatttaaa

SEQ ID NO: 240911 - DNA, 1481 bp, Cannabis indica
gccaggtcttaaacaagaccccataggttggctagggtgtgcaatggatcaaaaaatgtgttttttccaagactcgaacgtgttcttcgtgactcaaagagttaagaatcacaaaaagctcaaaatgaatctttttttatcaaaaaatcatacattatgcatcctaaaactatcatgcggatcaaaatactaaaaagattacaatccaatgtgagaatcaagaatgtaaaactcttgaacacaacaatggaaaattcaagaaaacaagtaaagaaagagatttgaaagcttactcactagtgaaaaccgtcaagggaagcctatgggaagcttggatcgtcgaaataaagcgagaatcccaggatttgtgggacttaggggcgtcaggctccaagagaaaatgaagagcttctctttttcctttttttggaagagagataaagtaaatggtgatgtgggaatgtgcttgaacaaatgaaccttaataggttttggtgagcctttctcatccaacatgtagcaagtagttacacaacctacaaaataaccatgtagaatattatcagttccttattggggaacgtgagttgccaaaaaagaaaaaatatttcataactgaagttggtacaagaaacttgcccagttaagacttcaacagtcaaaattgaagatagaaagtccctatctgtcagacgtctgcacagggaattgggggcaaatgttatcccaatttttacccacatgacgtggcatgtccatataggcaagattgatgccacgtggagtacaacttgtcagtaagaagaccaagtcaccatgcacaacgtactagatgacgagaagtccaaatacttaagcaagataaagatacaacaaactagctaaccagggggtctggccggaccacttcaggccgagcctagtgccaataagggctagccagcctccaacaatggttaggttgaccaacctctcttctagcaggcacttttggtgcctctacaacttttagcctagacaacacttttagttacgaattgggcttcaacaacccacgaaaaataggagattaacttcagttatttacctattctttaggactaattaacaagttattttcttattaatttaatatgtaacaaataggtgatatcttctcattttgagggatatcaacctactatctcttgtatgctctctcctatataaagcgcactaaactaaacctaaagtctctacactctaagttctaagtcttaagctctcactcttaaggcatagagttcaagcactcaaaatcctagctcactctatcttctacacgccattagcagtgtagaagagactaagtctccctcatctctcttgcttgagatttgccactgattctcacaattgtaatacgaagagagccactctagaactcacaatacttgtgatcaatctaagtggtattatctctcatatcattataatcaaaa

SEQ ID NO: 240912 - DNA, 632 bp, Cannabis indica
ttaaaagagttgcaaaaatgcagagtaggaaagtggaaaaactgtatatttatatgcaaggggagggatcccatgtaaattgaagaattttaagattaaaattactttataatttgtttttaacttccaagcaagtttcttaagtagagggttgtatttggataaatatattagtgtagtgtgtgaaatcactagtctttgtcttgtattaacttgtcaaagctaacatactgataagcaaatgttgcagaatctgcacttttctgttattattacctaattaattatgcttaggaatgtaaaactaagtgatacatcaacacttctagtcaactgtttttttggtgctgacctttcttcctttccattatatgtaattttttggtgatcacttttttttttcttttttgttcactgcaaacaaagaccaaaatagttcaaccattaaactagcattgctggttctctgtagtgaatttcatacacttgtcttttagtcaaagagtttttcataagacatgagaatacttttgttaactaatttattggagtagtagtataaattcaagggagagtaataaaacacccaaaaagagtagctcagatggccatgcgtatagtttgctcccccg

SEQ ID NO: 240913 - DNA, 1081 bp, Cannabis indica
ctctctctctctcttttcgaacccttagaccagctaggattctgaagttgttcttcaatccttgccaatttctagcagtttttagtgaattcaagctaaggttagtttctaagcaactctccctttggtgttcttaaatttcaagttatagatttatgcatgttttgtgattttagttgctgtagttgttgttagtctttgaaatatgtttctgtaggtagaatatgtttagatatgttgaattaagcatgtttggttggctggtttgttcattgagcatgctttgagttttagaactcaagcttggctctttaatggtttgggtagttatttcattgcttggaatatgtctattggggtataatatacaggtctggaaggtttggtaaagtttagaatcgatttgattaggttttggaattttttaggatttttggtataaactggctaaccggttttacaggacctgtaaaaccggttacccggatttgctgctgggttccccgaaaaattcaggttgtcgatttgtgctagtttcaggtttttggttggttaattccctgctagtctagggtattaccttgttaagttacagtagatagggttttggtttaaaacctaagtccccgattgtgatttagcttgtcacttatccttattgttattgatgtgatttaggaacctgtaatttgccgagcagttgttccactcaggttgaccggcacacctgaatttgaaattgagataagattagtataatgtcatgcatatgttattacatgtttaccgtacatgttgtttaagcctgttagattacattgatagcagtaatagtatacgtagagttgtactgattactgataaatgtatgttggcggaaatactgatcgatgatgtcacatcaatatggctagagtatgactagcatattgagtataggccgacattatggtcgatagtattgtcgtatgaacgttctagactcagtaccgtgtgatacacgggatagggtaatgattgggtgtatgggcgccaggttataacccaggatattagtctgttttatgttatgcttttctta

SEQ ID NO: 240914 - DNA, 795 bp, Cannabis indica
atagccaacctgtacgctacttgccctatcctctcgaggatttcaaaaggtccaatgaagctcgggttaagctttcctttcttaccgaagtgtttaatgcctttcatcggtgatattcaaacaaataccctgtccccgatctgaaaaaatctatatcccgacgctttggattagcataactcctctgtctgctttgagctgtgagcattcgcgctctaatcttttcaactgcctcactcgttctctgaacagcctcgggacccaagaactttctttcacctacttcatcccagtgaataggtgatctgcattttcttccatataaaatctcataaggggccatcccgatagttgcctgatagttgttgttataagagaactcgatcacgggaaggtactttacccatgatccttcaaaataaagcacacattcccgtaacatgtcttctaagatctgaatagccctctcagattgtccatccgtctgaggatgaaatgttatgctgaacgttaactgagtacccatagctcgatgtagactctcccagaatcttcatgtaaatttcggatccctattcgaaacaatggactttgggacactatgaagacgaacaattgctctgacatataacttagcatactgatcaatggagaaatttgtctgaacaagtaagaagtttgtttggactgatcggctgtgtgcttatgcaagctgaacaggtaagaagtttgtctcgaggtaacacaataaaccacaaactttttcttatcagaaggaagggttagtactggagc

SEQ ID NO: 240915 - DNA, 1396 bp, Cannabis indica
tctcattctatctcgaagggggggagccaagtaaaaatagaaatactcactttgggtttagggataatcatcaagctcgaactgatgatttccaccacgtcaaggtgacaatctaccactgagttatatccattccattgtccccatcaagaaataaattgactaaccctaaggcaaaagattaagaaactcaatgccactactcttgaacaacatggagtcacaccttcttttcgcaatattacaaatacaaaaataatagaaaaaattagattcaattgtcatttgttcctctgaaataggatcgactacggattcgagccatagcacatggttttataaaatcgtacaatttttccgatctaaatatagcaggttttatatgaagaatatttggctcaacatgttgtattcgatatgattaagagaagaacccgactcggtattcttaaaaagtctcgaatgggattaggccctctttttacgtcaaaccctaactgttggtaggttggcttttgatagaattgaccccttgcctatagaaaaagtgtaccattttgggtttattcctaaccttgaacaccgatccctattgcttgatgttcgaaaagggtctgaagcctcttcaagacctaataagttgttggatcaaagtagaaaattctccatatctgggcagtaccgcgaacgtcttaaagagagcgacctagtccgcgactcaaccgagattctaattcggtaacttcgttccttttattttctgcagctactatttttataacaattttaagacgttgagtttctaccatgactacggatgagaattctggtgttattgatataaacaaaccttttcattttgagggaaaccattttaaaagatggaaacagaaaatgttatttttcctcactacgaaaaaggttgcttatgttctgaagactgataaacctgttgtttctgatactgtaaaggatgatgaaaggcagaagcaaactgctgatttaacaagttgggtcgagaatgattttctgtgaaaaaattatattctcaatggtttatctgacgatttatatgactactataattctgacaaaactgcaaaggaaatctaggacgtacttcaaaagaaatacgacactgaggaggctagaactaagaagtattctgtcagccgctacctcaaattctagatgactgactataagtcagtgaaggctcagtctcatgaacttcaaaaaattgctcacgaaataatttctaaaggtatgtctttagatgaacaactccaaattgatgttattattgataaattgcctctcggttggaaagattttaaaaatattctcaggcacaaaacaaaagaattttctttggaaagtctgatcactcgtcttc

SEQ ID NO: 240916 - DNA, 765 bp, Cannabis indica
cccattcctcccctagactttgggaggcacaggaggtcccaagccttaaggcaaacacccctgttaccttgctcacagccccaccagaaatctctaaacataccatcaatttttgaggccagctttttggaaagcatagttgtttgcatagtgtaaatgggtaatgccatccccactgatttgatcaatgtagcccgcccagccttagatagtgatttcagtttccatccatgaagcttcgacacaaggttctcaattatgaagttgaaatcagcatttttctgcctggacctaaacaacgggaggcctagataattgatgttggaagcggccatattcacaccaagttcatgcatgatccctcttctcatgccgtcactggtgttcttgctaaagaaaatagacgtcttaagcttattgacacgttgtcctgaccactcacaaaatttctctaagcaattccagaaacccttagcctcagctacggtagcccttcctacaaggatgagatcgtcagcaaagaagaggtgggagagtcgtgggccattcctactcagcttgatacctcttatgctacccgactccaaagcactctccaggaggcgagagagaatttccgcagcccagataaatagatacggagaaagaggatccccttgtctcaacccacattccggatttaaactgcacacttttcccccattaaggagcaaattgaaagacgtggttgaaatgcactggcgcattgtaaagaccgcttagttt

SEQ ID NO: 240917 - DNA, 670 bp, Cannabis indica
aatttttgaaatttagagagaaaaaggaaattaatttttttcttaattgttcttgcttgtctgttgagagctaaacaataacaaagcttattcattttatcctaatagtccacactatttcttgtgtgtggtgaaacaatttagaagaaactggtgtgagtctaattgtaattttctcatcatctgaattaagggatacaacatatgagaagttttaaggataacctgatagacttcaaaaggtatattctaaacttgtatttttgttgttttgatttaatgtacacacatcaaaagatccaattggacatggtgcaatgataatcagataatacaaaactctttcgttgcataactgatttagtaccataaaaacgaatagataaaccttcaacatagcatagataagcgtcaagcaaagcttctaaatgagtagttaatgaacatctggatatccaactccgtgtcacagtaatttattattaaatctcgcaatataaggattttatttccaagatcatgtttgagaattatatcttccgaatatagaaataaagcaattatcaatcaagcatttatgtgtctttattattccacaatagtaggacacatttgtgaccactatatcaacatgatgtggcatccatatcagtagaataatcaataacct

SEQ ID NO: 240918 - DNA, 1129 bp, Cannabis indica
ggctagcatttagacaagaataacacttaaaattagcatttttcaacacacaaaccaaagcactccacaaatgaagaaaaatggatattttttcatcgtcgagcgttaccctaaaccaagctgaaaatacaagcactaattttctcattcgcaagctaaaacagaacatcacaaacataacaaaacaacatgattaatacacatctaattcacctaatacttattacacactatactaaattcaacaacaacagtagacacacaaacagaagcaacacttaaactagcacacttatttcaacagcacaacacataacagtcaaactaagctaattaactaaagagaaaagaaatactccctcaacaatccgactctccaccaccggagtccctttcttcattatcaacggagcaccaaagcgcaaggatttcctccgggaaagcgggaaatgcagcggctgttttagtctggttgcgacgaagattttgcatcatccacgcatctcactccctttcatagttccagtgagactacagccgctcacacatctgttgttgtagagcctcatgcttggccatccgctcatccattggatcccttgaagtggaagctgcagcagtggatgcggtggtacgtttcggggcaccagcaggcccgaagcttactactccctttcttggaaccggatcctcgtcagtcaacatcgatacattagcgcatctacacatctcaataatgaggtatgggaaaaacaatttccctttgacccagtatgcacattcaaagatctctttagctatcatcttgccgacattaatctttttgcctttcacgatgcaatatagcatccacatcctttcccgactcactgtggagtcatgtgacgtaggcagcagagtggattgaaggaaattatataaacacttgatatcgtgtttcaaatcagtccgtttgaaacgaaaacacaccatgcccatctatttcccactcttcttatggagttgccaattcgggcacaatcttgtgcattagctcatcagtgagcttaccactgtctttagagaactcacaagtcacatttttgagctggtagtaatgattgatatctctgtcggaaaattttacttt

SEQ ID NO: 240919 - DNA, 1424 bp, Cannabis indica
cattcactttctctttctctcttcatcttcatcttctttcttctcatctactttatattattttatattattttataacagaaattaaatactttagcagaattatctataatatatatcttttgaaaaaaattatatttttttttcagaaaacaaaaaaaaaattaattattaaaaaacacgttctttgtaaaaacaatatgatcagaattaaaagttacttaagaaaaatataaaactattacattaatatgaataaatgtgggaacaaatttaaataaaaattgactaactttgaataattacctaatttatctctcataattattactagaacctttgaaaatgagataatagtaaatttgtaatatatggtaagaatatagtgtcatcaggtaataggttaaaataaaaaatattaatttttgaaaaataattaataactataattatcatccattcgattaaattcaatgatcaatacttaaatacctatttataggtaatacctattaagagcacaaccatatatatatatatatgaaacaaattgaaaagagagcacaagattcaacataggaaaatagattaattagcttagaaatctccactaatttgacatcttctttgaaaataaaaattgactgaaatatcaaatcatttagtcttgtaaacgatcacacacttggattacataagtttatttgaaaaaggataagacttagaaactttttctgaatataaatctgacagtgtcactctcaacaatggtgtatgaaactgttccactggataaatataataataaagtctcatttaacaatacaggacagaaaataaattacgggtcattagaaataaccaatttttgggtttagtggaaccggaaaattacaactttatccttaggtttggctttattaaagttttgttatgaggggcattttggtaatttttgagtaattaatgaaaatagatttcatttattattcctttaagaattttgatagaaatttttagacagaaatcaatgtcaccctcattttcttattttgtcgaacacttggagtcaactcttgaaaaatgtattgttcttgaggtgtttggaagcttgttggtgaaagaaaacattttatttagttttcaattatatgattaggcatttggtgtttaaataaattatagttttatatattgaggttagagtagagttatttgagtaattttttgtttagagttatttgagcttattgaaatagactttgaaaataggaatttagagctttatagtttaaaacttgatcagttgtaatggtagattttatatttacgggttaaatcttttttaaggctttgtattagtcttgtttagtacactaaattattgtggaaagtttgggaaagattggtgatgatttaatcag

SEQ ID NO: 240920 - DNA, 1252 bp, Cannabis indica
gacattacaagtctattgggcatgagcaagatgaaacatgacgcctcataccgcggaatccctctcttcaggtccaagaaaagatcgaatgatatgcaatatttagtgcaaagagtattctccagaatagaagggtggaaatcacgtcttctgtcaaaagctggccgtacctgcctagtccaatcggtaggaacttctatccctctctatgtggctgcttcggaggtgatcccttctggagtcgccaataaaatggaacaaggattgaggaatttctggtggggagacaatgagaagaggaattccattcacactatgtcatggagttctctatgcaaatccaagttcaagggaggattgggaattcggagattgagagatttcaactctgctcttcttctcaagtggggctggaaactaatcaatgaccctcaaaatctttggtgctccatcatgaacgagaaatatctgaaagggagatatttgtttgacgtggagatgaagggaacagagtcgacgctatggaaagctattctgaaatcgagaccggtattgaaagaaggcatctgtagaaaaatcggggatggcaaaaccacttccatctggttcgatgcttgggttccgaatggagatcatatgccacagcctttgatggacgcaactcatggagttaatctagtaagttactttctgaatgagaacatgtcttggaatgaagaaagagtgagattatggttcaacgccaatgattctcgaaacattctcaacattggacttcctgctcaaacccaacatgattcctggagatggttaggagaacctcggggctctttctcggttaaatctgcgtacaagttggtgacacattcggcgttacaagaccacccttcttgggactggaaaattctgtggaattcaccaatccatggaaggctaaagtttctttggtggaaaataatgcgagatgctctcccaacaaggcaaaagattggctttgcgattcctcttcagtcgtacttgtgtcctttatgcgaaacgggagaggagtctactttacacttgttctgggagtgtcattacgcatcagccatctggtttggaagtatgtggggagttcgaactgaccaattactctgcaccaactggactaattggatggcttggtttctcgacaagaaccatagaccacaaatcctttcgtttgatgagttcatgactggggccctctgcatcttcaaagtgatatgggaag

SEQ ID NO: 240921 - DNA, 946 bp, Cannabis indica
caactcaaatttaattttctataaatatatatctctaattaaatttgaaatccaatgtatataaaaatatatttttgaattccattaaaataaaataaaataaatcctgaaaagtttttataatttacgttgatctaaaattaattatttaattttcaacataaatataattttcgtatttaattaaatctcttaagaaaagtatcaaatatttaagtgtcttgaacaaaatcaacttaaatattaattttctatttaattaaatatatctagaaaaataccaaaaagtatacatgaaaaataactacctagatatttcataaactaattattgattttttaattaaaatataatatattttagtctatttattttaaataatcattaatgaaaacattactttatttaagttgatataaaattaattaacaaactatttttcaactttaatctaattttcaaaataaaaatttcgaaatatctacatctaaaataaatgtatttcgaaatttacatgaaaaaatcattagtaaaataaaataaaatatattttaaaaatattcgaatttaagttgatctagaattgaaaattttccaacgtaaatatcattttctagtaattaaatttattaaaatagaaataaataattaagtatcttgaataaaattaacttaattattaattcttgttaatatctaagaatttttttttaaactaatttcaaaataatctaataaaattaatttcatttaattcaaaattaattatgttgctaatttaatcttaattaggttaaactaatataattaacctaatataaatatttaaataaggaaaatggaccttaatagttggtgttgttcatgtgaaggaaggttggattcagtatatcgtacccactactgttggccccctaactctcacacaaggcccaaaagagagaa

SEQ ID NO: 240922 - DNA, 1701 bp, Cannabis indica
ttaaattaataaaaaaaaatagattataatctttagtgacactctatattttcaatgacacacattgcaagagactaacactgaacatttagagtctaattgtgcatgtcactaaaaattactcagatctatttagtgacccacacttttgtgcgtgtcactaaacagtgtcactaaaaggccaaattgtagtagtgagcagaggcggatgtttgccaaaaggagagacaaagagatggaagcgttaagggctcatcatgcagagattgacaatcgtagtcggtcagctactgtgctgatacgaaaagcctatcaatgtgtcggaaagcaacccccgaatgtcattcccctgggtgaaacagacgaagatccagcgatgaatgcctctcagactataaatggtcagccgccaaatctctggtcacatgttttgcctatgggccaaggagtaggtgggcagaccttgtctagtaattcattgggagaagtcatacccggtatttccaattaggttaatggtgctagtcagcacattaaacaaactaaccaatcactgagacagccaggcgtttatgtattcaaaaggttggggacaactcatgatttgagaagcgatctgaataggaggagaggagtagacaatcagctttacacgccaatcgtgcagccagaaacccgtgctcaaattccttctcagaaagataatgacgtgactcagatcgatcaaaataccgaacaggttagtccagctgtacaggcacagcttgatgaactaaagaatatgttccaagggatggccggacagcgaaacaatgatctcgagttggatcgagcacgtggaacccctttttgccctgagatcaatctcctggcattgccccacaagtttaaaatgccaacctggaagatgtatactagaagagaagatcatctttcccacctcaagtatttcgagatgcaaatggatctgcaggggttacgaggagacatatgttgcagaatttttcctgcaaccctcttagaagccgcccaacaatggtatttgaagctggcccctggaaagttcgactcatggaaacctttctcttcagagttccatgtacaattctcctctcgccaacttctgttgcatctaggagacctggtcgaagtcaagcaaagaccaggaaagctactctgagcctacattggcagattcatgacggaggcgactaaggtttcacgggtaacggaagatggaaagttttctacgatactagggggcattgaagtcctcggtgagctctggagagacataagaaagaacagtccggtagattcaaggagcgattttcttgaatgtgttgaaggcttcatcaaacttgaagaggttattcagcgagcagacaatagacaagggaatgggaagaagggaaagttcaccagaaaaacctaacaagctccctaggagaatcaagccaagtacactgcatttaccatcttgattgaggatatataaagtgtttacatggccactctagtcactagccccgcacaagaagcccgcgcccatgaaaaacgatgtcagcaagagagacatgacttagttttctcggtttcatggagactacggccacgataccaatgaacgcaataagttgaagcgggaaattgaattcctgataaggaaaaataatctacatgtacagaagtatgtcaagg

SEQ ID NO: 240923 - DNA, 1009 bp, Cannabis indica
tatttgagaatttttaccaattttgggcaattttgagaagaaaaagataaatatgggtttgtttgttaattagaatactttgtgggtctaattaataaatatatttaaaatgtattatatttgataattatttataattattaaataaaattagtatttatacaattagatgagataaatggtcaaattagaaacgacatttaaaatctaactctaaagctaagtggaatttggccctagagtttaatttcagtccaattgtgtttattttagtccatctcatttaaacctaaccaagtgaatgcttatataaagaaatggatgagaagagagaactaacctaattcaatgtctcatctttctcttctctttatattttcgaaaattacatagtaaaggtgtttgagtatcaactcacactattcaaggtgatactcaggcttttgtagaagatgtgatgaacacaatcgaaggaggagaagatccaagtttagatcttgattaaactctgtcacagacaggaatcaagggttagaaatctgaacagaatgagacaatttattccgctgcacccaatataagattttcttaatcacttgtgtgtttaattcattgttttaggaaatttaatatttaggatgtttaattagtcataatctaatatacatgagtggcaaattaagatcttggtaaaagatttttcaacatttatgtgttatgctttcaagctaatttatctgtgcttacgtgtcgtgcttttgagtttgtcgtgtcgtgtctaagctcatatttttttcgtgtaatgtcgtgtcgcgcctaaacacatattttttttgtatcgggtcgtactcgtatctcttggactcgtgtgttgtgtcaaaagcccgggccatatttatttgacatgataataataaataaatcactcttgtagaactaaaaactcccatgcataaataaatcactccaaattaggggtgttcatccgattcaatccgcacttttttgg

SEQ ID NO: 240924 - DNA, 549 bp, Cannabis indica
agtgtacatgatttttttaaaataagaatatatataattttttttaaaacaagaatatatatagattgatagttgtagcatttttttaattatatataaatatttttcataattaattaatcaactaatatttataaatctcataaaaaatttcaaaaaaaataagacaattaagaaaagaacaaataatgttaattaaaaagagcgacattccaccgtctcatacctcttctttatataaataaataaatatatagatatatagatttcatcaaacattataatttacttttcttattaaactatttaaatatatattttcatgatacaatttaatattaaaaaacaatcatttaatacaatataaattatagatttttctaatttatcaaaattgaattagacaaattataattaaaaaatagattttttattttattttagctaatatcatatgttattaaaaactaaaaattagttttcaataaatatctttctttataataataatgtatataattttaaaagttgttagaagatgaatttata

SEQ ID NO: 240925 - DNA, 1035 bp, Cannabis indica
aagaaagttaaggccctattttcaagatcatcctgttcgggtgtacactgaccaactattacaccaaatattgcgaaatctagacgcctctagacggttactcaagtgggcagtggaactgggtcagtatgaaattaccttccaaccccaaacaacaatcaaaggccaggccctagcagactttgtggtagaatgcacaggcaaagaaaaaagcatatcagaagccaaccccgagacagtactaacacctcagccaagtaacagtgaagacaagccaacttggaaactacatgtggacaggtcggctccagataacctatctggtgcaagaatcgcccttgtcacgcctggggggcaacacctgcacgctccagttaagtttggattcaaggcatccaatgacgaagccgagtatgaagctttaatcgctgacctaaaattagcccgggagatgaaagccgaacatattgaaatctgtagtgattcacagctggtggtaaatcacgtatctggagaatacgaggctcagggagaaaagatgatagcatatctgagcaaaatacatgacctgcttgcacaattcaaaagctacgatctcagacaaattccaagggaagaaaacatgactgcggacgtgttagctcgactagcgagcagtaatgtaaatgataaagcgaacttgattcctatccagtttgtcaaagagcctagcattactggcacggagatacttccccaaatttgatgacaccgatagcagcctacctcaacactgacgaactcccaaataatcgaaatgaagctcgaaagatgacaaggaaggcagtacggtatatcatagtagagggaattatgtacagaagagagttctccatgccattgctcatatgtgttactcaagaagaagttgcacgacttctatctgaggtgcacgatggattttgtggaaatcatgtcgtccggcagagtttatctaagaaaattctaaggcaaggttatttctgcccaataatgattgaagatttaaaggcctat

SEQ ID NO: 240926 - DNA, 1142 bp, Cannabis indica
attttagatctaagattttttttaatctcatatgttaaatatatattaaatcaattaatacatttttaaataaaatatattaaatatataaaattataaatgtattttaaattatataaatataattggatcactttagtttggttatccattagatcagatgtcctatccaacaaccgatccaatccaattggattttcaaaatttacatctgatctgatccaattatgattagatatttgattctattggatcagttaggattggaccggacggttgtagttggatcgaatgacttattgcacacccataattaaagtaccgagtataggcttatattatggtcaatcgtactattgtacgaatgctccatacctagtacgcattagacgagatataagattatgattaggtgtatgggcacctgattataattcgatttatgtttatgttatagttatttttttcttattaagtctgtcaactcgcagatattgtttacatgcataggtaaaaacaaagtaaaggctgaacaatagtaagtctgggctagatgaaggttgtacatatcaaggcggttagatctggaatgttcaaatcttcgagacagttgggctttattttgatggtcgccatgcgacaacttttgtagtacaagtattttgtaaacttttgtaacttttaaaacgggatctcatagtattataattatatatttatagtgtaattacttataaaaattttaattattcaccattttggtaaactatttgaatagaaaaggagtcacaataatttaaaatcacgataacgtgcctaatctagtagggcattacaaatattgatgttgtgtccctgtgtaatgaaaatttaattaccggatatgatagtgactattctatttagattagttctctaataatcatttattcagttatgtaataaatattcttaaagagtaatttgtggcaaaatcccctcaactatcaatttacttacaaaaaatcatccaacctcatattttggtgggaaaaccctccaaagtactgttccgtatacatttttaagatgtcgcctgtccagcctcgttaaatcctaattttttccacgtggcaatgacaggtcactaaaaaattatccta

SEQ ID NO: 240927 - DNA, 928 bp, Cannabis indica
ttgaccatgatatcacccactacaagcactatgatcgcactgtgggaccgacagtatgtttgtaccgctatgatagcatcaatagcacccaagagtttggccatgatatcactcttaattagtactatgcccgtactgccgaaccgacacaatggttgtgctgctatgatagtgctaatcaatactctctggagtgaatatcactcttaaccagtacgatgactatactgccgaaacgactcaatgattgtgccgctatgatatcacccaaaacatatacaatcacaaacacaacatgcatatataatatgttctacactaatcttacctcgtttccgtgctcaggcgtgtcggtcagcccgagtggaacaacagctcgatgctttatagagctctaaatcacaatatttgaaattttgatgagagacgctaaaatactttccgaggacttaaaataaaaattagaaatatcccttcgatggataacatgacgataccctaaatatcacaaaaatagaaaaaactagggttcaccaaaatgtcccaatcgatagaccagtttaccaactggaattcctctaactgaagcatgaaggagaaagatttggaggaaaaatcactcattttatctgcaaatttgggacttttcttcccataactgaagaacaaccctcattccaaaaccattcccagttacccttttcttcttcttcttctttttcctttcaatcaatcattccatactcaagatctttgtacaagtaaattgctccattactactcacacactttgtactaatccaactttatttttcccccaaaaacttcttttaacctcaaacgggaccttcccaaccaaacccaggtatcatcctgacccgattcccacacgaacgcacaatcagcacacgtgccacccacgagtgtc

SEQ ID NO: 240928 - DNA, 688 bp, Cannabis indica
gctaccattgagatagtgtgacaacgtctcctatggttacaatctctcaaaaaagtctttttgacaatttgggcaatgttcacagcttacactttcacacagttatgcttggcacagcttgtggtaaaattttcatatttgaaaatggtcttataaagttgttacatattgtttgtctatttgatttgcctttaatatttttggtgactgagttaacttttttcatgcgtagctggtatgacctcattccactagttcattagcttgataaaataattttgactattctcatgagtttgattttttcatcaagagcaaagacaagcggacattctttactttttgttgacaaaactatcaaggttattttttctgcttttcaatttaaaaaaaatataaaaaaaataaaaatgtgtgaccgacactgacaattgagctttcttaaaaactattgttattttctttgttatgtttcactattttcttagacattatttttgctctaagttgattgttgctttatgtgtgttgtcttttttgtttttaatagttttttaaaaaatgggcttatttttgaaaaaatttaagaaatagggggggcatatttttttctgattttttggcaatttttcttttattttttcatttatggaaacacgtttttaatgcattttatttattgtgtttc

SEQ ID NO: 240929 - DNA, 852 bp, Cannabis indica
tctccacgggccatgtactctcccgagacatgcttttactactagctgtgaatcgttgtagacttcaatgtattcaatgtgtacctcccgagcaagttttagcccaactatgagtgcttcatactctactttgttgtggacgccttgaacccaaattttattgcttcgtgcaaaggttgccccaggtgtgatgagagcaattcctgcaccaaaaagttggtcagtagttgatctgtccacatgtaatttccaagttggtctatctttgttctttgctggtaaagattcttgtactagctccgagttatcctttgtattgctttcttctttaaagtctgccaaggcctgttctctaacttctgtacatggttggaagattatttcatactgtcccaactctatttcccacttgagtaatcatccgaaggcatcaagcttttgcaacacttggcgtaaaagttgctcgttatatacccaaacaggatgagcttggaaataagaccttaacttccttgtggctaatattaggcagtaagtgagtttttcaattatggggtaccaacattcgacttcaacaagtcatttgttgatataatagactggatgttagacattactttcttctcttatcagcaaactgcttacagcgtattgggtgacatccaaatattttccctattcttctttgtccaagggttttgagagtacatgaggcttagcgagttttgtttttagttcttggaaagcactcttgcatttcttcattcattagaactttttattaccttagaggatgttgaagaacggaacacatttgtctgttaatttcaaaacaaatctgctgagtgcggc

SEQ ID NO: 240930 - DNA, 2014 bp, Cannabis indica
actagggatgttctagtggataaacatcaaaataaccaagaaccacatcgagaggttccccaatgatccccaggaattatgaatcaggggaatgaacgtaatgacatacaagagccttctcgcaggaatgaggatacaatgcagccccaaactagggaacaggaaatccctcgtaataacgagagaaaccttgagactcaacctaggacaagtgggctaccaccgaggaacccccaacatccttctcgattcgagagggaaggcgcatatacatacctaaacagaggacgtgtatctaaccttttctgaaggagaaggcccataaaagacgaggtaagttctagctcgggattcttgaggtctcaaggacaaagtcgatcaggaaggaaaacgtgagaaggaagcagacctcgacgttatgctaatcaagaaagcatgagtaatacaagatgttatcaatctgagagttactcagatacaagatccatgagcaattatgaacgaagacaacctgatcttcgtgagcatttgaatagaagacaacccaatctttgcgagcgcttaaatcaaaatccacctaacttacaccatcaactaaatgctaaccaacaacaagtggatcccatccaattgcaaatcattgagttggaggataagtttaggaaataccaagatggggaatatgggaaattacttggctatgacttggatgaggagaccgaaactttccatcctgatattatgaattttgaattttctcagagattcaaaagtccacacgtctcgcagtatgatgggacttcgaacctagttgctcatctgaataatttcaataccataatgcaagccagcaacgtctcgaataatctatggtgcattttatttctaacctcattgactggggtagcgagtagctggtttgacaaattcactcaccattcaataacttcttgggaacaacggtctaaattttttaagaaacaacttcaagttgccagagataggcgaccagaagcatcatccctaactaatatagagcaacaaccaggcgagtcgattaaggcttacctgagtcgcttcagcactgccactgcaaaggttaggaacttgaatgacaatattcaacttattgcttatcaagtagggatcacgactaacctttcaacagttggggcgagttgtgggatgacttattattaggctaattttagcctaagtttcgggtcacattaataagaattttctaagttattgtagtctttttggaacggttttacgcttgattttccttgtttcaggttcccaatgcattttagttcaaattcagtcaattggcaaaagcgggacaatttggtgaaaaatctaatgaagctgccagatacgccttagtagtcgcgaccatgaaaagccctagtcgcaacccttttctctagttacgactatggtcctgacttgggtggattggcagaatgcgtgtttttccatttttgcctatggtcgcgactagccattaaggtagtcacgaccaggtacgaaacacaggatttttgacctaatttcgatatttttccaattagaggcacaaccctaattctatataagggactcgactcagatgatgaaaagatcagaaatcagtcccgaaaagtgaatgaaagaggagaggaagctatcttgacgatccggagcgaaatcaccatctagtttctttcttcatgttatcccaaattttgcactgtgacgtggcatcacatgtatggtgacacgtggaacccacttggaatatttgcccgggaagcatagtctgagcaggacatatcgctggcacgctcagagcaaagtattaagtaatccgcgcagagtaaccaacacttagcgaattcagctttcgcatcgtgagtcatcagcacaatccctataacttagggatcaatttacgtgattatggcatacacacgatcccactatcagtgtattcagcctcaatcccacgatccttgtattcagcctcaat

SEQ ID NO: 240931 - DNA, 871 bp, Cannabis indica
gtaaaaaaagtttccaattattcaaagtcaaacataatgtcaacattatgactggcgaaacaaaaagagtatcattatttaagcaaaaacgaaatcaaaactaaattgttgttaaaagataggaacataaaaaatatttttcaagacaatcttaactccaaattgtaattcaacaaaaaatgtgccaacttaaataatgtcaactccaacataagtgcacacttttagttttgacttcttctcagttggcttcctgagatcctctagcccctggttgtacttacttctttattaatttttcttatccacttttaggcttgagttgataaacgaagtgacaagattcctcagctacacactgagaaattaggtcggtgacattctattttttattataagtgttgtaggttgtctcgataaggctaaaagaggtagaaagtgtacgaagagcacgatgcataatgtaatagtcaggaagaggaatattacgatctttcaacttggactgaaccttcaccattttctgaataaaatcttacactccttttgattcatcatacttaatggttgtcatgtcatccttaagatgtccaacttcagtattttcactagtgctatataatttttcgacaacattgaaaaactctttggcatttgtagtatcttgcaaactactcaatagattgaagtaatggacttttcatagcaatgcgactaagataatttgaattttatcattgtgcatgaagagttttctggaaagcggtactgatattagtacgatcatcaattttttcttctcgaaggcataagtccaaatccattatgcctaaaataaatttcacatattatttccatttcctattgttgg

SEQ ID NO: 240932 - DNA, 965 bp, Cannabis indica
ctatagtttttacataaaaatttcaagtctcataatatataatgtagccaaataaatttactacatgatacttttagaaaaataaatttataagttatatgtatatagtcaaaaaaataaaacaaaatttataaaaaatctctcaaaatttaatagtcaatatatgaactaacttttttgtaaggaataacaacaacaactattttattgtatttgcaacttccataaagtaaccataaatgtcaaaaaaaaaaaagtaacaataacaatcactctaatgtgaaataatttgaactaaattataaattaatgaatatataaatgtacatccaccgaaagagacaataatatatggttccgaactcttgcaatttgatgtccaggcaaataaaaatacttttttgcggtgagtatatttcgccacaaataatttcgttgcatttttgtactgataactgacattgatctctgagtagtcaattgatacttcaaaattatataattacatattatatacataccaactaacattcaattttcacatttcaaaacaaaatggataatttatatctattctatataaagtgtgcctatataactgaaattcttggttgatgagaaattcatggttaacttttaatttttatttaataaaatattatttatatataataaaataataataaaataaatcctattaatatttgaactgatattaaatacctgtatcatcatcgttctcctcgtgtgtatggtccaaatcataagcttcctcagactgtatatcaattccaataacaccaatattctcttcatctgactcagagccattcccaacaagtcgaatgcaggtatcgaaggcgtctgcctctcttacactagaagacaatgcctcgccagattctaaaccagaaaccctcctcgtcacgaagaaatcatcgtcaccatcaacgtccagacaatgt

SEQ ID NO: 240933 - DNA, 1816 bp, Cannabis indica
agggactcacgagcgatccatgcttgttgcatggaaggaactgatccttcaactccttcttcaacacttcccaagtctcgatattgggccttcccgatcgagtatcttcctccatccgagtgcgccaccataacttggcatcaccctgaagatacatacttgtaatggtcactcgatccgcatctggaatccttgccgccttgaaatattgctccacgtcccaaaggaaattctctaattccttcgagttccgactaccattgaaggctttcggttcagggactttgattttcgaagaatgggccgaagatgagtcggttccttgggacggatttgctatcgccctcttgatcagtgctacatccgcatcgagagccatgaatctctccttcacagaatttgacagatccgatagtttgtccaccacccctttcatcttctcatcgaattctttttgcatatccatcatggccctgccacaacccgcaacttgattcgacgcttccttcaacaaatctcgagccaacatctcaagggactccagttgctcagaatgttgttcacccagaacacacaaactgacactatcctcttcgttgggagaaccaaccaactcctcgagcctttcaacccgagaacaaagttcagcattcgtcaccatgatttctgcaatttcccaacacgattcccgctctgataccagttgtcacaaggctaatttctcacactcaaattttccctgcgatggcctagattcacccaaatctagtcagccaacccaacaacccgttagtatgcacacacactcacggtttcactctttacccagcgtcactcaacaacacacaattgctatcaagtaaatgcatacacaagcataagaacacacagtatacaggaaacccttttcccaaccttgttattcacacaatatcaaggattacacaatgttcacgctggacatcacacactgatgactcaagcgcccaaagcctactatattacacaataataggttgcggttgacatccccaaccgcctaggccatgctggacacaccaccacattacacatcagcataatctatgcaaactaactaacacccgcgtgtcagccatccaagccctcgcctagattccatgcatctgtcctccaacaggtcacttaagcccacgtgcatgcctttggatagacataggtaacttccgataaccgtcattcacgtgtgtcaccatgcacactgtctgagtaaccgtttgcatgcatgcccatgcaaagtcacgtccatctaagcccatcacgtagccaagctcagctaacatcccccaatgttgctgagcgcctatgctgctgctgcctgctgccccaaggcaggtgcacttcactcatatgccgccatcccacaagctaagcatcgagtgatgtcaaggtccgccgagcgaacccaagttagggtctcacagaaagcaactacatcacattgtcgacaacttatcgacataccgtcgacaaattgtcgacattttaggtcaaaaaaataaacttaaacaactaaattagtgtgtcgacatcctatcgacacacatacgatatcctatcgacatacattaacaacacagacaaatctaatggtcaaattactttcatgtttggtcgacattatatcgacaacattgtttaaacacacaaacagacatccaaatatattgatatcctatcgatatttcatcgatgccactgtaaaaaacacagacaccattgaaacatatccaacatctacaacctatcacaaaaaagagcacaaaatctaacaaaa

SEQ ID NO: 240934 - DNA, 1225 bp, Cannabis indica
gtagttcatcttcttcttggtatcgttggtagaaaaagacaactaaaggtcgtatgttctgtctgatttcaactttctaagcatcaattaatctgtattcaaaataccagatcactgcagctacaagccacaatgacccaattaaattagttccacgtttttaaatgtgtgtataaatttatgttggcatccaaaagaagcatttgattgataggctgaaaccatacttctgaactttggagctattaagagcagactgtaagcttaaaaaagcatttgcttctaattaattcatttagaaaataaccatagcattctactttactgcgcaaaagaagtagaaaaattatttaaaaagaaaaaccaaacatcaaggtgtacatttttcaagagacataacattcaaaattatatagcaacggaataatattaccagaagaaccatcattggtatgcttaatcaaaaacccagtttcatctttgcaaactagataataatcattgacttcaaaacttcatattccaacatttaacaaaatgaaaatcttggcgaaactgaaaaccatctaagaacaattccattttaggagtaaaatgttacacacatcaagcattcaaaccattaacctaaatctcacatcaaaaaacagagatagtaaaatccaaaaaatacaagaaatctgagagtaaagttatttcaaaattgaaatgtgaaataataatcacctggtccttgtgtgatcgtgatcaaggagttgccgcaattgcttgcctcagaccaggaaggaaaactcgccgtcgagttaaaaagagaaggatcgaggtgagagtgccagccactggctcagtctggcgagagaggtggtggagggctttaaggctttttctttttctttttctgctcatgaaatttaggaaaaaaaaaaaaaattgatggtggaaaatcagtaagaaatcaaattcaggcgactgatagtggccattttcatttcgaattaaaatgttggctggatcgtcgtcaagcgaagatccagtgaagctgttcttgcttttcgattcaactttagtttctttagcttcaactatgaaaaaaaaaaactgaagataaattgtagcaaagaattgaaagaaagaaaagataataataataagcagacagtcacagatgatcaaaaccaccggacttctagggtttgtttcacatagttttaagagaattctaatt

SEQ ID NO: 240935 - DNA, 1406 bp, Cannabis indica
agacatgactttatagagcattaaaatagctttgaaacacaagttgaatcgtatcgatcaaatcaatattgagtaatattgagtgagttatgaccattttagtgaaggttattctgggcctagtactcaggttgacatcctggtccccaagttgatatctagcacccacgtttacatgtgatgttaacctggacattgggtgagtgggaaaacatgtctgatgtattttttgatgcctaggcgacattgtgacatcacttagtccatttctgtgttctaacgaagctggtcaccaatactcagagatgttgttattttgcaaaaactagagactcaaaactacccagttttcgagtaaatcaccttgttagaaaagtaaaaatatgaagttctgaatttgactcttcagaattcatgactctcaattatgatgaaaatatagaccaacggtcgagacagaattagaatcggataagtagaagtatcgcacctggccatttgtcaaaccgagtgttgggtgcttattttggagcttctgggatgtcattttaatagttccaaggttatggaacttgaggatgaggtagccaaacctttttttttttttttttgaccatttcagagataattcccagagcaaaattggtttctgagtgataaaaactagcaaaattggtatttttatcaagctttttaataatttttataatttttttcataattactataacattataatttttaaaattaattttttattaaagagggaaaaaaatttattgatcaaagttcacatggtaaaaatactaagttttaactgtaaaagaaatagaacctaacagaactgacataattatgtaacttctatattttaggggagatttttaataagtcatatattttagggagtaaaatgaggtagtgtcaaaagtttaagtggcaaaaatattaattattctaaattaaataatataaaatatttaaacaacatataaaaaattaaataaaatttagaagagataaattatataaacatataaataataaaaggtgactactcaatggttatatttttattgtaaccatgatggttacatttttctgacctgtaataacaggttaccaataggtaaaaattcctttttttaggattaaaattaatcataattaataatatttctaaaataattaatttcaatttaaatattaaataacaccttttttaccaattaatatttataaataattttgtttttatgtttaagtccctattatattatttttaacatttaaaccatttaactataatacttacaataaaattcaatttttttttttttaacaaaatttagacttccatcccttctaaaataaacttttgaatacttaattaatttttaaaaatt

SEQ ID NO: 240936 - DNA, 871 bp, Cannabis indica
gtaacaaaatttcattaattttaatgaattgaaacaagcattaattttgtagaatagaaacaagtgcacaccaattttattatttatttatttttaaaaaaggaaacaagaacacaccaaaaaaaaaagacaaaaggaatatgaagaagtagaagaatgcaaattacatttattaaatgccaaaaatttgacaaacatcaaattttttactaacccttgcacaaaagtctacctagtgatatgtgcaatgaatgaatcccattccatacgagtgactcctccttcagctacagagtttcgtacctctgcacccaactccccaatcctcttcctgatgtcaccaccttcctctgagaacattaatgtcttcactgatgtactaatcattgatgaagtcaccaactcaccactctgcttccattccaaaacagccagacccactttgagcacttctgtgagcaataaagcattcaaaggctgatcataattcattggccatgctaccacaggtacttccatacttatgctctccatgcaagagttccatccacaatgactcataaatccacctgtggctttgtgacctaaaatctctacttgagaaacccattccctcaccaccattcctattcctttctccctcattctttcctcaaacccatttggaagttcagttctcttaacttgtttctcattgtcaaaactatgtatcttatctccatcttttaaaatccagataaacttcactccactctgctccaaaccaacagtaatttcttcgatctgttcttcagagaaagaagtagtggtaccaaaagagagatacagtacactattttgctcttgtttgtccagccactccaatagccat

SEQ ID NO: 240937 - DNA, 601 bp, Cannabis indica
ttatttcggttggagcttacaccagttatgtcaagctactgcaacctataaaaaggcagccacttctacttgttttctcaaggctttactagttcgatttgtacatagattcatacagaaaagagagtttcattttgagtgtttggagggttgtaaaagtcttcctcatgtatttgattgaggggactcaagtgagattaaatttgtaatgtttttctgtactgaattctttaccaatgtacctttgattctcgagtcattctccatgtacaatcaatgatcatttaaggaataaagtggctgtgagttctttgtttctttttttttcaagtgttcattaagttcttgtattcattgttcattatttctcttgttctatctctactttttatggtttatgtttcttgtccttgatgttgttgtttgagttcaatcttgccagaaaggtgagtttgaatcaccacaaaaacaaaaacggatacggaatagatcaagatttaaggggaaaaaaactgttttaaatattttatttttttttaaaaaaaaatgaatctcaatttaaaaagtgaaaaagtaaaaataattttatagaatgttattt

SEQ ID NO: 240938 - DNA, 1096 bp, Cannabis indica
gatattgagatgaagcataacactcttcaaatagtgacaattaaccctatcaaaagccttagccatatcaacctttaaggcagcccaaccacatttaccatgctttcgagagttgatagcatgaacaacctcttgagcaatcaaaatattatcaaaaataactctcccagccacaaaagtactttaaaaaggacatataattttatcaagcaccattttatgcctatttgccaagactttagaaatgaccttataaaaggtggtacaaagacttatgggtctaaaatctttaagagtatgggccttttgttttttaggaataaggacaattaaggtggaattgatctcagagaaatcagcctcattgttcaaacagtttaagacagcatgaacaagatcagatccaacagtatcccaattcttttggtagaaataagcgttaaggccatcaagacctggtgctttatccccagaaagctataaaataacctgttgtacttcatcaaaagtaaaaggctgacctaaaaactcaacctcagagtccttaagagggggacccaagcaatcaaggatgtggttaactgcctcagcatcacaaccattacaatggaaaagatccccaaaataagataagattaaatcactcatatcctcaaggttgctaaagacagtaccaagatcatcccgaaggaatttaatagtgttatttcgtttcctttgtgaggaaaaacgatgaaaaaaagtagtgtttctatccccatcctttaaccagtgaaccctagccctttgtctccaataaacttcctctttatacaagagggcatctagttgggactgatatttgatttgtgagataacattgctatctggagaaagagtggattgaagcatgtcaacttcctgttgaagagtaagaatcctagacttaaagatatctctagtagacttaccccaggacttaagagaagaaatgcaagctgagcagaattgaacctagagtaaacacctaaattaaaccccccatgggaaatcctattccaagcatttctaatggtagtataaaaagcagggttctcaatgttggaaatattttacc

SEQ ID NO: 240939 - DNA, 633 bp, Cannabis indica
aaacgccaatgtagtgacaataactgtatatttatgtcttatgatctaagttcatgataccacataagacaagagacttgtgaaactattccaattaacaactgaaacaaactaagacaacacttagtggagatgaaatgaccaagatcgggctgcaacacttaaataaaaatgtgtgggagtttgtttagcatggaactatttactcagtgcttgcattattctccccctgctctaaaaaatacaactacgttgtatgcactctaaaaagaatctaacctggcataacaaactttccagcagcatcaatcacagtgacatcatcaccaacctgcatatggcataaacaaattaggtcaaacattaaatcataaagattaaaaaaaaaagccatataaataggaatcccaaggaaaacaaaatattacaaacttttaagttttaacattctacagatggctacgcagacaaacaaagtttatctcagtttagctattgtgataaatttaacgcacatggtaaaaaaagaaaaatagaatcaatttagaagtactgaaaaacaaaactatattaacagtttgacatatacagaaattggatacataaatatcatgctgaattgaaaagaaaaaa

SEQ ID NO: 240940 - DNA, 560 bp, Cannabis indica
ctaccctaacacctcctttcttaatgcaaaatgtccccaaaacgcatcttgcatatggaaagaaattatttggggcagggagattatttatgaaggtgcccgatggagagttggaaatggtagaaccattcgagtttggcaagataagtggctgccaaggcctaatggcacaattacacaccggcctttggacgcaaatcccaataccacagtgagcagcctacttaatactaaggaagattggaatgaggatattataaacaaatactttcataaggaggatgttccttggatattagggatcccaatagacattcactcggaggacactctagtttggcctttcactaaggatggtcactacattgtgaagagtggatatagagtagctagggagataaatcttgcccccacccgatgctctaatatggatcaaattcatgcttggtggaaaatgtggtggaatctgaatttgcctccacggatgaagctttttggatggaaatgtgtcgaaattggctcccggcaaagtccaatctttgtcatagaggtatgaaaat

SEQ ID NO: 240941 - DNA, 699 bp, Cannabis indica
tcgaaggctggtcgtgctaccctcatcagatctatggccctggccatgccagtctacactatgaaaacgaccaaactctccaaaaaacttgcttccagaattgatggtatgatcagggatttttggtggggttgtgaacagggtaaccgtggtttgtgcttaaaggcttgggaccacttatgccttctcaaataaagaggtggccttggcttccgaaagtccatggaattgaatcaagctttactggaaaaatggggatgggctcttcttacagatgaacagacgctctgttgcagggtgttaagggcgaagtatttgaagagcaagccgtttcttgaggcaacctataaaagttctgactcttggttatggaagaacgtggtcaaatctaacgtgattctcaaaaaaggggcttgcaaacttgtctcgaatggggaagatacgaatatttggtcggatccttgggttgtccatggggaagatttctatccgaaacctaatacgtctcgtcctgagagagcgattaaggtggcacatctgcttaagtttgatggggattgggacattgccatgctcaagtccctgtttgactctgctactattgccaacatcctaaaagggggaagaccttatggccaggagagtgacagatgtgttggaattatattttaccaagaacttagatctactcacaagtat

SEQ ID NO: 240942 - DNA, 661 bp, Cannabis indica
aatatttttttattaagaaagatgctttctatcaattaaaccgagacaattacatccacaaaggatttcctttcaaaagacaaacttacaacacttttacatttttaagaataattttatctatgctagacaacttcttttcctgacaaaattaagtctactttcgagactctctttaatgtcattatctatacaactcggatttatacatttttttttcttttcatttatacacaaatttcaatttagtgtaaatgccattaaacttgttaatacattcttatgaacataatataatttttttatgacactttttagtatatattcttttcttaaaattatatatatatttttagtatatagaatcacttaaaaagggatagaattgtgtaatcctatttaatttttgttgattttgaggaaatacataaattatggtagtttttttatttaaattttatatggtagtttttaatttttatatttttatgggatttttcctatatatgtttagttttttttttctcatcttgaaaccagtttctcaattttttgagtgcatgatattaactgtttttttttttgttggtaatataagtgcattttatttatgttatttttcagctaaattttaatttgattattttaaggatcgattctt

SEQ ID NO: 240943 - DNA, 1738 bp, Cannabis indica
caaacaaactaaaaacaaactatcaatggaggttacaagatatttaaaaaaaaaaactgaaaagaaatgaaaaatcaaaggaaaaaatgaaaaaaaaaaaaagaaagagaagtgattgatggttgattgaagagagatgggggagatgcacgtgtcatatgcatggggggagtgtgcatgtggtatatatgtaataaaataaagagaaaaggtaaaaatgttgaggtaaccgtgtgtaagtatttatgtaataaaaatttcattttgtatttttggtgtaaaaatttctttaatgattacattgaaatttctatatatgaccgattaaaaatataaaaattgttgggtatcactgaagcatctgagcacagcaagtacttgaggctgccgagtattgtgggaagaaataaaaatgtgattttcggctacttgaaagataaggtccagaaacgaattcagtcttgggacaataaatttctatcttgtgctagaaaggaaattcttattaaatcagttgtgcaagctctctcggcttacacaatgaatgtgtttcttatctcggttggcatttgtcaagatattgagggtgccattagtaaattttggtggagatcggacaaagataaaggaattcattggttaagctgggacaaactcacgaatcacaagaaccatgggggaatggggtttcgtgatttgagagacttcaatttagctcttttagctaagaaagggtggtgacttttgacatgtggggataacttgatgggcaaagagtgtttaaagccagatatttctccacagggtctttccaaactgtatctttgggtagtaatccaagttacatttggagaagtgtttttgaggctatggagttagttcggtcagggctacgacgaattgtgggtgatggttctaacgtctctatactggctgagccttggcttcctgatgatgtgaatccttttattgaatctttgcatccaagccttgtggggaagacagttgattctttgatgaaagtaggcttggttgaatgggatgagaaagttgttacagatgtgctcaatgttagggatcaatcgctagtttggaagattcctctctcttcgtcatcgacgagtgatatgtggtattggttgaagtatgagtcaagtctgttcactgtaaagagtgcttatgctatgctacaatcgttgaaaaccagtagtagtttacctgataactctggtttttggcgtcagttatggcagcttaagcttcctcccaaggtgttaaattttctgtggagggcgtcctctaacagtctcccaacccgtttccagctttcgtctagacatgtaccacttgattcaacttgtcccttatgtcttgctgctcctgagacagtcctgcatatattggtgagatgtccttttgctcaaagttgctggaacataatcaaggttccagtagttgcacctggtgtgatgcttttctctagttgtttggagcttggattggttagttggagcacagccgaaatcattaaggatgctatgacttgttagtcaatttggactcaccgtaatgacctggtttggaaatccaagcaaccaattcctagtgacgtggtgacattggctaaactaatttatgtagactggtttaatgctcaacaacataatggtattgatgtacctgttgatggcctccatgtccaaagtgttaaccactggactgctcctgatctccctta

SEQ ID NO: 240944 - DNA, 1114 bp, Cannabis indica
agagagagagagagagaggaggcattgatttacgccgccgaagcgaaaagaggagcctttaatacatcgtgaggtccccgtcgtccttctacgtcctctgaccccttttcttccgacacccacctctgccctctgctctggttagttttcttgcttctaatctccatggaactcttcaactattactcaatgctctgcaagtgtttgataaaatgttttaaaagaccccaagaaaactaagtcacgggactctcacttatggcattcagtttaatctcaaagattcacaatcacaagataattgtctattatctgaatttgctttaccagttgtaactaatatcagctaagtaactctacacaacaaaagttgtttatcagattttcatggaaaccatatgtgagtgttgtttccttcacagggcatagtattggttctcatattattatattgcattttatctgatgcaaaggtaatgattatagtgcattttaaactacttcttccaattgaatgattccaactgcttgatatgtcaaatatagtagtaggttgatgcaatttcagtcaagcaaaacctacttaattagttaaggcttctacttctgataaatacacatacactatcacaaacactagttctagtcttttatccttaactgcaccttcattttgttttttttttatttttataaatgtgataatttttaattgtttctgagacaagggtgatttgtgttttgactttgcaactctgcttcgtacgacaatctctattatctgtttcttggttactttgtttactgcaatgaaattgtaagtcgtactttttatttttatttttcaggtcattaataatatttagagaatgtcttcatgctcgtggtgttaaaagaaagtgcattggtgaaacttctaaatggaacaaggttttttctaattattctcttaaagtaccaagctacttattttccatgttcttttatttaatctcagtttattcatgatttattttcaataattttttatgttaaaatttaatgttatttatcttaaattagactaatttgaaacttttatttatttagatttaaatttacctaatcttttttt

SEQ ID NO: 240945 - DNA, 2029 bp, Cannabis indica
aggctgaggagcttccgaccaatgcagaccaagggaaccccgttgatcgttacaggcgatcatcacaagtgattcttgagggtgagtattattcctagtaaatggtgatctgagtcggatcatacatattatttatatttttttttcttgctccacaggaatagacatagatcttgtgagcgatcttagaggtcctcctcaggctgacaaggtattcaaaataaagttggcacaattttggctgaattcaggagggaagttggagtggtttctatcagagaatccaaccaacccaagacctgaacttgcaacagaagacactcgtgccaacctctctatagtatcgagaaatttcctgaggctagaaatgaggtctcgactgtaagaaatgggatcttctgatgatgagaatggggtctctgcagagatcaaggctctctacatgtagccggtctttctccaagctatgtgtagacggtctttcttgagtttatcgaccccattctctaattttttgtccaggaagatgaattagtggtttgccccttgcagcattcttgtaaagacaaatttgtaacccgacttgggttttttcttatcttaaatgccttgtactattttcattataacttaatacaattgtgtttgcttgcatttttattcacaatgtaaataactatattttgatcaaatgtacagtacttctgagtttttccattgtgtttgcctcgctatagtagttataatcagccttaagcaaacttaaatatactttcatgattttgtcaccttgaatatttttaatttacttgtatgaatagttagattatctattcattttctaggttcaagtacttttttcaaggcgtcatgatgcctcgttttgcactttccgagctctcgagaactgttagtattcagttttatacgcgagttataacttttgattttactttcccgtcagataggtttttaatcaaaagttatagttgtttgatcccttcttcgtcaaaaaggtttgatcaagatgttataacaattcgacacctctctcgtcaaaaaggtttggtcagggagttataacagttcgactcctctttcgtcaaagaggtttagtcaagaacctttaaatttcaaaaaaaaatattttgaaatggcgggtttgcattatactatgtatttctagatgaattccggttaatcatacataaatgccccttaagtaatttttaaagaataaaactttgtaattacttaatataaatgattctctttattcataactgaagtttaaattttacatcagtaatgcgagttacatcatttatttattggtagtagggtcgcaaatgttccacgttccagtagttctttattagcgagctgttgagtcgagccaatttataaactccaactccaactactgctttgatgacatatggaccctcccaattcgggctgaacactcctgcaaatgcatctctcatatttgcaaatactcgtcttagcaccaagtctccaacattgaatagtcttttcttgacttttttgttgaagtatcttgtaactcgatgttggtatgctgcattggtgatttgcgactcagttcatttttcctcaagtagatccaaggaaaatttcaaaagttcctagttttcttcttgattataaaactctcttctgtgagtcgatatgttcacttcaacatgcagcattgcgtctgagccaaatgctagcgagaaaggagtgtttcttgtcgctgtctttttggtaattctatgggcccaaagtacctgaggttgctcgtcaacccatctacctttggcggcgcctattttctttttgatagtatcctttaaggttttatttacagcttccacttgtccatttgcctatggcctggatgctgacgagaagtttttgataattttgttcctctcgcagaattcagtgaacaagtcgccatcaaatttggttccattatcagatactatcttcatggaaattccaaacctacagataatgttct

SEQ ID NO: 240946 - DNA, 1376 bp, Cannabis indica
catgtgaggttttttttaaaattttcacatcataccttgttttggattcggggagagctccagatctgtttgttacagatcacatcataccttgttttggattcggggagagctccagatctgtttgttacagatcacatcatacattgttttgaattcggggagagctcccatgtggctccatatagtggcaattattattagacgtaggatgataacaatttagctactatatatacattataagttgtttgtatgtactactcagtactcactactctctactctctactcactactcagccatggccatggcctcacccaaaatactcgagctctcccatgtggctccatatagtgtcaccaccaccaccaacttcactctcccattaaccagcttcgacacctactggttcaaattcccaccagcccaatgtctattcctctattctcttcccaaagacactacatttttcataaactctcttctcccaaaactcaaacactcactctctctcacactccaacactttctacctctagccggaaaactaacatggcctcaacattcccccaaaccaatcgctctttacacaccaggcgacgtcgtttcactctcaatcgccgaatccaatgctgactttgacaccctttctggaaacaaacccttccaagcctcaaaggtttgacctttggtttctccgttacatgtttcggaaacaggggtttcgataatggctcttcaaatcactgttttccctaataaaggattttgtattggcctcactacccatcatggtcttgtagatgggaaatccgcagctatgtttatgaaatcgtgggcttacttatcatctcaagaaaattccccattgccgccattgttgccggagaagcttacacccttttatgatcggactgttatagaagacccatctgggtttgaaatgaaggtcttgaatcatataatagggaacaatcctggatcaacgtcctcagattgtagaaacaacccaaaactgtttgaatttgaatcgtttcaaagctctgatcttgatgaattatatagagccattttcgaactaagtcgatcagatatagataaactccgtcgaaaggtgccaaattcaaatccaaataaccttcatttatcttcttttgttcttacttacgcttacattttcgattgttttctcaaagcaacaaatgaagataaaactaaaagtaaagttttatattatttgccgccgattaccggaatcgtttgacacctccggtgccagaaaatgacttgggcaattgtctggtatccaagatcaatatcgacgatatgagggagtacgtgatcggtaaaggagaaagaggggggtggactc

SEQ ID NO: 240947 - DNA, 524 bp, Cannabis indica
atgggatgtgtgacttctgtgtcgtattcggtgctactcaacggagcgcctttggctcccttcaatcctaaacgtggtctgcgccaaggagacccgctatcgccgtatctctttattctgtgtagtgaggtgctttcaaaactgatttgtagagctgaacaaagaggagatttgtctggtgtcaaggtgtctcgtgaagcaatgcctattactcatctgttttatgcggatgatgctattttcttttgtaaggctaatggttcaaatgctgaagcaattctacaatgtatcaatacatatgaactatggtctgggcagaaggtaaacaaaggaaaaagtggagtggttttttcacctaatacccctcaaaggagtaaagatgatctgaaatctatgctgggtatgaatgggctcgggcctcaagagaaatacttggggaacccgttcttcttctcgggtaataagcgcagtgactttaagtttttgaaggagaagattgtatctcggcttgaggggtggaaggc

SEQ ID NO: 240948 - DNA, 1150 bp, Cannabis indica
ttttcggccaaggaagaccagcagaattttagtgcaatatctttggtttttagggattatctagctaaaatctaggagcttaacctcaaggtaacaccttaatttaattatatcaagttctactaagttatttgaggattttttggatttttaggttcaaattgggggattaggttttgtatattttggttttagttagaagttattttataggttgaattttggctgtagtagctggttttggatttcttttgtagctgaagcaagtctagagaaagtttgaatttgtgaactcaagctttgctctcaaatggtggattttgattcatgtggtttttgttttatttaagctatggtatatgttctttatgtggtatatagatgttctggaaagtttggtggtgattggggaagatttgagtaggttttggggggcttaaagtttgagaattttcgtgttaaatctgcccagacaaccggaattccggttgacagtatcagggaaggccgattttcgtattttggccataacttttcactcgagtatccattttagacattctatataccgttttaaagcttatgacgagctctacaatatggtatataaatcagagtcaaattatgtattttattttcgggtctcttcactacaaagttgagtagaaaatcctaggttcttttcaggcattaaagaagtgttctagggtaaacacttatgaattttatgttgtgacatagggcctccattcaacgcgtaattttccattcagattgtctggcacacttaaattcggtaatgaggttagactagcatagaacacattatatatatgcatgctgtgtttgtgactgtatatgttttgggtgatatcatagcgacacaaccattgtgtcagttcggcagtacatgtatcgtactggttaagagtgatattcaccccagagagtattaattggcgctatcatagcggcacaatcattgtgtcgattcggcagtacgagcacagtactagttaagagtgatatcatggccaattatactcttgggtgctattgatgctattatagcggtacgaacatagtgccggtcccacagtgcgatcatagtgctggtagtgggtgatatcatggtcaattagcaccaacc

SEQ ID NO: 240949 - DNA, 936 bp, Cannabis indica
gttgttctttaatttgatatgtagtataaatttattattgtgacttattttttatttgagatgtgtaggtctcgctggctgggcttgttagtttgcaaatgtggtgaatgtttcaaagagacaatctgattctcttttttattttttaatgtgacggttcaatatcattgattatagtgtctactattgccaaagattttaaaatcgttgataaaacagatttcaactgttttaaatcattgcctattctacttaattttatgacggtggaataagtaataattatagagactgataataatacaaataacacattagtcaaatgtttaaaaatgtttaaaaatgtcaagaaatctgcatttttagtagtgtatatacctttgtttttaatacatgtccaaattcatattctattttctcaaattccgttttatcactattatatgagttatttataatttaattacttttatattgttatagaatgaattttttttacctaaaataaaaagtacactatttaattgacatgtgtacacaactctcagtagaaaaataatgatgtataagctcaataggattttctttgcataatagaaacatgcaagaatgtgtgaccgagatagagtatagtcacacactatgtgttgcatagtaaataagttaaaagtgagacatgaaaagaagttaacacaatgaaaacatacatcgaatatatatgcgatgagtcagtatttttctcctgtgtcttatgtaaagatctcatctttacagtgattaattagtccaaatgactaatatacgcgataactcgtcatggacccacgagtcctatgttatcagtacataaatgtccaatacaagactattttaatgcattctataatatgaaatctcaataggttctcgcctttataaaaaccctgagaggtttat

SEQ ID NO: 240950 - DNA, 1462 bp, Cannabis indica
tctttaacatgttaaatttcatataatttcacatatattgaactatataataatataattcttcaattaactcataattatctaattagagttttgctaatccttttcttaattctgggtattacaaatggagttttctttcttacattcttttgagtattcatcatagttgaagtgatgccacaactagtaaactttcctcagctctcaatgaaagtactaaaatttttactgagatttttagaaattgattaattagagcttaaggaaaataataaacgataaataatagacaagtaatttttatgtagtttgggcgttaataatccctaaccgagtctgttgtattagccttgccagtgagtgtttaagtattacaagtgtttacagtatgaatattaactacgtatttattttgtttcccttggagaagaagaaagcttttacatattttggcgaaggatctgtaaataaaattgttcaccctttgcacatgaaaaataggagtatttataggcacatattttggtgagggcatacccttcacgcacctagggtttcttacttagcacatttgaatagctggcgtttacaacatggcggtctgattgttggtaggtagggagcctcatcatcgtgtggtgcacggctgctgcaatctaactcgtgggactaaggacatgtgtcgcccaaagcttcaccttgcgaagtttgtgtctagacaagacgttggacaaaaaggagccacagagcacgtatgtgcacaaccaaagtctgaggcagaggacaaagtctgatttggtgttaaaaggtatgcaaccgtcgggtttggctccgaaaagggcatatccaagtgagttctaggaacgtctagctaaagctttcccaaacaaggttaactcactaccatcttggagcacttgtgacttctgatccctcttgatagcagttttattaatgggaatcccggagtccttttccacatattccagtagaaagagcctccaggtaacctctggtattatagcgccttccgtaaccccgaggagcagatggtatacattaaccatgcgtaatatgaagtgccatccttccgtgattgccatatacacttcatccgagaatacagataacatgcatgaatattaaattattaatatttattattgaataatttatataaatatcgaaaaattacttattaatatgaggttgtgacttgtagttgtacagagaacaaagataacttagctatgaaacagtcagcagcatattatttaagaaatctttagtcaatggttgttagtacggttcactaatgcctttcttcggtacaagtaatctcggtttgcattactgatgtagtatgatatctaagtgaaggtggtatatataatagagattatatatgataaggactaatataaataaagttgtttttatacctaaaattcggtgagca

SEQ ID NO: 240951 - DNA, 721 bp, Cannabis indica
tcttgaaatgcagtacattcctttgtccactcaatttttttgctgtctatgagaatgttaaagaagggtacacatttgtctgtagacttggacacaaatctgcttagtgcaagaatgcgtcctatttggctttatacttccttgatgattgtggtcgacttcatgtccaaaagggcttggatctttcctgggtttgagcttcatgttgtagttgtggaggattttgaagcattagtctaagtcctccatatgtccccatcctttttggacttgacatgcatgtcgtccacatacacctccatgttgcggctgataggatcattgaacattttgttgacaagtctctgatatgtgacccctacattcttcagctctgaagggcatgactttgtagcagtacatgcctaaatctatcatgaagcttgtatgcttctgattcgacagttacatcttctcttcctgggctttggacaaggccatgctgtaacagtgatgggcagattgtttgtctcctctcgacatcctttctcatgccttgttgggaatttaaggtagaggtggtagatggatgttaccgccttcagatcgtatagggctatcatggcattgaaagctgagagaacgtcaattacaatgaactacgccatcatagttctggtggttgaattttctcctatagtaaggggtaatctgatatacttgatgggtgtgatgccttggc

SEQ ID NO: 240952 - DNA, 844 bp, Cannabis indica
cttcattgggtccgccagtgcctcatacaaaatttactaaattacaatatgtaatatgttagatattttatgtttgtacaaacattaaaaataaaatttatgttatccttgttattttattgtaaaaggaggggtggcaattcgtgtttacggtgtcgaaactcatgtattacatatatttatatatatatgttcgacctaaacacattttctttaataaacatgtcaaaaaattaaattcaaatacgactcgtttataaatgggttggcacaaagcgactcgtgtaacctgtttataaatgcatcttatttaaacttatcaactcattaatttattaatgatctgtttaacacgtttatgacatatttaactcatttataaattattaaagccaaaaatcaactttaaacaggtcaatttcgtgttagcatcgtcaatctgaacacaatctatttattaaacgagttagaccggtcaaatgaactaaacccatttaaggcaaatataaacaaactaattttgtgcaggttttgagttgggtcatcgtgtctgaccaattttgtcgtctttaattaaaagtatcgtgaatgcattgttaaatattatttttttcgtcacaaatatattgttttttcttttatttcaatttaacaatgaacatatcgcaaaaatattgttaaaaattgctttgtaccataaaatttaagttttgtaatatcatcgcaaatatatcgttaagtaacgcaaaatatataaatttgatctaaaatcagtaatgatgaattagtatcttaactaaatagaattacatggaaaaaaaaacaaaaaactaagtaatgagtg

SEQ ID NO: 240953 - DNA, 1660 bp, Cannabis indica
cctagatggccatgatcattccaggtcaatcgtagccagcaatggtcttgctaggacctggtaagtcatgtgcttgctaggatcctgcaggttactatgacttcaccaagaggaagccaaccttttgatgttgaggcaagcctttggcaagtggaggatagctatgaacaccgtttccttgtagagatcaggttcccttggttgaacaaatgctcccttggtctgaaagtcattttttggctggacagcttgtgcacaaatcttggccagcctataggcttcctttggctagctagagatgttggtacaacctctttagagctcacttcactcattttggctgttacttaacagttttgccatacattgtatggaggccctgtcttgctaccaataaggatgtattctatctgtactctgtcaatggcttatgtggacatgccatgtcaggtggacaaaatatgggataacatttacccccgagtccatgttcaaacatccggtcttatagggactttttagcttttgtcttgtttgttgtagtctctgttgagcagccttgtcgagccaagtgttggctttcacatggcatacttttggatctttcattttatatacatctcatcttctcttcttgaatatctcttctttattcctgccattaacaagttttaagcttttcaagcttttgaaaactttttgattctcatgttagtttgtaatctcgttggtatattgatcctcctgatagttttagaatgtttaatgtgtgactttttgatggaaaagattcaactctagccttctttatgattcttgaatctttgagtcataaagaatacgaggcttatattcgagttttgaatgaaaacacacattggtattcaaaacttacctttgccagcttaggaggtcttgcttgagacctggcaggccttaaggcttagtcatgggagttagccagctttagggttttttcctataaagctagcctattcatgtgtaggtttggtgaccctcgtcagttcttgctagagtcatgcgactctggctgaccctttcaagacttgagaaccttggtcggcatgggccttggttccaagtgggtagccatttttctgtcctcatttgactttggcaagaattcaactttgtagggatatacaaccttagtctcactcgtggtttacttggaaattctatatgaaacgtaatggtgattctattatacttgaatgttcaacttaagactcaacatggcttggaacctataaggaactttgcgttaggtgttgcccggtacgtggcccatataggagctctgtccagttcttttcttgttatatggttcttgcaaggccttggcgtcatgcatgtgaaccgatttcatatcctccctcaaggctttcatgctcttgctttggcctataggcactctatttttgaacactactatcatttagccttaaagtcttctatgacagacatatgatcgtcctggctattttcttatggccttaacatcgaaggctctatatttactttgtcaagtgttaggctatttttagcctacgttttcggtcactttttatagttgttttccttccttattattatatttgaaatagaattatgcttgttttctttggttttaggtttc

SEQ ID NO: 240954 - DNA, 681 bp, Cannabis indica
tatttttcattctcaaactgtacagttttaattctatgagtagtagtttgttgtctggaaatttcaatttctttatttgcatcttcgtcattgtggtgaatgatatcttatattggtaaacgatgcaatagtatataaatatatattatattattattattaattgcacatgtagtttaattttaagaggtaccattattcggggttgcaccatttactgaagagaatgtagactcatgtatgttttcatcaaaagagtagaattttctttttactggtccatgttcatttacataatttatagttaaaagaccaaaaaataaattattaatttagaatattagaagcatcaacaataagtaataaaattcagcaaatgtaaaatgtacctgtgagactaagacgtctttttttatcataacttctattgtagcttaactttagaaaatcattgaaagatttaacaactccaaggatcaggttaattttcttgtctaaatcatatttatacttattctgtataatgtaaatttttcgtttcaatcttgcatgtttgcatatagtcttttgatatagcacaaaagatactcaataaaattgaaaccaatacaatcaagattccaacatgctaaagattctcgagtcttgttactgtaatctctcaagtcaggcattaggcaa

SEQ ID NO: 240955 - DNA, 1257 bp, Cannabis indica
aaagcagaacaactcaaaataaccgtaggacactagtaaaacaccagtagaacaccagtgaaaacttgacacagtatactacagtatgaaacttataaaaaaaacacagtaaaaaagtaaaaaatatcgcctggcagtatttttgtaaaaaaatggcaaaagttagtatataatgtaaatttcccaattaatattggctgcgcatataccgattatatgtgataaccaaacatatctctcctgcaatgagtaaagactgtttctttacataagtttagtccgaatgactaatgtattcgacgacatcagggacttgcatgtttcaagttatcaacgcatagaatgtccgattatgcaatcaagggtgaacgtagacattcaacgaaataggcccaaaggcccatcctgcgagtacaacaccgtagagcctgcaagctcgtgtgtttagaatatgaatggacaatctgcgacttatcaagaacagacgaacttgttcttaatttattcattaaacgtttatcttgatttaattatgtcatttattgtaaaaacagtctgatatggctgattatgtaatcctaaaggacacttactttttatataaaggggtgatccaaataaaataaactaaggtaaaattatttcttaaaataaactaaacagaccaagctctgattaaaccactatagttctcttattttttctatatttttgcttttttgtctatttcgtagcttatattttgagtactcgctattcttggtgagtactagcataactgctagtgactattcttgctttgcttgattactcgcattatttgtattgtctaaatttctctgactatacttttcaataaaaaaaaatagatcgtgtatttttgataacttttggagttgactattattggagcttttttgtaaaaaaaaatataataaatttatatggataagagagaaaataaaactaataatatttagtgatgatatgtataatttggacacatggtgctctcattgaaagtgctctaacccaaagagccatagctcaaattatctatttttctctatccaaaataatgaaagaaaacttaattgactcccacaaatgagtaacatattaatttaagacacccaaataaaaataaaaatataaacaaattcttacaagaatgtcattgaatcatattttaattatatgttccattagcatgtgtagttctcaaaaaacttgtacatgaagttgcaccacaaaaag

SEQ ID NO: 240956 - DNA, 1028 bp, Cannabis indica
tgagattttaaagtaagagggtatacccaggaaaaacgactgtagtcatctataaaaatgatataatacctatagccatctttggaaggaacatgggagggcccccataagtcagtgtgaaccaactcaaggggttgactagcatggctagtggaagtggtaaatggcaacttgtgattctttcctaattggcaggcattacagaatttaatttggccagtatgggaaacatgttttaaaattctgtttaggacattgttgccaggatgccccaatttgcaatgccaattgtttatatcatttgttcgtgtggaaagaaaaacacttggagaagtagatgacaaaccagaatttttatttatgaactgtgaattacaagaaggaagagattcagtgatctctttattacacagacagttgcgattacaagaatttgaagatgtaaaatcagaggtgacatgaagacactcaacatttgatcttgatgaacaggaagcatcaccaagagagtatagaccatgtttacgtttccctttgagtagcacagctcccgtttgtttgtccttgacaaaacaacaatgcttgtgaaattcaagaaatacattgttatcatcagttagtttagagatgctaactagatttttagtaatagatgggacatgaaggacagatcttaaagccaaagaagaggaatcaaaggaaggtaagaatgtagaacctgtttggaggatgtttagtctcttaccattgccaacagccaaagattcagaacttgtgtatggtgtaggattgtcaagaacagtgtcatcagaggtgacatggtgagtggctcccgtgtctgcaaaccagtggcaatcatccccaaagtcttgtaccatggttgttgcataagccaaaggatcacagtcaaactcttgttcagtcagatatgcacggggatgattgggatttggctttggaacttgccaggttttatcaaaccggtagtgacacacaggtgcagtatgacccattttcaagcacacttg

SEQ ID NO: 240957 - DNA, 1182 bp, Cannabis indica
atatatatatataattttttagggaataaattgtaaaaatatataatataggattttatatatttgtatttaaattataatccgctatttaattagaatgtgcattatcttaaagaaaaaaatttctttcaagagaaatgctatgggagatcttaaagtatcaaagtatatatacccttactaatataattttgtgggaaatttacaattaaagttccagaattaaattaactaaactttaaacaatcaaacaattaacaataacaagattgaaaaattcacaaacaataatcgaatgaaaacggaaataatgaacagagtaaagaaaaactagaaaacaattaaagcagaaaacaaaaaaattaacaccatgatatacattggttcaagactgatagatcaatatgatctatgactttactccagttctagaacaccacaaaattctctttattgattgagcaagaatatgtacaatacattcgagatcgattctctaatgagttctctcagagtgtttcaactctcacactattaaccaagaattttctttatttacataagattcttattacaaaactcaaaataaatctctcttttttctctgcacctctttctaccgatctcaatctttctctctctatttctcaatctgaatcttatcgatatttctgaaatgataagtgtaggtgatatttataggccctaggatcaagatcctaaagtcagtagttgcaagaagttaggtttaagttagttaggtaataactaacttaaccaactcttatttaagcgagaactatatgtcaccataaataagagtgcatccaggagtgagaatgagggctcctagagtcacagaccaaggtacttgctgaaggaccttctcggataggaacggggcagctggagttgactgtctgggagaaacaactagccatctgaaactttttttcggaagaggactagctttcttgaagacccttcctaaaagaataagcctttcaggactggcttccacaagtcaactgctttccaagaatgataagaaattcttgaagacccttttcatttagagcaactatactgcaaatttaatattaggtctcacatattttgatttagtaaataatataaaaaaacttaaaagataattacatataaatattttttgtaaaattt

SEQ ID NO: 240958 - DNA, 1581 bp, Cannabis indica
tccaataatgaggccaaatatgacactttgatcgccggtctaaaactagtccgggaaatgaaggccgagcacattgagatctgcagtgattcacagctagtggtaaatcatgtgtctagaaaatacgaggctcgagggggaaaagatgatagtatatctgagcaaaatacacgatctgctcgcacagttcaaaagctatgctctcaggcaaatgccaagggaataaaacacgactgctgatgcattagctcgacttgcgagcagcaatgtaaatgataaagcaaatctgattcttattcagtttctcgaagaacctagcatcactggcatggaagagattgaaatgattgatacatccccgaattggatgacgccaatagcaacctacctaaacaatggggaactcccagataatagaaatgaagctcgaaaaatgagaaggaaggctgcatggtacatcatactagagggagttatgtatagacgaggattctccatgccattgcttagatgtgttacacaagatgaagctacacgaattttgtctgaagtacataatgaattttgcggcaaccacgctaccgagcagagtttatctatgaaaattctaagacaaggttatttctggccgacaatgattgaagattccaaggcctatgttaaaaaatgtgataaatgctaaagattttcgaagatacctcgagcaccgcccaacgagtttactcagatgcaaagtccttggcccttcgccatttggggaatcggcctgatcggacaattgcccaagggcaaaggtggagtgtagtatgcagtggtcacggttgattacttcaccaaatggacagaagctgagccgttagcaaccatcacgtccaaaaaagtgcaggacttcattgtgaaaaacaataatttcccggttcagattgccgtacaagatagtctcagacaacgacaaacagtttgacaaccaatcctttaccaattttcgtacgagccatggtatcatcaaaagtttctccgcagtagcgcatccccaagcaaatggtcaagttgaagcagtcaacaagacattgaaagacaccctaaataagagacctgaggatgctaaaggaaactggccggaagaacttcctgaagttttatggtcgtactgaacaactaaataagcagcaaccggacaaactccatttgccatggcatatggatatgaatttatgctgcctatagaactcgaaccaccatcacacagaagattaacatatagccaagaggcaaatcatgtactccttgcgaaatcacttgatgaaatcggagaaaagcgaaccccagcaaacttaaaactgatagctcatcaacaaaaagtagctcggtattttaacaaacaagtgaaagcacgaaaattctttgtgggagatatggtcctaagaagagtatttttgaacaccaaagacagcacgacaggtgtggtcggacctacttgggaaggaccttattaagtggtcgaggttctagaatcagtggcgtacaagttgggtaagtatgatgaaaaaaatcaactcgctcttgttggaaattatttta

SEQ ID NO: 240959 - DNA, 843 bp, Cannabis indica
tcttatccataatgcatatatatgtatcataagatgtatattatacagttttcaagttttttctaaacaaataaatagataaataaaaataatatttttatcaaaaataaatattagtaaattctttgaatatggttatattgttttgcctttatgaatgaatatgggtgtcctaggtgcaccaatagtgtggagtcttctttccatgcattagtattgtgccatgctactctctttctttaggaatactttcactctccaaaggaatgaactttttgtttgctagtagttacaaaccttcttcctgccttttttgttttgacttctcctcttattttctaaaggcttgagactctacacctctcgccttgttttgtttttcaaacgaaaccaagacctctgcaatgatgacatgatcgatggaggacatgttgccttatcaatatcaacacaacctctttctaattgctaaacttcacttcaaactttattttgattctatattttgcaagacgctatctaaaaggttagacgaattgtactagctgtgatctcatctatctcattccaatcttcgtctttcattgtactaggctttttctctatgcttagtaacactttgtggaccttctcctgaataataaagagatccttcctcctcagccagagaaaaattatcgttgcctctgaacttttcaatttccagttttttggctcttcttttttcttcagtctcaccaacctttgtactagctaggtgattcccaagaaagactgtgtttatatatcgcaatcctttcaagaaaggataggtccggacagtctcctagacaaaattactct

SEQ ID NO: 240960 - DNA, 1646 bp, Cannabis indica
cccctttgtggacctttccctttcgggaaatctgagcgaacctttcgcggataatgcacctttttctttttccctgggatggaagtaaggtttttccattgatttccttcagagggataccgtatggggctagtttccctggacttatgcttctgagtgattggtgaggactcttcctgtgcttcctcgactcctgcggggatggctttagggtgtatgtggatccctactgtctccatggctttttacatggctaccatcacctcttgcatttttttgttttgttctttttgggctgccatctcagcttcaatattagcagccttttgtcttaagagcagtagctatgtgtagctgccttcgtcgtaggcgtcatactcgtcaaagttttcctcgtactcgtcatcgtttgcctcttttcattcctcagaatccacgttgactcttgaagcaacttcctcgtcttcagggttttgagcgtcttgaggaggacggggctgatgtgtgtcgcgagtttccaccataattgcttcggcttataaggttgttgtatgtttaaagacgcttccttcaactctcaatggaagcaccaaaatattaaccgaggttttcggcaaccaattaaatagtaaatatataaaagttgtagaaagtttaatgcatggaattttgacgtggttgtggcattaacgagccttagtccacgagtctttgttatttatgagagtatttattacaaagaattgtcttggtagatatctctcctatttgctctctttaattcttatgacccagaattctcgacccctatctcagtgtgtttatagggtatttgtagtgtttttttttttatgggagggtccctagaaatggatcacttgtctttttgtgcaggctcagtaggggcacatattcctagcagatacaaaatgggaaatacatgacctataccgtaggtatcttaggggttaggtggatataatcttttatcccctcttgattgatgtgattcctcataaagtagccatcactatagccttattaatcacatcgtaatagctgcaaaagagggttacgccatcaatcctattgtttatggtagttccaatacgttttcccccatgcagtattaaatgtgaggtgattgttcaataaagtctagtacctctcggagctgccttagtgaggccctggcctccgggagcataaaggtctttcttgtatcttctctaggagtcaacgtcccagagacacttctccgctgcccaagacttagttgatttctttaagagcagaccctctcagctccacgtgtcgttctcgtacaggtccacgtatttttaggcaaaattaaggcaacactttctaattttcacatattctttttgtataaatgaaatgaagaattttgttttattaaaagataaactcagccaatatagctaataaaatcacatttaataacttaatataaactcacaaaatgacaaaaactccaataggaaaaataaccattttgcccttcccacactaaaaatcgtaaaagatcacttaggggtatttttgtcaattatatatctcgactatttctgacatttctattgtctaactatactgctccgctatactaaaatactaggatgtga

SEQ ID NO: 240961 - DNA, 777 bp, Cannabis indica
aaatatcaaagggtgaatttgacttgtcacaaagagtaggtcccgcttactacaaaaaatagtcagatgctagagaccgaacaagaatttgataagtagagcccaatgtaccaggctgcatgtcaacctgggcgttggatgcttcttcggcaacttcccggggtaatacttctaaggaatttgagattgtgaaagaggtctcctacctcgtttttgaccaaactaaagagaatgtctagagcataatttgtgttaatggagagaaaatattcgaaccaagatgtatatcaaccttgttgcagggccagtacccatgtcaactgggcgttggggccctattttggctttcaatggatctcctttacttctcaagattgcttgtgttgacggtgagaactcatcaactaacattgtggccaaaaatcagaatttaaagtgaaactaagagatatgatgaagatgaagtgaaatgaagtttaaatgactaagagatttcatgagtacgagaatgcattcaaaatgtaagttacagaattgattttccaaccccctctcacacttgagaattagatatttatatgctctaattgctgagttacatggtgatcccaagaagacaagttgttgcttttaggctacaaactgcaggtgcagaaggtggtcttgcgccttgtacatttgtgtggtgtcaggtggtcccaggttgcaaaggtggtggcaagcccgttgctggagaagaatatcaatttattgcttttgattatggatctactaaca

SEQ ID NO: 240962 - DNA, 799 bp, Cannabis indica
ttgattcatactatgtgtcatgggaccccaattgaccgacagtgatagtgtcactactgccattgtacagcgacaccactgagtggaaccctattttggtatgggttagtgatttccttacgaaactagtgactccggtacactttccctaacttgacaatattaaagttctctttttatctatatttgtatgatatcaaaaaaattattctaatcttttttcgacgaaaaatatattactgtaatcctaaaaaattatgatgtgccatatgattttgaattatttttcattattaaaaaatatttattaaataaaatacataaaaataatgacacataattattaatattaataataattattttaataataactttttttcatatgattaaaggaatttaatatacaaattaagaaatctatgacgagagaaaaactagtttatagtgtgtttattaattttcgcccacatatttatttggacataaaataaaaaataataaagttcattccattccaaatattattacaccaaaccaaaccagttgtaagtgtgtttattcatttggggacatatgtttatttgttgtacttttaacttttcatagatatcacaattaaatattattttaaattaattggactgcttgtgattgacaatacttgttgtatataagtatagtgcaccaaagactttgaaaaaaattatttaaaggcagcaagaaatatgctccccaagtttaatatactttcaaacggtttcaaaaaaattcggtttcccccctaaattcattttca

SEQ ID NO: 240963 - DNA, 1053 bp, Cannabis indica
tgtttaaacaacatacttgtgagtagatctaagatcctagtaaaatatattccaacaaggttttgcttcacctccagtgaatggtcacgttgctacaatatctagaggcccatacattgctgaaagtaccaaaaacactcaaaaaagatgcctcaatgagcttgaacaagaaagtgcaaacgccaacacaaaggccttgaatgataaatttaccaataacaatcattgaagaagatgcaagatatgttcacttttcccacaatgatccattcgtgattaaggctcatgccaataaaagagtatctagaatcttagtagataatggaagctcagtcaatatcctgttcaaggccacatttcaaacaattgggctaactaaagcgaacttcatgccctatctaattcatcttcaaggattcaatggagactccttactcccatgggaaagatccaacaaataattatgttgaatggaaatgtagccagaagcaatacttcctctgctttctattagttttgtgttactaaatcaaatgcgcgatgaaagcatttatagagattatcatcgtaccacactcaaagatctccatatgtacatatattgaatctgaaataaaagaaaagatatatttacctcttgaagtgaatcagggtatcctcaaatctttttgtaagttgtatccttaatatggtgatgacaaacccgcactgcgatcttccaaatccaccaccacacataagaatgattgtgggctaatttggataaaaatatatatgttcttgagttttcctcaacacatgagcaaaaaaaattattttctatctaagtgaataataatgaaaagttttttttaacctattgaggtttcttattatacgtatatatagatttaggatataccaatatattaatttaaactactaaaataataaaggtttaattaaataagatatatattatttcaaaaattaaaataataatagttaaatatttttgaataaatatttgtacccgattttgttatagatatatattttaaatttatatattta

SEQ ID NO: 240964 - DNA, 1414 bp, Cannabis indica
agctctctctctttttatctcatattatttgctatgaaataataaagaagagagtgccctacaaaaaaaaaaaaaaagaagagagtgtagtgtcgcgtctaaatatttaatgtattacgtctcttttatgaaatctatttatataatatgccaaatatcatatacttttttttgttgttgttgaagatgcatgataaatgagtttaaagtcatgttattgttcttcatcgatcactcaaatcttcttgcttttttattttaataaaataaatagctttggttatataaatatattgataattttacccttcaaaacaaatatattgataatttttaaatatgtattcctaaatatatgatatagttagttttatgtggtttttctatacttaatctttccattcacaaatggatttatttatctcaagcattaatgacaaatctatgtatacaaacctatctttattttatcatttgataaaaaagagagtgtaacttttgtaaaattgtctaaaatagtattaccttataaaaaaagtaaactctataacatggctgatattttttaaaagcaaattattttattattattattattattattattattattattattattattatataataacaacaacctgggctgattttttctaaaaatctatctaaacaaaaaagaaagaaagaaaagcaatatttatataataatgtctttatatgcataacaaactataaaaataatcaccataaaagtaattattttgtgaggtccatataaataaattaataattaaacaaaaaaaacttaaatgtctacaaataattttttaaaatcagttaactattgatttttcaatttataattattgtttactataattttgaatatagtgatgagtaatgacaatgaatacgaatatagaactataaatgatatgcgaagatgataacttttttgaatttagtagtgattataaatgagatacgcagtaatgataactttgaataaagtaataactatatacagtggtgatgatgactttgaatataacgataactacaaatgaagtatagtgataacaattttaaattttttttgtattccaatttacatagctaaatatagatttttccttaattatattataatttcattaattgcaccacataaattttagcggagttttcaatattatacttaaaatggattttatttataaaaataccttcaacaaaattatttgcacaaataccgatatgccacatcagctcaaataccgaaatttaaaataattaccgaaaatagaaaaaatttaaaaaatttcgcttccagaaatttcaatgttttgtaggttttagaaaaaaaaaaaaagcaactttttagttgattttaatgtaaataatatatcaa

SEQ ID NO: 240965 - DNA, 1550 bp, Cannabis indica
ctgcctttggcagcatctaacttgttcttgataatatctttcaagattttattaacagcttccacttgtccatttgcctgaggcatagaataacctcttttttatagtttaattattgtgtatgcactgaatacaagagttttcgcacctcatttttgttagttggaagttgtccatcgagtagatagttgattataggagtcatccatgtaggtgaactgtctatcatctctatgtcttccttttcacatatacttggctcgtttagcatctccactggaaccaagtttaattcatccaagtcattctgcgaggccagtttttccaaggcatcagtgttagagttttgttctcttgggattttctcgattttaaactaaccaaatctttccaagttcttccgaaccttttctagatacttacccattttaggcccttagcctggtattccccgagaaccttatttacaatcagttgtgagtcactatgacacatgagattctagaccttcaacgcctcgactatcctcaagccagcgatcaaggcttcatacccagcctcgttgtttgacgcgtcaaattgaaatctcaaagcataatgaaacttaaagccttctagtgaaataaatattaccccttcacccgagccctactcgttggatgcaccatccacgtataacttccaagtggctgcgtctcggtgaacaggaaaatttcccttttgagttattccttctattaagaagtctgccaaggcttggcccttaatggatgttcgagggtgatatgttatgtcaagctgccccagttcaattgaacattttattaatcttccagaagcgtctggttttgataaaacttgtctcaagggttgatcaattaacacttttattgggtgtgcctggaagtaaggtcgtaacttgcgagacgcgtggataaggcataaagcaagtttttcaagaaggggtacctcgtctctgcccccagtaacattttactgacatagtaaataggttgctggtgctttccctcttctcttactatagccgcactaatcgcatcttccgagatagctagatagaggagtaacgtttctccagttattagtttttccaaaactagaggcgtcgccaaatgccttttaatgttctaaaaggcctcctcacatccttttgtccactcgattttcttgttgcctcacaatatattgaaaaatggcaaacacgtatcagttgatttcgaaatgaatctgttaagtgcagccatccttcctgttaaagcctggacttccttaggttttgttggtgatgacatatttatcaaagccttgattttctcagggtttgcttcaatgcccctcgcattgacttttcccaaggaaactccaaaggaatattttttcgggttaagcttcatattatacttctttaatatttcgaagcattctacgaggtttgtggtatgactcccagtttttactgattttaccaacatatcatcgacgtaaacctccatgttttttctgatttgattcgcaaacatttcattcac

SEQ ID NO: 240966 - DNA, 1179 bp, Cannabis indica
aatgcaaactgaacaacatcatcaacactccgactattctgatcccaaaccaattcgttccgagccttccatattgcccaacacaaagtaccaacctgaacaactttaacatcatcaactttgtccattaaatcctgcaaccagtccctaaacgaatcccacacccgacccccatcactcacagcaagcttcgtccaacacgcagcagcaaagtcacagttaattagacaatacgagatggtttcgctggaaaccaaaggcaccttcctctcaaaaagtctcttcctagttgggagataattggccgctgccctccaaagaacatctttaacagtaggcggcactctcaagttccacaaatccttccaaaactttgaacccccatccctcccttcaacactagagtcacggttaatgagcaattgataagctgatttaaccgaatagcatccaagtttctccttcaaccaataccaagaatcactagcatcaccatagctaaggaattcccaaaatacatcagcttccctttcattaaaaatatcctgaaccacctcctcatcccactccttacttccaaccttaaacaaactatgaacctttaaatcattgtaagcagttaagtcagaagttggtattggaaactcatcactaggaagccacggatccagagcaaattggatagataaaccatccccaaccctcattcgtaacccagccttaagaacatcttgagcctccactaagcttctccaaataaagctcggattagagcctaattcagcataatatctcgcttgatacacgcgactcaccaaagaattaagattagtgataagacgccacccttgcttacccaacatagcaatatgaaactcacaaagactcctaaaccccattccaccatcgaacttatgcttcaccaaacggggccaactcatccaactaatgcctttgttttgattccaagaagatttccaccaaaatcttgccattagactctcgatctccttacacaccccaaccgggagaagaaagacgctcattgcataagtaggtaacgattgcacaaccgttttatcaacacttccttactcgcacgagacagaaattcggtatcccaacttttgattcgcttttagcacctttatccttaagaaaccccaacacatcattctt

SEQ ID NO: 240967 - DNA, 1818 bp, Cannabis indica
caggtttgaagaaacacttctggagagaagctttgtacactgcttgttacttaattaatagaagtccaaataggaagattgagctgaaaacacctgaagaactatggacaggtaaacccccatcaatgtctcatctaaaatttttttatgcacactctgtggaagacaaacttgggaaaagatccattaaatgtattttcttgggatatccaaatggtgttaagggctatagactttactctcttgaaacaaataagattgtaacaagtagggatgtaatctttaatgaaaatgatttttttaaaagaaatgagaaaggtactgtttctgatttttcaggtcagcaaagccatgataatgtgagtactcaaatcgagttggaaaaggctgctgttgatcaagaaacaacaccagaagacacagatgaaactgaagtagacactgataatggtagtgaaaatttggaagattaccagctagccagagatcgaattagaagggaaatcagacctcctgctaagtatgctgaagctgatatcattgcttttgctctttctatgaccatggaatctcaagacaaagtgccaaagacttatatggaagctattaacagtaagcaagccaagaaatggaatgctgcaatgaattctgaaatggtgtctctcaagaaaaataaaacttgggttgtagtccctaaaccagaaggacagaaggtgattggttgtaaatggattttcaaacataaggaaggtataacagaggatgaaccagtgctttacaaagcaaggttggtagctcaaggctttacttaagttgaaggagttgattactcagaaatattctccccagtagtcaaaatgaagaccattcaaatgatgttggctcttgctgtgcaatttgattggaacatagagcaaatggatgttaaaactgcatttttaaatggtagacttgaagagactatctacatgatacagcctgatggattcaaggtggaattcaaagatggtgaacttgtctgtttactgaagagatctttgtatggtttaaagcaatctcctcgacaatggtacaagaaatttgactcagtattgacaaaagttggttacacaagatcaaattatgacacttgcctctatttcactaatctaaaatctcaagctgccactttccttctagtgtatgttgatgatatgttaatcatgggaaaggatcaaaatcaaatcaacaagcttaagtatgtgctcaactgtgaattcgagatgaaggacttaggtatggccaagaaaattttaggtatcgaaatacaaagagacagaaagaacaacaaaatgtctctaactcaaagaaaatacattgaatctgttctgagaaaattcaaagtgagtgatgctaaagaaacaaaagttcctcttgctggacattttgtgttctctactagtcaatcacctaaggatgacaaggagatgaaactgatggcagaagtaccatatgctgaagcaattgggagtgtcatgtatgctatgattagcaccagacccgatatagcatatgctgttagcacactcagcaggtacatgtctaaccatggtgaagaacattggaaaggagtaaaatggttgctgagatatctaaaaactacttctaattatggtctgacatttaagaagtctggtttcaaggtggaactagaaggttttgttgatgcagattatgcatcaaatagggatactaggaaagatcaaaggcattctaggagaattacaaatgttaaaaggcaaagcagttgtgttttcagacagtcaatcctccattcat

SEQ ID NO: 240968 - DNA, 985 bp, Cannabis indica
cgcctaagatagttagggtgttacaccatatgtcatcaaagcagtagttggagttagagtctataaattggctcggcctgatggctcgctaattaaaaactattagaacgtagaatatttttgacccaactatcagtaaataaatgatgtaacttgcattactgatgtaagctttaaacttcagttatgaataaagagaattatttatattaagtaattacaaagtttcattctttaaaattacttaaggggcatttatgtatgactaactagaattcatatgtaagtacattgtataatgcaaccctgccatttcaaattattttttgaaattcaaaggttctcgactaaacctctttgacgaaagtggagtcgaaccattataacaacctgaccaaacctttttgacgagaaaggggtcgaatcgttataacaccttgatcaaaccgttttgacgaagaagggatcaaataactataatttttgacttataacctatccgacgggtgtggaaaatcaaaagttataactcgcgtacaaaactgaatactaacggttctcgcgagctacgaaagtactaaacgaggcatcacaacatcttgataaagtacttaaacctagaaaatagatagataatataactatttatgcgagcaaattaaaaatatacaaagagataaaatccttaaagtatatttaagtttgcttaaggcagattataactgcaactgcgaggcagaatggacaaccgcttgaaaatcataaagtttggtagattattaactacttaaacaagaagattacaagcaatggaaaagcccaaaagttctgtatattcgatcaaaatataattgtttacattgtgaataataacgaaagcaaatacaattgtattaagttaaaataaaaaaagtacaaggcatttaagataagaaaaacctaagacttgttacaaacttgtctttacaaaaatgccactaggggc

SEQ ID NO: 240969 - DNA, 1094 bp, Cannabis indica
tctttcgcttttcatctctttcagtcgcaataaaacgaacaccattcactacacaacctttgtaaaaggttgctaagtaatctgagccagaagctaaagcgagtaactcatcaccattatgtaaagatccaagcttgtgtaactcatatatctaaatacatgaaatatattaatatgagaggaatttagattgttgaattaaaacttaaaaatattgtcatcataccttcttatgaaaccacggacggaaagtttgtctatgcaaaacatcgtggttaccattaggatattcatgcttgatcttctccaaatgttcactatgaaatgtgatattgtcaaggtacaacagagaaaaagagagaagaaaaacttaaaatttaataaaataattcattggaatgtaacaaacttactctaaataagcttgtatttcaggagaattttgaagtatgtaccactcagctttttcacgaatgatacgatcaagaggcttgataattccactagttaaaggacaacattgagaattaaaaagtgtaagatagcgagagacagaaggtgcatcttcatttcgatcaagacgattaaatcttgtttcacactccttaaagtacattgaacaaaaggttactgcctcatcagtgacataaccttcgggcaatggacccttcaggacgtgccttgtttcccatataattctttaattttttcatgtacctttcaaaatgatacattcaccacataaataccgggccacccagtatagctccttcaagcaaatgtaataccaaatgtatcattatgtcaaaagtagctggaggaaaaatcgattccatcttgcacaataatagaattaaattattttgagaatcctctatatgttttacatttaaagttctcaaacataattgtcggaagaaattacatagctgagtaatagtggctgcgttatcacgttgtagaaatttacggacactaaccgcaagtactcgccgtataatgacatgacaatcgtgggattttaacccaataatatttgactcatctggagaaactttgctctttaaacttgaacaaaagccatcgggaaactt

SEQ ID NO: 240970 - DNA, 726 bp, Cannabis indica
tatatagctccattaatggttataaatgaagtggtccaaatttatattctagatatttgatttaataataataaattattatttttttttcagttcacatctacaaagttatatatttcaactactataaagtatgtccgaaatattactttccattgtttagtcattgccactgcatgatatgaactcatgtcttttatggacgtatattttagatacaaccagataaaaatgcacgtcgttgatcaggagcatacaaactttattactaatatggaattgtattgttaaaaagtcaccccgtgaatgaaatgttctcgagcaccaaattagtgtaaacatcaaaatttatgtggacaacacgttggttaagtcagtaaaaagtcaagactatatatagtcgcacgatctcgcagaatgtttttcagtcctaaaaaaatacaaaatgaagttaaatccaaaatagtgatcatttggagtttcttctaaaaaaagttttggcttcatgaatgctagaggaattgaacccaatttaaaaaagataaaagctctgctcgatgatcatgccttcactaaaaaatcataagaagtccaattattgactgaaaaaatggcaggactaaatagattcatttcaaaatcaacagataagtatctactattttttaacgtattgcgaggcaacaaaaaatttgaatggactgaaaagtgtgagaaggcatttca

SEQ ID NO: 240971 - DNA, 856 bp, Cannabis indica
ttcaagagataagtctttgtgagattgaaaattctaaattacaaagagaaacaattatgaaccataccaccagaggaaaaagagaatcatacaatacaaaaccaaaaactgaaggaaataaacatccgtaaacccaatcaattaggaaataaactaaaggtattagcatcaaaatgatatattaacaacatagatgaactcactttgttaatatcaatagctgaaaagatattttgaaacatattgtagtaagttttagatgctctcccgtgtgcaaaaccccaaaagaacaatctgcagaggaaaattaatcacaaacggtataataaaaagtctagaaagcgaaaataaaaccaatatgacaagctagtatgattgcacacatctcttcataaacataagattaccaaagggggattagtgaatagagacatcgaggccgcaattgagatttaataacatcaacatccaaagagtattcttgtatcttaaatgtaaaaattgggccttgtggggttcttgcaaccctcaagtatggtgcagatggagtttttgacaatataaggaaatgtgtaacacacattggcccagcaacatttagaaagtccttgagattattctgtttcttctcctgccaaacgtaaaaaagggacaaagtaagctaaattaaaatcctaaggaaaataacaaagcccatatattccaaatgagactagcacgagtcatgacaaaatctctctttgccataaaataactataaaatctgaattacttcttgtgtattgtattctaaacttaattctttatttttttttctgctatttgctattctgatttttctctgtctctcgagtct

SEQ ID NO: 240972 - DNA, 540 bp, Cannabis indica
tattgggagagaattaatgaattaaaataacaattaatgatctcagcccaaacttataataattcttagtgatatactgagatctagtatagattatatatatgcacaacaatgtgtatcttaatttttttaagtcatgataataagaaagcaaaaattctattaaaatagtcacaaacctaacaagatcataagatcaatacaatcaatcctcgcggtcatggctttacatagagcgcggtgatcccgaccaacatacttgaggaacatctaaacataaaactaactgagcaaaagaatgagcaatggcgaccactacacttgaaaaacatctaaaaataaagctaattaactgagcttaagggtgagcaatgacgttattaatagtcccattataatgataaatagacatataagaaaaagatttctaaatatagaaataatattaaccgaactcttaataataactatagcagacaacgagaacaatttaagaagatagtgattcgagtataccctaaatgcaagtagaaaaaaacg

SEQ ID NO: 240973 - DNA, 935 bp, Cannabis indica
acaagtaccgagaccgggacccatattcagaatcgaaaccagaaacagacttgggaccccaaacccagaccaagacccagacatagatggggatccagaccccaactcggagtgaacccgaatccagacccagaccaataactggacccgaatcaaaaattggagctggaccgagacccagaacccaaacccaaacctccacccaaaccaggattcggacacagaaccagacttagacaccaacccgaacccggacttgaacctagaattagaattggaaccggaccagaactgggacaaagacccaaacccaggaccgaaataagagcaaaacctgaacccaaactcagaacagaacccaaaccgagacttggccttggaccgggacctagaatttgggatatgaccctggatcgagatccgaactcggaccgcaacccaaactagaaccgagacctagacccggttcgaggacccaaactaagatcgaggtttggacctggacgtagacctggacctgatacgaaccagaccaacagttgtgatgaaacccgacaccaaatatggcagactcaaagaattctcaaaatttggatgtggaactgcgaccgaatgcttagttaagcatgaaccttggtatgaaggaagatgccacagacggtggtcgaaattcgtttgataagtcaggttgaacgccacaaggaatactccttgataagtttgaatagttctctcaagaactcaagaagaaaacctctcaaaattttattccaaaatattctgatttttcaaagtgtttacaaggctttatatagccaacttacaatcaagaaaaaggaagctaaaagaatgacaactttccaaataaaacaaagacaaaataaaggaaacaaaattaaaaaaggaaagctgccaattgccttagaaaacgtgat

SEQ ID NO: 240974 - DNA, 1173 bp, Cannabis indica
aaggcttgttttgtagtagtgtgcttgaactccctttgatctccttgaagagtgcttgtttcctctcgaggcaagacctaaaaaacaatctcctaaaagcttgtaaaaccttttcccgaaggtagcactgttgcccttctttttttgcatacttgaataaagactcaagacaatacaaaatacatataaacagaataagagacgaacattctcttctatacaaagcaaagacactcttttcttaagaaatgaatacaatttaaagtgtatgaaagagatatatgacgtagctgctataaggtgtatttataagcaatatataccttattaacagctcacacacggtctgaacaagaccacaactcactagacaattccttaaaaaagatcttcttttagcccaggaatttctaattctgtacctacagaatcgtgagcagtaagtgcaactttctttctataaaaaaaaagtcttgctttggttttctccacaagaaatttgagcaaacatattaggaaactcatacaagatcagattaacagaactggatagatagagaaaggatgagtcatcaaacttacactttataccttatttttcataaatagaaaaactagacagttttctttccaaatacaaattaattaatacgaaaaatataaaagtcaaatacacaaaatatatatatatggaaactaaataaataccacaactaaaattaatgaataaattataaaatatttttgtcaaattaaatatgccaaaaataaaattgaaaatctcctcctttggcactttaattgataaaacatattataagaagaaaacatacaccaagtgttagaaacaaaaacaatagagtatactcccccaagcatactgacacataaaacatataacttttaaaatagaaaaaagttcacaaaccacaaacaaaataactccctctaaaacaagggtccagagttgtaactaacaatctaaagaataaatactaccccttctttttgtctatcaaggagctaaagataacaaacaaaataaacaaagtcataatagttcaacaaacatagaaattaagcaacaagataaaaaatgaaccacttaagcatatcattggatcggaagaatttcatgatgttgttcatcctcctgagaagcaaggcttgact

SEQ ID NO: 240975 - DNA, 1536 bp, Cannabis indica
tagctcgtgtcttttaagcatgcctaggaattttaagacttttaggcacaccactacactacaaggtagtgtcacgacgcttgaagcaaaatttttggcagagaagaatgaagagttttaatgcctcaacattggatcccaatgttgaggcgcgcctataaacttgccaaatatgaccttgttggcaaattttgttttttagcgccatgacattgaattctcatgttgaggtgctactccatatttttaaatcccttagcattaaaaggtctaattgcactagatctgttagatttccttcttggattaatttcatgatactctagcgacaagactttatttaattaaccttcttgcataatttttccatgtttgatgcacttttcttcattactaaacttgcaaaatattaataaccaaaagcataaaattgcataaaacacaactaaaactatttaaaaacgctttaaaaatataaaatagtactaataaagtcctaatagggatcacaatacccattttttccatacttctaccagtttctgaaggaagcaaaatcatttttggagtatctcgaaagatgatcaagttttgattcgtagtcgtgctgatattagaaaatactttacagatcgattttctcaaattttttcttcctctctaatccccctatgcctttgggattgaaaaaatctaattcagtcatctattttggatgagttaatgtcaatctcattaaaatcctctaagctcaagagaatagatcagtagtgtggagtatgtctccccttaatgctccaagacaagatggtatgcccgataaattttataaggatcactgggaggttgatggtagtgacgaggttaattttgtccatgatttcttttgtacaggaaagtttattaagggagttaatcactcatttgtggttattattctgaagaaagaaaatacctagaaatttgatggttttaggccaatcagcctttgcaatgttgtgtacaaagtggtgtctaaagtattggcaaaccaattgaggggtgctctctctaatttgatttctcctcattaattggcctttgccccaggccggtggattgtggaaaacacaatcatagcctaagagattgttcatactatatctagagattagagaaggaaaagttttacggttataaagcttgatatgtcaaaagcatacgataggatcaaatggtcatttcttgatagtgtgttgaattgctttggttttgccgaacacttcaggaaactcatcgctcaatgtatttccttagtatcgtatttgatgctcttgaatggtgggccattaaaatcatgtcaattgaagtgtggcgaccccatttctccttatttgttcatatgggttagtgaagttctccctagaatgctttccaaggttgggaatagtggagggttgatgggattcaaagtgaatgacgtagtccatatatttcccatttatgttcatagatgatacaataactttttgcaaggctaatgttaacaatgcgata

SEQ ID NO: 240976 - DNA, 1041 bp, Cannabis indica
catcaatcgagaaaagttcgttgtttattgcgatgaaagcagaaggttctagaatgtgttctgatgcaagctgacaaagttatagcttatgtctcttgtcagctgaaagactatgaatagcgctacccaattcatgacctagagctttccgccgtggtttttgctctaaagatatggcagcattatttttatgatgaaaagtgtgagatttatactaattataaaagtctcaaatacttttttacccagaaagatttaaacatgaggcagagaaggtggctagaactggttaatgactatgactgtgagattctgtatcaccccgagaaagccaatgttgtggctgatgcactaagtagaaggggtcccgggtaggtttcaccactgttatgatagcccctcacctagcttcagagatggttaatgcgggaattgagtttgtagttagaaagttgcataacttgacacttcactctaatttgctagagagaatcagatgggcacaattagaagatcccgagctagtcaggattcgggatgaggtgatggcgctggtcggcctgaagacttttcaatcttgaataatggaatgttactgtataaagctcaagtttgtgttcctagtgttgatgaactcaagaaagaaatccttgatgaagctcacaccacaccttattcactgcatccgagaaccaccaaaatgtatcaggatctaaaaccctacttctggtggtatgggatgaaaggagatgtggtagactacgtgtccaactgcttaacctgccggcaaatcaaagctgaacatcaaggctggcagggctattgcaacctttagcccttcctgagtggaactgggaggacattgcaatggatttcgtaactggtttgcttagaaccacaggaatgtataattcaatatgggtcatagtgtacatattcccaaaattagctcaaatgtcgcttccttatttattgaaacgaaactggagaaaggaagtacttaggtacgaaattagttcagaggaccaatgaagctataga

SEQ ID NO: 240977 - DNA, 1434 bp, Cannabis indica
tgagcgagctattaccaagttctagtggaggtcaaataagaataaaggcatacactggctaagctgggacaagctcacgaaacacaagagcaatggttgcatgggatttcgagatttaagcgacttcaacttttcgtcagggtcttttttcacatcgactttggggtgtaatccaagttatatttggagaagtgtgtttgaggctaaggagttagttcgagctggggttcgacgattcgtaggtgatggttccaccgttaatatcttgtctgagccttggcttcctgatgagatgaacccgtacattgaatctgtccatccggggcttgtgggaaagtcggtcgactctttaatgaaagtcgggctggttgaatgggatggggaagtattagctgatgtgctcactgctagagatcaagctttggtgtggaaaattccgctaagtagtcatatgagttctgatttgtgatactggttacatgatgcgtcaggggttttcactgttaagagtgcatattctctgcttcaatcaatgaaatccaacagagatatcccagatagctctgggttctggcggctcttgtggcagttacagctccctccaaaggttcttaattttttgtggagagcttctaccaacagtctcccaactcggtttcatctttccataaaacatgttccaattgctgcaacatgtctgttctgtcttgctgctcctgagacgactctgcatgtgctggtgcggtgctcttttgctcaaagttgctggagcaaggttccaattactgctgtggcgcctgatgcaatgttgttctcaagttggtttgaagcgggtttggcatcgtggacggctgaggctcttgaggctggtatggtttgttggtcaatttggactcatcgtaacgatttggtctggaactccaaacaccctgatgcgggggaggtagtggcaatggctcagttgaattatttttattggtttaatgctcaaaaacttaatgtcacagatgtaagcttaaacaggccaactgcactacctatggagcattggacaacacctgatttccctttttcaaagttactgtggatggtgcaccttttgccgaccaagggcagtatggactgggtttggttacaaggtctgctgcaggttgggttttgggggccaaaagcttatctagagaaggtgctttgcaacctcatattgttgaagccattggaatcaaggaagctctctcttggagtaaagcgaatggattgtcacatgttgtcgttgaatcggattgtttaagggtcattagtgatttacaaaagtttaaaagtatggcttctccttatggccatattctttatgattgtatgactttggttgcagattttgatattgtttcttttatttttgctaaacgggctgctaataaggttgcgcatgct

SEQ ID NO: 240978 - DNA, 1110 bp, Cannabis indica
ggttccggtctggatttcagtcttggtttagatcaggctccgtgtgtgggttcgcgtcctaggtcttggtctagtccaaagttctaatcccgatctgagtttggattctgttctgggtctaagtccttggttctagtcctggcctgggttcgagtttgggtccgcgtccaggtctaggtttgggtctgattctaagtatgagttttagttcaagtctgagtctatgtctgggtttgttgcaaggcctggaccccgatctgggtctaggttcaggtcgaggttgaagttggggtcccgagtgccagtccaagtttgggtcttcgtcaggatcttggtccagatctaggtccagcatttcgatcccagtctgggtcttggtccgagtccaagttcttatccgaatccctatctaggtccaagtctgtttttgggatcgcgtcctagatttaggtccaagtccgcgtctaaattccggtctgggtacacgaccgtgtccaggcccgagttccagtctcagttttggtcttaggctaggtctgtcttctgttctatgtctgggtctgggtcctggtttagtgattcttgttcaggctctaattttgggtcccaggtctaggtctgggtttgggtgtggttcttcgtctgggttcttgtcctagtctaagtcccagatctagacaccgagtactggtttgttccaagccccgttactcgaatgtcgattcaagatctggataactgtcatgggtatcggtctggttctggttcaggtcccaggtcccaggtgccatttctgagtttgggttctggatcgagactgaggtgcgattctaggtccagaccctagttctgtgtccccagtccggttccatgtttgggtttgagttcaggttcgggctcgggtcccgagtctaggtttgtgttgggatccaggtctggctcccaattcgggtctaggtcttatttggagtgcggcaccttgtccggttactgttccagatctaggtccaatttcagttacgattccaagtcaaggtcctagttctagtcccggtcaattccggttttggttccaattttgggtcacagggtacgggttcgcgtccactt

SEQ ID NO: 240979 - DNA, 687 bp, Cannabis indica
gtgctcgtactgattcgaaccgtgaatcatatttttttttcaatatccaatattttagtctaattttttttataaatctatacgttgtaattattaagttatttataaatttttttactcaagtaattattcaaactttattttagacaccatatttaaaaattaaccgcaaatcttcaataattacttaatacaaaaaaaaaatgaactaaatatcttagggcttggttgatttgagatttaaaaattgtgttttctaaaagtaatttggaaacaaaaatttgaattttggatgtgaaaaattatttttaaaatgtgattagttgtagtgtaattttgtatttttgaattttaaaaagtttaatttgtgattggttatgaatctcaaaataaaaaaaagtaaaagagtatttgaagaattttgagattttttctattatagaccaaaaatagatgaaatttacatttatggccctaaaaaaggaaataaacaaaagtggaaactaaaaagttggtaattacaaaaataccggctgagaaaacggaaaccaccattctcaaccatttttcttcgtgaccagccgaagcttgttcgtgacccagcgatccaacccccaaaaaaccaatctcaaccatttttcttccaaatccagcaaaatcgaaaatctaaaaaaactagtagaactc

SEQ ID NO: 240980 - DNA, 1645 bp, Cannabis indica
tcaaacacacataaaccctcatgaacacatccatttcaaacatcattttaaattcatattttatgaaaataaatcattaccatcgctctgaggccagttgttggatattattatatcaagatctagatttactaacatgtatgtttgattataaactataatctaacatcctaaatataaattccttaaaataatgaaataaacacataaaagattaaggaatccttacaattatggtagtaaaataagatgactacttccatttagatctctaacccttgattccagtcaatagcagagcattatcaagatttgaacttggatcttctcctccttcgatggtgttcaacacagtcttccacaaaggttcgagtatcaccttgaatagagtggcctaatactcaaacacctttagaacaatatttttgagagagaatacgtgtaattttcaaaatatacaatgaaagaggagaagagactagtctgacaatgaaaacttaggttaattctctcttctcatcactttctttatataggcttctcttagggctaggttagatgagattgggcttaaaatagagacatgggctgaagtctaactctagggccgaattcctcatgggctttagggttagatttatgccactttatttcatttaaatgaaacaatgtgtcttttcttattttactacttatctcttctaattatttaaatactaattttattttaataattataaataattatcaaataaaatacaatttaaatatatttattatttagacccacaaagtgtactaattaacaaataaacccctatttctcttttcttctcaaaaatgccaaaacttagtgaaaattctcaaaaaagacagtctatttttgaatttgttaacgtaacttttcgttaaccaaatatatacgtaacaaatttactacagaatttaattataataatgaacacatgatattttacgtggttttgtagttaaaatctacatactccacaagtacatcttattagggatatttctttgaatgtacggtataaatcttaataataataatagataatagaattctctttctattttgtcgtcccttttctcatagtttttgtctctatttataggtgtataggttgacagttatttttattgcgatcgattcatttacaattgctgatgaaacgtggacatttcccacctttcatttattttcacatgggatatatctaataactactcaactgctccttgtcttgatcttttaaacagttatgctgactaaaaaggttgcttctcgctcagaatgagttatccttcttatccgtctttagagaaaaatatactaagtgtagacatgcttcttctcgcagcactctcatattataaagttatttgcgaagtagcgttgagagcgagatggatcaacgtaattttctccatgtacaattgtgtgatttgatgagttttatttccaagtatgagggttaacgtgttaggtttatgccctaaataaactccatttcaatgtaatctattttattcaacatcaataagaaacagaagtatttttcattcatttgtgtttgttttggttcacttttatcaatttgcttgtctaattgatttataaaattca

SEQ ID NO: 240981 - DNA, 1630 bp, Cannabis indica
actcaaaaatatattaaggtttttttttctttttttgaatttaattgtcagcccacaaaactaaaagtcaaaatacctatataatgaaatgactaatctgcccctcacacaaaatttaaactttaaaataacctagggggattatggttattttactaatccaccaaaccgacattctaaaattctaaactagtccagaatatcctcaaaataatccatccattaatgtcgtgacatttctgaccacatcgtcaaatttccacagtcgatgggcccgataaaatatttttatttcaaaaatggtatcctcagaatccatatatcccaatataatcttcgtaattaataaattacgcttaatataatcattttataaattctcactaaataccctaactaagatcataatcttacttcattaccaaaataattacgtattgcataaaatatgtctaattaaatactgtaatcctggtattatgaatttgggatggtgaacttctgaactacgaagggacattctagcgagaaaaagatgatccattttgaaaaaggatctcactaaaaagccaaaggtttgtgaaaaatgagaagcttgaggcgccctttacaaagtccagtgacaagaaagggaaagattagggaatctaacggttgggagttgggccgaatatgatgagacgattcataatgaccctgaaaacttcacaactgccaaaatcgaaggacgcgttttttccaagaagggatcttgacgaaaataccctctgtagttattaaaaagctctttttgctaataaagctctttttaaggggaaagtgttatacccaaactttggctgccatctcaatggaggacacgtgtcaagataaagggaatgtgaatcgatgcaattgcttcttatggaataactaattaatcacgtaagtatcagagtatatttgtaaccagctgactgtaaggtcttaggcgaggaatccctgtacaaactggcacttagtatattagcgagaaaccatatgtcggtgaatgcaaatagcgaggcactaaagatagcgacacgtatcaatcgtgaaagtccttagcgtacaatgtacaaactaagtgtaaaagtcgaatcactcaagaataagtaagcgaggtggccatctcgttacgggaagacttcatataattacatcctgttagcgtcggcaacgcttacaatcctagagagccaaaagataacattcaaataagcctcaaagaattctttgtaaataagaaccgtgatcgacaccaggcatacatcgtcgacctcgaaaggaagaatggccccaactcgctattgagatcactagaacaaagtttctatcgaggcatctcaagatagaacaactaaagatgtgtttaatacactttagttttaaccctaaaacacggaaaaatcacagctatatgactttcaaatcataaaccgcatttacactacgtgatatgtaatcaaatcccacgattttagggatgattgttgtaaacatattacagtcaactttgtaattaaatgtctactatgtaattataaatagtcgcagacaagatcaaataagggacggaaaaaatcatacaagaggagccctgaaaaacaat

SEQ ID NO: 240982 - DNA, 1390 bp, Cannabis indica
actcaacgtccttgaaaagagttgatgggttcacggaggccccccaattcacaaataacacgttctacacggtcaacacattcaagaagaagccaacgtgatggtcaccaaaacccaaaaactgggaatgaggaacctaacataaatgtcggcggttttacgcctgtgagtgagggtgcctatgaccccacaagatacctactattggtcgaattggaaaattgtcaactccgggaatgtttggaggaggaaaaccaacaaaatgttgagttggaacgagaggtagttgtggccagggcggcacaggaaaacaacacacaaaaccaacctaatcttggattgaggaggccacctcgtcaaggagtgcctcaaagaccccatggatacacaacccacgggaatgaaaacaatgatttaccagattcctctcgcaggaatgtgagcagaaggcaaccccagactacagaacgtgaaatcccttgtggtaacaagagagatcctaagactcaacctaggacaactgggttgccactgagacactgtcaacgtccttctcgaactgatagggaaggggcacatacaaatcccagcagggggcatgtatcaacccattcccaaaagagaacgccagtacgtgacaaggcaggttctagcttgggacgtattagatctcgagatcatagttgatctacgagaggagcgaatagaagtcatcgcagtaatgatcgagagagtacgggcacaactagaactgagagctactcaaggatgaggtttataagtaactatgatccacaacgattggatcttcgtgagtaattgaaccagaaaaagcctgacttacgtcaacaactcaatcaaaagcaagaggatcctatccaattgcgaatcaaacgagataccaagatggggaatatgggaaattgcctggttatgactcgaacgaaaagcccaagcctttctatccagacattatgagcgttttaattccaccagggattttaaaaaccctcacaactcgtcatacaatgggactacggatccattcgctcaactcaaaaattttaataccattatgcgagctagcaatgttacaaacaacttacgccgtattatatttcccacctcgctgactgaggcagcgagcagctggttcaataaattcaccaatcactcaattacctcttgggaacaactttctaaagacttcaagaaacagttccagacagcaagagacatgcaacatgaagcgtcttcccttactaacataaagcaacaactgagtgagacacttaaggcctacgaaagacgtttcagtacagcttctggatgggttagaaacctgaacgacagtatccagcttactgctggtctagcaagaattatgact

SEQ ID NO: 240983 - DNA, 579 bp, Cannabis indica
gagttattacttaagtcgacgttcaaaatatacccatgaggaaagtaacgagccttattaatcctaccaaccaaagatttctcatacaacgataatcgtcggctttgtttctctaagagagaaaggttataatcatgaagactgtgaaaatcaagccccccattactcttatgcttacatactgttttaacttattttatcaagatcttaatttactaacatgtatgtttgattataaatctataatctaacatcttgaatataaataaacctaaaacgataaataaacacatataaagtttatgatttccttacattgagaaagtatcaaaattaaataactccttccattcaattactctaacccttgatttttattttgtagcagggtatagccaagtaatgaacctgaatcttctttcccattaatgagtgacatataacattctacatgatcttccacaatggtcactgtgccatcttgaatagtctgggttggcactcaacttacttaccattatatttgactaaaattatcattgagtaagagaagagaaatttttgaactctaatgctatt

SEQ ID NO: 240984 - DNA, 1306 bp, Cannabis indica
ataccataaaaaatcttaaatgtgaaaaaatgccatagaagagtggcaaacctaaaaatgccatatttttctaactttgttatgaaatcccatatttcatgtaattttcacattttttattttattgttgcaacaacctgccttcttcttcgaaaaactctcaagagggctggtagcctagttcctgtggtatgccatccaagccaaagcaaaatggtttcccaacacctcctgctgaagcaacaatcaaaaaataagttccctatgttctccactatttgctcacataccaaacaatgtccatctgcactaatattgagaggaaagagcctctctttagtttgtaatctaataatgacaaccagccaaaaaataattctatgtttcggagtgagaaagcaaccccaaacctctccatacgaagacataaactcttgtttaggaacgagctattagaatattttctatatgtgtacaaaatcaattaatttgatttacacgtatgaagataagattgatttttccattgactgtatttaatcacaaattaaatgtgataaagataaataatgtatggccagttttgatttattaaatatttcagttactcgatttaatttttagaattaattgtcaaaatattgtgataattaattgtgacagaggcctggaaggtctcacctatataaatatagggtctcggtccccgagctcactactctgtgaaaacacagtaattccatctaaaaagagtagagagagcttgaaagcccaattacccacactaatcagtttccttttcttttgcagatcaaagctcatgtgggattgaagctcaaagaatcaatggttcgaatactctgcgaaaacacagtaaatccatctaaagagagtagagagagcttgaaagcccaattacccacactaatcagtttccttttcttttgcagatcaaagctaatgtgggattgaagctcaaaaaatcaatggttggaagtatttcgattaatttattcataatgcacatatgttcaatttattccgcatttcatacatgatcatatatgtttcatttttacataaatttctaacagttggtctcagagaaattttttatctctgtcttggtgcatttgagtttatataagtatatgcacatatatatggataatttcttaatgggtattacccttactaaacaaatttaactataaattttaattttaaaaatattaaatcatcaaattttgatctaataatgaataataaagaaaaatttagaatttctatgcttagtttaactact

SEQ ID NO: 240985 - DNA, 915 bp, Cannabis indica
tttcaagagatgataataatagcagtcttattcctactctagttgataacgctctgattgctgatgaatatattgctcctaatatctaagatgacgagggtcctattattcaagaaagttttgttgttgatgagggtcttattattagagaaatccaattgcagaatatgtcactcaaaatgataatcaacaattagaggctatttcagaattatctcctttaaggagatattaaagacaaaagatgtcaataaggtgtgatgataattttttttatcttggagaaggtaaattgatcttggtcattttgaggatcttctcacttatagtgaagtacgtaatagtccacattcttcaaaatggatagaagctatggatggtgagactgagtccatagagaaaaatgatgtatgggagttaattctattacctatggtttcaaaccaataggttgtaagtgaatttgaagaactaaaaagattaaagaatagattgaaagatttaaagcacgtttagtggcaaaatgctattttcaaagagaaggtattgattacactgaaactttctcgcttgtttctactaaaagattcattcagaattattatgactttaattgagcatattgattaaggcattaaatggatgttaaaactacttttctgaatggagaatcaagagagcaagtctatatgtctcaacctaaaagattcaaggaaaatggaaatgaaaatttagtttgcaaattgaaacaatccatttttattctcaaacagacatctcgctagcggttcttgaagtttaataaggttgtgacatcatttagttttattaagaacaaatttgaccagtgtatgtatatgaagatgggtgggagtcgtcatattttttcttattctttatgtagatgacatttta

SEQ ID NO: 240986 - DNA, 1445 bp, Cannabis indica
tgtggccaaagggcggcgcatgtcagtgttcatggtaatgacagttgatgcctaatttatacggtaatgattttttgtaaataaatttaatattgcccgaattggaatcaagattagtactatttgagtctaagaatacaatggcacaattagatttgaaaaactaagaatcgatataggctcatgattatatgtctacaaaacaaaaattatatgtgtacctaatagatagctaagcttagaatgctgtttgagaggggagatcctagtgtcaactatccgccacctcctaggacctaggtgctaagtgagctactgctagtctatgagactagtcgcatgggcataagaagaccaagagaggactcatatatctccatgagttggagtactcatgaatgttattgggctaaatcaatagtgtatctagaatgttgtcaggggttcgttgatacgtttccattagcttgtcaatgtgccactcgtagggaacatggcctaaacctctgaaagacaacatgatttatcttggccaagagtctcaacacaaaatgacacgggtagtcatttgtgggactagttcgcatacatgtgtgggacagatgcaccataaaaagagataatagtttgacatatgctactagtctattggcttgtcatgagggcatattgacaattgtggatgcatggtatctcgaggattggactagggacatatgaaagtttttggagggagacttcgtaaatagtatcgaatggggcacaacaaaaagcgttgacacgtcaaattggtattggcatgtggccaacaacacacaatattcttgattacaaagtccaaagccttcttaaaagtgactatgttcattggttttgcttctacccacttggttaaatagtataagaaacctatggcatatcgcactcctcatttcccagtaggaagctgaggtcctaccaagtccattccacaatctgcaaacggccaaggatattcattatttaggttggtggagcctaaggtaccttggcatagctttgacattgtttggatttccaaacatagtctatgtaatcgttttttcagggttggccaaaaatatccctgccggatgatcttcttagatagacttcgcactattacaaaaactaattttttggtcggttttaacgtcattaaaattacaaaattgacgcaaaaaaattaatgggcaaaattcacgtcagttgagaatagacgttgagtttgcatcaattttggcactaatttgggttggttttgtactaacgccaacttacatcagtgcacaaccgaggcaaaaaatgcatttatgaaaaaaaaaaaaagaaaccaattatgggcttcagcccaatacacttaaaaatataataaccctaactctcacacaattgcccaattcatttcacaaactctctctctctct

SEQ ID NO: 240987 - DNA, 1417 bp, Cannabis indica
ggcctcggtcgattgaagaaatggttcgtggctgctgtaacttaaagaagaacttgactgaccgaattatcaatacagtcctggctgctgcactgtactttctctggaagagtaggaacaaatgcatatttgatcttagttgtttgactcctagttgcttgagtttggggattaaagacactgttaggtggaggcttattagcaagggtccttttaaggattgtaaaagaaacaagtatttacttaatgtaataaataagtggtaggtgttttttctttgggctgtagctgctggtttctgcagcaacagccgctggttctgtaggcttttgccttgtgtttgtattgtttgtcttttgaataaagcattaccctttttttaaaaaagaaaaaaaaacgaaggtaaccattccaagggcagtagtaatggtcaaagaccaggatcgagttccaacacaaattcaaaggtaggaaaatagtgctaccattgtaagaaggagggtcatttcatagatgagtgcagagctctcaaagaaaagcttagcaaagaaaagaagaaggattctagagatgcaggttgtgttcttgatggatatgagtctgcttatgccctggttgcatcaagtcaagccattggtgagaaccattagagatgtgaggtatgtccttaacctcaaaagaaattcgttatatattggtgcactaactcttaaaggccgcaacatcaagattgatagtttacttagagttctaaaagactctacagttgtgatgaaaggaaatctcagaaatgggagtttattacttagttggtacaacagtaattggtagggctgcaacatcagtcaaaatgaagcaatagattagacaaagctttggcctatgaggtttggacatgtcagagagagaagtctacatgagcttgagaaacaaggcatacttaaagataaacttggtatgaaattagacttttgtgaaaactgtatttatggtaaaagctacagattaaaattcacaaaagtgaggaacacaacaaaaggaaaactagactaccttcattttgatctctgggttgcatccagaacaaaaacaattagtggagcaagctattgtctaagtatagttgatgactatacaagaaaagtttgggttttcttactcaataacaaaaatgactcatttaacacctttgtcaattggaaaactttgatagaaaactagacaaacaagaaaattaaaatattgagagctgacaatggattggaattttgttctgatgagttcaatatgtactatcaagaaattggaataagaaggcacaaaactgttatcaagacacctcagcaaaatggaatagctgagataatggactttattttccattctcgacgaggtttgcgtccatgtgacttatttg

SEQ ID NO: 240988 - DNA, 824 bp, Cannabis indica
caaattctcgtattgtgtggttataaatatatatagtattttattcatttaaatttagattaactattattaaaataattagatcaaaatattaatcttatataaaaatgtctacataatttttatttttaaatatatataattatactataaaatcaattaagaatattatgttaaataatgatgtatttagttaaagttaacaaagaaaactaaaaacactattaaactaagaatttcgttacaatttaggttggtccagtagttgctctctagtgatttttatgtggattgcttgtggactttggttgcgatttaggttgctctgttagttgctatgtggatttctataaaaatgtaaaaaaaactgctttgaaatgtaaaataataataataaataataaaaaaaaaacagcctctatgtattaacatgtatatattttacacaaatatattaatattaaatataatactatatatacataaaaataagacatataatataatacaattcaatataatactataataatatgatgtaatagtatttacttaaataatatactacattaaattttgatctataattaaggacatgtatattatgttatatacacaaataaattaatattaaatatagtataatatataatacaatccagtataatattttatttcgtatgcaggactagactagattaaacagactaatttgtccactccaatgtttgggcatgctgaaagtctggataactaatccagctaacctcatctgtctaggattatttttggaactttttaaataatatactatattatcaaat

SEQ ID NO: 240989 - DNA, 2043 bp, Cannabis indica
ccttttactatctctttttatgtctgttcaaccagtaggccttcttttgagataaagtgaccggccaagctgtctttaaacttggaatatatttttcatttttgtaacaactggctgaccgggcaacctttaattctggttttcaatgcttttgttattcttaatgaatttcatccctgatatataatcatactccaattgtgtttgttttgtttttttttttaccaaatgctttgtaaaggtataggtgccccccaagtgaccgagcaaacttttgactcttggtcacttgttttttttttttcacaagtatgcttttttgtatgtttgtggttttcggtccgagcacacctgccgtactgtctttggtgttaaaaaatactcttcttaggactatatctcccacaaagaatttctgtgctctcacttgtttgttaaaataccgagctactttctgctgatgggctatcagtttcaagtttgctacggtttgtttctcttcaacttcatcaagtgcctctgctaggagtacatgattggcctcttggctatatgttaatcttctgtgggacggtggttcgagttctacgggtaacatagcttcatatccatatgtcatggcaaatggagtctgtccggtcgctgttttctcagttgtgtggtatgactataatacttcaggaagttcctccggccatgttcctttagcatcttcaagtttcttctttagggtatgtgccactgcggagaaactttttatgatcccatggtccgcacagaaatccgtgaaggattgactgtcaaattttttaccattgtctgagactatcttatatggtaatctgaactggcaaattatgttctttacaatgaagtcttgcacttttttggatgtgatggttgccaatggctcggcttccgtccacttggtaaaataatcaactgcaaccactgcgtattgcactccgccttggcctttgggtaactgtccgattaggtcaattccccaaatggcaaaaggccaaggactttgcatctgagttagttcattgggcagtgcccgaggtatctctgaaaatctctagcatttatcacatttcttaatgtaggccttggattcttcaatcatggttggccaaaaataaccttgccttagaattttctttgataaactctacccggctgcgtggttgccacaaaatctatcgtgtacttttgacaaaagtcgtgcaacttcttcttgtgcaaaacacctgagtaacggcacagagaatcctcttctatacataactccttctacaatgatgtaccttgcaacctttctcctaattttccaagcttcatttctattatttgggagttccccagtgttgaggtaggccgctattggcgtcatccagtttggggatgtatcaatcatttcaacctcttccgtgccggtgatactaggtttttcgagaaactagatacgaatcagatttgctttaccatttatgttgctgctagcaagtcgaggtaatgcatcagcagttgtgttttcttcccttgaattttcttgagagcatagcttttaaattgcgcgagcaaatcatgtatttttctcagatttgctatcatcttctctccccgagcctcgtactctccgaatacatgatttaccattaacagtgagtcattgcagatctcattgtgttcggctttcatctcccaagcaagtcttaggccgacgataagagcttcatattcagcttcattgtttgatgccttaaatccgaatttgaccacaacgtgcaggtgttgcccctaggtgtgacaatggcgattcctgcgtcggacagctgatccgtagctgactcgtccacatgtagcttccaagtttgcttgtcttcattattgctcagctaaggtatttgtactggctctgggttgtttttttgaagtgctcttttctttaaattcaaccacaaaatccgctaaagcttgaactttaatcgttgttcggggttgaaaaataatttcatactggcccaactccactgccca

SEQ ID NO: 240990 - DNA, 1198 bp, Cannabis indica
ttcgtaataaatattttagactcggacccaaattttctcccccatagccctggtgctgaactcggcctttgatatttcaagagtattgatatttcaacaattatcattttataaaacaacatggaagccacatatatacatctttcaaattttagatggaaaagggacttctccatgtttattgtagatcgggaggatttttgccaactaaaatttcagggagcaaaagtctacacttataatagttcgggggacaaaaaagcattttgtcctattattaaagcatatttaatggagtgctataaataatatatacattttagttcatatttataaaattaaactccaataatattatataatgtgatttaaatttagcacatttcaaaaatagtgccaaatttgatgcaaaatatatagggatgggcaatatcaatccaatttaattggactgaatcaatttaatacaaggaaaattttcatggggcacctaaatttggaaattatttacaaaaatgacgttgtttttgttgtgttaattttctttatatatagttgccgtttttattggtagtttcctattttaacgttttttaaattgggctttttattccctactttttcggccaatttttttttaaaatcgcttctttgttcgcgtgcgcgcgtgacgtgaggctgagcagctacagcctacagcacgtcaatcacgtaggggggaatgatggttttgttagtttccctctttcatttttttctgtttagtttttcatttcatttcaaaagttttcaaacctgttgagcgaatataagggttagggtttcgtcttcaataatattgtttccttttagctgtaatggcgatccttcgatcgtctagttctccttctctgttgcctttatctgattgtggtgcaactgaaaaagatttgtcaatgtgtgtccctggtggttcgaagccctcgagttcaggaaagagtaagggttttgctgcaaagaaaaaacgagataaggagaagatagtcgagaaaggaaaggcatctgaagatgatcgtgttgtgaaaagagttaggaaatgtgctgcactggattctgattctaaagatgagttacatggatatcttcaatggagcaaaggttatttttctttcattttaactttttttgttttcattttttagtttttttttttaactat

SEQ ID NO: 240991 - DNA, 2193 bp, Cannabis indica
ctttcctctgtctcttttcgtctccgcattaataattgtctctctcacaaaattctccccactcgcggaatccgtcagggcgaccctctctcgccttatcttttcctccttgttgctgaaggtctctctggaattatcaatgctaagacgcattctaactctttcgatgggatttccatttcactaaggtttcttcctcttcgtccactgaaatcaaggatattcttaccctttacaaccacgctactggccaatccgtcaatttccacaaatcctctatccttttctctcctaataccacttcctctgactgtcacaatctcagaactactctcaatttggacgataagcctttcattgataaatacctaggtgtccctcaatatttctctaggtctaaaaactcctccttcctattccttcttcaaaaagctagctctaagctgtctatttggaaccaaaatctcttctctagagcaggcaaagaaattcttttaaaagcggttattcaagctattccctcttatgctatgtcctgctttcgcctccctgtctctctttgtaaacattacagcaaattaatgtctaaattctagtgggggtcccttggccagagccataagattcattggaaaaaatgagacaatctttgcacttccaaattttttggaaggttaggctttcgtaatattgttcatcataatcaagccatgctcgctaagaaagcttggcgtatcctcacctcccctgattccctagtttgccaaatccttaaggctaaatatttcaagcgaaatgatttcttgcatgcagccactggccactcaccttcgttttgttggcgtagcattctttggggcagggatcttctgatcaagggccttatctggaaaattggggatggcaccctggtaaacatttctgaatccaattggcttccttcccaccgtaaagctatgttaaagcctggcctgtcccctccctcccaaaatgtctcttttttcctcactgaagaccgacattgggaccttacaaaactccggtattattttgatgaggagatgtgcaatgccattcttgctgttcctattgaccctcataaccatgatgctctcatctggaatcatcaccattcgggttgtttcacagttaactccgcctaccatttggcaaactctaacttttccacacctggtccttccaatcctgctacttataagcgttggtggaccactgtttggtcttctaatatccctcccaaaatcaaacattttgtttggaaagcattccaccacattcttccctccaatcttaaccttttccaccgtaagtccactccctcccctttttgctccctttgtcactctcatcatgactccaacacccactcccttattgaatgttccagggcaggtaatgtttggaagcactcttctttctatcagttttatattaataatagaaattgtgatattaaggaattcatgctcagaggttttgaatgttttgacaaagatcaattttcctcttttttgggtttaatttgggccatttggaataacagaaacagagccatattccattctaacaataccactgatttcagtttggagaattctgtcagttattatttgcaggaatacagggacgcgcagaatcggatatccatatcatctcccacttcccatcagtcttctgcgagtttacaagtaccaagaacaatgtttcagctttctgtggatgcagccctttcacaaccttccaacaagcatgggtacggagctgctgtaactgattctcattgtaaagtcattgcaactttcatggctccttctcattcaggtctccccccaatttttgctgaagctgaagctctccaccgggcgttactttggtgtcaagcagtccgttttcctattgctgttattgcctccgactgccagaacttggtgcaccgtatccagaagttctctccaaatcgttcagccctttcgggtcttgttgccatgatcgtctcctctttgtcgtcttttccaggtgctatcgtccattacattccccggtctacaaacaccatagctcacgatcttgcccgatcagccctgggaacggacaaagagataatttggaaccatttcagttcctctccttgaagatcttagcccagctttagcttttgtctttgatcttctt

SEQ ID NO: 240992 - DNA, 1226 bp, Cannabis indica
gagcaatggaatattgctatttaagatgcgggtatgtgttcggaataatgttgagcttaaaaaaaagatagtggatgaggcccatactacaccttattcattgcacccaagtaccaccaaaatatatcaagatttgaagcctcagttttgggtggtactagatgaagagggatgtagttgaatatgtaactaaatgtttaacctgccagcaaattaaagtagaaaaacaaagactgtcgggcttacttcaaccattgacactttgtgaatggaagtgggaagatattgtgatggacttcgtggttgggttgcctagaaccacaggaatgtatgactcagtatgggtcatagtacaccgtttcatgaagtcatcatagtttttgcctatgaaaatgacctatgtcgtggatcagtatggagagttatatgtgaaggaaatagttcgcctccatgaggttccaaaatccattatttcagacagggatccaaagttcacataaaatttttaggagagtctgcagaaagccatgggtacaaacctaaagtattgtatagccttccatcctcaaacagacggacagtctgaacaaaacatccatagacttgaggatttattacgagcttatatcatggactttgagggttcatagagtgaatacttacctctaattgagttctcctacaacaatagttccaagagtactatagagatggctaccgatgagataatatatgggagaaaatatcattccccaattttattgggacaaaactggagaacgaaagtatctaggccttgaattagttcagaggacaaatgaggcaatagataagatcaatgtttgaatgcttgctttacaaagtaggtagaaaagttatgcagatctgaagcacaaagacattgcatttcaggcaggagggcatgttttcctacgagtttcaccaatgaaaggtattagatgctttggaaaaaagggcaacctaagccctaggttcatagggtctttcaaaatacccgagaaggtcaggcaagtcacatagcggttagccttgccaccaacattatcagatgtgcataatgtatttcatatttcaatgtttaggaaatatgtatcagacccgactcatatcctaagttatgaagccttagaattacagtctagtctatcttatgaagaatagcccgtgaaaatcctagatagaaaggaaaaagttcttcgaaacaa

SEQ ID NO: 240993 - DNA, 1016 bp, Cannabis indica
ttcctcctgcaatcttttgtactatgcccaataccagaacaattataacacacaagtggaatccattcgtacttcacttccaattccacttcatgattaaactcatctataaaatcgattttctcaggaaagttttgagccaaactaacctgaattaaaactctagggtattgcagctgatccctgttcttggttacactatccacttgcaatggctctcccaactgactcacgatcttgaacaaagatgattcaccccagtatttgatgtccagccccttcaattgtatccaggttggaacatttgtgacttcctctttagtgaaatcatcgattgggttccaaggtttcatcaccattggtttcctatcaaagaaaacatatccctgctgcataatcttatctctttgctccatactttggaatcggatgatgaaaattcccttagcaagtaagccaactttaaccacctcttctttccacaacctgcgcacaaaaccttccagaatgcttataggaggatttgctccaattacatagcaaactaaggaaggttgccagtagtttacttcctctgctatatcctcaaaatctatcttaatcttcttctttaaaccaggacactctgcctctttatcagagtgttcatacgagttttctaggttacgaacaatattagatctgagaataggaggatgtacctttttcccagtgctaatatcctgtgcagtgcgattagccatcgacagccattcagaaaactcatttcgtactccactttgtcgctgaacgcctaaatccaaatctgcaggtgaaagacatctctcagcacagagttcttcatcacaacactgttccattgaaacaacatcttcctcaatcgccaattcctgaatccctagcactgcatccatggatctagtctttatgactctatccgaggatgaaggtccagttttcttccccttagatttccctttcccggccatttttgcccttttcgccatagctccggt

SEQ ID NO: 240994 - DNA, 1225 bp, Cannabis indica
cgcattgtaacgagagaggaaactcttcctcctcaagtttcccagccctataaatagtgatgcatatttactaggcaggggatcaaaagtcaaaacgcagctaagctaagattgtattattatctaagaattatatattcagagatactgttgtaagagctataagaaaaggaatcttctttcttgttcttaagtcaatacaaataacgaggattaggctactaccgaaatgatcggggctgaacctctataaaattcctgtatcttattattgctttattatatatttgttacgacatatcgtttatcgcttataaaatagactcattgtcgttggctaaaagcgaagttaacagaatccaactccttaacataaagacctcgacctggctgccaaagagtggccattttattttgcatatcttgaaaatcaatagatcgattagtcaagaaacgaccaaccaatagccatctgtcatcatcgatctccgataaaccatcgtctgctttttcaaacaacaatccttcctcatcatcatctatcgcaaatgtcgtgacctgccattccatagatgcagtctgatactgcctgtaatccatatactagaaaagccaaaaagagactaaaacaacaaacacaaaaactcatagagactttacaaaaacaaccatgtcaacacgataaaacttctctatagtaatttacttttagtgtatttaatttgtgaacaattcaaataaatatatacaaaatattaaaaaaaaattcctctaaaatgtacattaatattttatattttcaatatgggtcctcctcacaaatatttatgcccgtattgaatataaccatgaaagaagtttcggtctaccaatacgtacttttttttttttttgaggaggaagatcaaagactaaagaacaaaaggtgagactaagatcttcaaggagaggaacttaaatggttccaagttatctctttgtccgttccaagggctgctcgggcaaggccgtgagctgtggtgtttgtagaccgagatatgtaatggacggaagcacctggaaaagatgacaaagaggagactatcatggcaacaagacccgagagggctgaacgatctggagagaacttctgaatacgatgcaccaaattctggcagtcgaaggcaataacagcaataggaaaacggactgcttgacaccaaagtaacgctcggttgagagcttc

SEQ ID NO: 240995 - DNA, 906 bp, Cannabis indica
aaaaaaggaagaaactatagacattgaaacatgttgttcatctatatgatccgcagttgaaagattttccattggagtaagaaatccaacagcatttttggccggggcatcggttagtgatcaatgactaaaccatcattcgagcttgttttgatctagttttacaactaatatttattctcatcccttgtcattgatgtgttttttctgtaagcaggggatatcagctgagtgtttctttacaggagtttgtggtggtggtttgatcactcttccaattcaggtcagtctagctctgattaaaatcccattgcatcagattgaatatatgaaatgactaatttattgatagtaatttcaacataaaaatggctattcagccttctctattgacactcaaactcagatatacaagttcgaggatcgcttaagcctcccaatgaattctaacgaattcccactattacaaaataattccacaccccctactgacaccatcattttatcccacatttggtggaaagatgtaacatctctgcttcaagtctctattgagtccttacactacggaatgatcactcttatacacgagtacgtcactttggatgcttcatggaatgacgactgaccctacaaaccaagacgagttccaacgtgctttgtcctcacttgcacactttctggaaaaaatttccaggaggtcacctatcttaaattacttaggtcaagcatgcttacgatgtgggattgcacaacttattcgatatttccctttccggatcacggaactactgaatctcacaaaagaataatacatcattagagtttagaatttcaaaaccgagagggatcattgaaatttcaattgcagacagttttctattcttatgttctgtcattgtgcat

SEQ ID NO: 240996 - DNA, 552 bp, Cannabis indica
actatatttcgacatcaacgcagatgaatataagcgattctggtgtaacactcaaagagatggttagtgatatggaataaacaagtgaaaatcaacaaatcttgcattgtgatcactaattatgatttggcagcaatagctcccaatagagaataacaaaacatcaagctccatccagtcactttgaattcatggattattaatgctgtcataatagctcaaccgatttctcagcttcaaaaattttgcagaacaaggcaaaaagaaaaaacttgcatgtagtgttcccttaatttccatgaatcaaataaaaataaaggcttacgcatgcaacctctaaacacattttatccaaggagggtatcctcaaacgtagtaaccggtgaaagtgaatccccttcccacgatttcgccagcacaaaaccaggcaaagcactcaagcccaaacagagcagctataccagcatcttcaaccttcaattcctgcctgttcttccacatttgcttgacgtagtcgagttccttcttgaatgactcacaacgattgggaat

SEQ ID NO: 240997 - DNA, 1080 bp, Cannabis indica
aatccaaaccctagctgctcaagcagtggccgaaagagagagagatttgagagaaaaagcaattttgtctaactttgctaacttggaataaaatgaataaatggatgattttttccttaattaaataccttatttcagctaaattaagcttaaaaatcagatttaaacataacattaaatcctcactaaaagacaaaactcaaaaggcaaaaagaccataatgcccttgcccatactaaaaagtcacacaaatcacttagggtattttgggaaaactctaaattcccgacatacctcgacattcccaatgtctaacaataccgccccgctatactaaaatactaagatgtgattctaccgagccatacgccgcgttccatgttgctgggcactgaacatgcaaaaatatgaaatttcactatatgacatataaaatgcattctgaattcaaataaatcaacataaataattatttaaatatcaataaataatttttataattaaaccctaattatctgctaatttccaaatttaaactaagcggtctttacaggtagcttgctatataggtaaaagaaaaatgtaaccatgatggttacaataaaaatgtaaccattgagttgaaatttatatgtttcaaactccctatctataatttatatattcaaaattttatcactctttctattctatttttattttcaactctattattttgtaatattttttttatattttaaattaatagtttatctaaagtaaaaaaaaaataagtattctttatttatttatttttttgaaaaaaatggtgtattataatgtcaaatattaatagattttgattgaaatgattatatattataattacaatattattatatattagaataatttgtttaaggttaaattattatttattatattaataaattattatttttttgttgttataaaaaaaattatgatagttctgtgaaaaatagctttattatctaattgaaaattttaattttattgtattcaaaaatgtttgtaatttatgcatcaataaaaaactataaaacattaaaaaaaaaaaaa

SEQ ID NO: 240998 - DNA, 2058 bp, Cannabis indica
gatttgaccatgcattacccatggtatattcattgggaacacccaactttattgatagttacagaaatacatgtactataattctgggaatcaccccaccaaaaacactataaataccccctcaaagctcattaatggggtcgaaaattttgggttgcataagtgcaagaagagtaaatactcaccaagaacattctctgtgttaaatacactcgtaaatacacagactcgtggactaaggctcattaacgccccaaccacgtaaaaatccttctcttaatttcttacagctctttaatcttttattattttattggttgccgaaaacctcggtcaacacttacattaatgggagtggaataatatgcctcgtttcgttcagatctctaacccttgatcctttctgttgtagagtatgatcaaaatctgaacctagtttctccttcaagcgacaagaacactacacaatcttttatactatcttgagtattaatttgaatcatttgggcgatcactcattcactatggggtttaaattttttgagaagaataagaagaggaattcaaaaaatagagatagctctgtttattttctatttgtctaacaaaagagtcaattaggttataaaataggaactatatcattctatttatatgacagtgagttaggttttgaattaaatagaataaaaaaaaaggataaaattggctttatttaaacccttattgtcgaattcctcgtgggcctcatgagtttcaattttgccattttattgaaagttatctttcttttttcaaatgccatcttttaattctaactctataaatatcaattatatctatttaataattataattaattatcaaataaaattttcatttaacttatttatcaatcaaacctttaaaagtctcttaattaataaacaagccttaaattctctttacttatcaaataagttcttgcttagtgaaactcataaataagacatagtattattcataattctaattgattaataaaatcaattaatttagtctacaagataatattatctcaactagtgtggggaccatgaacctatataattaagctctcaataagtagttttagaatttaccgagtaaattctctatcttataaatttctcttgactccactatagatttaaaattgtactctagattatataaaacactcaagtacggatacgctataaattattcattattttaatccaaaaaaccaatgatcctctattaatgatctacatcgagtaggggaaattttacagttttacccttcaatgtatttaatccttaaaacactcatctacttgtaaatgatatttcagtatactaatataataactgaaacgtgtacttcaccatttaaactcatttagccaagctcgaaagaaaccatcatttcacttctatgtatttatagaagctatagatttcgtatctatgattagcagtcccactcaattgcactatattgttcccaagatgtaagtattggatcaatctaattggttagctttaacgaacaagtcaaataacacaagtaatacacttaaaccagaacctaaccatctcacgaggactgtagtcaagtaccaataaattaaattcttatttctatttggcgatcgaataaataaatttggaactaaataaactaagaaaaattaaataaaataaacaaataaaatatttaacaatggatgtgaaattagggagatgatttcaattgctttgattacccaattgttaacactaattaaccattattcttcctcttatgtgatgtcagattataaattaacctaaactcttttcaaatcataaaggtcctaaattgcatgccaactactgcatctttgaaatagatcaacatacaattcacattaagcaataatctaaaaagccacataagctatgtgaatactcacgtttcacatcaaaacctatgtctattcatttagagcattctcagtactcactttctagattttatattgagatcataaatcatgcataaggtggccaatc

SEQ ID NO: 240999 - DNA, 744 bp, Cannabis indica
cactttgcactaagacagccccaaaaaccgaaactcttgttaaggatgtcaacctgggtgacgggtgaaccttaggcccaagttggcttatgggttgcaggttcgtgtaatttcagctcccggggcttggattaggttgcttcatgtcttcatggtacataatattgaaagatagtaagttggattcaagttattgaagtctgaacttccatcccggagatcccaaagtcaacttgagtgcagggctagggtcccctcccaggttaactgctataactcgggtctactcaactctgtgatgtcatccttatgccacgtgtcaaatattaatgtccacgtcaccagagaaagtttatgggttaacaaacatcatttatactaattatattttaaagctacatattgataaacttatttatttgtaacactattacaaaataaggtatttttgttggtcaacacgttcatcaacacccatgactgacacaattgattaaaagaaaaattaccattagttttacgccaacacaatctttcgtcaattttaaaatgaagcataggtcttttgcatcagtcgtaaactaacactaacttgtgtcaatgtgtaaccgataaaaaagcagctaattttttaaaaaaaaattgtatcaattaaataggccaagcgcattatccaaacccaaataacactaacatatctataccacacaacattcactactacaaaaaaaaaacaaaaaaaag

SEQ ID NO: 241000 - DNA, 537 bp, Cannabis indica
taaataaacctttctctgatgaacttagcattggcaaaacaaaacaaggcgggcttgattcgaataatgattgttccaggaatttgaatggccatcgaatattgctgaatatcgcaaaacgcatcagttcccggaagctttcctagagtttctgtccgcagtcttatcgatatcagaattatctttacaaatgatattgcacctgcaaaatcatcacaaacttaattattatatttaatttaattataactctgtcttcaatattattatatatctatacacatgtacgactacgtcttagctatgtacctagttggcttgtatatgggtgagatgagttaaatccgtgaaatataattgtaaataatttaattcattatagaaaaatatttattaatttaactgtaacactttcatcaatattatgtatgactattaatcccgattttcaaaatatcaaaatttggggatataaggtttgttggagagatatgtgggataatttttttttaaatttaagaaaagattgtttaattt

SEQ ID NO: 241001 - DNA, 1418 bp, Cannabis indica
acgttttgagttttattttccaacatactatgcttcatgtagaaactttgcaaattatagtactactgatggtactaataattttaatggtgcatttcaacttagcgaaagagagaaacttcaagctcaagtaaatttattaactagaaaattggatgttttgaaagctaagtatgaggatacatatgaagtttatgatgaaccttattttgactatgaagtagttgataataagaatggtaatcataactggaaaaatcttattgactgtagttggaagtctgagtacaactacaatgcaccaattgatttggattttgctgagaaagcttatacgttttgtcattcatctcaatttagcaatagcaaatctctagaggaaaatagttcaacattttttgctagtctagagaatgaaagaatgatgaatgaaaaccaaacgctttgctcactcaattagtagaggaagatatggaaattaatgaacaaatttcaaacaatgttcttcctccacaaattgaaataataccatcaccctctactccaatctcttacaaactcgatgaggatgatgctattactatttggagttataatatttctcatcctgaaactcttcaaatcattccaaatgtcattccaaacgaaaacaagtattatcatactgatgtgatagacacaattgtggaggaaatttgtaaaagtttctcaagtaaccaagcataccacttcctccatgacattgagaaccaatattttccttatcctgaaaatgtcaccaatgcatcaatttctgtctaccaatgaaaaattaaacttacctgaggaaatcatttctgtctaccaatgaaaaatcaggttttatttctatgtttttagtaagtttattttatcttttctgttttcgtgtttttcttttctatgtttgttttccgttgccattatcaggttatctccgctctcgccccatgcatatcgtcaatcaggtgtactcttttttctatctttttcatttcatattttgtgacattaaggacactgtctaattttgagttgggggtggtgagctctggtgagcgttcatttggaaaattttaattatcttgttgaatttttaagttaaattttttcaaaattttctgagcatgattatacaattgcggtttgagtcaaatttttgctatattttgttaccaagttgtgattttcagagttattttatgcactttccaaacttgtggagaaattgttgttaacacatataattgagaaaatttttgagtgtaaagttcaattttttgtgagttctgagagttgagaaaataactttttgaactttcattggtcattgaacttttagaatttcaatcatgacatttactagagggattaatttcttttgtaataaagagccttta

SEQ ID NO: 241002 - DNA, 799 bp, Cannabis indica
tcccaaagtggagtacccatcaagcttggatcaatttcgcccaataagtctctgcaacttttcctacaaggttattgcaaagatcttatccaatcgtctcaggccgcttatggaagatttggtctctccacttcaatccgcctttatccctggaagatggattgctgaatcttccatactcactcaggagatcattcataaaattcaacacaaggggggcaaaggaggtcttatggctattagacgtgcacaaggcctacgataaaatggagtggagctttattgagaaggttcttagtgctaatggattcaatgaaagaagcagaagactactaatggcatgtgttacaagtgtttcctactcggttcttttaaatggatcccctttaaagaggatttttcctcaaaggggtttgaggcaaggggaccccttatccccattcttgttccttctttgtcaagaggtgttatccaaacttttatccaaggcagaaagttgcggattggttcatggtatcaaaatatctcactctgctcctccgatttctgatctaatgttcgctgacgataccatcctctttgctcgggctaatgaaaatgatgcgaatgctctcttaaagtgcttatctacctatgaattgtggtctggccaaacttgtagtaaatctaaatcaggcgtgtttttttccaagaacttaagtttggagaggagaaatcggcttctaagtatcctcaagattgagatggttcgaggagatgagaaacatttgggcaacccgtttattttcaagagaaggag

SEQ ID NO: 241003 - DNA, 1411 bp, Cannabis indica
tatataaggcaagaaccaggtatcattttttattcctatcaaccctttgcttgttctctttatctcttttcttgtactctttgctatttagtatcatggatgaatttctgagtagtgtctctagtgctcttgtcttacctgctgatgaaaataccgttttcacttatcatgctaacccccctagtgattttccaacccctattagtttgctgcttaaattacacactgttcgaccttacaataggccttcccttatgaaaactctctctggaatgtggtcatcgctttgtagattccctgtctgtgtttctgaacatgcagatggattgtttatggttacttttgggtgtgaaggggataagggtagagttcttgaaggccagccttggcactttgcacaaagtataactgtttttgctgctcctgatctttcatttcctatcacccctgatactttacattatgtgcctttttgggtgcaagtgtatggtattccttttatgtgtaaatcttatgagcttgctaggtttattgcttctgaagttggggatcttatagaagtagatagggacactgttagagagggtactgggccttatcttagactaagaatcctcctagatgtaacttgccaattcgtaggggtatgaatataaggtttattcgaatggggagggagttcattaaatggattgatttcaagtatgaacgtttgcctgatttctgctattactgtggtcgtcttgatcacactaaaaggtattgtcatgcttttttgcaaaaatgtgatgaaactatgtctgagcctctttgtccttataatattctgcttaggggaaaagagaaaatttctgataagggtgctccttttcagtaccctcacccacctgccatgaccttgttgaatgttcctcctgtcaatcttagtatctctgctagtggctccttggatttacctattaggtttccttccttcctcaactttaacactgcttctacctttccttttacacagtccctgcaaactactggcattatgattccaactcctattaacccaaatatgcgtgagatgattcctcctttcaaccggtctgatcttagtttgtctctaagtaattctgcttttagtccttataccactgattctgtgattgtaactgccactgttcctatggttagctctgagcttcagttgggaggctttcagcctcaagcttccattccgtctgcccaggatgggaatgtttctctcaattccaatcctatggagatggagcatggtgtccatgtgagccaacctgactactctgttcgtggtaagggtttggcctctgcttcaggggtcaaaagaccttcctttcagcttcatcaagctgttgttggtggctctttgagatctaccctgaag

SEQ ID NO: 241004 - DNA, 1146 bp, Cannabis indica
ttagtgggtcggccagtattactatgttagcgcataaaggacaaaatttaataccggcagaatctaccgctattaatctgccaatattaatattatcaccgacgaaaatatattttggtcgctaataataatattagcaacccattattaccagaagaatccgacaataatatttaacaccgataatttttaacaatagtactggcggaaatttccacctgtacaaatcttaaatactgtagtgttcttgacaacataacaaaatatgaaaacagagttacaagaagtaaactccatagcccaacgtgctatagcatcagtggggaggttacaagttcttttaacataaaaaaatttgataaaatcaaaagcattaataaactaacaatttcaagaaaaataggaaaagtagaacatttctaacccaaggaacttcatgcttagtgcatttgaaccaagctaattttgataaaaagagctttgttcatgtcttcaaaccgacggagacccaaacctccgcatacttgagatgataaatagaagaccaacttttaagtgtaggaaactgtgataatattatcactacaattaagagtgttaattacgacctcttaacagttgaaataattaatttcacccaaaggttagtgtttttctccaaatttagtcttatcaacatgagtggaactcaccaaatagaattttacatggataatttcactttaccatgctaaaatcaccaacttctatcaaaacaatccttctcataatacatattagaaatttatatatttcttttcttttttactaaaaatattcctctcattatcttctccttctatttccttcctcctctctccatactctgaattttgaccttaactctggaccaggactaggacccgggacttcgaacttaggtctttttaaatatttgatataagcttttgttggggtttggacttaggcctgctttgatttaaggtatagagtccgtttggtgaagaaatgggtcatggatgagcttcattagagagaggtacaatcaggcttacacacaaagactcatgatcattccaatgtcatgtaatatgagccgctaagttgatcatggatttcttacaaaatactgtaaaatgagaaaaa

SEQ ID NO: 241005 - DNA, 1001 bp, Cannabis indica
ttagcagactttgtagttgagtgcacaggcaaaggagaaagcatttcaaaagacaacccagagccagtacaagaatcccagccgaacaataatgaagacagacctacttggatattacagtggacgggtcagctacacatcaactgtctggtgcagggatttccttgtcacacctgggaggtaacacttgcatggggtggtcaaatttggattcaaagcttccaataatgaagtagagtatgaaaccctcattgctggtttgaaaattgctcgagaattgtatgctgaacacattgagatctatagtgactcacaattagtggtaaatcatgtatcaggagagtacgaggcccgagagaaaaatgatagcttatataagcaaaatacatgatctgctcgcacaattcaagagctatgctctcaggaaaattccaagagaaggaaacacaactactaacgccttagctcgacttgcgagcaccaagatagctgataaggctaatttaatcccaatttaattccttgagaaccttgcatcacctgtgcggaaaaaattgaaatgattaacgcagctccgaatttgatgacactgatagcagcctacctcaatactagagaacttctaaatgatagaaaagaagctcgaaagatgagaaagaaggctgcatggtatatgatcatcatagaaggagtcttgtatagaaggggattctccatgctgctacatagatgtgtcacacaagaaaaagttgtacggcttttatctgaagtacatgatggattctgcagcaaccacgcagtcgggtgtaatgtgcgtgccaagatggcaggtacaagctaggtgattaccacaagttggccaagtggtggcgcatgttggtgtgcatgttgatgcttagtttgtacggtagtggcatttttgtaaatatcttcaatattatttggaatgggatgggacttggtatttgccatttatttgtgtctacaaatacagtggtgca

SEQ ID NO: 241006 - DNA, 1104 bp, Cannabis indica
gatgaagacaccgtacgcccaccggtcaaccgcgtttccgtggggatcatctttagccatctcgggtgacacgtactcgtgtgtactgaccacgaacaatgacctggccgtcaccagttcggctacaaagaaccggtttagcgtctggactccgcgcgacttagggaagcaaccaaacgaggatgagtcgggtgattcaagtgatgattcaatgactgggattgcgtcggagcaaagcgaaagatcaaagtcagttagcatgatgtgaccatctgacttgacgagcacgtttttgggtttcaaatctctgtagattatgcccaacatatgaagatactctaacgctagtagaacttccccggcgtaaaatctgtatacattcatgaaagaaatgatagagattaataaactaataaagattttctgttaatttacgtaaccgatatagattaataactaccttgcggagttgagcgaaaactgttttcgaggatgttgatgacgaagatagttaagatcgccacccgagcaatattccatcacaatataggagaaatgttggtcttcaaactccgcgtagagactcgaaagaaacgggtgatcgagcattttcatgattttttcctccatttccgctcggttaaccttgcccttcaccgcgagcatctttttgtccacaactttcatggcacagtaacaagatgcacccgagttattttagtttgcagaggtaaactttgccgataccggcgccgatttcttttaggatcttgatgttgtgtaacgagaggccattctcgagtggcggagaggatggtggagtaggcgaaatcagaggatttgtgtggctttgttggaagctccatttgagatagaagagtatatcttagtatttctgtatgtatggaaacctatataaaactgaataaaaatggagaacagtaatgtgggaaagatcatatatatatatgcttattatataaatatatatatatattagttttttttgcattctaaggtttgattttgattggttttggggaacagggttattgattctcttacaaatttcaggtcatgtgtccgggctagtggggaccaaga

SEQ ID NO: 241007 - DNA, 1131 bp, Cannabis indica
ctcctaacctatttaaataattatttgaatatatatatctaattgaacttaacttcccacattcttctctctacactacgataccattaactatctgaagccatttatatgtaatttaatttgtcaatatttatttagctttatatgttaacaacacacccctccataaagctccaatcgaaaaggtctaatcactatacttaaaaaaaagaattagtcaaactcaaattggacatttctacaatatttttttttcgctagaaactcctctatttgtaatactcctctaaagctcggctactactacctaattttaaagaatattgcattctaacttaatatatacctatcttaataaagctttatatatcaatctagttatgaaccaaatcgtattagtttttcataaaatgggccaagccctagctttaagaaaaataaatataccataattaattaaataatattaacaaaattattattttcacaccaataataatataataaattttgaatactatatatattttaacctggtattacattttgtgatataacatatatttgtttttttgttcgagtgttacattctactctccttaaaaaaaatttcgtcctcgaaatttaattactaaactcctcgggcacatattgtgactttatgtccttcactactaactatattgcctccgtatctatcatatggaccctataaagaggtattaaatctttgcctttgggcaatccataacacatataatatatacaccttaattaagtgttgttattcatctataccttacttaagtaacaaaacgtactccatcataataacatacacatacattccttaattacacaagttctacaattgcatgctcgtaatattataaaattttctttctcttatgaacatccttacaagccattaagagcaaaaccatttattctcttatgaacatccttacatatcacttgagaacacattatacaatacaaaaataacaaacaacaaagagtagggtagaagaccttatgcaaacttctctttaattgttcccactctttcgttgaatgttattatgcacataaaacttatttttttttcccttaatttcctccataaagcta

SEQ ID NO: 241008 - DNA, 965 bp, Cannabis indica
tatatatgatatagtataattttaaacaactttttgtgtgtcaagttttttattgcatgaattttggatttttatgttatgtttgattttagagaatgtttttatatcattatttatatgttatagatctattacttatcatgttaaatatatatattttaaaaaataaaattaaaaatttagtaaaaaatatagtacaattacttaaaaaaatatgaataatataaattttacttaaactgtggttccgaaccaaaccaaatcgttcttaatggtttggtttgagaaattttttggtctggtttaatttttaatattcaaaaaactgttatactgatttagttcaaaaactatgaaaatctaaaccaaaccaattcgtgaacacccctaataaatatatactagattaatgtcaagtttagtttaatctgcaatgcaagtataattagtttatttttttttaattaggtaataattttttaaaatttttaaaatgggtttgagattttgatttttaaaatttttttaatatggttaaaaatatttataagattttaagtattttaaattaaatttaaatttctttatgtaaagtgtcaatatatttattttttttatttttaatgatacatacttgagtaacaattggtgtttgtaaatgtttggttgagcaatacaattgatcatattcatcaatttttttatgtttaactatatatataataatattataaaattaataaaaaaaaattctcttaatagtatatttagttaaatatatataataaatattataaaattaatagtatattcagttaaagttaatgtaaaaaactaaaaattaatgttacatagccacattttatatagaatagatatatataataataagtgtattgttaaaaaaaaatgaaagatgactacaaatattaagtataattgatgatgaaaaaaaattaacttgt

SEQ ID NO: 241009 - DNA, 862 bp, Cannabis indica
tttttatttatttttattcaattgttcaactaaaaaagaaaattgagtgtatatttagttttcagtggtacatatactattgagttagtgagcaagtgttttataattgatttttaagttttttttattttgtaagattattggtgtcttgtttttttatgcctattagttatacagttacttgtttgtttttatataattgttcaaacatgtattaaagttgtttgggtgttgtgtatgttttttaaaggttgtcgacaatattttttatgtccacttgatttacatatttaattagtgttgttttgtagttgtatttttgttgcatatttaattgtttttttggcaaaataacagtaaaccaataaaataactacataattcaaacgatatatacaactacattataaaaatgcaacaacacatatacaactatatacatctagttaaaaaattctattcagtattggaaatcaagtatgacagaagtctcatattttacatgcaattgaaatttaatatttttaagaaacattgttgttttagagttgttttaaagttgtaaacacgttatttgatttcgttgcttttttaaacatgttgttttcatgatatatgtatgttgaactttagtagttaaaatttgtagatttcttaaattttatatacagttatttttatgtttttatgttgttaaatatttgttaacagttaatattatttttgttgttactattctatttttataggtacatatattaataatatttttgtattgttattattcagttttttgttcgttattatttagttgtttaactaagataaaaattaatatatgttcaaatttttatgggtacat

SEQ ID NO: 241010 - DNA, 1002 bp, Cannabis indica
tggaagagaggagaaaggagacgcaagccttattagtattctttatttcatcattcttgattgtgcatttattcatatatatgtttaatacatgtttaagattgaaaaccttaggcatgattcatgatctcaatacaaaatctgataagtgagtattgagaatgctctaattgaataaacataaattttaatataaaacgagagtatttacatagcctttgtgacttttatattattgcttaatacaaattgtatgttagtctatctcagagaagtaatagataacatatagtttaggacctcaataatttgaaaagagtattggttaatcttataatctctcatcacataaagaaagaagaatagtaattagcattaataattggataattggtacaacaggattcacatccctaattcctcacccattgttaatcaactttaattgttttatttttagtttcttgtcattcatttacttctttgacaattatttcaaccaaatagaagaactaatctaatttcgtggtactcaattttcaattccctgtggttcagcctcacctgtgtgagtatatacttacaattgatacgtatacttgcgtagagaagaaagtaaacaacgaagtcattagaagagcaggctcaccacctgagagtggtgttgcaactattaagggaccaccgttttaggaaaaaagcaacaaatgaaaattatttcatcctatgattgagtacttggggcacttggtatcttctcaaggggttcaggcagacctttccaggattgcaacaacggttgggctcaaccgcgtaatctaaagcaactaagaggatttctaggaataacagtgtattaccatcgctttacagatcattatgccaccattatggctcctcttacagagttattgtaaaaagataattttatttggaagctctagcagcctttaagcaactaaaacaagccatgacagagaacccagttcttactttgctaga

SEQ ID NO: 241011 - DNA, 1354 bp, Cannabis indica
aaagaaaagtatagaatagctatggagaaagataaagtgtatatttctctaggttaagtgttacaatgatattttaaccccttctcacatttgaaagaatggtatttacaggctctaatgactttgggtacaatagttgtcccaaggaacatggtgacatccatgacctgcaatctacaggttacaagtggtggtcttgcaccttgtacctttgtctggtgtcaggtggtctcaggttgcatgagtagtagctattgtgtaaccatggttgggttgtcaggcattgcagatgtggtgcctccactacttgtacttccttgccttcaaaacttgcagaaaacgtgattgtacacaccttgcatgcatgccttgtccttgtgatcgtactcttgttgccctcttctccaatacttcagaaaattttactaagtatagttatgttgttatgaaatcaaatttccctgtgcatggtcatggccaagtgacattatgaagtttatgcccagttacatacatgaaatgcatgtcgagtgccatgcatgaggatcatgccaagtgacctcttggctagcatggttgaatgacatcttggctagcacgaccgactgacttcttgtctagcatggtcgagtgacatttgtgctagcatggccgagtgacatacttggaatcatggtcgagtgacttcctaaagtgtatggccaagtgaatttctaggaagcatggtcgagtgacttcctaaagtacatggctgagtgagtttctaggaagcacgcctcagttactttcttgtaagcatggccgagtgacttcctagaatgcatggccgagtgacattcgacttggaaggatgaccgagtgacttcctcaagttcatggacgagtgaatttctaggaagcatgtccgagttagatacatggccgagtgacttcctaagttgcatgactgagtgacttcttggcaagtgttatcttaatttttatcctctttatgtggaagtgcttacatggacaaaatcagcgccatgtggcagtacaactcaccaacgagaagaccaagttaataccttagcaaacggggaccctggcactcaaacgggcatcaaatgatagaccagcttcctcacagaagctgaccaaccctatgtctggctagcctctgaacattaccatggccgatcagcctgctccctacaggggtctggccggccggggaaaggcctccagggttctttgtgcaattatacatgtggactacatgatttgggctacgaactaaaagcccaacagaatagctgaataatctatgtttaaaggaattttggtctttcgtagttaattaattaaatataca

SEQ ID NO: 241012 - DNA, 1176 bp, Cannabis indica
ctacaaccgaacacagacctagcctcaaacccaaactgagactggaactcgggcccgaacacggtcctgtaccctgaccggaattgagacccgaacctggacctaaatctgggacctaatcccaaacacagacttggacctagatagggatccggatacgaaccttgactaggacaaagaccaagactgggattgaaatgctggacctacatctcgaccgagatccatactgagacccaaacttggacccgcactcaggacccgaacttggacctgtaccctaacctagaccaagatcggggtccagacctggatacaaacccggacttagactcagacccgaactaaaacattcacacctaaaatcagacccaaagctagacccggatccggacccaaactggaacccaaacaaggatcagaacaaagaacgtaaacccagaactgaatccagactcagatcgggattggaacttgggactcggaccacacctaaaccaagacccaagacgcgaacccacacccggagattgatctcgtcctacactgaaatccggacccgaacccaaactctgaccatgactttaactctgacccgaactcaaacccaaactcgaactcagaatcgcaaatggaacttgaaccgaactaggactaggaccaggaccaggacctaaacctaaacccgaaattagatcaaaacccaaacagagacctaaacctgaaccgagactagcactcaaacccgaacctagaccgggacccaaacccacacaataactgggacctagacctagaataaggatagggacctgggaaatagaatgaggactgagaccttgtatccgaccctgacccgaatttgagcataggaccaagctcgtgacccagcaccaaaaatggaaccagaatggcacccaagattgggatccggatctcgacacagggcttggaaaaaacccatattcggtgagaggattggggacccagccctggacccgaaccttgaaaaggacccgaaacccacaccaagatctgaacccagtcccaaacgcaaaagtggacccgaacccgtacactgtgacccgaaattggaaccaaaactggaagttgaccaagactagaactaggacttggaatcctaacttaagttggacctagatccagaaccgtaac

SEQ ID NO: 241013 - DNA, 987 bp, Cannabis indica
actgaaattttcaatttttttttactgtggagcaaatttttttttaaaaaatactattgactgtgttaagtttcatctattgttctactgttgttttttagttgttttactgttgttgtttttaattgttttatttagtgttttacagttgttttataaaaaaaagtattttataaaaatttctctgtgaattataaacttgtgtttaaaatctagtattttgtaaaaatcccatatatattttgttggttcaaaaatatggaccatggcagctgctgcagatttcaaaagaaaaaatgaatgtaaaacaatgatattgggcctgggcttaaccaaggaaggtaaagaagaaacaaataagtgagatgggcttgtgataagtgggctgaaatcttgttctattcctttcctttgatttttgcattttatttttatttttaccactttgaggacaagttgtgtttgaatggttggggttttacactatgggctttttggtaaatttgtagcttttagcctagcttagtataaatcaaatatgtaatgtcattctcacaaaacttacttggttaactgtcatcactttttttttcttccttaattatgtactctactctcttggttttttgattcttcacttgtctgccccattgttatttttaaaattagtttttgcaaataagaaagggaaaaggaaaaggtactaattgatacaacattgtagatacgggtctaaattggctcagaaatgttgtaatattaaaaattattaatgagaaacactcataattaatgggttcgcaatagctttcaatatatatttacagaccggtatttttttaagagaaaaaaataaggttttttaaaaatattggattttggacaaaactttataattttgttgtaacatgaaattttattacaaaaatactatttttttttataaacaaccgtaaaacaacaaaactaaacaattaaaacaacagt

SEQ ID NO: 241014 - DNA, 948 bp, Cannabis indica
attactaaaaactttccatattaaacattagatactaaaaaaatattatttttccatgtaattattaactattttgccgaacaaaatattagaaatttatatgtagttaccaccttatatttaaatacaccttgtattttaaaatatagtgtaaaaactgtgtaattaccagcttagtaattacagtacatagtaattacacaattacttccaaacacaccataaatatgagttgagcgaacatgacacgcatgaaattacaatactatatagtagtacatgtatatgctgtgtattcctttgcataaataacatgtgtctctttagtctacaacaataataatgaaatgagtaattttaacaaatgatacttggtcatggtgcaagaaaaagatgacccataaaaattaccattatcaatttaggtacttttaccagcgtgcccttttggtaggatagagtttaattattttgttttcctttccaaataattaatatcactgacattaattaattatatagagtttattgcagtaattaaagttttgagtttgtaacataaactcaattatttttttaatagctaaatactcaatattaataaaattataattttcgtcaatacaaattttattttaaatttatttaaagaacatttagaagtaattgatattaaatattttcgtctagattcaatgatttaaaatctaggctttatatgtgtcttgtttaagacaccaatgaactctttattcaaaaaaaaaaaaagacactaatgaactttatactgataaaactagacaaaaattacagttttactgacattgaatacttatgccatacaaaaatcattaaatttataccgtttataaattcaaaactttgagtacttattaggggtgttcataaaataaccgatccaatccaatccaatccgcaaagtgcgga

SEQ ID NO: 241015 - DNA, 2077 bp, Cannabis indica
gtttaattattcctaattgatttaatttgactcatttctgttgactaaaagtgaggtcaatattttggtgctttcattaatagcaaagaagcacaagtttttgtttaaagtcttttcaggacacaagatggttgtacaaacacggaggtaaaatctgacagatcaactactgatccaatggctacggatcctaacgtgcatacacttgtgaatcctagagatccattcaggacagatcccgatctaactaatcctcaccaataggcccagaaacagtagggcaaggagtgaccaccccctctggctgggttcactcaaggcgtgcaagaaactggaaccactagtacttggattgaacaaactggccctagaactggaattccatctactacaaattctcaaaggtcgatcggtgatgacactgaaagacaaaatttacgagttgctctagggaaaatacaagagcataacaacactcttcattacaatcagcaagatacccaagtagtcgtaaattttgctttatagaacaaaggtgccacttctaaaaatggataaatggacaaatggaaatcataagggctcaacaagaaataattgacaattgttccaggcaggctaccgtgctgatcaggcgagcatatcagatcaccgaagaatagccagtggaaaatacttacattcaaacttggccctatcaagcacattatactaatcatcaacaccatggggaaagaccaattgaaaatatatacaggggcatatccaaagagaagattctcatttaacacatccttatgttggtaactgcgctaacatccctcatttcaaggagctaaaactcatgttggtaactgtgccaaaatccatcctttttaaggagccaatcctcatattggtaactaggccaacattcctccttttcaaggagccaatccacatggtggtaaccattccaataatcctcctctacctgtaagagttgattatgctataccaataacttttgaataacaataaaatgaaggagtataaatctgctgaagaaataaagccaatcttgccttatatcttagcattaccttaccctccagagttttaaattccaactacaatcaagtatgataggaccactgaccctggggtccacataagtgatttcatacttttatgcaagcacatcaagtggttagagatttgaaatgtgtgttattccttgctaccttatatggagctacatcctcgtggttcaaaaagtttaaaaggtacttcatagtgtcatggatccaactctcaaatgctttcaagaaggagttccaagctgctagaaccaacaagcttgaatgttcctcgttggccaacatgagacaatttctaggagaaagtttgaaggcctatatcaaccatttcaacatcgaagcttctaaaattcattgcatcaatgatagtgtaagactaatggcactagtggcaggtattgcccatggttccatattttggaacaaccttcaaagaaagagcacatgcaccattgacaaattcatgaagtagacacaaaaatacatcaacattgaagaggaaagaatatcaaacaacctccctctccaatccttgtagcctactcaagttgcattagcactgctagaacttactaaggcaactatggctactaactctttcaacaacagtaaaagagaaggcatagatggtgaggactcaagtcccaagaagaataagagtgatggcccttatcaccctatgtatttaatctacaccaagttgataaaaacccaagaggccatctatgtggcgaatgagcatcgagatccatttcgagttcctaaacccataaggcatgatcaagccaagagagatgcctcaagatactgtcaataccatgagacatcagccacacaaccaatgagtgttgaaacctcaaagatgaaattaagactctagtcctaacaagacacttacccattatgcacaacaaaattttcaaggaggacatgtcaactaattgaaactccaccaatggagccagaaggcatttagcatttcttgagttttttgcctt

SEQ ID NO: 241016 - DNA, 1465 bp, Cannabis indica
attacaaatattgatttccgatttatttttttatttattccgttacatttctccattaatttattccgattctgattactgtatagtaaacgtgccataaaggtgataacatatagtgtcaaatatttcacaattaattataatttttattaaccaattaatatattatatatagactaccactaaattgaaaacctatttataattttaaagttgttatgtttggtttatataatataatatatatagtcttggttaaattaattaattaattaatttttttttattaaataatattatacaaattaagtaatttcaaattagtttttctcacgttgtagtttaaattaattaactagttagagatattttttaaacttcaaataacaaaaaatttcatagatttattatacggggtgtttaattaattattaattttaatttaaaaaatagaaaaatgagagaattaaggaaggaataaataaaattcttatatatataataatattataacattaataaagaatctgataattaataggatattctgttacataacacattttatatagaataaatatttgttaattttttattaattttttgttatttgtatgttattttttgttgttgtttttatttaaatgttattttttttgttattttttagatatatttttttaaaaaaatttatattattttggagtttttttttattattatttttatacttcaatacggcacatagaaacctctagaaaccactggatacattactcgagcaacgcaaaccgtaaattaaaaaaaaaattaaaaatagtatatatattatttttataaaataccgtaaaaatataaaaaaatactttaaatgtaaaactataaaaaaaaaatttaaaaatattgcttgttaaaattttaagtaagatttactttgtatcaaaattctcactatctgcactgcactgcagtagtcatacctcgtttttttttggttcttttctaaagaaaataatggtaattattagtgataatgtccaaatatcgttgtaaaataagatctggtattgggagaaattttttcttggctgctgagttttcagactgtattttcttcaacaaacatttgaacaaattgttagaatttagggataagatgaatgaggttccatctcaaaaccaattggctatgggaagagtagtccgttcctcttatatattctattatctttccacacattagcaatgtgggattctctaacatccccctcaagatggtagctattttatttgctcaccatcttggataactcgatcgtaagcggctctttttttttggctcactatccctggtcacaagtggctttttttgctctactttttggatcggtatttttggatttttggtggctctttttatttttgctcactatcctcgaagcacaagttgttttttttttttttt

SEQ ID NO: 241017 - DNA, 986 bp, Cannabis indica
atgatgtggagatatatagcatcttcaaagaatattaccattcgagatgctgttatagtgacactcttggctagctagttctccacatcaacatgactgatcgagctattcctccctcgagcaatcccaaagcgatttttggcaggttccagtaactcatgggtgtggagagaaaggcccaagccccccctgtaagtagtttgcagatcgcttccataattaaaaactaatgcatgtatatgcagcaaatataaaaaaatcatacgtatataattatatagtcagttacaaataatttgatgtattatgtattatgtagggtgaagagtttcgagtcccattccatacaattaatattcattgttggtatcaaaaaagaaaagataattcacggaggatgacaatgtgtattgatagtcgtgcaataatttaagataacaatctaagtattctttccccattccccatttttaagatatgcatcttttatcgaatttaccttagtgtggttaccactagctagatttaacttcgacatcggcaacaaaacccatactaaaccaatacatgtccaacacttcctaaaacttcaagttaaatccatacttcaaaatgccacaaataaaatttgattcaaaatttgatatttttcaaaaactctcctaagaaggcttaattggatataacttcacaaactcgcccaaacccaaaatcaaaacttatgtaacaatgatccattacaccaaaaacagtagtatttatatgggctatttataaaaatatggaaaaataaagataggggtacttttatcaatcaattaattaaatttacctctaattttatatttaattgaaacatacttctttttatatgtattgtactcaaaatagcctgacataagagagtcacatggagagtatcttgaagtgacagaggcaaaattggtacaatatttaaaaaatgaggtaaaaatgatagattttaa

SEQ ID NO: 241018 - DNA, 970 bp, Cannabis indica
acgtgccgactagcatagacgacctctgccaattctccaacaatgaaaatatttgaggcaagcgtaacaacaatagctctaaccaaaataatggcaaaaggagaaattcaatgattcccgtacgctatgaagtctaagggagaaggaggagaactgtgcatgcttcactctcctaccaaaactcccaatgtaatgcttgccaaccagccatggcaataggtgtcaccaaaacctgaaccacctggcccaccacaccaatcaaccactgaggctcgggcaatataaggccacctgtaaacctagcatgaccataaaggccaagctctcgccagcttcatggctaaacatagaagcatatctccctaaatctctcaaagtttgggagaaaagtaagagccagagaagaagcgagagtaagagtaagacaactcaacctagaagatgcattgaccacttgcccaatgcaggcctagcccgtagaacacttaggggcaatggctacacgaggcaacaaaggtcagtttcaaagcttctaacaatgagactgaacatgaagctccaaatgtgtgcctcagactagcacacgaagtgaaagttgaacacctagacatacaccacgactctcaactagttggaggtcatgtcctaggtgagtatgcaactcaatggcctatttgagctaatatcatgacatgttaagtcaactcaaaggctatactaaaacgtaagtccccaaagatgatgcaaaaattgatgcactcgctcgactaggaagttgtgccttaacaaccaaggcaaacttggtacccactcagttcttcaaagaagtaagcatccttatttcaaaagaaatagacgtgttggacaaccaacatggatacacctatagcagcatacttccaaacaaagaccttgccaaaaagtaggggtaaggaggatagatgctaggtgtacaatcctagacaacata

SEQ ID NO: 241019 - DNA, 1651 bp, Cannabis indica
atgggttttatttaggacacaaaacccaacaagaccgtctgcacatagcttgagaaagaccggctacacgtagagagccttgatctctgcacagacctcattcccctcatcatcagaagatcccatttcctgacgttgagatctatttccctgcctcaggaaatttctcaacactagagagaggctgacacaaagatctcctggcacaggttagggtcttgggttggctggattctctgatagaaaccacaccaacttccttcccaaatccacctgaaaccatgccaatcttcctctggaattcttcatcagcttgaggaggacatttgagatcgttcataagatctataccctccatgatcacttgtgaggatcggccatggcaagctacggggttcccctggtttggactggtcggaagctcctcagccctggaatccatcatttccggctccggttggggcttgaagtctgtaggaacaaatggaaaatggttggtgcatctgggtattatgagtctggaaggataaacttctgaactcaaaagagacattttggcaggaagaaagtaatccattctgaaaatggatttcactaaagaagccagaaggtttgtgaaaaaagacaagcttgagccacccttttatacacaaagttcagtgacaagaaagcaaaagattaagaaatctaacggctgggaatcgtgcagaatatgaataggtgattcataatgatcttcgaaaccatacaactgccagaatcaaaggaggcatcctttccaagaaatgaatttggcgaaaacgctctccgtaattattaaaaagctctttttactaaaaaaactttttaaggggcaattgttatacccaaaattcggctggaggacacatatcaaggtaaagggaatgtgaatcggtgcaatatctttttatggaataactcattaattgtgtaagtatcaaagtatatttgtaacccgctgactgtgaggtcttaggcgaggaatcaatgtacgaactggcacttactttattaacgagaaaccatatgtcgctgaaggtgaatagcgaggcaccagagaaaagtgacacataccttagcttacaataagcaaagtaagtgtgaaagtcggatcggcttgaagaacaagaatgcgagatgaccatctcgacttgacacgtatcctcgcattatcaataaatgatgaccatctccatatgtgtttcttttactttttctgtgttgaatcatctcgtatttacagtttgttagggtataacaaatgcttttgtttgatgtactataaaaaacttagaatgttaccgctattctatcccatatagtctgaatgactgtatcctcaacgtcctcaaactcaaacttgttcataggaatagtattgcgaacaaaaaactttatgtaattgttaaaccctttgccatagtcatctacagggggcccagtcgccatatgaaatctaaatttcaatttttgacctgcaggttgctcggctagttcttgttcaatattttttcccttatactatcccctaactccctttttctgatctccacttgaacctgcatcagtcattctacaaatacaagctacgaataattaattaatcatactattaacaaaaagtatacat

SEQ ID NO: 241020 - DNA, 642 bp, Cannabis indica
ctcataatttgatttaagatttgaaaaatgaaaatctacataaaattttacctaaaatttcaaaattaaattcaatgaaaaacaatgaaaaaatgaaaaaagggcaaaaaattgcatttggcttggatggtatgcattgccatccgcgtgcgtgcatggggagccctgatcgagatttttcgcacaatgaggctgtaggtaggattttcgcgcacagaactgccccgttcagacaaaatcggttgaggttggccgaggatcctcggacaagaattgtgtccgactgcgcgtgacacgaagtgacactcggtgcgcgcgcagggcagtgatccccttccctgattttttttttcgaatttcaaaaattcttaactaatttattttaaatcgaaatttagtactgtaaaaaagtaaattgcttcataaaataattccaaatcgtgaatccaattattttacgtaaaaaatttgtaaacatcaatcaatcatcaaataaacacatagaccaatatgaatcacatccaaatcatacattcatcattttaaatccatatgtcttgaaagtaaatcattatcatggctctggtaccagttgttcaaatatattttaccatgatcacgatttactaacaagtatgttga

SEQ ID NO: 241021 - DNA, 592 bp, Cannabis indica
aaagggggttcaatgagagaaaagcaggattcaagggctgcaagcctgagaaaatgttggaggaggaaggctcttttgagtgaggtatctgacttttgagtaaggaagccataatgcaggaaggataaatgaaaaactcaactgaactaacccagaaaaagaaaagagagttgaaagaattcttagataaaaaagaaggagctcaactagaagcttatttatacaaaagattgcatgcagattaataaagatgccacaaaaacggaaatgaagagtcacctttttgcattaaaacacgtgccaggcaaaacacgttcacccaaatttcaagaagcggccctaagagtatatatgtctttccactttccaaagcacaccattcaaaaaaaaaatcaaaataagtacgtgtaaatatatgtataaatgataagtaataaatacacttaatagagtcgcagctcccccaaccttatatgaaacaaacacaaaacataggaagggacatcaagagtaataaatacaaacccattaagagatcgcgacccaagcacaagttacataaatataactagaaatgtaaaaaaaaaaaaaa

SEQ ID NO: 241022 - DNA, 709 bp, Cannabis indica
tagcaagaagagttgacaaagaactgcgggacttctggtggggagattcggagaataaaaagacttggcatactattgattggagttcactatgtcaatcaaaactacggggtggtctcgggtttagaagaattgaaactattaatacaacttttatccttaaatggggatggaaggctcttacggataaggatagcttgtgggggaccattattcaaactaaatatctcaatggaagatgtttcctagatgctgaaatgaaggagggggactcaagcttttggaaatcagttctaagagctaaaccgctgcttctaacccaggtgtgcaaaaagattggtaatggggaagaaacatccatttggttcgatccgtgggtgccttcctccaatactagacctacccccctccaagatgtaactcatggtgtcgcttgggtgagtcaattcatgagggacgatcgaacctgggacgtggatatggtccataaatggttcaaccggagtgacgcgaaagcaatattgaatatccaactaccgatggatgacacaagggatgcttggatgtggatgggggaacctagtggactcttctcaattatatcagcgtgtcgtagtgtcaaaggtgtcacacatacaaccccagcggatgcaaaatggaagttcttatggacatccaaaatccaccctcgtctgaaactcatttggtg

SEQ ID NO: 241023 - DNA, 825 bp, Cannabis indica
gcagagcatctggcgtgagaagaccaataagatagttttgaaagtgtcatggctctttgttaagtacccgtcgtttgtctccttcacaaccaaatgtaatatgaaatagtccattatcttctttatattcagtgataacaactcgaaatcgaccttgccagtggccaaaaatttggtcgataaaaatctgtttgtagacattttggtgagtaagaactttggcaagaagagtgggctgattacattcagagggcgtggggttatattcagggacacaaaagatggatctttcttcatcaataagagaaagggttgaatgtatgttcttcgaaagtgaatccatgaaggatatcgagctggttgagcgaatgggagggggctgacgccggcgtggggaagcagaggagtagtggagggaacagttatacaagggaaatttcaaatttgaaggaggaagactacagttaaaagacaaaggtggttaaaaagaaaaaaactaatacagacccaagagggcacccgataattacaaaagatagtacttggtataaaaagaagtaatgttttttttttccgtgtgtcacagtaaaaatgaaagaacatatatataaaaaaagggctatttacaaaaatatgggaaaataaagataagttttgatatatatggcataaaaacttaattacactaaatatgacatttttttaaaaaacttacaaatatgggaaaaagtcttgaggaatgccataaaaaactttaaatttgtgtttctttttatttattttttctttttttaaaaaattaaaatactaaaataaataaaaaat

SEQ ID NO: 241024 - DNA, 684 bp, Cannabis indica
tcatatatagaataatgtttttttaatgatcattggacagccacaataagagcactaatctcaataattatcaattatgttaataacaaaattgcttaaatgtagagtcgaatacctaatgtttaagtgagaaatataattttaaataattagagagtaaccataacatttttaattatttaaaattatatgttaattaaagttcatattagtagacataacttgtaattaattatatatgtataataactttaccttacaagaattttattatatctaaataattaattaggataatatgttaaattaatttttttaatttacccacaagagttcggataattaatttaatagtgttttaacaaatttaattaaaatagataataatctttattttttctaagctaaacgtttgattaaatctatcataaaattcatctgattatattaaatttattatttaaaaggcttatcacctcataaattcaaggatcatgtagagagcatgggattttgttttcttatgtagtttgtagatatgaagttgttattaatgaaactcttattttaatgttttcttttatgtgtatcttaatttttatttaagaaatttttttagacgaccaaaataaacataaactttagagttaatttacttaagtacattgccacataaagtatatt

SEQ ID NO: 241025 - DNA, 1537 bp, Cannabis indica
cataattactaaaatcgcccctggctcactaatggggtcttaacatgtcataaatcatatttattctcatatattaaattatataacaatataattcctcaattattcataattatctagttagggttttgctaatccatttcataaatccagggtagtacattattcatgttattttgaggtagaattaagggctgttgggatgtttgagcaagctttgagttttaaaactcaagcttgtctctttaatggtttattttgattttgagaatgttaggttgttctattgcttggattatgtttttgtgggtatattaagcaggtctggaaggttttgtatggttttgatttgaattgattaaggttttgaatttttgggttacctagtgtaaactggttaaccgattttacaggccctataaaactggttaaccggatcagcagctgtgttcccaaaatttttgtgttgtcgattcctgtaaatttcaaagctttggttggataattccttgattatttagggtagtttcatgttaacatttcttagaaaaacttttggttttaaacctatgtcccaagatagtaatttagcgtgtcactcacccgtgatatgaataatgtgatttaagggcctataattagtcaagcagctatttaactcaggttgccggcacacctaaatttggaatcgaggtaagattagtataatgttatgcatatgtgtttacatgttatttatgtctgttagagtacattgatagcactatcagtatacatagagttatacttggtactggtagatgtatgtttgggtcaaatacttatcgatgctatcacatcaacatgactagagtatcactagcatattgagtataggttgatattatggtcaatagtattgtcttatgaacgttctagaatcagcaccgtgtgggacacagcgacagggttatggtggggtgtatgggcgcctgattataatgcgggttattggtatgttattatttatgtttttcttactgagtatgttgactcatagttgctattttgatgtgaggtaagggccaggctaaggctgagcagccgtgagtaagagcatatagagattgtacatgtcgaggcggttaagcttggagcgtacagtctttgggacatcagggcatattttgtgtagtcgctatgggacaaacttttgtaatattcacaatgaaacttttgtagatattttgtaaaacgggatcctggtttattataagtataatattttaatgtctactgttaataaggtaaaattttaataaatcacggttttcaataaactcgttgattatcaacgagctacacaattaagttaaaaatcacgttaacatgcctaaaatagttagggtgttacagcttacctcattgatccaaagaaattaccataattttatagtccaatactatcaactaagtcttcctccctaggtctctaaatcagaagaagttttaatttctatctgattatcaaaagtatacaattgtgatgagacaatat

SEQ ID NO: 241026 - DNA, 510 bp, Cannabis indica
gtaacgaataaacttgttaaattaagactaaaacaatataaaataaaataaataaataatttgaccaaactatttatatataccttctcatcaatgaaaatcatgtctaaactaattaattcatcattcttcttggtgttagtagactcccatattctacaaattctaatccttatcatccaactatcattgtcgttgttcaagtcttgaagaaaagaatactccataatataaattgcaaagtatacttcacaaataatagtggaagaaggaatatgtgtaaaaaagaaacaaacaaaacactcttcaaatgataatttaaaattattatattataataataatactaacaacaaatgaaaaagataatattaatgtgtattttaataatagaaaatgtgaacatttaatactaatgcttaccgatttattgcagactaatcagtgtgtgtatataataatagaaaatgtgtatataattcttatgatactattaaataacaaacgaaa

SEQ ID NO: 241027 - DNA, 1237 bp, Cannabis indica
atgtggtacattatacttttcttgcttttgatccagattcatgcatgtcggccaacccaaggagagaaactttcttgataatctcgacccttaaccttgccctctttgatgatttactatctcgctactactggagcttaaattactaaattttggattgaaaataaaaaaaaattaaatagtggggttgagggtttcatcgcaccgaagaagaggattccgtcgttcttctatttatgtttcttaaaacataatataatatatattaaactgatacgtttattattattgatattataataataatataatattaataatatttgtaaaatttttattattagtagttattttattatttcttaaccactaatttttttttaattttaagtatatggtcaattctgagtgccctaaaatactccagtatttttaaaatcaacttatctcaataatctcatcaatatttcaaagtaaaactgttgtgacattgttagcctcctatggggtctccagggtcgtcaaacttgaaaatatttttatttcacaaataacttacattatatccacatattttaaataaattttcgtaattaataatttacacttatttgtccacttatagcaaaatttataatttatgctaaattaggtcagcagcaggatcataatcatactcattactaccaaattaatccataatatataataagtcctaattattcataattaggtttccaggatattacaaccatcccctccttacagaaattttgtccttaaaatttacctgaacaatccgggatactactcccatatccacggttctaactcttaagttacttcttccactttgctctttctctacaacactttcttaattagtagaattatcttattccatattactttctctttctagttcaaaatctggacaagatgtttttcctatataataaatatgtctaaagctcaaaatcatcaaagctcagaatatgggttgagtctgatacatattttctcatggggatatgaaatacactccagagtcaaggctagctgataggctacctggcctatttactccaatatcaaaaggtataatgaatttagggtttaactttcctatctacgtatcccgtttataggcgatactcggagaaaaataaaatctcctatttggaactcgataatcctatgctttaaattagcgcaacttttctgtgtactcaatgaa

SEQ ID NO: 241028 - DNA, 731 bp, Cannabis indica
attgagttctactaatgagttatataattcacgtactaattgctttaatatatatatgtgtgcattaggctcaattagaggagcaggttactcagggacaaattcaagtccggggccaaaacgatatcctgacgcaagcgctcaggacaccaaagcatcctggacgtgtcagggttgctgggtatgctagtacttgaaatattatttctttagttatacaaaaaaaatgtagctaattttcattttatgatttccaggttcctgaccagggcatctaaattgttcggcaggaacaaaaggaaagtgtctgatgttgtggctcgacaacagaaggagattgaaaaattaaaagccgaactccaatcccttaaacagaagaaaaacactactgaacaagaggagaaaggagaggtggctgatgaggcgtatgttccacaaccatacgctcgtgaggatgaggtcgtccaccacaaacctatgttgaggagtttgtttccctcaacgagctagcaaacccgtacaattttgatgaccattcggcccttgattagcaagtatatctctgctatgacaacatcgacaacattgtagcccgagcgtatctgtacgagcatgttggtaaaatcactgttcactgtacagactacgatgattcacatgcccgggttttgatttcggaaatgctgcaagaggatgttaaaatcccaattagggacgtaccaaacatgttc

SEQ ID NO: 241029 - DNA, 1023 bp, Cannabis indica
actaaacaatgtaaacctggtttttcatacaagctaagtgaaaagagtttttcagaaaaatattcaactaatagaaatctgtagagttgaattaatttgaaattttaggtctaataataaatataaactaattaccattgaatcagcatggcccaaacaacttttaattcttataaaaccctaaactcagatcaaagatactctacacaataaataaaattaaacatgactttgaaaaataaataaatcaatataaatgaaagtaaaagaaaaaatatcagaatcttttgatatccatgatcaaagtgagcattaaggtagcacagatagctagcgtgagatttgagaacaagagacttagggttcgaatgcgtgtcaattttttggagaaaagtggcaatgaagtaggtgaagcaggattggggataagtgaggagaagataggcggtgaacaaaaaaaatatataattgtatgaaaaatacaataaacccacttcaaccagctgcaatagaagggtattattgtcctttaagcaggacgtgaagatgagtcttattatatataagataaatattttaaatcagagtaatttgtagcgtaaatacttaaatttaactcttagttgcaaataaatacttaagtttaatttttagtggtaataatatctaaattataattctaaaattttcataggtacttagccgttaaatgtctaatcaattttttattagttatttaaattaaattttaaataaaaaataaaaaataaatgacatagaccaattaggaattgtcatgtggtaatttaattgacacttgacagccaggtacctatagaagttccagaattataacttaagtattattaccgccaaaaattagacttaggtatttataaacaactggaatttaaacttaagtatttatgccgcaaattactctttaaatcactatcaatttaggaatagttaacccaataaattgtatacatttagctttaaatttaaagggaataaactcat

SEQ ID NO: 241030 - DNA, 1015 bp, Cannabis indica
aagtctcttgtgttgggattttatgccctaagtaaaatttatttcaatataattttatttactaattaataaaagattaaaaaccattttatgtttcatagttcacataattactttcatgattttatgtttaatatgtaaattttgttaaatctcgaacatatagttactcgtgattatattgttgtctacatgtggaaagtaatcataattatatgcttcaaattatttagtcccacaatttatcagtgtactgtatttatactgacatgataattagcgatatattttacttacagttatataagtggaatgttacatcggactagtccgacattgatagtgaaaaagatatcacaaacttacaattatgtcttttctaagtaaatgtcacttagttgatcttagatcaatttatctcaattctgagatgattaagttctaacttaattgtactatacgggttctttgacttgttcaataccaacttacccgtaggactaggccatacttacatcttgggaattcgtagtggaattgaatgggagcgttaatcatagatgtagaatctatagcttctataactattcagaagtgaagcgataatttcttttgagcttggctaaatgcgataaatgatagagcgctcatttcagtaattatattagtttgctgaaatatcatttataagtagctaagtgttttaagagtaaaatacattagaaggtaaaataataaatttgtccctactcgttgtaaaccgtctatagaggatcaatgattgtttagattgtaataatagataatttatagggtatctatatttgttatacagagtgttctatttaatcaagagtgcaatttcaaatctataatagaatctggaggaattaataagctaagaaatttactcagtaaattttagatctacttattatgtgcttggttacatgggcttatggtccccacattgtctagaataatgtcatctaatagactcaattaattgtttaat

SEQ ID NO: 241031 - DNA, 1151 bp, Cannabis indica
ccaaaaggggacatatcgaatagaatcaggagtaggggttggtgacacatcaggatgagtgaagaccatcaagaacttatcaaaatgccatggttgttcttcaagaacacggcgcctatctccatcgcattggaatgaagctagaaagagcccagaatgatactcagaaatttgacaaggaaagcggagggtccaagcttcagacatggctttttcaatccaagagggcttagcagatttgggagataaaagcttgaaaaacagacagaaagcatcggtatcagtagaggagtgaattgaaatgtgatcgaactcatgaacaaggctgtcctcgtcatcaagagcagtaatggggtttgggttggtggaggaggaagccattaaggtagggcagaagaaactaacagggttttcagcaggagacgaaaatggtatgcaaagagtaaaggagagaacatataaataagcaaagatagaaagaatcgagagagacgagtacctggagaagaaaagtcgcctcgaagagagaactggcgtctgaaccatcgcttcacagctgggagaggcggtctggaatcgtcgctgaaatgcaatgatggcttttggttgtgagagggggagaagcagaatgacggttggtttagtcgtataagaacgattcgaaaatcgaagatagtatgaagattgtgcaggaaaattaaatgctgataagaaggagccgccataattaaatgcaagtgtgagagagagatagcattaaacagcgatggagctcgagaaattagggggaaatacataacgattagggtgacgtattaggaaaacaaatccaaggtcattaatgagggtaaacagaaaacaaatcgaaagtcaggggagagtaagaaatgaggcgagtaggaacaaaagggaacatcaaatgatagaggagatagggtaataaatgcaagacagaaaggaatcagaagagaaaagaaaataaaagaaagagaaactaagagactcaaacctgagaaggaagaagctgagaatcaagcaaacaaactgatatcggtgcataaccagagcaaagcctgtaggaagcttcaagaagaagacttgaaaaattgtatgaagaaaaacgatttgggaaaaaaaaattggaactttat

SEQ ID NO: 241032 - DNA, 1256 bp, Cannabis indica
taaattatttttttaatatttatattattaataataagtggaccaataaaaatttgtcatatgtagacttgtgtataccgtaacagtccacttttgtacttgatcaaaatgaacaaaaggactggagagcaaaataattgtgaagattagggaatttagccataatgtttccagtgtaatggtttaaccgtgccaaactttaaagttcaaaaaatttaaccgtcggatatggaaagcaggtcttaaatcagtttaggtgtggttgtgttccattttacaagaaaaaataataattttggaacatatatcacaataatgagaaacaatatgtatggacatactattgtgtatgtgtgcagggtgtttattagatcacattcaatggatttggaccaaactgatccaattcaattatttattggatattaaattttgtcatccgatccaatccaatcgaattgactcatccaatccgatctgatccaatggatgtattggattggatcgattccaaccattgaatgcattgattggtttttcattggattggattgaatccatcaaatccattttagttaccatttaagttgatttcattaaaaatttatataaaacatataatttaaaacataataatcttacataaacaataaacattagtttagtccaacctaattcttattatctcataataaaactattaaaaaaatttattgaatacacattgataattttattagcacttaggaagatgagaattaatatattagatctaagatatttttttaatccaatgtattaaatgtatattaagtcaattaatatatattttaaataaaatatataaaattataaatgtattttaaaaatatataaatataaatggaggccattgataataattggatcagttttggatcggatgtcccatccaatctgattggattttcaaaatttacatatgattcaatccaattatgattgaatttgaatgtctaattttattggatcggtcgattgtaattagattagatgactctatgtacacccatgtatatgtacacccatgtatgggtggataaaatagagaacaattgcaagaatctcaccatctcaaaatgtacagacatcccgattaaatggttggtttgatttagacacattagtacagtactacaaacaaaactggacttgaatagagcttagattacatttggctctgtttctgatgttccttttcatatatatatatatat

SEQ ID NO: 241033 - DNA, 791 bp, Cannabis indica
actttaactgtgattttttgacggaggtgtgcagagcaaaacggaactaggatttaggtagttatgtcgctaaaatttctatttttgtggttaactattacaaaccgtaaaattcaggtggtttagccgctaatatcccaatctatgtgactcaaattggtcaaatcatcacattctactaataccgactataaaatataaaaaatataaaatttcaaatataatataacaatacacatagaattaaaatatatttctataattgcaaaaataataattttaagcttatttttaaaataagtcctaattatttactaatttccatataaagctaagcggtcattacaatttgttaaccataaaaattcactaaatgtctattctcaaagacaaaaagtaaaataagaaaaaagattcccaggccaaataaaaggtccaaggaaagtaaaaagggtgtaccccttttttgtccccttgtcacatcaccccctcacccccgcactcccctccccgagtccccctcttcccgtgtccccctctccttgaccccctctccctacgcacccactccccgcgtccccctctccttgtacaccccctcctcgcgccccctcaccctctctcaacccttccccccgccttgctcaccccctgtctccctcatctcacctcgccccactttccttctcttgcccacttcaatcccccaaggattaatacatatacaaccttagtatgaatttcttaagtgtattcataacattgcgagcatgggaggataagagagaata

SEQ ID NO: 241034 - DNA, 565 bp, Cannabis indica
atttttttctttattatccctttcttctaatttccttgcttatagaggttgtaactacatattctattttcaaatatacctatagctacctttcttttctttatgcgcacatataatttggaattatataccttcttttacgtctttaattttctttaatcaatattctacacataattttcttctttttgtctatgtgtctatataaaaagaatttatttaatatcaattcactcaaacccagctctaaacttcctgctactctctttttctcttaaacttttctccttcaaattgaataacaatttttaaactacttagcttatttgtttgccaaaaagaagctattttctacaatggtcttatataatagatttctatcgagacgtgatgttgatgaacaagattctagaagaacccttcgcgaattattcgagaaaatatacatgttagaggaagaactgaaattggagcgagaaggaagattgaagcaacaacgtcaaaagaaaaaatgtcatatatgtgataatgaaatttttgaggaaggttcttcatctgggtgcaa

SEQ ID NO: 241035 - DNA, 1332 bp, Cannabis indica
gtaagtattcgagccacaatcttgtagcaaaagttacaaagactgatggggcggaacttgtcgaacgagcttgcattgttttcctttgggatgagacaaatgaacgtatggttgatctgccttgacattgttccatgatcaaagaactctttcaccaatttgcagacttccggacctacagtattccagtacttacggtagaaaattccagagaatccgtcggggccaggcgccttgagagggtgcattttaaagatcacttcactgatttcagagtcttccggtgttctgcatatgagtaagttttcctcgggcgataccttgatggtgaagagagcctcaagatcttcattaatgacagggttagtagattggtacaattcttggaatttatcttggaagtaatggccgatatcgtgtctgctgcaaatccagacgttgggactggtttcaatgcagcttatacgattttgccttcggcgcactaccgtagatgcgtgaaaaaacttcgtattattgtcaccatacttcaaccagttctccctggatttttgcttccatattctttccatctttgcttccaattctaaaatttccaattggatgccagcttcattttccaacaaactttgagttaccggagccccttgaatcaacccaagggagtgtttcaaatcctttagcctacgatcagcaaagccaaacttattaagattccaacatttgagctcttgcttagtaatctgaagcttcctctgaaatctgttagaatgccaaacaggaatatgttgtgcccacgcccgatctataacttctccacattctttgctggaagtccagacctccagaaatcgaaacggatagcacagtttctcattgactccccgcatatttagacaaagaggggcatggtctgacccgtagatgggaaggtggcagacagaagcattcgggaagagtaagcaccattgcgaatctgcaattactcgatctaaccgtttgcgtatatgatgcgaggcatttctcgcattctgccaagtgcaggggggcccaacataccccaaatcgattccacccgaacccaacataaactccttcagcatattgccctcatttacttgaaaaggccgaccacccatcttctcctttgcttcgagaatgagattcaagtcccccatgagagcccaaggtagtggactaccttgcaccttagagagcattcgatcccagtaaggttgttttaagtcaccataaggtggaccatagatgcagaagagaacccaagatgcgcaacccggcatatctagcacattaactttgaaacccgaatct

SEQ ID NO: 241036 - DNA, 801 bp, Cannabis indica
agtggtcttgcgccttgtaccatcattgggtgtcgggtggtcctgagttgcaggagtagtggtcgcaggatacctgttgttgggacgtcaagggctatggaggaattgcctccattacttgtaccccctcatctctaggtcacgctaaaggcgtggccatactccattttcgtacccttctgcatgcatgcatcgtccttggattcctctcctaatgaccttcgctccaacacttagccaaattctcacacactcatcactctcacatcttgcacggacgtctcgcatcactacttgcacggatgtctcacaccacgactcgcatggacttctcgcatgcaccacgactcgcacagaggtctttcaccaagtgtcacacgaacgtctcgcacgtaccacagcttgcacggacgtcttgcatgcaccactgctcgcacagatgtctcgcacaacgactcacacgttgatctcccacaatgacttgcatgtaccacgactcgtacagaaatgtcgcatgcaccacaactcgcataaattctccaccactcgcacaaaggctccttggctcacacaaatgctccatggctcgcaaaattctccacgactcgcaaaaatactctatggctcgcacaaatgcttgacagctcgcacaaatgctctacgactcgcacaaaggcaccatgactcacacacttcagtggtcttagtgttttggccataactttatcgatatatgtcgaaattaaacgatttaaaatgcgttagaaggataagaaacagatctatgaattttatgtttat

SEQ ID NO: 241037 - DNA, 941 bp, Cannabis indica
accattttctcatatccaattattttgtagatatcggtcgaaccagtttgtctaaggcgtcaagttctttcatgtgatattcgaatttttagcagtatatgcctttgctgcatgagaaaatgactttttcaaagaatcttgtatttttcttgaatgttatcttcaggttgttgagtaggtgatacacacaatatccatgatgtatttcaggaaagacttgttgagctgcctttattatacttttatgtctctcagatataacacactgttattatctaacactaaatgtggctcttaatttttcaaagaaccattcccatgagatatcattttctaaatttgccacacaaaaagctaattggaatattttacttgctgcatcttgtgcactagctgttagtagtgtccctcatatgaagctttgagaaaagtttcgtctactactattataggtctgcatttttcccatgctttcactaaagcgttttgtgtcatggagcaaaacaagaagttgttgtgttcttcagtttcaatgtgcactatagatcatgggtttgttttttggagcatatagaaataactaggtagcaactgataagactcctttgcttttcctctaactatgtttagagcatgttccctactcctccatgccttcatgtaaattatttgtaacccatatttgtcattcatctcaaatctaactatctgctggtgtagctgttgtttttatgttcaaaagcttgtatttaacacagtcccctattatctttgctaaagcttgcctttgatctccaaatctgttgcttagtgagcaagtgtgtttttcattgtatttccttactatgaaatactctactttcccattccttgaagctcttagtgaccatttgcaatctttatccaaacacttaatttgaaattcctttgtgcaagatttt

SEQ ID NO: 241038 - DNA, 1551 bp, Cannabis indica
ttctcaatgtcaccaaacacttagtcaaaaccaatactgttatttcttagaaccccatatatggaattatcctaaacttaaacatgttactaaaagcaaacaaaaaacaaaccccacaatagtatccatttacaaactataagccatgtcatgtctagagtgattaagaaagcaaacaaggaacaaatgtgattcgcatgaaagaagcagacatttcttttctgtaggtgtaatcccattgaaacaaaatcaaaaaaatatgaaagtttcttttgtttcaaatgaaaaaagattgagaacataatctcggaaccatctagactagaacaaaatctcgtatgattattacaagatatttacactattaacgtttaaaagaatgcgataaggtgtacatatatacacaatatcaaaattttagaactaaatcatatccctgacaccattaaaaaggaaggaaaaaagaatcgtatcatagctaaatcatatccctctaaaaagatacctagaatgccaatgtagaacagagagaatcacttgagaaaaatcaaacaaccagataaagcttcaatcttttctctacatttagggctgcataataaaacaaatgtttcaagtagagaactcaatttggattacagcataacagaatcaaatcagtgtattatcatagttcaaaaccattaacttatcttcttcttctaaacaatttttcagaacaaaacacaggttgattcaattacttcaacactgatcagaaaatataaagaaagagagaaattaacaaaaaaattataaaaaggggaaaaaataaagtctgtaaaaatagatgaaatggcgtacctgtgatgaagtaattgtaattgtttatcaaagcaatgagtgaagcgtgcgcaggtggtaaagaagccgagttggacaacccaacacagcttatgaattcctcctcaacgatgaaagaggttagcaagtgatagaagaaagagagagcgcgatcaaaaaaagacagaagaaatagagaaattgattaacgtagacagatggtgggtgaagttgtgctgacttcaacattggttctttcaaaaaaaataaataaaaaaatgaattgcgcttgggcttctcatattgagcttgggcttattccatcagtttcaaatcattgaaataagtggaaattggattgtatatccattttacttttacctccatatctatattttttaaaatataccaatttttatagatgatatcttcattataccttttaggttaatgtaaagcatgtgctatacttagtagagggaaaggatatattagacaacacactcataaaagtaggtggattttaataaagtataatatgaaggtatttttgattaatggataaaaaaaaaataattcatcaacttatctctccaaacaaattaagaaattaagatttttcacacatactttttttttaagaaatttacaataatatacactctttgcatttaatttataataataatattactactaaagtatcacattcacattagccacatctga

SEQ ID NO: 241039 - DNA, 726 bp, Cannabis indica
tgttcattgtgataattagagtggaattcaatcaataagaattgtgtgcaccattaacgtactaagcacattgatatcaagcttcatttcatacgagagattgtggagaaagaagctgtgaagatttttaaagttccaactgaagacaatccttctgatatgatagccagggtagtgccaaatagtaagtttgagcattgcctgaagctgattggatttatctgagcttggaggggttgaggggacgacagcatttaaatcattggtttatcaagagacttcaacttgaaaccacagtgaagatgttttggttatggttacaagttttgtcatcggaattggaagctgtgaatccagaaagaagatactggaagctttgtgtggatccaaaaagtcctgtgcagatggtcatatagaatccaaaaggtactttcaaataagcttgtaccgtgtgtggaatgtctctcccgaaaagcttgttattaattcggacgtacacacactattacaaaaaggctaatttttttgttgatttttaactaacatttatactattatcgtcggttcccataaccgacatatatacaggagacgcaaaatgatatttttctgcgtcaattttggacagtcgatatcaaagtatcacgttcttttataaccgacgagaatagtatttttataccttcatctgtcggttttgtaccgacagaaacttaaaaataataa

SEQ ID NO: 241040 - DNA, 1416 bp, Cannabis indica
gaaaagaaaaatctcaatattttcccaaaaagacaatgaaacgttctatcaaatttgggagagatttaaagatctcttaagttagtgtccacaccacgggtacgagagttggcgcattgtcagctacttcaatgaaggcctcacaagtcgtgagcgccagttcgtagaaatgatgtgcaatggtgagttccttcaaaaggaacctgaaaaagctcttgagtttctcattgagcttgctgaaaaatttcacacatggactggtccaagtgctgctgaaagcaccaacagaaatcgaccaactgggatttaccaactttgggaagaggacaacttaaaggcccatgtcgaagctttaaaaaagccaattgaaaaccttacgaataaagatggccaaaaagggcgcatggttgcccaagcacaaacaagaccactcgaaccttgtttcatttgtgaagaaaatgcgcatttggctaaagatttcttagtttacaaagaaatgaggggggttcatgaggagcaacgcaatgccttagggcaatataacaagccattctcccatatgtataaccccggttggagaaacgacccaaatttcagttggagagataactccaaccaagctcagacatctggaggacaatggagaaatgagaatcaagctcaacctccacaggcatatcctacgcctaaatacaattctcaacaaaagggaactcccttgaaagcaccattcatgcattcattgaggaacaagcaaaaatcaatcgccaattaaaggaagatgtccaagaaataaaaagccaattttcaaaattgaccgcatccttggctattttcgagaaaagtagacttccttcccagcctcaatttaatgcacaagggcaacaaatggctgaaacctccaactctaatgatcccattgttaagggggttaacgccatcacaacaagaagtggtaaatctttggaagatccatctatcaaaaccactacttcaaatctaaaagttgttcctgacagtgcaccactcaatgctcaagccaaaataccgtttccccaggctcttagacttgttgggaaaattcttaaaaatcgagctgaactccttgagcactagacacaagtgaagattaatcttcctttgctccacgtcataaaacaagtttgagcttatgccaaaatcatcaaggccttgtgcactggtaagagaaagcatcatgtcaagaagactgctttgttgactgaacaagtcagtgcggtaatcgaacaaaagacaccgccaaaatacaaagatcctggttgtcccaccatttcatgccaaagtgggactcatgaagtcagccaagctttgcttaaccttggcgcgagtgtgaatctcatgtcttactctgtgtattcgcaacttggtcttggagaa

SEQ ID NO: 241041 - DNA, 710 bp, Cannabis indica
agtaagacaaatacacattatgaaaataattagttatatgaattatgatttttcttttcatttaaagtagaaattttacatccacaaaataaaatgtaaaaactttcataaattgtatgttaaattgtttctttctataaaaaagtctaaaaattattttaaaaataactacatcatcaatcacaagccccagtttattaatttcagaagttgttatctttttcttttattttaatataaaaatgcatgcaattttttttgttaaatccaccatttaatatttgttacaaaatcgttatctttttatgtaatttaaaattatatttttaatttcaatattattactttgtttataatacatttatcaaaatattatattttaaattatattacttaataagtataatatatatgtataatttataaaagttggacaataccgcgcgaagcgcggcttaattcccttgttaaattatagggaaacttatactgaaaaatggtccaaacttcttttatattgagacccagcaattttaatgataaaatgctataaatttattaggaatgtaacttttgtaagttttcgaggagtgctaccgtcaacttcttgttacaacctcttagtcaacctctatgctcgtaaatacatgttggaatattttttttcaattttttttttcacggggtgttcgttatgcttacaacatcat

SEQ ID NO: 241042 - DNA, 1043 bp, Cannabis indica
ttaggtgagcaaaactatatataatatatacatataactcatagattttgtgttactaatcacatctctcataatctatatggatatgattttatttagaatgaattatatatactttttcttacaaatcatcatataataataataatattttgaaggagagaaatggaagtatgtgtgtggagtatttgtgcaacagagcttgtgtggatgtgggattacctataccattacagcagccaccagtatcaggtctcttactatattttctctttccttactttctattctactcatcaaaaacccttgactgaatatgccaccatagagctaaagaagaccatatttaatgttgtatatatatgccaataatcaatcctacttgcccaattatgacaccattataattaatttgtacaaaagaaaagcatggactttgagatttcataatgcattgcattgcctttattctccctattagattaagagtattgatgcagctacaagtgataaccaagatattaacacttagttttttagtttgtacctttctattatatggttgaaaaaatagttagcctttttactgtaaaactcttcttctataaataaaaggtttttagctcattatcaatggacttaattttgttgcaaagcttatgagatttttaaagaacaaaaaaacatgccatatgatattacacacaagatttagttagtcttttcaattaagaattgcttaccatatttataataaccgaaatgttatgtcacttgatgatttttacttagcttgaatccattaactaagtagagacttatcaggaattattagcaactaagttaatttggtatctggtgtagagtcttctgttgtttgcttccttatattggtgatatttcaagcatttttgttatgttgatgcagagccattcaacggtcgagctgttacaacgaaggaggagaacaagcaacatgttcggacggacttagtctgtacatgttgctattcggagctcttcagattatagtgtcacagatt

SEQ ID NO: 241043 - DNA, 698 bp, Cannabis indica
aaggaaaggataagacatgtacaaagaggtatagaatatagagtaattaagctagaatgtcattttcatttgcattgttgtatagctgtttaaggaccttgtttggtgcatttagattgtaaaattggttgtgagcaatacaaactttctgtttcatcaaaaaaaacttactggttgaagttaaggcttagggcaatgactggttactccgtctgaaaatcttcgaacagagcaaggatcactttgagagagtgaaattggaggaaactcgtagcaaaaaggtcaaggacagagaaggcatgcaagttctcagacaaactcaacggtgatccttgacgaagaagcttaagatttttttcaaactttctaaaatggaggaaataatgcaaaggtggttctttttttcttactttatacccatgatagtggctttgttagatcaaagaagggcttgatcctacggacataatttaaagtggtagtggaaaagatggtcatttaattctgatgtaactcgaaactgcacaaccgccaaaatcagaggacatgcgtcttttcaaaaagtggagcatgatgaaaataccatttgtaatcattaaaaagctcttttatttaaaaagaacttgttagggggcaattattatactcaaaattcggtaagcacatcagaagaggacgtgtgtcgagcggggaagaac

SEQ ID NO: 241044 - DNA, 769 bp, Cannabis indica
tattactaaaatactaaaccatataagaaaatgtgactctaccggccaaacatcgcgttccactgttattgggcataaaatatgaaaaacatgaaatttcatatatatataccataaataatacacctagaattcaaatatatcttcataaatttataaatcataattaaaagtctaattttcgaattaaacactaattatctgctaattttcatatccaaattaagcggtctttacagtacatgcccaccataggaagtcaagtattcaatgatagtgtgtaagactatgaagaatccaacacctaaaggagaatcgggctcagagcttgataatactttgcgacagaaaagaacaagggttagagatctgaatagaaggagacatattattctgatgcaaacaatgtaaggttttttaactttatatgtgtttaaattccattgttttagataattcacatttagggtgttaatcaacataaatgttagtaaatctagatcttggtaaaataatccccaacagttacccatttcctaccaaatcgcacaagatcaggaattatctttctaaaatctcgaacaaagatcatatctttttaaataaggaaaaaaaataattggcaatcaggtaattaatacgtcattaactaaccacgaagatagaatacagttttgacaactagcattgtgttgtggcatccacatcaccatacacaaggcaccccatgggccggtaggaatggcaattatacttgcgggttcgggta

SEQ ID NO: 241045 - DNA, 596 bp, Cannabis indica
aggtttccccaaacaactccaaatttgctcaaaacttctctaaatgccaccaaaccatccagagtacctaaacattcttcgacaacatattcaaagcaatagaactaagaaagatacttaaaatcaaaatataccattaaagatctaagtttgagtttcaaagctcaaacttgtgtaattccatctcaatacatttaaaccagcatccagaactcaaaatcaacctaaaatggacctaaaaatcggaccataaccttacagcccctattctctaaaatcacaagttaaaaccaactaaaaccttgagaaattcataaacaaagagtgtctagggcttaccttgattaaaaaatcctcaaattcttgctgaaaacataaagatcagcagcaaattccataggtccttgctggttagaagagagagaagtgaaaagagtgaaattcctatttcttgatttttttttggctttttctcaaaatgaaataaggtttaacaaaataaacctttgctgaaaataaaataattaggtgtcactcccctaggcaaccaccaaatctctcaattgacaaattactaaaatgccctttttcttata

SEQ ID NO: 241046 - DNA, 792 bp, Cannabis indica
aacccgattccaacacagttgacaacacggcaaatcaccaacagtgtagtacactctcatcttcttccagacagatgggacaaagtagattaacatctactctcttggttttgagttgaaccaaagtaggcagacactgtgtacacgcccgccataacagattactaaacttagagggaagtttcaacttccaaagtttactcaagaaagaagcaatttcttcatcaaaccagttacttttttgcttctacaaggaattatatgctgactttaccgagtactcgcctgaaattttaaaagaccaaaacagatggtcagatgcagcagtgtcggatagaggtataccatgaatgagagactagtccctagcctcaaacaggtcagcaatgatctccaaatcccatcctaacccatccatagtaagcaggtttgccacagtgacatcaacaagaccagggtgagttgaaaccacccaaggattggtctcatttggaagccacggatccttcaaaactgaaattgaatgcccattaccaacacaccaacgggatcctgcacgaacaaggtcttgagcttccacaatactccaccaaatgaaacttggattagacccaagttgggcattgagaaaattgccatccacataatatctcgctttaaagatccttgataccaacgaagacggtctagtaagcaaccgctagccctgctttccaagaagagcgagattaaatctcgtagatctccaaaaaacccatgcctcctccctttttatgcttgcaaagtttgtcc

SEQ ID NO: 241047 - DNA, 1409 bp, Cannabis indica
ttagtttactggactcaactagttcatacggctgtttatctaataaatagaattccctcaatcattctcaaagataaaacaccattcgaactccttcatcataagccacccaagtatgatcacctccgaaactatggatgtctaacctatgcttcccacatcaatatatctcacaaacttgctcctcgtgccagagcaagtatcttcataggttaccctgaacatatgaaagcatacaccttgcttgacttacaaagcaaacaaatctttcattcaagggatgttgtcttctatgaaagcatttttcccttacaaaacaaccaaaataatcacaacatcagcaatttttttcataatccctcaccacattctgttgacacaaccactcttcctactcaagaaccaaagcaaactgtagaaaatatcactacagtaccacgacatgttacagaaaataacagcccatatattccaccccaaccacaatccaaaaccccaccaaaaacaaaaacagggagaaaaattaaaaagccaacatatctacaagattactcttgtaattccactacatatccccttgccaactatctttcatatacaaaattctcaaaactttttactgctgcattacttgctatagcccaatgcacagaacctacatcctatgccgaagcctcaaaacacaaaatatggaacaatgctatggatgtggaaatagatgcattagagaaaaatcacacttggattgtagttcctctcccacctggtcaacatgtaataggaaacaaatgggtatattgcatcaaatataacccagacggcacaacagaaagattcaaagcacggttagtagccaaaggctacaaccagcaacaagggatagatttctttgacacctatgctcctgtagctaaattcaataccttaaaattgctatttgctttagcagccatcaaaaattggcacctccatcacatggacataaacaatgccttccttcatggagatttacatgaggaagtctatatgaaactccctcaaggatacactcccaaaggagtgattcccaaaaatgctgtttgcaaattacaaaagagcttgtatggccttaaacaagcatctcgtcaatggtatgctaaactcagcaatacccttatcaatcaaggtttcaaacaatctcaaaatgatcactcattgttcatcaaacatcaatctggcaccttcctcgcactactcatctatgtagatgatataatagttgcaacaaacaacatgcctgccttaaacaatttcatttcaacacttgatgctcaattcaaacttaaagatttaggcagcctccatttctttctcgaccttgagattgcccgaaacaacaatggtatctctgttacacaaagaccattcac

SEQ ID NO: 241048 - DNA, 1744 bp, Cannabis indica
gtcctagtctttggttcgagtttgagttttggtttgagtgtggttctaggtccaggtcccgagtcacgggtcctgggttccaggttctgggtcgtaggtcctggtgcaagtttgagtctgggttcaagttttggtccgggtatcgatctcggtctaggtccgggtccgtgttctgttccatatctagatcaagttttttgtcaaggtcaattcctgttccatagtccttattccgattcttcttctgattttgggtctcgggtccgaggttgggtttggatgctttgtctagaaattgttctaaatttgggtcttggtatgattcgacgatctagacgccgaatatgggttgggccagctcccaatcttcggtcacgatcacgttccacttcggatcttgggtgtcggtctgtgtccgtgtccgggtcctggtctaagaccaagacttgtgtcgggtcttgggtcccaaccctattctaaagtcccgattctagttttaattttgagtttgagtgcccaatctatgtctgggtcctgggtacaggtctgagactccaatcccggtccaggtcttgggtctaggtctgtgtccaagtttgtatcatgtttgggttcgtaacctgagacccaatcaaagtttttattcgggtctgcgtcacagttcaggtctgggtttgggtcttagtcagattcatgttcccagactcaaaccaagactcggactcagacccaggtctgggttacgggtatgggtcttggttaggttctgggtctgagtccgggtcaaggtcttggttggagagtccgggtatgggtcccagatcaaaacacaaactacgagttaggttcaagcccctggtctagatctagttcacagtcttgggtccaagtctagttccacttcgggtcccaggtcccggtccaaattctaggtcagggtccgggttcggggtcagatcctagttctcaatcccagttctaatggtcgtgtcctgggtctaggtcccatatccaagttcgagtcctaggtcccagtccgagtctaggacccagggccaaggtccaggtgccccatccaggtccgagtaccgtgtttagatttgggtctgggttccgtggcccaggtccagataccccatccaggtctgaattctaggttccggtttgggtcctagtcccagtttcgatttcaattcagtgtctgggtttgagtttgggtctaggtctgggttgaggtctgattccttgtccgagtctgtgtctgagtctgggaccgggattggatcccggtctgggtctgagtttaggtccaggttcgagttcgggtctcgggtacgggtctaggtctgggtctgggtcagggtcttgttcagaatctaggtttcgagttttgatcctggtctgggtccaggcctcggttcaagtttaagttcatatctagatccctatctaggtccgagtttaggttttggatagggtcctaactctaggtatgggtccgagttttggtccgggtctcagtgttggtttgggtacacgacgtgtcagggcccaacttcaagtcacggtttgggtctggggctaggcccgagttcagttctaggtttgggtcaacttcctagtcatggtcctagtctggtcctgagtcttggttttagtccaggtcgcggtacgggttcaggtccagctcttgatccctatctttgtctgggtttaggttcgggcccttgtcagggtctggatc

SEQ ID NO: 241049 - DNA, 1430 bp, Cannabis indica
aattttaatacagtcatccaacagtaataaattaatccttaaatcgacccataaaaacataaataataataaaaaattaaaaaattaaaaacatgaaacttgtcttcccatccccaaacttaagataaaatgtgttcccactatgcaataaaattaaagaagagaaaacaaaccagagcagctaggactacgggtccatagttgtatcaccaccatcagtagcaggtggatcgccatcattaccagcaggttgtttatatggttgcagctcatcaagagactagaataatcagtgtatgatgaatggcgagcaaaagtggcataaaacttagcccttttttcagttcaatctccaggcaacatgtcacttattgtggctgacatgtcgctaattttttttttcaaatttgtttcacgtatttcatgattcctcgactaaataaaataaaaataacaaaaaaataaaaagaaataaaaacacaagttcaaaaataaaaactaaaaactaaaaaaacaaaagaaaagaaaagaaaaataaaaaaaaaatagtatgggttgcttcccataaagcgctttgttatcgtctttagctagacattattgttgcttcaagtttctttattacgaagctatttagtcaacactccactatcatcgattcatgccttcagtttacgcttgtgaacctttacaatctcacatttttcacttttaatacttacaaggtcagaaggaagtaactctctgactttaaaaggatttttccatcttgagataatgttacttgtcaatgatttgaattttgaatgaattgccaacacttgttgttctattgaaaactccttctttagtttctttttatctcgaggcttctttttcttttctttctaattagtctctcaatcgacttcattggagttacaagactcaaccaatattgcatatattctcagtattggattgattagaagacttataaatgtcaaacttgatttcttcatcattagcactcaaggttaagtgacctcttcaaacatttataaatgcaccaccagttgctaagaaagggcgcccaaggatcaatgacatatccttgtcttcttccatgtctagtacaacaaaatcagctagaaatactaacttaaccactttaattaggacatcttctcttattccccttggataagtgaatgattgattagccaattgtaacaaaattattgtggactttacttcacaaatacccaattttttgcttaccgaaagtggcattaaatttatactagccccaagatcacataaagatttctcaaattttaaatcgccactctcacaaggaattaaaaagctacatggatctttaagcttttgaggccgctttttctgaattacggcactacattcctcagttaagctcacagtttcataat

SEQ ID NO: 241050 - DNA, 1117 bp, Cannabis indica
aattctagataaagtgaagggtgcaactataaataccccatcaaacttccaaattgtaaccaagcttgagtagccaaagcaagtcttttactactagcctactaccttgtctcctctcttactacacacataaaaattaaaacgctacataactcttccttgtcccaccaatcatccaacttatcaacatcatcaaactattaactacatatccacctattctaaacaaaaccaatacaaatttattctcaaaccatcacttgaactgctccttgactgtagtacggtattgattccgagtctgtgtcatttattactgataagtattctgtgcttcctgctcttctaccttttgcttcaatgcctcatagtcttcaacgctgataataggctgcttagaggtagaacctctcttgggagttgcccctggagttgcccctttggtaccctaagtctaggcaaagggccaatacctctcaagtggcatgactgctcaccaagaacttgtgtataatttgtgaaaaactgggtgggatgtacatcatactgacgagggtgatcactcgacacaggttgagatttgcatctcttaaccatttgggtctaagaaaatataaaattacttacatacacttgttgcgtgtattcattgtgccaagtcttgttcttgtggtggaacttctcaaaagtattcgcagcactgggaagttctcctatatttggattagccttgtcaacccaaaattttttcctagtgacatggacattaatgtttgacacgtggctagaaggatggcgtcatgaagttgagtagacccgagtcatagtagttgacctgtgaggggaccctagccctgcacccaagttaacttcaagagccctaggatggaagttcatacttcaataactcgaatctaactcactagatgtaatattgcaaaaaatataattatgtttaattagacatattttattaaatatgtagttatgtgaatattaaagtaatgctataaccttactaaagttaattataggataatcagggacttttgagaaaataattaaataagcactactgcaaatatcagaattcacgacggtcctaaaacgatttttt

SEQ ID NO: 241051 - DNA, 1000 bp, Cannabis indica
ttcttagcttaataatataaataaagaccaaaagattgttttcaaaattaccaaaatggctcttgtagattccaatggttctagaagtaggtttagcttagggggcataagatacacactatatatttttttgttaaaagaaaaagactttgatgttgaatattttgaaataaataatgtggtgatgacagcaaagactctgtgaattttgctgagacatgctttgagaaattcggagacaaagtgaagcactggatcacatttaatgagccacacattctccatacaaggatatgatgttggtttgcaggcaccagggcgttgttctatcattctccacctcttctgcagggctggaaactctgccaccgagccttacattattgctcataacgttctcctgtctcatgctactgttgtagatatttacaggaaaaactacaaggtattttaatctatatatttataacaacaccattataatattatatatgttgtagtaactaacccctttgacatgcttatttgcagtctaaacagaagggctccattgggatatctctagatgttatgtggtatgaactggcatcaaactccacagcagatgttgaagccactaatagagccaagattttcagcttggctggtactaattattcaaattccaaagctactcctacattttaatttcgcattatattaacttgattgcaataataagtggattgtggtataacattgataccccgtacacacccgacaagatcaatatacttttggatgaatgggcggaattcatccagtttgagctcactaaaccaacgcaacattgaagctttggagctttttgtgtaggatataattttgttattgtaattagttctagtataaactgagtataagtactttgtgaagttgatatttttatagtataagtactttgtgaagttgatatttttatagtataagtattttagtatttaatttttgttgatatttt

SEQ ID NO: 241052 - DNA, 993 bp, Cannabis indica
ggactgccattagacaatcagagttccagctttggttttatccaactaagggcctcctaattccaattagctcaacaatttcaggggcaacacaccagatttgcttaaagcaacagctccaagaacagctccaaatgtgcacgggctaaaaaaccaaaaccaaaagagttgtaagcttcaaagatagctccatcaacatttacctttatcttgtttccaacaggtttagtccaatgctctacctctttacctatctcgaaggaagataaaagaagatcaaaacgatttttttgagcactttgccattgataaagattagaccttgctgacataaccacatccaaagcagcagtacttttttgattccagagtaactgattacgagcattccatattgcccaagtcaccattagagcttcttcaatctgccccgtgttgttactgatcattacttgctgtaaccactcgtgatacaccgtgctagcagctgaagagaagttgacagaggaacgatgccaacaggacctggcataagaacaatcaactaatatatgttgtatggtttcatctgcaacattgcagaaagtgcagaattgggagataggcacatgcttagtgttgagttggactttggtagctaaagtaccagtgagagctcgccacccaaattgtaggaccttcggctgcacattgattttccagaatgcagaccaaaactcagtaggcataccagaaacaatagagtgttcttgcatccctctataggcactttttacagaatacaccccagtcttctccctgctccaagtccaacaatcattctggacagtttggtaaaggaatgtttagaattaaatctctgtctcttacatcaaacatgtcttctaaaatttccttgtcccattgaagtcgatccatacacattaaagaagagacctttttattcacaaggccaggatttacagaacgcacataaggatcagtaccatctgg

SEQ ID NO: 241053 - DNA, 1155 bp, Cannabis indica
ctaaaatacatgattcaaaaacagaagcgttaccttcgttttaatggtctagaagtctggaacatctttcttctgaatgtcccttctctccacaatatgaacatagaagtgtatgattgctcattgtttcagttcttggttcaatttcgattctagcccttaaaattgaacttgaagaagcatcattgtcagaagctctattaccctcttcctttttctcatgtctgaaaaattggagggaggcctccttgtaggcaaagtctattcgtaagcacgcaattctgcgtccagcttatctacgtcgaataagtgaaaattgttgatcatgtatgatacaacaaatccattatacttaggtggaagactattgagaattaattgaacccattgctctattgataaatcaattcccaacaaatttgctttttggattatcatattcgtcatgattaagtgtgaatcaatgctcttactaggagacattttcacactataaagttcatttgcaaaggcatgtaaaaggtgaggattggggtgtgggttgttcattttgacactacaaatatcaatcaacagaaataaattatttggttcgattaaattcatacacaagttcaaaaataacaagtaactaaacatgtttgcaaaaataccaaaaataaaacatattcaattttccaaggtttccaacaaattgatacactgtcctgtttaggcaagagtcaaagatatcatttactgaatagatttgttagctcatctaaaataaataacattctagaaaccttttattcgatcgaaaagggaatccgacgttgtcctgtttaggcgagagtcaagatcattcttatttcatgagcttctaccattctttcataccttgtaagtcttactcttagcagccactattcaggtggacgttcctaagaataaaacacttacaaataatacttatctttcgagtttttactgcgttaaattgctaatgaacattaatccattagggttgattactcactaaaacaagaattatgtagaaccaacaatggagatcgaatatatctttgattaaagctcattatttaaaatatattttatctaatcacttattttaatctgtatattttcatagtgaaaactacttaatttaagttg

SEQ ID NO: 241054 - DNA, 1335 bp, Cannabis indica
agagagagagagagaatcctttttgagttgttaaaaacaaaaaaatatctcaaataatcagccaaaatcccttttgttgaaaatagaattaaagggtcaaaaagaccaaaatgcccctagggccttaatataaaacatagacaatttcaaaggcaaaaatgtcgttttcatcacatacatactcaaataaatttaaggttattcactcaaccatgaaatgtcaatataaaatcccgaaaatgtatttcggccccgaacccggttctgcccgaaatacccgattgtgactataccgccccaacttgtcagaaaacacctgtaaaaggactaacaagtatactatataataatatagtccataagcacacaattaaattcaatttatagttttacctctctcgggtcaaaattacaaagatgcccttggctcaccaatggggtcttatcatgtcatttctcaatttaattcacatataataaagtatataataataatataataaagtatataatatataattccataataaatacacatttaactagttagggtttgctaatccgattcttaatcttcgggtattacaattatcccctccttatagaaatttcgtcttaaaatttacctaaacaactctggatatttctgctgcacatccgtctcgagttcccaggttgcctcttccactttattgttcctccataatacctttatcagtgcaattgtattgtttctcaagactttctcccttctatcaagtatttgcaccagttgttcctcgtatgattagtctggttgaagttccaatgcttcataactaagaatatgggacgggtctgagatatacttctaaagcatcaaaatgtggaacacatcatgtacagctggcagcactgggggcctagtcaccctgtacgctacttgccatatcctctcaaggagttcaaaaggtccaatgaacctcgggctaagctttcccttcttaccaaagcgtttaatgcctttcatcggtgatactcggagaaataccatgtccttgatctgaaaatcaatgtcccttccctttggattagcataactcttttgtctgctctgagccgcgagcattcacgctctaattttatcaaatgcctcacttgttctctaaacagcctcggaacctaagaactttctttcacctacttcatcccagtgaataggtgatctacactttcttccatataaaagttcataaggggccatcccgattgttgcctgatagctgttgttgtacgagaactcgatcaggggaaggtactttacccatgatccttcaaagtcaagcacaaatgccc

SEQ ID NO: 241055 - DNA, 1627 bp, Cannabis indica
aacacaaaatcttatcaacaaagataatctattctaatttttcggtcagcattaaaaggcaaaaacaagaacaaaaaaattaatagagttttgttttcttctttttctcagtttaactcctacagtggatgatgccatctcataatatcgaaaaaataaacagttgcaagtactgcacacaagatccctcatccaaatcacaagaaaccaattcactcgcacacgcacacaatattgccaagcatgtctcatattagatcagcaacattcatcggcatttcgtcaatctgagtactatagtactgttcaatgtctctcaaaatcttaatatcatcgcttttaacaaagttgattgcaacaccctgcatgaaaataaaaccataattataactagaaaaataaacaaacaagtacttcaaaacacaaccaatccaaacactaaaatagaaacatatttggtattcttgacttgtcacaactttaatcacgcccagtagctcgtaacccccatttcttaaaattaaatgttcatcaaaatcgttttatttaatagtttttgttggcaaacatcatcgtttcattgccaagaacaagttgtgcccttatcaagatatcatcagttccaattacaaatcctaatttgaagttcaacggtgttttattctgatcgtagatgcaagctagaaacttaaagatgtgtcttctgcctagaatttggcaaaaacccacactaagaaatccaacaccaaaagataatattaaggaactagataaataccttgcgtccaaaccgaccagaacgaccaatgcgatgaatgtagagctctcgattgttgggaaggtcataattgatcaccaaggaaacctgaaagaaaaataaataacatgattaggaaaaccttagtttcaagagaaatattttagcaacaattttagaagatttaaaagacaaatgaaaattatcagctgaggcaattataaaagacggctgaactgccaaccaaataaaattgacagtactaagcacaagctaaaacgaatattcatatcatacccaattaaaatttctatcaagagtgttatttcaactttctatggaggaaaaataaaagctacaaaattgcatggaaacctaattttgctgcaggcacaatctaatagagggaagctcatgagagccaaaaaactttgcagagcactcgtcaagtgccaaatatgattcgttttttcatttcatttacttctattttacgctattcaaatctctgttcagactcttgtgtataaatacagtatttcgctgctggcaatatatttgttcaaccctcacaagtcacaaacacgcatcatcatctaagtaaaaacaatcctagtcctgaaatatccttttacactaaaggaaacaagcatttctcatgacatattccaaagtgagcaacaaaataaaagagaaagctagaattgttcttaaaacccattatataatacatcaaatctccaaccaatttcaatcaataacatctttaagagagcgaggcagtaaaaggttagttgcttgacaattagataggctttcacagtagcagaacatttctcaacagaaaagaaaaacaaatacctgttgaac

SEQ ID NO: 241056 - DNA, 1452 bp, Cannabis indica
ggtggttcgattcggctcaacgacgtcatccgtttcagatttttgttttcatttattaaattaatattattagtttaattccaattaatgtttttatggggttataattattagaagttcattccttaattaattttaaagctgtgatcgtgtttatgtgttgaaactaatttagtttttccattagtattgtcttttgacatagttcttagtcttgtctgttgacatagttttttaatcttttccttttagttttttctggttcgagtcttgtcttttggcatgggttgtgtagctcagaatcatcatggtgctacggtagaagcattcaagaggagaaagattggatgtgttcaacccgaaattactaagataataggcattaaagaagcattgagttggattgcaactcattcgtgggatagagtcatgttggaaacaaatagattggtgtgtgtccaagcgattcagagcggtattttataccttcacaatttgtgttttgtaaaatgatctgtaaataagttggctcattgcttggcaagagactcttgtttctatacaggtcgtgtccttcagttggttaaataagactgttcctctgaagtgtgttctattgttttgaacgaatttattaattaatagatcttatggtttttatttacaaaaaaaaaaaatcaactatattttaaaatgaaataaatcataattattaattaattttttgtattcttttactaaataatgatcatttagcaattaaatttttttacttaaattataaaatatctatagcaaaacatcttataattttaaattataacacatatgacctcatgatttaaaattttattacacatataacgttaattgtaaattattacacttatttatttattttatttaaaaaattaaaaaaaattcattaggaattatatgatgaaatgtgaaatgggttgaatgtgtattttcaaaaaaaaaaaatgtgttgaataagaaatgagtttctcagagtcctcctgcctccacccctctcgattaagatatgtgtagattttgtttagaagtaaactattctctattattcatcttcaccagtgctttagaattaagatatatgtggaagtctaatttttgtacaaaaaaaattattgtaaatattataattaaatgaatttctcctaaaaagaaattatcatagggatttgtaaataaaaataaaattatttataaatattaattaataaaataggatttgttaaatattcaaattaaaaattacatattttaagaaaataattaattataatgttaattctacctataaataagtaacttgctattacagaaaaaaaaaatataactacgaaatagtcacctatgtttatatatagggtaaataccattttggaccctctgttttgcaaaagttaccaattggaccctgtgttt

SEQ ID NO: 241057 - DNA, 1188 bp, Cannabis indica
aaaccaaatcgataagaattttcctgctcaagtacagcggcatcaacattaatcttgatggtttgtatctcaggtttaacccaaagctcattttgatcacctatattatcaaagaatatagatgaaagtgaaataatatcttgagcttttctccaatgatcaagagaagtaaatgccgataccataatctcgttcaaagagtaagtttgatttttccaaatttttttgttacgagctttccataatgcccagcaagccattattttgcacatgtcttcggtggcagcaaaagaaaaaacctgttcgagccatgaagcaaaggtggcgaagggagtttgacagagtacacctagctgatgccaacaagcagcaaccaaagagcagttaataagagcatgggaagtgttttcgggttgggacagacacatcgggcagagagtagatatgtttacatgtttagtgacaaggtttagacaagtaggtagacgatttgtcaaggctcaccacaacaagtttttaacttttggccgtatcttcagttgccaaagctctttccaggagccaaaattatttgctgcaggttgaggagctttttctttctgcagcagcaaataggcgctgctaacactaaaactgccattggattcaccaatccaataccagcagccatcttcatctatagagctgagtggaagtcctagattgagattggcatctctagggttgaacatatcgtgaaccaaatcataatcccagctagccgcaccagtagtaaacagagaagaaacttgctggtttaagaggacgggggtctgagttgtgacataaggttgattcttatcaggaagccatggataatgaaggatactggtattcataccagaccggattgtgcatcgagctcctaacttgattagcttttgagcactccaaatacttcgtcagacaaaactaggattggagccaagttcagcgttgagaaaatccgagtgagaaaataccttgctttgtaaacccgactagctagagtattatgattacataacaagtgccaaccttgcttagcaagcatagcaagattgaaatcacttaaatgtcaaaatcccatacctccaagatgtttatgagtggtcattcgatcccaagtcatctaaatgatcctgttacctttacttgaactagttttcc

SEQ ID NO: 241058 - DNA, 696 bp, Cannabis indica
attagtattaatatacaatatatgtattaattgtacaatagagaaggcaaatgaagaaacaatttgtcaatttctaatatgtctttactccaaaagtagtgcttctgttgcagatattatattctttaatttcattataataactaaataataataataataataattgtattaaacccatctgcacgtattatacaaataatatacataattaattaattattaaaaatcactactatactatatatatatatataattaatgtagctatatatgataacactctggcaagtggcaataaacacatgtacatgtttccattattagctgcataagctgataatctccctctttcctaggtaatcttatctttaattaattaactcttaattaattaatctctttttcatgtgtcttaattcattttttattttttaaacttaattactctacaactcctcattaatttttatcctatatatattcactccctcatctccaaactttttaaaacctctctatatctctaacaaaataatatggattatttctctgatttgtttgatcttgaccaaatcttgaattcataactagatcttttccatgggataatattgatcaagatcatcttcttcatcatgatcaacaatttgccaatataatcaagatcatgatgatcatgattattcatctcta

SEQ ID NO: 241059 - DNA, 891 bp, Cannabis indica
taaccatgctttccatgacaaagtggttcccaatgcaataggtgttttgtgcaagattaagaagtgtcttgcttctctttcggcattggagggggagtcccctgggtcgcacaacatcagggaacaaagtgtggatttggtggagtgcgagtttcgaggaaaattgtgcatcgagcggcgactgatatagtggttaaagatgctaaaggtcttcttgtggttgtgcagttcaactgtcttcctccgatcctttggaggctgaaactctggcactttctcaggttgtgagcttgtgcgtgtctcggggctggtatgactgttttgatttcgatcccacaaggcaccaattggaggcttgctcaaagttgttagagcttctggatgagatctctggtgtgaagttgctgtgggcgactcgtgccttcaaatggggaagctcataacttggcggcttgggcatttacttctgcttcttctggttttctttttcggctggggagttggctcttcttgtagccaattaatgtagtgtttgttttttttctggtcatgttgtaaaatccaatcaacaacatgattcattgttcaattaaactgtcctttttaatttggttttgtcaatcttcatttatatatgtaccaaattatccttctaacagtttatccaaatcaccaaagtagaacaaagatagttgaagattaataaatgaccagataattttttccttgttcaactacaaactctaaaaaggggtatacaatacaatgtaatttttatcaacacaacaacaaagtttaaacagattgactctaaagaaaaacaatccacacatcaagtttaataataacaagtacataaatcttgtctgtttttcaacctaatctgacatt

SEQ ID NO: 241060 - DNA, 1066 bp, Cannabis indica
aaaaagtcttcatctcgctttcttatagctcactattatattcgtattttattagttgccgaaaacctcggtcaacaagtataaataggtgtaaaaagatgtaacacctagttataacacttataagtcgagtcattattatattttattttgataaaatatttaattcaatttactattttgtattataaaacatatattattgatcatttaacaaaagcaaatattttacaacttttacatataaatagtatttacttatataaatttggcactccatgttgttaattagtaatcaaaatttaattgaaaaagaagaattaatattaatgtttcttttccaatgaataaagtggagtgcttttggttcttggagacagatgtctctactagatttgttcaataggtattatttgaaggattcaaaagtagcagctttaaatgatcacaaaatcctaaaaaggacaacaaaaaagtggttcaagcagttaaagttcaaagcttgaagaaggtgagtcacatgcaatggtcatagaaaaagttcattattctaaattaaataaattaccaaagaaactggagtcagacagttaattaatttctacataattttcacgttaatttctacatgttcactatctttgctgtccagtctacaatatgaaaaaacacataactttgtgataacctaaaatacgcctggagctgtggaacatgtgagcccacatgatcatcccattgctcctctcctcatataatttgcttcaaagcaaagataacatttacaactaactcagatgtgggaaaaagaaaaaagcaaaaacaaaaaacaaaaggtaataataataataatattattaccaaaaaaaaaaactttctattttgtttgtattttgcaagcaaatcacttgcgatagtcttcaacgaaaaggtaaaaagcccaagaaaagaaaaggagctgtggattgaacaagattttttctttttaattatactattattctataaaagtttggagctttttcatttttacattttcaaacctagttttttttttgtatttttt

SEQ ID NO: 241061 - DNA, 544 bp, Cannabis indica
ggatgtaggggatttagtgcagtgggctagaattctattgcaatacagaatgcacaatccaagagaattaatgctgaattagcctgccattcgcatgctacaacagagcagagccaacctaaaaaagggtattattaatttacacagatgctgccactgatacaaagcactccaagattgggcttggtgctatcattaaggactggactggaaggataatagcaggaattttattacctataccagctctggtctcacctctcatggcagaagctatggctctcaaatcagccctagattggtgctgcagtattcaaattccacttgcaagtatattcactgattccaagcaactgatcagcaaaataaatagctctaaaaaggagctttctgcccttcctaatattgtggaggatatcaagagttcctcgtcttatttccctactgcttctatctgctttgtgccaagagattcaaatacttatgctcatcacatggcgcaaaatgctttaggactagaagaggaattagtttggaaggattt

SEQ ID NO: 241062 - DNA, 1072 bp, Cannabis indica
accaccgcggacccaacgacttctccatcaacacgactttaccatcgacaatgttgtcaaagaaattgtatgattaatatttgttatctgtgagtagatgttagattttagggtaaaaaatggccagatatgagttttgggcaaaaaaaactatttttttgtcaagcccgatggtagtccaatgccttccagttgttaaaatgagtaaaggttgaagacgaaggtctgatggtaacccgatgatatggtccgatgggtgtctgatggtggtccaatggtgacctgatgccttcttgacaagcttaatgaatgagcttatcatctatagatgtagatatggtccgatggtggtccgatagtggtctaatgctggtccgatggtcacatggctactttttttttatgtacaaagacattaaaaaaaatgggtagcatcaggccaccatcaaaccctcatcggaccaccatcagtatagataggaacatggagtatggatggtgaagttagaagagaagagaagagagaagggtataatgtgtatgaatataaagtatgcctattttttaaaattttagtaagcttgtgtttaaaaatttaatatacaccaaatctatgcatataaattcaaatttccctaatatagtagccctaatatactttgccatatatattgtattgtgacatttcatttttaaattatatatttgttatttttatagttaatgtatatacaaaataaagaattaactcattatttttagtatattttattaatattttgtattcaattttatttcgtaaaaaatattctaatttaattttctattttaaattactattatatttttttatacttgatagctctttatattaaacatctttcaataaaaaaaatattatttatttaattaaattatataacattattttatttattgtaacattgaaaagtaaaatacataacttaatatcaaactaaatatttgttacttatacaaaacattaatcaagtaatatatagttttattgaatctacaacattagatgtatacaattttagacaaataatat

SEQ ID NO: 241063 - DNA, 1240 bp, Cannabis indica
aatatactatggtgtgaaaaaagattattatatactatatagggtcaaaagaaatacataacacatgatttttttttaagctcaaaaggttattataaagggtcacaagaaaaacaaaatgtcaatatttaggctcaaatttggtaaaattagggaattaacaaataggataggtttgaaaagctcaatcgataattttttttgcctatatcatatctcaaaatcatgtgtaatttatcgatttcgcctcaaatgattatcaaataagttctagagtgattgagactttaaattaaaagtcaagcatgcacttatctttccaaacattagcaaatatgatatttcaactgatgtgcaattttttttaaaaaaataagcttgagcagtaattaatcatggattaaacacacaaattatgagaatctatcattttcttaaaattataactatcacacaatcaagaactatcatcaacaaaattattttttccaagactatgcataagacatcaaagtaaaaatacatttcaaacacaagcaagtcaacaaaatttcattcaacccacactcactaatattaaaaccaaaaaaattaatataaactgaaaaaatgataaaaataagtaaataaacaactaaataactaaagaaaaaaactggatagacacgacaattaatctcttcccccacacttaatacacgcattgtcctcaaggcttaattaaataaaattaatgcaaaatttaaagaaaatggtaagaaaaactcttgtaagtttgctttgtttagcgtcgttagctcgactgtatgttgtgctcattcttcatgttgggtcttttaacaaagactcattctttatatatttatcaatggaatctaacacattataattaattactacaccattaaattctattgtaggtatccatactttcatatacaacttcttagtagtgagtaagaagggtctcccaaataaagttgatgtaggattgggatcaccctcatcttccatctcaattatgtaaaaattacctggaatgacaagtctattagcctgcacaaaaacatcttcaactatccctgacagataaggattagtttgattagtcaatagaatcaaaatatgagtttctcttaacaaaccaagatttaaagaagcaaaattaaaataagatatattattaataattactcctaaatctatcatgcaatgatcaaactgttggaatatgttttac

SEQ ID NO: 241064 - DNA, 1377 bp, Cannabis indica
atttaaaaagagattattaatatttaaaagattgtttatttaaaagattgtttaattttttgggtttaattattgggtttattttttaacgatcaaactaaaccaagaatgttaaatcaagaaatgccgttagataggcacttttaatatataaagatatagaagaaaaaaaataagcaaaacaacacaaaaacaattaaaagaaacactcaaaatcttacatccttgacattctttaaagatttgattcttttggccttccgagcctctaccttagatggtagaggcctttttttcgaaccagaaccctatggtacatcattcactggaccttctttttttgcaatacctttcaaccccattgaacaaacaatcacccttaccaagaaactatccaacttctttcaaagagtcgtttagagtcaattagaagaagcttgagttatttccatatggggttggtccaagttgcaatcaaacccttgtcccaagaaattctaccacttctgtcctaataagccttagagattgcagaatcctaaacttcgagcaatctatgtcgagtgttatggagactaatttctgtaatggaccagtatattttgataattatccaaattattgtgccattacaggatccactccttgaagccttgactcaagatatcaaatctggatctttacctgtagcattgacctatagagttcattacagggtcatgaaatttgttgtattcagtgacattggactgaaaacaagtaatgaattagtccaagactgcaggtaatgcatgtagatctaacaaaatctaggaaacaaaagccaagaatcattcgattagatgaagttaattttccagaataatggaagatacgtgatcaagaagggtcagcagttcttgcaaaaaataaaaactttgagaatgatattgattaataatagtgatgaattgcaagagtgagagagagagagataacttttatcatgaaatgtgctgtcataaataattttcaagggtgtcaacgtgttcaatgatttgtacttttaatttgatagcctgtctgtgtttgtaaattattttacaagttgtaatcctcaccaaagtttgatgtcaagtcaagaatcaacatcaatctttgttggtcttcatatggttagtaatttttaagtatccctatattccaagttctatactcaaaaccaatgatagatatactagcattttttttcaagaagaaagattatttgaaagggacttcatatagaagaaagattactcaggaggataatctccaatccaggaacaactacaactattttgtaaagcaaaattagtcatacgaataaccatgttggttttcctggttgataaaaaa

SEQ ID NO: 241065 - DNA, 512 bp, Cannabis indica
aaataactgtcaacctatattcatataaatagtggcagattctacagaaaaaggggacaaatatttttgagggaaaaagattattaattgtatattgtatctactattcagaaaaatatcataataagatagactcgtggagtatgcaaatttaactgcataactacgtaaaattcttagagttatttaatcgtttattaccatttctgtgatataattattacgtaaatacttattatttttagttaacgaaaatctgcgttaacagatttgtattacaaaatgtaaatatattaatgtgtattagtattgctattattttttttttgaattaaagttcgatcattcaataacaacataattcaactattacaatattctttaaattatagtagtatgtaaataaaaaaagctaaaaaaaaacttatgtgtgtatatcttgtcccacattactctcatgtgtttgacaattagataaataccaagtgtaattaaaattaatatatatatat

SEQ ID NO: 241066 - DNA, 1195 bp, Cannabis indica
gagtctcaattaccaaataatcctagtatatttaattccattgattattaccacgttataaatatagaatttgaagtactagtagattatagaatttatatttattgagttttactgcggtgcccattgatataatcgattctgcacatgacgacgcatgtggggattgttacaccttatgaggaattcattctctctctttagattttgacactcattggcgtcatggccaaagtcgttgtgataccgtcagaactttgtcatgtccctctagctcatctcccttttgatagtaaatggcttctggtaggggactgttccttgagtggccataaacatggcgtgaggttactccatcaaaagggtgaagcaagtatacttctccttcttgttcttttgtggcatggaagaagtgttgaacttcccttttttgccactcttcctcccagagctattggtgttgcgcttatctttagtgtttttgccactagaggtctgggcagagttgctggtgttggcctgtgttcttggtagctcatgagactacaatatgtctcgtgaatgcctgttgttgacatgccccacctagcctgtcgtatggcttcttcgagtttgataaagctattagctctatcgaggaactccttcatgttgttggttgagatccttcagatgtctttctagaagtcactcaatgggagtatgcccccagtatggttgtgtaccagctttcttctgtgaggccttggacttttgtagcctcagccatgaacctctggatgtagtccttcaaaagttctccttgtcgttgtttgacttcgacaaggtcttctagctgtaatggtacaagtcttaaagacaagaattgagagtagaattctcgagagaacttggcccaagaattgaatcttcttagggtgagtttgaagtaccattattaagttacttatgacaatgtggctgggaatatgcgacatcgcacatcaccagtaaccttctggagattgagttgcatcttgaagtacttgatgtgagccaacgagttttcttgcctggtgtacatattccatactggaatcttgaatttcagcaagggcaaggtatttatgtatgctaagaatggtgatccccttgaccgatctaattcaagatcggaaggcttcagaccagcaatgccttgaatcatgtccctgag

SEQ ID NO: 241067 - DNA, 1011 bp, Cannabis indica
aagccatcgcataagcagggatagcatgaattatagctttcaaaagaacctctttaccagctctagaaaaacatttagaagaccaagttctaaggaccaaggcaactttatccctaagaaaagaaaaagaatgaaactttgaatgggacaaacaatgaggaagacctaaatatttagatacaaaaggcttatcctctaaattaagagttttaaagaacatagtacgaatctcctgaacagtattaggagaaaagagaatagaagacttagaaaagttaatggcttgacccgaggccctagaataaatattgaagacctcttgaagagctaaacatgactctctatatgcagagcaaaaaagaagactatcatcagtaaataacaagtgagaaatcgagggagcatgtctagatatagaaatacctttaagaaactgagcatcttgcctagctcggaggagagcagacaacccctcagcacagagaatgaaaaggtaaggggataaagggttcccttgtctaagaccacgagaaggtttaagagagcctttaacctccccattgacaagaaaagaaagagtagtagtagctatacatttcatgatgagattaacaaaaccagtaggaaagttaaaatggtacattacactttccagaaaatgccattccacacgatcaaaagctttggccatatcaagcttcaaagcagcccatccccttttaccaacttttcgagaattaatggcatgaataagttcatgggcaataagaatattgtcaaaaataacacgcccagaaaaaaaaaaagcactttgaaaaggggaaataactttgtcaagaacaacctttaaccggttagcaatagccttagaaatgattttgtaaagcgtggaacacaaactgataggtcgaaaatctttcataatattgcatgtgtttttaggaatcaaaacaatcaaagtgttgttaatagcagagaaatcaacttgaccatttagacaatccaacacca

SEQ ID NO: 241068 - DNA, 2048 bp, Cannabis indica
attgcttctcttacaagaagtttccaaacaaaggaaagtccagctgaaaagttcaactttcctaagaaagaaaagagcaactaaaaaccgaatatacaaggtaagaaatcgggtatgaatgcaaaacaatcttaccataaatgaaaaatattttgtcaactaacttgccaaaaaaggactctacaatctccccctttggaactttagatgaacaaaatattttttaacacaaagtacctgcaaattaaagttagcaagaacaaataacaactccccctgagtatcacactcgaaaattaaaaacaacaaaataacatgctaacttttaatccaaataagttcacgagtaccaaacacaacttcccctagaaaaagggtccagagtaggtcaaaacaagcagttaaaaatcaaaatattactccccctttttgtttatctaagggccaaagataacaaacaagaaaaaaatagtaatatgtccaacaaaagcaaagaaggagaaagaaaaaaaaacttagtctctgaacgtcattcttgacctcctagatttctgcagcagcagaactcgagcgtgcagcagcagcagcaccagctttaggcctcttttgaaaaactccatcaaaatactccaagggttggaatgttgttccactcaatgaaggcttaagagtctcatgagattgggccacatttttctgagaggagaaaaccttaaagattaaatttggaaacacaagcttaaaagttggctttttacctcttcgaaatgagacaattcggttcaaaatgtggggatccaagtcaatagatgctccttaggtgatacggtagaggaaagaggccacatcttgagacaccacagtcttgtttgagtttggaacccaattgctaagagcaaatcgcatgagagatggatgagcaactgtgagatgtgtaatgcgaagactctccccccgatttcagttaagcctatgcaccagtgagttcagtgagcatcaattggcgatccatagacattatggtatttggaacattctctggcagttgcaaggcttgagaaatgtctttttcagagaatgaaaatcaatgtcctctaacatacacttttcaaaatagtctagaattctcatcaagaaaatcatcagataaattagcatagaaatctttgacaatatttgcaatgtaccctttgaatccagtgagaatgttctcccattgacggtattgaatgaacttaacaattccatacatcctatgagtatgcaaatcatagttcctttcactcttaaacttttgggtagcatataaattccaatcacgctcattatcacgatagtagaaacgaggacaataggagagagatgtaggaaagttaccaagagatgattccttcattggctgcttgcctttggcagcagcagaagccttggctgctgaagaggatcgagtaggagttgaagtagatttggtcaaacgaggctctggctcgagttcagtttcctcactgtctgaggaaacaccaatgtcctctggaatttctcagaatggagagacacggattttaggaatcaatggacgaatcctccatgggttcttcttcttcagaactcaaagaactcgaagggtgatttaccttttgtttcttggctggaggcactggcttgtcatgacttcgagaagatcgaagttccttctcgacagtagcttgctgggcacgagtgcgagtggaagggccagttggagtagaagcagcaacttcttttactgatgcatcaggaggagaaactgcagcaggtggaggagattcctttgaagatgaagacgatgaggtccaactcttgtatgggcgcacagatttttgagccacttgtttaggaattcgtttgggcttctcggcttgagattcacgctaaggaagcgatgaatctccagtttttgcagcagcaggaggcacggttgaagcagcaggaggagcattcgagggggttgcatcggtttcaaccatctttttgggatgccctagattctttgttctaaccatggtgat

SEQ ID NO: 241069 - DNA, 749 bp, Cannabis indica
gagcattttgacacggcacgagctcagaaggcacgagcacgaccagacataaaaatatatggacttgcgcaggatatgatacggtgctataaattagcatgacatggctcagaaaatatgtaattaagcacaacacgatgccagaagcacgaaaggcacgatatgcaaacacaaataaactagtccgaatggcacgacacacgaaaagcctaaaaggcacgacacaaaacaataaaaaatcctataatttaataattatagtaattatatatatgtatttgttaattataaataattttaaataataaaaaaatcaaatataacacttagtatcataattttataattaaaactattaaaaaaataaaggtattatttatatagtgtgatataaaaatttaagattttataagtaaatatttaaattcaaataatttaattatttttttctatgactgtttataaaatatttttgagaaattacataaatataattgaaactataaaatatacatataatttagtaataaactcattaattgtaaaaaaaaatatgaaaaagtaaaacatgaatttgagaatggatatgaaaataggctggcacgtttaacaaatccaagttattgcgacacaaaaatatcgggcctacgggttgtggcgggccgtgctgggcctactctttaaaaatagtagcacaacatgacacaactcatatttttttaggagacaatatgacacaatccatattt

SEQ ID NO: 241070 - DNA, 1296 bp, Cannabis indica
tatcaatagcttcattggtcctctgaaatacctctggacctaagtacttcctttctcccgtttcgtcccaatgaataggggagcgacatttcctaccatatagcatctcatagggagccatccctattgtactctggtagctattgttattagagaattcaattaaacgcaagtacttactccatgaaccttcaaagtccataacacatgctcgtatattatcttttctttactatttataaaaaaaattattattaattgttgttgatttctactagctaagagcactcttttagttactagataataaatagccaaagaatcaatgtttcataatacctatggctcataaaactttttattttatctcaaatatttatccattcatatatttatgctattgtcaggtgatttcactgttctaagtcaagaccaagcatatctaagaccttccacgaaaggcaagaccaagcatatctaagaccttccacaaaaggcaagaccaagcattccaaagacctttcacgaaaggcaaaaccacaattatttaagacctttcacgaaaggcaagatcttaaattcctaagacctttcacgaaaggcaaaacaacaattatttaagacctttcacgagaggcaagatcttgaattcctaagacctttcacgaaaggcgaaaccacaattatttaagacctttcacgaaaggcaagatcttgaatacctaagacctttcacgaaaggcaagatcatacatagctaagaccttttacgaaaggcaatctacgaaagaatacatgagccacattcgtaaatataagacgtaccgaagaccttcttaaaggcataacaaaacgagtcgcctccataggagattaagacgacatatcaaaagaccttcttaaaggcataacgaaacaagtcacctccatagtagattaagacgacatatcaaaagaccttcttaagggcataacgaaaagagtcgcctccatagcgaattcagccgacatatcaaaagacctttttaaaggcatagcgaaacgagtcgtctccataacagagtaagccgacatatcaaaagaccttcttaaaggcagcataaagtaagtcacctccaaaacaaatttagtcgaaatactgaagatctaaaatgcaaaagaatcgcatcaataaaaattaagctaacacatcaaaagaccttaagaacatatgaatcgcatccataatagcatattaaaaggctatatcaagtcctccttaaaggcacgtcagtcacacacaaagtgaatcaaaaa

SEQ ID NO: 241071 - DNA, 827 bp, Cannabis indica
agaatatggaaagatgcagtagtgaaagttggattgttagctaaaggaatttttattatcagattccagaacttggaaatgagggataggattctggagcagggctatgtgttttttgatcgaaagccaatggtgatgaaaccatggaactcggtggatgatttcaccaaggaagaagtcacctctgtgccaacttggatccagctgcagggattagatatcaaatattggggagagtcctctttgttcaagattgtgggacaattgggggatccgcttcaagtggaccaaattaccaagaatcgagatcgactccagtatccaagaatcctcatccaggtgagtctttctcaagagtttcctaaagtcatttcgtttattgatgagcataatcatgaaattgaattggaagtaaagtatgagtggattccattagtatgctataactgttcgggaataggacatgatactcaatcttgtagaaagaaagaaagtaaggaagagcaggtgaaacaggtatggatccctaaaaaacctaaagaaatggtggcaactcagaaggatcaagagggatttcagcaggttctaaaaggaaagagagtgatgatggaacaagagcatttaaatactgtgatacagaatagatttggcacactggaatttgtaacaagggagatcataggaaatgagggtaacataggagaggggggagttccctctacttctaatggatagattattatgttggaatgtgagggggattaatagccaacaaaagcataatgaaatcaagcaattggtttctttgaagaaggttgggctagtta

SEQ ID NO: 241072 - DNA, 1278 bp, Cannabis indica
cattgcaaaaatcattctccctagtgtcaatatgaacccaaatttgtttgcaccaaataaaagcctcaagttcagctttatagggtgagagataactagttaccagtttcgtgagcacccgaatcactctttcagaagcatcacaaataaccgcaccaagcccagtgaaaccgctagatgcatctacaaaattatgttaattaatattaaaatactaaaatattaattaatatattagaaactagcacacattggctgaaaggttctaaaaaaaggttaaaggagagatatcggtgttgggttctgtgccctaactaaaactctatttcaatgtaatattgaatattcatttatcaataaagaaacagatttatttcattacataattgtttaatgtattatttggtgcacatatttatttcatgatcatttgtttaatttataaatttatctaaatccatccttatttcattgatattcttgataactatgttgtcaacacagtagaaagtaaacaagattatgtgattaaataaagccctacgattttatcaatacacaggatttacactgatatgataatcatcagtaatgtagtttacttgcaccttggataagtgctatgccctttctagggtattggtaaagcaagcttggattggatgtattgttatacatcggattggacagatattgaacttggataagatatcataaacttaccataatatctatctaagtcaatatcacttagttgatcttagatcaatgttttcaatcttaagattgttaggttctagttaaattatattatttatgttctttaattagttcgttaaaattgaccaattggatcttcctgatacttacggattaagaacatggtagtttaattgagtgggagtgttaatcatagatacagaatctatagcttctttacactactacaaaattactatttagtgacactctttagtgactcacatttttgtgcgcgtcactaaaggattagtggtgagttttagtgacacgcacgaaaagactctaaacattaatgttagtgtcttataatttaggtcactaaaactatgaagtgtcactaaagagtaaatctcataatttttatcatttttttttaaaaaaatattcttgacgtataatgacacgccaaatgtgactagataaacatgtagccacacgtttagcgcgtcactatatcataaccataaatttaattaaaataataataaatactaaaaaaaaataacttaataaata

SEQ ID NO: 241073 - DNA, 1070 bp, Cannabis indica
ctaatccatttcttaattccgggtattacagctaagctcagcgacaatgggaataagagagttgcggtgtatgtgaaatctggtatttataacaaatatgtggaaattgggtaagatgtgaagaatttaatggttattatttagttttttgataaatgaaatgaaatgaaaattaggattttatttttgctttttatgttggtaatctcacattattagtgcccattaatggaggtaggtaagttagggaccctttgcgttttgttcatttcaaatttcactttggttgagaaaagagtactttttatatgctaatcaagaatagtaaattggtataactgttatattttttctttcattcattagtgaaaagttgtcatttttgtttaaaatctttggagctcaaagaatgagtatatatagtctggtaaattttaggcacttttgtatgtttctatagaaatattaatgttaatcttgttttgtgcttaattttatgcagagaataattactggcaattttttttctatttggtgagttttgcttttaaatcttacgttgaactgtttttttctttcaatttatagatgaagttgacgatcggtgaggcacgcggtgagatcaagtttttggacggagttgtgttgattttttctgaaatggtcaaatacatgtatatatagagatggtaaacctccaagatttctttttggttcttcgtatatcaatatcagcgatcctaatgccactcccaattgactcattccaatgattctgaagcctccacaagaaaatggctagcatcccactcccaatcgagattagcaatcgactccaatcgcctaagatcgctgccccagtttggttcttcgcctaagatattgttcctttgtcaaattcacacaaaagccctaaatcatcaaattttcttctgctcaacttgggtcctctgcccaaccccacttcgtcgattcattggcttcaggtattttgttatttttcatttctagaaatttcagttaatatacaaatgagttaagattctcgtacgtatgtaggaaaaatgaag

SEQ ID NO: 241074 - DNA, 1052 bp, Cannabis indica
gatgttaatgaaacatacttgttagtaaatctagatcctggtaaaacatattccaagatattcatgttgaattttaatgtttggaagggtgttttaaactctctgtttgatggttaaagtttaattgttgaattggaaaatttggttaagttttgggatgtattggataggtttgggagctgattttcgtgtttatgcttgcaagttttctaggtttgaaacccaggtgtcgtggcatgactttgagcatgctgcggcctgcccctgatgtgagacctgggaattggttccaggtgccgtggcatggcttttgcatgcagcggcgcgccctcgagtttctgggcagattcaagtgcaactttaaaaagtcataactctatgatctgaactcttatttaggagttctatatcttgttggacagctcgttccgagctctatgtggttatctatatattaaatgccatgaatatattttatgaatgtggaataaggggttaaccctatttgtgtaaattctggtattgtgactaggattaccggcaccttgtcaggagcactcggggatttggaatctctgctgttgcgggagatcaggtaagacagtagttagcaagtagagttatgcacagtggtgcttatattggaaatgatttatgtgagtatttattaaccaggattagggttatcaccctaacatgagcgacttaatagcctagggttattaccctagtgatatatgttgtataaatgctatgccatgctgaatatataagtatgttgagatttagggttatgcgtccaaggcataacaaggttggactcgataactggaaccgagatgaaccattctaaggcctaattatatttagacgtgtgagcgcaacacgtaggcctacattacgtaggcataaataggcatgtgagcataacatgaaggtctgtgtcgcacagtcatataagaatggcattaatgttattatagtgtgatgaacatgttattgttgggaatttatgccctaaataaaacacatttcaatctaatcttatttgt

SEQ ID NO: 241075 - DNA, 1285 bp, Cannabis indica
aaaaagggcaaaaaaactcatataagagaggccctgagaaaacaatcagagatgtgaataagattgactcgtgaactatgcagaatttttaactgcaaaaccacgtaaaaaaccctatgtttcatacttttattttatagctttttattttttttctgtgtgagattatcacggttaggctcaattttggttaacaaaaatctgcattagcacacacatgtattgcacttaaattcacctaattgaacctaattaaaaagaaaactaattatgcgtgcattgcacgtaccatcaacctagtcaatataagtgtagcaagaaaaaaaattacaagtatgagaaaagacaaacaccacttgttatttacattttttataagtagagagatgtattattttaaatatagttatataaccaaaaatattatttttattaacaaaaataatataatttaaatttaaactaactattcatatctcattaatatcttttattttatactaaatgtgtttatataatataaatggtttttaaaaaatattacaattcaaatttaaacgcaccccacatatctaaaaaaagtatagtcattttatactttatattttgcaaaacttaatgaatgggctgtctgttttgttaattgacaaattatattagtaaaaaaaataaatataaaatttgtaaaaaaaaaaacatctttctattattagttaatttttttttttttaaaaaaagttgtattatttctaaaaaataaaataaaatgtattataaaattaaaatattacaattaaactaaacttataatttatagcaaaatttaaatattattatatatatagatatatatatatttttttataaatatcacttaaattaaacattttttagtaagaaaatatagtgtttatctaataacattaacaaaaaaattaatacaactatatatatatataaccaaaataaaaactaatagtataattgtggtcataggcataattataatctagtatatatacatacttatattcatctctcgtattcttattctctcatttgattataatatacaatatagttcatataatctgatagtttcattattatgaaaggaaagattatctaccgttattattatattgttctcttttataacgccctaactattatgcacgttacccaagataatttaagaaactctaatcccctaaacgggattactaataaaataagtacgaaaattaaactttaaatgcaaaaggaatgaaaataaacttataat

SEQ ID NO: 241076 - DNA, 828 bp, Cannabis indica
ttgctattgaacacctttaattatgaaataacaatgtctggtaacccatgaggaccagcaccaccataataagaaacaaatacctacaaatgtatatatatttttgatcgaacgcataaccctattttaccaaaatatagtgactacactatttgggccaacaatttggttttcttataataaaattaaaaagtttgctaattagaattttacataccgaactttgtgttataatcattgggtacatgttatgggtataacaaagagaataaattaattcagtaaatttaagagtcggggtataattgtctcctcgcaatataaagctcatgcatgttcttcttagatacatcattaaatgtaaaaacactcaacataatcctgaggatgctaagcttgtcaaggcatttagaaatattcttagtgttaacattgttcacgatgaaaagcttaatttgcttaaacttgctcctgttcatcatctcagacatgttatccgaggaatatatgtacccgaggtatacatccaaaggttgacgaatttttcgagagccttgcatcaaaacaataaagtgtctcgataactgtatcttatagagaagaaagaccaagttaaataggacaattatattatttaaaataaaagtggttgcatgctatttcttgcctattagataaaatatatgaagcgtggggattgttcacgtttcataactgttgtacagattatataaaaaataattgatatcctacttctataaataacaatgatcacattgtaaaaggggacgactaattttctaacttagagaaaattttgctaaatta

SEQ ID NO: 241077 - DNA, 1401 bp, Cannabis indica
taatttttcataaacaaaaaattttgttatatagactcattttatttagaattgatatcagcttttcaaataaatctcacaatataaactatattgactaaatttttatttttatattggcttatttgaacggtaaggctaattattatataaacatctttttttttttatttaaaagtttttaattattttattttaaaaattatttctgaaaagtctattttagaagaaattacaaatcttatcttcttctcccaaaagactttttaattataaattgacttcttatatttttctatccaaacactaaacggaatttttttaattttttaatagaatgcctgtaatgctatattttgatattttatatatataaaaatcttttttaataatgtgttaaaatttgtgctacatttcacacatattaaaaattggaacaaatttaatataatatagcattgtgacaaatcttataacaattaatatacattttttatttatattattatcatttaatattaatgacttatttattatataatacttttaatacaatattgctattactttttgaaaaatattattaatttattgattatcattagtgataattattttttgtgacaatttgtgttaatttgttattataaattggagcacaattaaaatatggggaaattctataatgcaccctaataaaaggaatacaccgatacaattctatctgttttagtatccgaaaaaaatttttagtcaaattttttttcatagtcatgtaaattatacttatttaagacatcctgcaaaattttaaaaaatttagaaaagtttaacacgttgaaaatatgtgttcaagcagtgtgttgcacacgtgactattttattttatacgcatgtaaaatatactttgaacattgttttctatgttgtaaattattccgaatttcttaaaattttgtaggatatcttaaatagactaaaaattttttttgatgtcgaaacaagtagaaagaaggtgcattagaacattccttaaaagtgcattgtaaaatcaccctaaaatatatatgccatatataacatttactaatttattaacaaatttaacacatttttttaccacatgtattagctaacccaaacggtgtcattttacacccaatatagaaaagaaaagagtacactaaaattagtggggtgaaaatgtgatttcacagtaataaataataacagtagtggggtgaaaatggaaaaacgagaaaggtaaacggcgggcgaaagtcggagtcactatcggccaaaaacagaaagcactgacaagtgacaaagtaaaccaagtcatcctgttcattgttctagatatatattatatctatctatgtttgaaatttattttagtat

SEQ ID NO: 241078 - DNA, 1629 bp, Cannabis indica
ttgttcctcaaaactttctctcttctattgagtatctgcattggttgttcctagtatgaaagatctggttgaagttccaaagctttgtaactcgaaatatgagatgagtctgacacatatttccaaagcattgaaatatggaatacattgcatacagcttctagtcctgggggcataaccaacttgcacgccacttaccctatcctcttcaggatttcaaaaggttcaataaacctcaggctgagtttcctcacttgtcaaagcatttcactcctttcattggtgaaatacggataaatataatatctccaacaagaaagtcaatatttcaccactttggataacataactcttctgtctactcttggctgtaagcatttgagccctaatcttatcaattacttcactcattttctaaatagcttttggacctagaaactttgtctcacctaactcatcccagtgaatagttgatctacactttatgccatagagtagttcataaggggccatctcgatagttgactaataattgttattgtaagaaaacttgatcaaggggaggtacttaacccaagatccctcaaaatccaacacacatgcttagagcatgtcttctagaatctgaattgttctgtcagattgtacatctatctgaggatggagcactatgctgaatttcaactgtgtacctatagctcgctgcagactttcccacaatcttgatgtgaacttcggatctctgtcaaacactatagactttagagcaccgtgaagaataactatttttctaacatataacttagcatactgatcaatggagaaattttctcaaacagacaaaaagtgagctgactttgtatacatgtcaacaattacccagacagaatcatattgccttgtaatcttaggtaatccaaccacaaagtccttgtaatatctttccatttccattttggtaagttcaatggttgtaagaactgtgccggcctctaattctctgcctttacttgctgacatgtaaaacatgttgaaacatatcccactatatcgttcttcatacccagccaccaatacatggtcttcaaatcctgatatatcttggtcataccgaggtgaacagaataaggagtggtataggattcatctagagtctcttttctaatatcagcatcctcaggaacacatacacggttcgtacaccgtaacataccactgtcatccatagtgaaatctttaactttagcaactagtactttgtcctgaatcttaatcaaatttggatcttcatactcagcttctataattctttctagtaacataggttgtagggtaataattgctagttgtcccacaactaacttaatattagcctttgtcatctcatctgccaactagggccatacacgggtcgaatttttgggttttcgggtggtcgggtttgggttttcaaatttcaggtgttttaaaggtgcaaccgaacccgatttttgggtggccgagtgtggcaggttttaggtcaggtatggcgggttttgtgttgtcaggtttgggtttaatgggccatttttgaatgaaatatttttgggcctaaatgatattttgtttttaaaaatgacattttttttt

SEQ ID NO: 241079 - DNA, 681 bp, Cannabis indica
aggccttatattattataggcctcagactatgtctatttttttttgggcttgggtaattaagaagtcaggtttggtcattacttttattatttaacgcttgggtttttttaaaactttttatttaaatatggtagatttaattttacttattttttttaagaggaaattagactctctaccatttttatattgttttcgtttatttttactctcttttttaaagtcaattatttttacattttttttaaacactttaccaattttttcactgtcactttaatatactctccatgtgactttcttatatcagggtattttgggtacaatacatataaaaagatgtatgtttcaattaaatataaattagaggtagatttgattaattgataaataaaaatgtatttttcaatttaccccatttttatggtattttgttagttttaaacatttttatgagtttagttctaccataatattaagaaaacttacaaaaatactgacttttgacccaatctttacaaaaatactgccacacggcagaaataacttttatactatcttggccattttttttctctttatattgtaaaacacaaaaaaaaaaaaatgaagcatccatcttccacactcacggacagaaccaccagaggaacacctgaataattggaaaacaaccatta

SEQ ID NO: 241080 - DNA, 1337 bp, Cannabis indica
ttcctatgatctaaagaagacttcgagcaggatcaaagtggctagaaactccagtttctaaaatcaccattttcacattcaagaaaatagagtttttgagcaagtttcagatttgaggtgtttagttggtatttaaatttaaaggaggtttatttttaagcttaagagacattataaataatttggatgtgaagattgaagcttaaatgcctggaacaaaaaattccatttttgacaccattaatggcggtacaccgagataagaaagacgacttctgtctaccgtgttaaggctattttcttgggttggtttgcgtcgtgttgagtttctggccttcatgaaaacatcctccaattgacagaacatgtcaaaagccttggagaaggagttggcatctcgccgacgccgagatcgacgaagctctgatttggtactcccaaaggtgctaaacttgtttttttggcttttaaatttttttttttttgcatgttatattgatgtgtaatgacatttgtgtttaattttaattttttttatgtatatagattgatgtttatggtggtggtggtataagtatgtactcatgaagaagatgaagggaagaagaagaagatataaaccaaaaaaaaagtcagtacgtgagggaagagagagagaaagattatgtgaattttttttaaaaaaaattatttattttaaatattaaaataatttttttacaataattaaataattaaatgatttggaccaatatgaattgccatgtgtatatgagtgtacacatgacattccaacttggcatttaactaatgaaaatggatggaaaactaaatttgctaacagaactaaagtttggtaggtttagccaccaaaatttgaatttggatggttaagtgcaagtgaattgagagttcggagagtttagccgcaaaaaactcttttattaataaaaaaatatttttttaagaaaaaataataaactattttttagttattttataatttatttatacttgtattataattgtcatgagtttgtttttttttttttgaattattttatagtttatttatagttagagtaatttgcatcataacctctttaagtggccaaatttttggaactaacccccaattctaaaattttggtggtaaaacctcctaaactagcacttagccctttccatccatttttgggtgttaactgccaggttggaatgtctacgtatacacagtgtacacgtggcacaattttattggtacacgtaaaaaatatttaaaaattataataaaaattaattattttaaaaaataaaaaaataataaaaaaatttta

SEQ ID NO: 241081 - DNA, 1063 bp, Cannabis indica
taaccatttatttgagtaaagaacaaatttaaaatttagaatttagaatttatgacatacctttgttttgatatcaattttttgtattgtatgtagagtggaggctgacgagtggatctctaatgtcaattcaaaattgtaatcaattaataaattatatatatacaaacactattttctgtatgcatataaataatagaataacaaaaaaaattaatttcaatgtaaataccttttactgcagaatagtatcttgccccaaaaattttgaattgctaaatgtgaaagggaaataacctaaagattaatctaatttttttgttgccactttctctttcttgtttgcctaaagaaaagataaaagtagtgggctttgaatataaattgtaatagttaaataaatataatattaaataataaatatttattcaaaaggaaacgaaaaaaaaaaggtaacttctcttgtataatttgacttttctaaataagtgggtcccaaaattatttatatatataataaaggtggatattgttttacataatagaaaaaaaaaagctatacatgtaataattaataattataaaagtttgggggtggccaaggccacagtacatatacatgtacctccgcccctgcatatgaggtatcctgttcggactatatcttgcgggcatttactcagagtcgattccacgtgtcaccatcatgtgatgccacgtcagagtgcaaaaattgggataacaacatgtttattaagatttttagaaactaaatatttaagaacactaacgaaacaataaaacacataaataaagagatggagattttttacttgattcaggtattaattaacttagttcacgagttagtctattagcttcttaggatgtttttgatgtgtctacaatgtttttgtgggaaactctaactctgtactctaagtttcttgtgaagaagacaagagtgaacttaccagagtttcaactatgtatgacgtgatccccctccgtatagaaataggaggatattttaggctaagtagcgagtatggacatgcctatt

SEQ ID NO: 241082 - DNA, 943 bp, Cannabis indica
gaaacagagttttatttagggcataaaacccaacactctcaattctacttgtgcctgtactctctcgatcagtactacaacaagttccgtcccctcctcgcgctgatcgactatgggttcttgtgcatcccgagctggcacttgccttatcacgtaccgaccttctcccttgggtatgggttgttgcattgcccctactggggtttgtacgtgccccttccctattggttcaagaaggacgatgacgatgcctcggtggaaacccacctgtcctaggttgagtcccaggattttcctcattctcacaagggataacctgttccctagtcccgggtcgccttttgttctcatttttgtgagaaggttccggttgatcatttggttgttcatttttagggggaccttcagcttcctcaggttgttcttcctgagcattttgagggtcctcctgagccgtctccaccctcctggttcgtgagccgcgaggtcttcctcgtggtctcctcactccaggaccaggttggttttgcgtgttgttttccatgcggttattattatttgaaaaatcatacaactgtgatttatctacttttactgggtcaatgctgacaaggattcaaatacactacaatgtgtatctcactggggcatcttgctgggatagcaacaataaccctgacagcgagctgaaacttttcccatgtcttttccaggttgataatataaatttcgtcgttgctgcgattgaagacataacgctccatttgacaattgcatttcttggtgacaaggtgaacttcagtagtcaacatcatttgaatatcagcttctatttgagagagctgactcgatggaccagtgaatctcattgaaagatgtctagaaattatttatgaaggtaccaggattatgccttcctattgcgagatggatgcctcgctat

SEQ ID NO: 241083 - DNA, 1091 bp, Cannabis indica
ttacggtttgagtttctaaagtagttgcagctctagttgcaatattatattcaatatgtataacatttagctcaaagtaaattaatttaatatttcggcccccttattcaattctttattccgccactaaccgtactcattattaaaaatatttggaactcctatttattttttgaaaatatagattaattaattagctagttcttatttaacaaaataaaaaattagatggaccttttgtacaaatatctaatgatcaatgtaaatgattttttttttaatttctttttaaaaaaaaaagattgggagactgtattcaagtttgagactctttttttttttttgagaaaacatgtaatatcatatcatgcgacatcaatgttaatactaaaatatatgtttttttttttttgatgaaatcacatattctctctttctaaaagaaaaaaaaaatgttattttttgtcaataaaaccctatacaatgatttttcatttctttcctaataaagactcataacactgtaatgtaggagcctggtgataaagaaggaattttgggtgaattagttgatcgaaacccaataaaacgaaaagcagagcctagtgatatttcatcggttgtggcttttctttgtttctctgctgcatcttatgtgacaggccaagttatttacgttgatggtggatttactgtgagtggcttcccaaacccatctccagatcatgatgaggactagaactagaagattatatatacataaatatgcagtgtgtggatgcaacgctctacctcaaataaattagttcggtgtcttttattggtcgatacttatataaatatgaagaataattaataatatctatgaaactatgttacacttgcacgtgcgcacaatattatcgttttttatgggatttgcacgctagagcatctttaacgagctcattaaatttgatgttacactactaataaattgtgtgtgaaaaactatatttattccaattaggactacaaaaattgtattaaaaaaatatttcttattattatatttgttggattaaaattttattgtgggtacatatgtataa

SEQ ID NO: 241084 - DNA, 984 bp, Cannabis indica
aaaaaaaaaaaaaaaaacttggacaaaataatgaatttattggtcttcattaaaccagctcatcaactgctgccacataagtttcaacagttaaaactattatattatttgttataatataatgtagattaaaatattgaaatgtgatatattatatattaatatgagattaatgtatattatgtgttggaggttgtattatatcatagtacaataatacacataaaagttgtaacatatgaagagttataaatctgaaaatagattgtaacttaaggatcacaattgataatatgtaattaagtgagttaatacatatgatatggaacttatgaaatcaatggaaaaagtttctagctgttagaaattgttacaatacccaattatatcatttaaatgggtattgtgacgttggaaaaacatttaactcagagaggagttacaaaaactaaatattgagttttttgaaaacagttattttatggttgttaatatgttattttatggttgtttttcgaacacctggaaccagtttttgaaaacgtccataaacgtatatgaattgattgagcatgttttcagttctcttgtctaacgttttttatctcattaaataccaattaaagtgctggtaacaaccatgtagtaaaaagacactgattttcatatgtgatcctcaaaacattttaaatagaagtgttaacgcagatttttgttaacgactaatgagcctatttcgtaattaaacacagatataagaaatttaataagtagaataataagaatgacaccaagtatttacgtggttttgcagttaaatctgcatagtccacgagtctatcttattcaagatatttctagatatagaatacagtttttgatctctttctctcaaagattttccatctctttttctatagaatctgcccctatttataagaatataggttggcagttttttacatttaaatttgaattacataa

SEQ ID NO: 241085 - DNA, 801 bp, Cannabis indica
tgttatattgattatttttttggttttttaatttttttttctagtgtaactttatctagttataatctcacaattagaatataatttactttgtctcaagtgtattattggatagagattatactgtatatagatgataataacaaaatggaaagaataaaagactggaattaaacttacataatattttacattgtagttgtcctatcaacaaatctaaaaatctaaacaaaataagaaataccacattccacacccatcgtatgtaatattaatttgtctaaatctaagtttgtgtaaacaaggtaacaagctcaggttggcaatgggaacggaatttgaccccacattcattgaagcaccagagcacaggcccaagcccacagtcgtcgaggcccaaggaacaccagtgattgacctttcggccaggcccatcgatgacctcgcgagggagataagcgacgcatgcagaaagtcggggttcttcaaagtgatcaaccatggagttccaccagaggttcgacagaagattgagtcagcggctagagagttctttgcgaggccacaagaagagaagatgagagtgaagagggacgaggtcagggttttgggatactacgataccgaacttaccaagaatgttagggattggaaggaggtctttgattttacgctggagaatccaacctttgttccggcctcggtagatcctgatgatcagagagttaccacgtggcataatcaatggcctgacaaccctcctgtgttaaggtaatttttagtgctttttaaatttttatt

SEQ ID NO: 241086 - DNA, 745 bp, Cannabis indica
ttatatatgataatttattttcacatataagcaatgtgagactaaactctaataaaatagaacaatagaggttatatatgtatatgttttgattagtacctggatttctaacagtagttctaacaaaatgaccattgtgtaataaggttttgacaaggtgagaggcaatgaagcctgttcctcctgttacacaatattctggcatctttcttatctttcaaatttggcttttgtttttagattatatattcaaatttagtttttgtttttagattatatataggggtatttcatcttggttgtacaaatattataagaacaaaataaagattactttttgaaaatggagaaaagtcaaatatgtcatgcatcggatcaatgctcttgttttatatattaattaagtaccaccaataatggtagttaattagaatttttctcccttgaattttaacatatattaaatcatgtatttgaatttttttagtggttaaaattttttcctaaactatttagattattgaatttgagaattattgcccaatttaatttaattttataaatttggtgattatttatatactaaattatgctttctaaactttcatatctactaaattatgtctttcaaattttgtacatgtattaaattatacctcctggactttctatctatattagagttctcttactaaaataggataagttgtgtattttttattacacattaatcaaatgtaactgt

SEQ ID NO: 241087 - DNA, 1394 bp, Cannabis indica
ctgtgcaggaaagggtaaaccagcttgtgatcagccatgagttcgaggacttggcggtggattgtacatgttcgggccacactagaccacacgggttgggtctgccagctgttatatttgtattctcggttttgtcgcttaggtcaacatgttaaaatgacttgtaatattttgtgaaaacttttatgggatcccggatcatgtgtaatattttgaaatagtttgtaaagtttaaataattacaagttaaatttttattccttaaaggttttaaagtttaaattctgctttttttctaataatctcagattagcgggattatgctatgtttatcgaaaaccgtagcgtgcctaattgctagggcgttacaacctgagtagaacaactgcttgacgatttataggctcctaaataacaatattcataaaactgatgagtgccatgctaaatcactttttgggaacttaaaattaaaactaaaagtttccctatcgatgaatagcatagtaataccctaaatgtcgcaaaaaggggaaaaattagggttccctaaaatgccccaaccaacagaccggttccccaaccagaagaccagttcgaaggggtttcttggggaccaattggaattctggttcctacaggtcccactgaaccggtcaaccggttcagtgtaggaaacacaaaaaataacacaaacaccacaatttgaccccaaatgctacgaaaccttccagagtacctatttacattacactaagaagaattcatgcaataaaccaaccaataacctctatagaaaaattcaccatgtgagagaaaattttgagctctaaagttcaaactttattccaacacaccaaaaagcacccaaacagactcaaaccagcttaaataatattaaaataacctttgaatactaaatcaaacaccaacaacaactacataacccttaccctaaatatcatgcataaaacttagcttgaaactgaaggaatcacaaagagatgaggttgggagcttaccttgggttaaaatcactacaaacttgctagaatactcagaaatgagctgaagaaatcctcaaagtgctgctggtttctcaaggatttgagagagagagagagagagagagggtttgaagagagagtgtgtgtgtaatgcttctaactttgaataattaattaaaatataatgtttatctagtaaaatcctcaaataacattcagcttaactaattttaataatattccacaaaaggacaaataacatctcatggtaaatgactaattttcccttgtctaagccaaaaaataaccatgccacctaggggcattttggtcaacttattacctcgagtaattttgatattcccaatgtctatctttattgcaccg

SEQ ID NO: 241088 - DNA, 982 bp, Cannabis indica
atacgcctaagttagttagggtgttacatttggtctggggtcaagtcttgggtctcagtgccaattctgaagcctgattcccgagtccaggtcccccatccatgtctcggtcctaggtcctgatccgagtctaggacccagtagagcttcaagtcctagttcgagttcgggttcgggtttcaaatcccaatcagggtccagatctgggtttgagttccaagttcgagtccagatcttggtccgggcccgggtcccgggtctaggtcccccatctaggtctaggggtttgagtcctggtctgagtctagagttgggtctgggtccaagtccagatccctgtctcggtttgggtttggggctatgtgctagtccaagtcttagttacgggtcaaggtttgggtctgggtctcggtccggatccaggtcccacgtgttaatcccgttctgggtatggatccgagtcttggttcgagtccacgtttgtatttagatccatgtctaggtccgagtctaggtctaggatcaggtccatggttcaggtccgacccgatacccgaccctagacctagaactgaaatcggaccaggattgggactgtaacaggacccaaacctaaacccaaactcaaacccgaacccataccgggtactttgaaccagactagcacttgtgacctgggacctcaaccaagactgggacctggacccagaccgggactaggacctagacccagacccaggaccccaaaatcagggccgaacccaggacccaataaccagactcggacctaggacccgaaattcagggctaggctgggactaggacccgaactgttacccgaagccaaaccgggacctggactcggactagacccgaacccgaacccggacaaggacctaggacttgaatatagatgggggaccttgacctatgaattaggccccaaaactaggccttagaacttgggccttagaacttggat

SEQ ID NO: 241089 - DNA, 779 bp, Cannabis indica
ggcataaaacccaacacttcatgccctgttcatgcagtctcgactaatcagctgaaggttatctccaactgtgaaattgcaaaggatgcttgggaaaaattaagaatcaagaatgaaggaacagaagcagtcaagaaagctagattgagagccctagctaaagcctttgaaaacctgtcaatggatgaggatgagtcagttacggattttcatgccaagctatgtgacatttctaatgagtcctatgccctggggaaggtatattcaaataaaaaactggtgagaaaggttcttggtgccttgccgaaaaaattcatgtcaaaagtcacctcaattgaagaaagtcgtgacatagaagctttagaccttgatgaactgattggttctctgcagaactatgagatgtcactgcaaaggtggtccaaaggcaagaaacagaaagatcttgaaaaggacaagagtgaaatgggagtcgcctttgttcttaaagaagattccaagaaattgaatgaatcagctgaatgtcccgtggatgagaactttgcccttcttgcgaaaaattatgccagatttttgaaaaagagctttaagaagaactcaggtgctggtaaagaaaatgctagtggcaaaaaccagtccagctttaacaaggcttctcagtcaagtgatgaaaaaggaagagggatacaatgccatgaatgtaagggatttggtcatatacagtctgagtgtgctaacacgttaaaaaagaaaaaggctctcacagtgacttggagtga

SEQ ID NO: 241090 - DNA, 1479 bp, Cannabis indica
tattaaattattaattaaaaattaaaaatcctagaatttttttaaaatttaaactctcagattcttttttattattattttttataaatttattttctattaaataatataaattaaatgctgactttctctggtttttctctctagcagctgaagctggtgccatggcaaaaactaggtcgaaacatcaagggaagtcgaagaactcatctgtgaagcagaaaaagaagggaccaacctctgtatctgatgtaattcgtacgaaatcgatggatgttgtattaggtattaatcctcttgatttatctgatgaagatgatgaacctgatgcgattcaaagtcgatcctcccctgcggttcaggatttccaggagccattatcgccaagggcgtcgttgagggagataaggcgcactgaagatgcgagatcatatttcttacactttgttcaagctaataatcaatgtaacagtaatgctagacaaggtatgctttcaattccccctatactcagatctggtactgttattaggaatttggatcaatcttttcaacaaattgagaagcctgtcaaggtcaaaattgaattggaagacattgaagaggagatttcttactggaacccgtctattgtctgttatgtattgggatcaaatccccctctacatatcttagatggctttgctagtagaatatggaaggagaaggtagataaagtcaaattgctcacctatgggatatttctcattaggtttcattctgtagaaattcgggatgagattctgaatgggggatatattttcttcaacaagagaccagtaatcatgaaaccttgggatccaaacaccaactttagaagagaggatgtgaaacaggtccctatttgggtgcagcttgaagagcttgagcttaaatattggggccaaaaatctcttttcaagatagttggacaggtagggaaactaatcatggtggatagtgtgacaaaagcaagggaaagattgaattatccgagagtgctaatcgaagttcaaatgaaccaacctctgcccgatatgttggattttgaggatgaatttggaatgaatgttagtgtgggtataaactatgaatggaagccaataatatgctcgaattgttcaggtatgggccactctacggctaattgtaggaagaacaataagtctaagcaggagtggattatcaaggaagacaagaggccacaaaaaccgactgctattattgatgcagaaggttttcaaactgttcaaaaaggaaagaaatctcaggtgcaggggcagtcctcagttaccacgattggaaatggatttcaggtcctctcggaatgtgtagacatggagacactagctgatgtagcagaactgaatgtggaaaacagtgactatgatattgctaatacaagagagggggggggccctctcttggtaatggataaggtcatagtttggaatgttcggg

SEQ ID NO: 241091 - DNA, 1151 bp, Cannabis indica
ttttattctattgattaatacgaagtttcgtaagaaatagattaatgctcatattttcatgcactccaccaaatacatatatatattatatatatatatccctgacaaaacagcatcaataacatcaaaagagctcgagtgataagaagacacaccaacatagttgagcatgaaatcgtatgccttcttagtttcttcttgaccttctagccctttcttgtcattgctctttcttatgaacttaatgtagcatcgcctacaaataaggcacaagtgaaaaatgaaaacaaaatgcagctcggtttataagcacaacatatatactttatctccataacatgaaagaaaccatagtttactgaccaacgctattaaaaaaacataccaaagaggaacttggagacaattcaataaacaacggctaaaaatctgtttagtagcatcatcattattaacagccatgtgtgcctctacatactgtttccaatacttcgcctgaaaagaatggtatacatcttcatcaaccgaatataattccgcataatactattggaaatgaaaacccgccattgtgttttttataggaattttctctattgattgacaatagaagtgaacaagaccaatttgggtattcaagagatcccccaagagctacttctcaatacaaatttattctccacacccacaaatgaactctctcccaaaggtgtagcattaacctaaccacactctaactaactctctccctgctctcttaagctaacttttgggagtgagttctatccaagtggttaaaacaaatggtatcaaggccatacactatcaactgggactgaccacgaaaagggcgacctatagaaggggcactctgtggaaattggaaaagcccagagtgggccaccgcagagtaggccactgtagacgtcaaatccaaggagtggtaattttgactaagaacaggactttttcaagaaggaaaaaaacaaaaagagaccacttgtcttagactgatcatccccaatcatgtattaatactctcactgaggaaaaccgtaataaacaaaacataagagtatcgtcaaaacacgggattgtttggtggcatataactattttggcacccttccctcttaagctagctagctttt

SEQ ID NO: 241092 - DNA, 1000 bp, Cannabis indica
acaaaacacagggtccaattggtaacttttgtaaaacagagagtctaaaatggtatttactctaaaaataataaattttgggtaaaagtttaaattatactgccacacagaatatttttaaaaaatattgtcttttctttttataaaatagttgtaaaacaataaaacagaacaattaaaataacagtagaataactaaaaacaactgtggaacagcaatgaaacttaatacattgcacagtataaaacatatacagcatttttttaaaaaaaatttgctcggcagtaaaaaaaattgaaaattttagaatgtggtgtaaaaatccctaaaattaataatctaaatgagccaatttttcattatacttcaaattactcctctcattcaaacacctatccctctctctctctctttcgctctcttaccctcttgcttgttctctcgctttcaatttcacaacttctcacctaaaaccactgtcgaaccaccgtgccaacctaggcccatcatcgtcaaactaccgtgccaatccaaaccaccgatcgattacccacgacaccaaaatcaaacacctttaagaccccacgacccacatcggagcgaaaaaattcgattacccacgacaccaaaatcaaacacctttaagattttttttttttttgtgtttttagtattaaagaattaattttgctttttgtatagtggaataggttttggttagatttgtcatgtttttagcacaggaaaaattgaatttgtgataatagggtgaaatttgtgtttctgttttttttctttgagtttcgtagtggtacgatgatctccaacataagtacaatataggtctgatagtgtcgtattgagaaatgcaattgcaggttgggcaaaactaggataatagggtacgatatacgtccaatattggtatgatagtcttaggtagaaataaatttaaggttgaagatgatagttcgatatatggaacgacagggttatgac

SEQ ID NO: 241093 - DNA, 1378 bp, Cannabis indica
tctatagtgtgtgtgtgtgtgtgtgtgtgtgtgtgtaattttaatttggatcacatatgtagatagacatgtagtaaaggtgttgcgtataattcaattatgcatgactggaccgatatgtaatataatctttcattaattcatttaccatgaaagagttattcatatcacactgatgatcacagtagatcagtttgaatcctaagtatacatgaactcctagttgtgttcattgagttatttgattcactcattaaagtttctcagagaagatgattgttacaacttctattttgggagcttaataacatgagtggttggaaacatgttatgcaataatggaatccaaactttcctagcagatcgaatattagttctcttattaattctgggagtgctaacaattagatctgaatctataataagttatagattaactgttcacattgatataatggtacataagaagtcaagagataattataagggtaaaatagtaattttgaccaactctaattatgaattgataattggaggatgaactacttatattgattagatcagtgaaaaataagtgagaattatgtaaatataattctatatttatagtggagtaataatagaattaataaactagattattctattgacgagatcgataataatcaagtgtttattggagcttcaaaatataagtccatggtccctaagtcacctctatacaacaatgtacaagggaatattttatttgatgagtaaatttgagtaagagttaatttctatgagaaataaattcttaagagttaaatagtaattaatggaaattattgttttgaataattacgacaattatgaattgtataattaatagtatttaactattaagttttattacataaaactacattaataagttaaatataatattattcttaaatcatattaaagagagaaatatattattttagcaaaaataatatttattttaatcgttttaaaataagagattaataagaattaatcaattattatttattgatagaataaataataaatattatttgtggtaaaattgagaaatcaatttcggaccttaaataatatgacccacacatgttaattttatttgattattttattggttaaaataattcaaattaaattaaccaattatattttaataattgatttaaatatattattagataatttatttaattaaaaagataataataaaataaaaaactttaactgatttctgttattcatttataatattatatatgtgatgtatatcagtacaaactaacaaccttaaaaagtaaagaagaataagtatcaggtttgagggaaaataaaattgattttttcactctca

SEQ ID NO: 241094 - DNA, 1555 bp, Cannabis indica
ctaatccaaattactaaagcggtcattacatctacatttagttttatattagtaaaagtgagagtttcttgggattttatgccctaataaaactcattcactataatcagatttactaattcatagaacaccgtaaatcattttatgttgcatggttcacgtgattaatttcatgattatatgtttagtatataaattctattaaatcctaaacatataaaaaataatcatgattatatgcttcaaactacttagtcccacgatttattagtgcactagatttacactgacatgataatcactgatgtggtttacttacgcttgaataagtggaatgtccttacaggtcattagcaaagtaaactaggattggatgtaccgactatacatcacattggaccaatattaacagtaaaaaagatatcataaacttaccgttttgtcttttctaagtcaatgtcacttagattatcttaggtcaattgatctcaatcttgagatggttaagttctagcataattatgctatatgggttctttgacttgtttgttacagttgatcaataaaatcgacccaatacctatatcttgggagctcggtagtttaattaagtgggagcgttaatcatagatatagaatctatagcttctataacttttaaaagtgacacaatagtctccttatagcttggcttaatgcaataaatgatagagtactcatttcagtaattatactagtctactaaaatctattaggctttcgggggccaatttgtagcctaaatcatgttgtccatgtgtagaagtgcacagaaaaccctgtaggcctttccctagtcgacatgactcctacagggaatagactggtttgccatgatgttttctagaggctggcctgccatagggccggctaggggtggccggccagcttctataaaggagctagtctgtcatttgatgcctgtttgagtgtcgggatccctatttgcttagattctaacttggccttcttattggtgagttgtacttgcaagtggtactgatttcgcccacataatcactacaacgtcaagtgggaaaaatcgggataataggaaccaacattcgatccgttaagaaagttaggattccataagtgtagatcatcttcccaaccatacacattgctaaattccctaaatagaagttttaagaataatcttctttgagaaactttaacgagtgaaccaaagaaactaataacatgaacttgagttcatgattactaaggatttaggtcgatctactatttatcatcattatgatatcaattaggtctttatagtaaacggtaagtttgataaagacaactttcttcatattggtccttgtcatatataatctctattatatacaatacctttatttttatgtcatagtacatcagtaatctgaaccgatattccttgcaccgaagaatgagcatcagtgaattttactagcaactattgattaaagattcccaaattttaatatattgctaaccattttatacgtaactaagtgatcttagttct

SEQ ID NO: 241095 - DNA, 1243 bp, Cannabis indica
tgattatcatgtcaatctaaattcgtgaactaacaaatcatgagaattaaacttttgaacatataatcatgattatgttctattgtgtagacaacactatcatcgtgaacaaatatatacatatttatatatgttatggacttaatagaatttagacattaaacattaatcatgaaataaattatgtgaaccatgcaacataaaagtgatttttgatcttatattcattagtaaatctgattatattgaaatgggttttatttagggcacaaaatccaacaaaattaaggtatttataggcttacatgtgggcaagggcattccctttacccacctagggttttgtactcaacatgctgtaagggctgtcactacaacatgatgatctgactgttggttggtaggaaacttccccatcgtatggtgtcgactgtcgtgaatgatcttgtatggacagggacacgtgtcactcaaaggtttcaccttgaaagtttgatgcctagacaagccattagacaaaaaaggggctttagaggaacgtacacgcactaccatggtctgacgtaggggacaagatctgattcggtgttagagggtggataacaatcactttaggttctagatagggtactgtcaaataagctctaggatcaacgagtaaaagccttcccagataacactgacctactacctttctggaatacttgaagctctaagtaactctgatccttcccaattacggatggatagtaagagtccttgagccctatccgtacacgctcacattagggacctttgattggcttccaaaatataataatcttcagcatcttcaagcgataagcatatattgatcatagatcatccaaagtggcacctttacgtgattgtcatgtaccaggcatctgagaatacggataacatttaaccccaagctctcgagacttttgagtggtgggagcttgtagcttccttttggatgcttgatttattattatggtatgccaaaaatatcttgaaatgtggaagtagccttctgtagtactttggaaaagagttgatatgccatgcgatacaaatgtaattttattgaaatgtggtgtccattttgtgaagttgtgggactaacgtgccaggccaagtgcgttccttgtgggaaatgaatggcggctggacttgaatagatggtaggtttgtggtacgttggtctttccttcgcaaaatgataagtaatgaatgcccc

SEQ ID NO: 241096 - DNA, 587 bp, Cannabis indica
gggtcaccattgtcattaaggatttgaagaactaccgatgagacaagatttcccacaatgtgccagtgatggtggtagaacatggccgacataccatctaaccccggacttttatcagatgccatggatttcaaagcaaaatagacatcttccttagtaaagtcacgaaggagaaaatcattttggtcatcatttatggtagtaaggatagtagatagtacatgtgagagagtccaatgatcttcctctgaagcagtaaaaaggtcttgaaaataatgagaaataatgttcgtaatcccctcacaattagtaacaagattaccattagcatccttcaaagatttaatcttgttggtggaatttcgagcactagctttggtatggaaaaattttgtgttgcgatcccccgattttaaccattcaatacgtgacctttgctgccaatattgttcctctttagcaagaagttcatccaagattgattcggcagtggtgagattgtgagaatgtaacaaatctgtagctggagaggaattaatactgtgaacccgattttgagcttgtgaaatatcatgttttaattttcc

SEQ ID NO: 241097 - DNA, 1668 bp, Cannabis indica
atcaacttagaagaagcccaaatagtggcttacggaggatactacccgaccagagttgcaagatatgtacccggagttcagctttcaagaaccccacctcaggctactcccccaatgagcggtatacagttcgccgctacccaaggacacaatcagagccaagccttggctcccgcatctttgcactatgggaaccactccgggatgagcggacaaatcctgtctcactccgctacaactgcaagcctaaccggaccttctcaaggctccaggagcaagaggtcctcaaaaggcagcaaccggacggaggacaagtgccaaaaaagagggtgtactgcccaatatacccagtacacgaagctgacagacacccaagaacgtgcgtatttcgccatgaggaaaaatacacactaccggaggccgcctcctctgtacagagaagttcctgaagggatcccaacaaaagatgcgaataccacaatgacattggacacagtaccaatgagtgcaaaaatcttgaagatgagatcgaaaacttgattcgattgggtcacctctatgagtggataaggaaccagctgccccatctcaacccggttctggcagggggtccattgccccaagggacaccaggaagtgcgcacggagcattagcaccaaccgtaccctccggaggaccaatccttcagcagacccctggcctgccaccaagacctaatggaagagtggctatgctctttgatctgccccatattggagggaccactcgaaaaaaattaaggcgttaccccgtggccattaaacacgacaaggtgtgggaagtcattcagcttccagctcaaaagccccgactcatggatcagtcaattactttcacggaagaagatgcaaggatggtgtgttttcctcaccatgaccctctggttatagagactcccattgccaacaagatcgtggctagaatactgatcgacaatgggagttccgtgaatttattgtttaaggaagccttcacagcgataggcctcacggaccgagatctgtcaccaagcggttcccagctcacgagattcaacggaaccacacttatcccaatgggaaatgtgcggttgccagtcaccctgtgcccggactcaccccagagtactttcaagtactgcacgtttgtggtggtggactgcccaactgcctataacgcaatccttggccgggtagactttggcgcagtgacgtccatccggcacttgtgtctaaaattccccacgcaggaggctggagtaggaaccgtgaggggaaattagggtaaggccaggcaatgttataatgtcgcggcccacttaccggtaattatggtccgtgaagatatcaagccaggattggtagaagaagatgagttggatccccgtgtgggatccgaaaaaattgtggaacctatggaagacgtcgaggaagtgccagtatgcgacctcgaccccaccaagatcctccgactgggaaagagcctagaaccggaggaaaaagatcaaatagttaaagcactaacggcagccacagagatacaaccagcataagtcctcatgtaataacccacgtccttaatgttaattcggatatgccaccagttcagcagaagcggcaccccctcgatccagtaaaggcggaagctct

SEQ ID NO: 241098 - DNA, 717 bp, Cannabis indica
tccttttttttttttagaaaaaacctgaacctttattaaaacaaacaaaaacaaagaactcaagttacaaaggaaggtaaagaaccatttcatatatactcattgtctaatcctagacctaccctagcacacacatgagcaattttattaagctcacgaggaacatggactatgaccagattaggactgaacaacaatgagttcttaatacaagtgacaatatcattaacaacagaattatgacatttagtattataaactttatctactatgcttttacaatcagtttgcaaaacattaacaagaagcttggtggcttgcacccaagaaatagcagtcaagatagctttagcttccgcaacctccggtggaactgagccgacaataggtataattaagccagccttaatatcatcattttcatttgtaaccaccacgcccaaactgtgcttcctaacagaattactaacacccgcatctgtattaactttccatccttcatgctgtgataattgaacctgttcattacacctgaaattaacattgtctggcttaaaaccaggcaggttagcatgctcatactccaataaataactcacagcctaatcataaagatgccaaggtggcagcaacttcttattatggaagagattattcctatgattccaaagtaaccagataaaacaaaaaaaatatagcacaatcatatttatccaa

SEQ ID NO: 241099 - DNA, 1212 bp, Cannabis indica
caatatgccaactttgcaaattttttgcacaagagcttaaactatgtaccatggcagcaatcgggtcagcagaaaaattaatattccatctttttgagatgatttcagtactttcagggtcggccagccacagtttctcaaagcgaaatctacttctgctctttgctgaagtatcgggcagtgtggcacatgaaaaaacagctgcaatggctctatgatcggagtggtaatagtccaagtgttcaacagttggagcaaggaaaaaagatagccaatgattgttgacaaaacaccagtcaaggcgctccttaagtgtatgtacagcagtccgatttttaatccaagtgaaaggatcaccaatgtaaggcacttcttgtagaaaacatttatccaaagtagatcgaaaagcctccatttgggattcacgtctcaaaccacctcccgatttgtcattattggacaaaatttcattgaaatcacccatagtaagccaaggtagaagtggagcaacatcgccaaaacgctgaaataaagtccaggagtccgatttattagcaatctcaggagcaccataaaagcctgtaaaatggaagttcggccagccattaaatttcatgtaacagtcaaagaaagttggtcccatattcagcaaagtaacatcaaccacatctgtccaaaaaagcattaaaccaccactcaatccaacccgaggtacctcaagaccattgggaaaatgtaaaagctgtcggattctagaaatagaattttgagcgagttttgtttccataaggaacaaaacgtggggagattgttgttgaacaagcaatctaaggtgtcgtaatgcattcgggttccccaatccccgtgcattccagcttattattttcatgatgagttgcggggttgccttgcaacctccgcatttgagtcattggagaagcttgaatcctcaaaatcggaaactagagtctcaatatcctcatctcttgacaaaggagaagaagatgtattattggtattgcgacatctcttaagcaattttcgcatggagagagagtcatttggccgtttaggggtggtatttggtgactgattttctttagcaaaagaaacagcagtggcggagtgcgtggcaaggtgctgtgaaggcatggtgagggtgttttgctgaaggtgtggggttatggcaatagaattgagaactggtgggta

SEQ ID NO: 241100 - DNA, 571 bp, Cannabis indica
ttttttttcttaattgggcaagttacacttagatttttgtaacccgatctttacattgggttaaataaaatataacataaattgaccaaactgaccgacgtacacccctagacacttgtgtaaatatgattcgtgaagacatcagtcttgaacttgtggttgatgttcataataatgtggtgatagcatgcaccgtggtgtgcattagtgaacacgatctccaaagcatgaacaatgctttgtttgatgcctatccgacacaaaggctaagttctcaacctcaccaatcacttttttcaattttctcataaaataggtccaagaattatggctttcactgtcaactacagtgaaagctatcagaaaatatagctacctgcatctagtgccactgaacacaatatttgcccaccatacctagtcttcaagaaagacccatcaacgcatacaacaagtcagtaaaacctaaatccacgcctataaggacctagaaagaagaaataatacttatagcgaccatcctctaccacaaaatctgtgattgtacctggatttctccaatgtagcatgt

SEQ ID NO: 241101 - DNA, 1041 bp, Cannabis indica
agtaaaaatatatataattaccttcatcgatgattttagtcaaaaaacacgagttcattttttgctaggataaatctgaagcttatggagcctttaaatgttttgaaagtggccgatgaaaatgaggttgacaatcccatcaaagttctttgcattgatcgtggcagagaatacaactcacataaactttaaaatttggtgagactcatggaattcggaggcagctcacagcaacattcacacctcaacaaaatggagtagcaagaggaaaaatcgcactattattaatatggtgcgatgccttttgttgaggagtagatttccaaaattttttggccagaagcagtcaattggaaatacatattttgaagagaagtccaacttttgttgttcaaaatatgacaccagaagaagcttggagtggacgaagactagtggtaatttatttcagaatttttgagtgtattgcttatgcccacattccatatgagaagaggaagaagctagatgacaaaagagaaaaatgtatttttctcagtgttattatcaatcaaaagcctataagttatataatcctaacaccaagaaaattatcattatctatgatataatttttgatgaagaaagaacctgagtatggaatgagagcaatgttcaacaatgaatttcaggagacttcgatggcgatgaagagaaaagatagaaacaacaacctatagagacaacccaacaaccaacaccaatcacagattccacctgctaatgaagcacccaccaaacaaatgcctcaacgagagaggaaaatgctttcatggatgatggattatgaggtatctgattctgataattgtgaagaagacccactcactaatttttttttatttttagattgtgatctagtagcttatgaagaagctactaaagaattaaagtggagaaagacaatggatgctgaaatcataaccatagaaagaaacaatacttgggagttgatggagctttcaaaagggcaaaagataattgtgttggatatattttacc

SEQ ID NO: 241102 - DNA, 1612 bp, Cannabis indica
tcgcagttgattatttcacaaagtggacagaagtcgagcctttagcaacgatcacatctaaaaaagtattggactttgtagtgaaaaacataatatgtcaattcggacttcagcataagattgtttcggacaatggcaaataatttgaaaggtagatgtttacagatttctgtgtgacacatggaatcataaaaattttctccacagtggctcacccgcagtgaaatggtcaggatcaggcagtcaacaagacactcaaagacaccatgaaaaaatgacttgaagaggctaaagggaactggcaaaaggaactaccagaagtattgtggtccaactgaacaatagagaaaatagcaaccaagcaaataccatttgctatggtctatagttataaagctatgctgcccgtgtaattagaacctccgtcccacagaagattgacctacgatcaggaagctaatcatgcccttctagcagaatcacttgacgagattgaagaaaaatgagcctcagcaaacctaaagctagtagcttatcagcaaaaggtagcttggtacttcaacaagcaagtgagggcaagacatttttttatgggagatatggttctcacaagagtattcttgaacacaaaagacaacgcgattggtgctcgaacctaactgtgaaggaccatattaggtggttgaagtcacaaactctggagcatatatgctggggcggtatgacgaaaaatatggagctcgttctggtaccaaggcattggaatagggaacatttgaggaaatactaccaataagtgtacaaggtctgatgactactttcagtacacaatgctagaacatttactcttaagtagatggccttctgggcggatcccactcaaaggattagataaaattactagtactcaggtcgaatgaccatctttaaagtacaaatctaaaagtgcaatttttttatgtttaaattagctaaagatcaattagatcatgtaatagctttcataaatgtaagttactacggtaacaaaattattccgaccaataaatgaatattaattattattctaattgtgtcaattattttatagcaagtaatgaatttactatcaaaatgtgcacaaagggtctgctcgaacccaaaagtcgaacagacaaaaattgaacttgtgaaatgcaagtgaccaagattcataagtgtgcttggtcatttagggggcaactatacccatacaaagcattggtaaataacaagctaaaaaacatagcagttgcatgtataattactaaaacaagggaaaatattcatttaagaaaagatgacaaaagcacgacataaatccgggattaaaggctgcccgatcagctagtcgtctcaaaataaaatggagtattaccaagtttaaagacctcttggtcggtcatattatatttaacaaaggcccatggcccgaacaaataaaaaaaattcacaccgcaggagtcccaggttctttgtatggatcgacttggtcattggaggctggggtctctgtgctctgattggtcggggctgtggaattagctacctcagggttttctttggctacctggcccgcacagtaactaagata

SEQ ID NO: 241103 - DNA, 567 bp, Cannabis indica
gccaagattaatatttgaattttgaataacccaccaaaatctccaccctttactccatactcggtcaacagaggaaagaatccaaccacaattaaatttgaattgttttccttgcatgccattcatgcacacgtccacatgttatatgatatgaaggttacaattcaagatttaatttgtagtgtcatgtgtccaagtagttctaatctctaataataaattctctaaattgatctttaccttcaaggaaatggtatctttatcttgaaattaatgacctccacgtggacttctaaccacctatattctttttttttaaaaaaaattcaacaactattacttatctataattatatgaaagaaaatatcaatatgtgatgtgactttacacatgtatgatattcataacaaaaagaagagtccctttaaaccgcaacaagctatatgcgtgtacaccacactcggttaggtctcttccattttgaatttgaaatgtggtcttactctaaactaatttccaccaaaatctctaagtttaccctttatccattccactccccaaatact

SEQ ID NO: 241104 - DNA, 719 bp, Cannabis indica
ggcaccctgtaatcaaatgttactatcgatttaatgccaattttgtccctccaaataattctcccaacacatctcaggggtcttcctctgcctccccacatggtaatacccaacaagccttcttagccaactctggacaacatcctcgactaatgacagcaaccgtgatgtggatagtggagcatcaaaccatataacagacaatgtcaacaatcttcacacccatgatgagtacaatggtaagacacgactcacggtaggtaatggacagtctatccctatattccacaattgaagctctatgattaaaactagtgatgcttccaaacctattaaactaaatactatcttatgtgtgcctcatatttctcataaacttttaagtgtttcccaactcacaaaagataataatgcgtatgataaattctatgctgactcttgtgttttgaaggacatggattcgaagaaggtgcttcataaagtgaaggttagcaatgggctgtatcaactcacaccaccagcaacatgctttgcaagtcacaagttctctggtcttctagctcacgagtcaaccaacaaaagctctagtgttaatccacacttagagtctgtcgagtcttgtttttaagtttctgtcaatgaatcaagtttgtggcatcttaggctaggccatcctttcttaaatgtactcaaacatattttacttaatgaaaagaagc

SEQ ID NO: 241105 - DNA, 622 bp, Cannabis indica
ttaagtattattttttcaaggcatctcatgtgccttgtttataatacatgcctgaacaatgtgagctgttaaatattcaaatttgcatgtagccttatgttgttttatgagttaatctcatatacaactgcttcttcagtttttcatgattttatattgtccatagacaattttaatcaattatccttacttggaaaaattttaaaatgggtgagtttgaaatatatcatgtacttctagattaattccagttgatatgcacatatatacatgtccctcaagtaattttaaagaagactttgtaattacatgaacaaaatttaactttattaacagcagaaatttacatttttcagagagaaatacaacatggacattaaaaatttactggtaatagggttgcaaatgttcactgttccagtggttctttaatagtgagccattaagccgagccaatttataaacctcagttcctactactgtctcgataacataaggaccttcccagtttggattaaacactccaatagatgcatctcgtgtgttttgtaaatactcgccataacacctaatctccgacattgaagagccttttcttaactcttttgttgaagtatctcgt

SEQ ID NO: 241106 - DNA, 1238 bp, Cannabis indica
ttgggcatgttagaagtctggatcactattttaatttaagtttttttttcttaaaacgaaataaataatccaaacacagaattactttcagcataattcaattttgtccagttcaatccaatctttttcagtccaattcaatccaatttagcgcaccaaacgagctctagtactacactacactacacttctcacacatatccttcctaatgtaggatgatgtgtatggtgagagatggagatacaagcaaatagaatgaaatgatcattagttgacttgggtctttctttctatttttcttttatttgttcctccctgtctctctttatttattttcttctcttgtcttttcttgtttctttttcccttgtgttgtgtatgccttttttcttattttcgcgtgtgtggttggtgagattttgttgtgtgtgttgtttctcaataaactaattatagatgatcagaattgaagaaataaacaaccaaaagagaaaaagcaagaaagacacaaacaatttttatgtgattggggcattaattagctttagtccacgagtcgatgttattagataattctttagcttgaaaagcttttgggaatacaataaatttaagttctcaaatttacctgagtaagtactgcaaggaaattcaacccttaatccataagattcacttagtatttatagtagtttgagaattatatttagtttctcttttccctctattagggagtttacaatgaattacatagttgggctgcctcatgaagtccagtccacgaaggagaatatatgctgactaggtagattggattcggttggatttagtcaaaactgagtactatgattgtgggcagttaactgtgaatcaattgcttgatatctattataagaagtttccccttttagcttgatgtgatcctcttcgatatctggcaaacaaatatttccttatatatgcgtaggaataaaaaggaaaaaccaaaccagtcttttgggaacacgttgtcttacccttctaacctcacggtactagacctacttctggacaagagctgtcaaaggcagaaggttctatgatcacggaactgaagtacgttcttagaaggtcctgtccaaatggacttggcccactttatcttctttgggagacctattgatgggccttggatgctgacctggattacacgtgtccactgccgaaaacgcgattaacatttatcccccaagcttct

SEQ ID NO: 241107 - DNA, 1795 bp, Cannabis indica
aagcctgaaccaatgagacatgccagatacaaacgagattcaataaaattttgacataaagacatagggcatacaatcgaagagtgatgacaactgaaggacgagatagagagcctgatctcgcgtggatatttcagacaatatgtgaagcgtcaagggaacgagccaaaccagcctaatcaggccaacaacccaaaaacaaaagattgcaacctccctctgttgagggcgaagatatattggttatctcaggagagtcgcatcttgctggagagagtaataatgcccagaaaagatatgtcaatgaaataaaaaacgagcaattggtgtttgatccaaaaccactaaaaaaagctaaaatagaagaacctctaatcatattcttcgacgaagatacaaagcacgtgaggtatccacatgtaaatcctctcatcattacagttcagctcgccaataagagagtaaaagggtgttggtggataatggaagctctagtaaatatcctttataaggatacgttgaagaaaatgggattacaagatgcaaagttaaaagctttcacggtgaacttttgcagattcaccggagatagtgtcgccagccaaggcatcattagactcacattgactatagaagagccaccattatctacaacactgatgatggaattcttagttcttgatctaacatcaatttataacatattgatgggtcaccctatgttgattggcttaggggcagtcagttcaatcaaacacctatcataaaaattccaaacacctgcaggaataggtgtagtacgaggggaccagttgttgctcgcgaatgttatcgcataaaactccaaaatagaagagccaaccatcaattaatagtggtcataacagaagaaagagaaaagaaagaagatctagaccctagaatccaagacgagaaaaaccagttaaaatcaattgaagagctggaagaggttcttttagatccagacaatcccactaaatgtgtgttaactgggaaaaatctggatgaaaaactaaaatagcagttaattaaatttctgaaggcaaactaggatcaattgtcctggagctattcagacatgatagcgattgaccctaaagtgatttgccacatttgaatatcgaccccaactacctagcaaaaagacaaaagtggtgacccttagattctgaaagacaagaggcacttaaagaagaggtgaacaatttattaaccaatgatttcatacgtgaagccttccacccctcttcgatttcaaatcctattcttgtctcgaaaccaaacagcacttggagaacttgtattgattttttggatttgaataaagcatgtccaaaatattgtttccgactaccaaggatcgaccagttagtggatgcagctgcaggacacgggctgatgacatttatggacgcatattctagatataaccatatcaatatgcacatccctgatcaagaacaccaaagttttgtaaccaatatgggactttattgctctaaagtcatgtcttttggtctaaaaatgttgggacaacgtatcaacgactagtgaacgggatgtttgaaaaaaaaattggacaaaatatggaagtctatgtcgatgatatgctggtaaagttgataaaaagggaagatcacacgagggacctcgaagaatgctttgggatacttagaaataacaatatgaagcttaacccaaagaaatgctcttttggggtctccttaagaaaatttcttggtttcatagtaaatgcaagaggaattgaagccaa

SEQ ID NO: 241108 - DNA, 992 bp, Cannabis indica
agggactaaaataaacagaacaagtaaaatataaattacttcggaatgtaagagaggagaaaggcagagacagcaaacaatatagtctatactctatgcagaagtattgaaaatgtataaagattaagatgattataaataaacaaaatatatcaattacaaaactgcaaaagtagatgttattagcagtatatggatatgcggaaagttactagtaaacacctaaaataatgagtaaaaaataggcatttatcagcgaaacttccatcaatcaatattggcctcccatgaatcagataagcacataatttcagctcaactgggattatgaaggctcttcagtgaccaaaataaacttaacactaacaagaacgatacagggtgttagacttaggttgctaatgcaacaaatgtgcaaaaatcatttaataaaaataaccagatacatcataatttttttatctgaacgattaaatatatctttcctaaagaaaaacagatataaaaacaaaacaaatattgtgcagtttatgaggactcagaatatggataatcgtcaaggactacattagaccattacgtcgaacgagaccatagataaagatcctcagtgtccctataaagctaaacaaatcagtatttaaatggaataagtgcacaaaatcagtcatagagatgaagaggacgcacgatgtctaaaatgaatattttatcccaaatcataagctacatacaaatttaaagattttaacgtcaaaggacggaccaaggaaagacgtggtaacaagcgagtgcatatgcggtgtagaactcagaatatggattatcggcaagaactaaaacagtccattacgacgaacgagaccataagagaaatcttcactgtcccctactaaaaaattgtgcacatgtaaatgtcgactaaggaattgcattcctactccactactgactcaatatatacatatatgatatattcataaataagcaaa

SEQ ID NO: 241109 - DNA, 1565 bp, Cannabis indica
gggttttcagcattctttttttttgatgaataaggaaatcttgtattgctcaaactaccaattacatctccagtttttgtacataatctgctatttacggctataaatcaaaaactttttacaaattacaaattcaacacccaattcttgtccttctcctttgttttgcttggccaaacccctacaattctcctcttgctttcttgctgtacccgattcacaattatcctaatttgccattgtttttgattccacaacacatcataacgtgcaccccagatcttgtataccaaggcagccaacatagttaacatcatgctcctccttgttgctgaaattcccttaaacttgctgatgagttgcagcagcttgtgtacttcaattgctttcgtaccccagttcagtctaatcttccattcggcaagacatttgctactgtattcacattgaaaaagtaagtgctggaccgattcatctgccttcccacaaagtaaacaggttggatctacctgtgtatcatacttacatactctatcctttgtcttcaacctatccaacaagacatgccataagataaacttgtgtttgggaataacaagtctatcccacacatgtttgcaccagtccttcttgtccggcctgataaacaacaagtgatatgtatttgatatactgaatttctgcatgctaaaggtttgccgatccaccttagccttcacctagtttttcactccaactaattttttccaaaaccagctacaatcggtgggggcttcataatcccaccaacacctatcttttaagtatacattatgaatccatctgtcaaataagcaatctttcttgctagctatatcccatacataccttctcatagctgctgtgttccacttctgaagatctctaaggccaagtccaccagcacttttgggggtacaaacatgctcccaagccaccaaaccaggacccatcatcatttgggttcccttccataagtatgatctacatattgcctcaatatctttgagcaatttctttggtaatatcataatctgagcccagtatgtatgaatagctataaggacagcatttatcaaggtaactcttcccatatatgacaaatttcgagagctccacccacttattttacttaccatcttctctagcaaaatttgacattcagaatgagaaattttctttaaacagataggtatgccgaggtacctgaatggaagggaacttcgcttgaattgtgaggcatctaggattcttccaacttcagcatctgacatgcctgaacaatagattgccgtcttctgttcgtttggcattaaacccgaagttgaagagaagagtttcagccctcttagcatcaacatggctgaaatgaagtctccatgactgaaaaccaaaagatcgtcagcaaagcacatatgattcaatttcagtgaggaacatctgtcatgaaatttaaagccaggcatttctccaatctttcgaaggattcgggataagtattccattcctaatacaaagagaaggggagacatgggatcaccttgcct

SEQ ID NO: 241110 - DNA, 713 bp, Cannabis indica
agccaaccaaagcgtggtaaattgtcttgtcatgtgaaagacacaaagggtagtgtgtaccaatgggaacatgacatttttttaattgaacgcatgttggaaaagaacctgatgcagctctccacaggaagtttcgaaccttatgtggtattttaaggttccaaagatctctccaaaaatcggtagagttatctaaggaccaagttcctttaaccagctgcaaatgcttacaagcacttcaaactgtatactatttttgttttattctttattaaaataatatgatattgtaaaattatgcgataatttttataatttttcttattcatgttatatttatatatatatttaataacaatgcttatgaaaaataaatatatagtttagttttttcagtttgcgggatagaaaatgaagcttcatttcatgtactttgaggttgtacaagttttgtttccatagttaagctaatggattttgctcttacatctaaagagttgcctcaagttgaccttctctctttcctctgagaacatgaatttattcttcgtatagatgagatagagcggctcttagttcttctttggtacatttggtatcgtctgggttcgtgacaaaagcttttcgatatcgaaggcgtatcgggctaggccttttggtttgctcgacctatcagaagcttaagtgagattggatgtgtgacttctggtcat

SEQ ID NO: 241111 - DNA, 917 bp, Cannabis indica
tatatattttttttaataaaaatcataagatctattaattaataaattcgttcaaaacaatagaacacatgcacttcagaggaacaatcctccaactgaagcacacgacctgtagagaaacaagagtctcttgccaaacaatgagccaacttatttgcagatcattttacaaaatacaacatcagattctcatttcgattgaataaaaagttgctaaaacggtgtccattttagacgagtcgacaactctattaaatgaatgatatttttgactcttgcctaaacaggacactgatattgatttgttggaaaccttaaaaattatttaagatgtgtttagtttgtatttttacatgtctttgttactttctaaatgcttaataatttctgaattgtgtatgttatccaattttttgcacattgatgtggcgataagaccgagcgacacgtgtcctatatttctgatacttggggcggaggtaaatgtccctagcagcctgcacataatttatcagcttctataattatcgattactcgaacagagctgtggagaagacatctgaccaggtagaagattgttatgctgagcaacttacaagagatagtcacttcagaatgatcttgttatgtccagacatgaagacaatccctataatcgtgggattgagtcagagaaatatggcaacctgttttagtttcctatttcatgtatcgtaattatgtaatcattgcaatttcctatgttatgcattgtaagcaaaagggaaatcatccttcatgcattaagtccctataaatagtggcctagcctcattatgaaggggatcgaaaaaattgcttcagagagagattctagagggaaaataatgatctaagagagttactcagagatcagttgtaagagctttcaaagggg

SEQ ID NO: 241112 - DNA, 816 bp, Cannabis indica
gactaaaaataattagtaaaaaattttgggtgactaaataatgagttttaatgaccaaaaaactagtcgggcaaaatgagtttttttgtagttgctagagcttccgcccattctcttccttagagcatcgagcatctgtcgagacatgtctgcacagagcaaaaatagtgtggttagaaaacagccatcagaaaacacaaggcatgaaaggaaagaagctcaaaaaagaagtaaaatgcaactgaccgcccgcacagagattcagaagtccatcatcacctgacatcgattttatctcaaacatgactgccttcccttttccagcaaagtgggctcccttatgcgaatagcatgttcaacaggtcggggcgtggccgggagtttcttcttgctcttcaatggggtcacctgctcagcctcagcctaatcctcaggatccaaaggctcctgagcatactgcttggccctaacacctcctttcaacttagcctcacgcttaagttgaaagagctcatcctcctaatgagctcgttcaggccgaccagcaccaaacttcctcttcttcccgccgtggacataggagaaaagtccttagggtaaagctcatacttcaccagattatcatcggaggtcaagtggatgatattcctgtcttcctccggcaaccggacaagtttttgagctctatccctaagagcaagggtgaggggatgacggtaatatgtcgaaatattctaaaaccgagtctgggtgatgctcgaatccttcaccatgaagtactcatcaacaaaatgccctatcttgttgatggccttg

SEQ ID NO: 241113 - DNA, 1209 bp, Cannabis indica
aatagtatcatcaaaggtggtagactcgggggccaaggtagtgataagtggatttggactaaagaaccaaatggtcttttctctattaaatctgcctatctagctcaggccttgggtcgtgctcctcctagcaacgttgctcccgctctatggaataaactttaaaactctagaatctcaaagcatcacaaggtcctttgatggagtattctctcaaatgccttccctatcagggctgctcttgctagaagaatgcatattgaggaagtgtcatgtcctatttgtagtgagggagaggaaacaatggaacatcttttcctctattgcaaccttgtatttcacctctggaggtcctccccatggggtgtgatgccaaagcaagattctgaggcctgagtgtgggattgggtcaaattcttatggagcctgaaggaaaaaagagtagaggaggtccaagaattgtttctgtatgcttcaattgtagtggattcgatatgaaaaacccgaaatgataagatttacaataattctatatgtaacagtaagcactgtattgactctatatatttttatatgttatgcaaattttgcttcttgtctatttccttcgccggtgacagttgcgcctcctgtttggtctccccactgaaagattgggtcaagaacaattatgatgttaaagttgctagtgactcaatgtgcatgatggctttagctagagaccacaaggagtcagttttgtgggtggctatcaacatgctcaacttctctgacccactcattggagaagctgcgacctgtttgttagccctggagtcagtgatcgtttagaagcattcttttgtgataattgagagtgattctgagacggtgatcaacaaggtgaaggggacttgttctgtttgggtattggtaactatgtgcttgtaaaaatctctcaaatcttttgattagttgtaattttttgcttatatatttctagactgtataatttcgcagcccataatgtggctaagtaggctttcgccagtaatataactgatatggttgatctgtactccgtaccaaataacttattatacaatgaccataaggtctaaataacatttttatggatttatttttcattacagattttacgaaaaattaaccgaaaaataacatagtataaatgtaacaacaatcaaaaaataatattgttgtgaaaaa

SEQ ID NO: 241114 - DNA, 1485 bp, Cannabis indica
aaaaatatttatttattacaaaaataaataattattattttgtcaattcaaaatagatttttctaaacatcttttacaaatctttatccctacccttgatagtgtttcaaggtggtgatttggggatcatggacctctaattctacactccaataaactaaattatttattgagtcttatcaaccaaatgacgcttgtttattaattccatgattactccactataaatatagaattgaagtctaattatagaattatatttactgaatttcactgcagtgtccattgatataattaattatagtgattagccctccatgtgttagttcataattagttttggtattaccattttacccttctaattacttttttatcctttagtaccattaattcactagtggaagtataatttagatttcatataaatttgtgcacaacattctagttctaagattaacacttaaaagataactaacattcgatctattaggaaagtcaggatttcataattgtaaatcatgttcctagccgttcacattattagattgctaaaacagaagttgtaagtaagaatcatcttctttgataaactttaacgagtgaatcaaagaaactaataacatgaacatgagttcatgataactcaggatttaggtcgatctactattgatcattgttataatatgaatcaggtctttatgataaacgacatattaataaagacaactttattcatattggtcattgtcatatataatctctattatatacagtacattcactttgatgtcatactacatccgtaatctaaaccaagattacttgcaccgaagaacgagtattagtgaatcaaactagcaaccattgattaacgattccataactttaatatagtgctgactgttttattcatagctaagtggatagttatttattttaatttttgtgaaataagagattaataagaattaataaatttttatttattggtagaataaataataaatattatttatagaaaaattgagaaatcaatttcggaccttaaaatatggcctacacgtgtagattcattttacacgcgtacgtataaggtgacatataaaggtccatgattaatttgatttattatttttttggttaaaataatttaaattaaattaagttaattatcttttaattattaattaaatacattattagataattatttaattaaaagaataattattaaaataaaagatctattgatcattttaatagtaagttattagatatatatatatatatgtctgaatttgaattttgaattcaaatcaaattaaatatttattttttattttaaataaaagattaaaagactttatttatagcattatatataaaatatatagtataacaacatttttaaaacaataataaggcaatatacaaagaaataaacataggcaattagagagaaaataagattaatattttaaa

SEQ ID NO: 241115 - DNA, 1214 bp, Cannabis indica
ggtttcggttgtaatataccaaaaaactttcattgcaccacaagtgcaagaagtgttgggttggaattcttttagctcatcccaaaggattttgagcttagtaaagtaagaggtgacggattgatcaccttgttgaagatgtgttaattgggtttgaagttgaaagattcgagggccatttccctcattgaatctttcttgcaaatcatgccacatatcggtagcaagatcaaagtacataatactttgtgctatctcgggtgaaacggaattgacaagccaagacatgaccatattattgcaacgaatccaagaagggagaagagtgttaccagcggctgggcgaggaagagagccatcaatgaaggcagatttgttctttgccgtgagagccatcatgattcctcgtttccaagattggtaattggtgccatttagcacggtggaaactaagaccagtcctgggtgatctgcattgctgaggaagaacgggctagatacatcttcatgagccaatcgatcggctaaagaacgtcgagcctgaacaggaggatcagtagcaacaggtgcaggagaggaatttgctggtgcgatcggttctggttcgtgctagatccgagatcttggattgttgttccgtcgagtagcgattgaggtatccattaatggaggtgcggaagtagcgtcggggttagactccgggtgttgattatcggaaggggatgggggaatgccatcctgagaacgagttgtgggtctagccattgaaggaggatcttgattgtctgctgataccatatgagagaaaatgcagagaaaagaagaaggagaaaacagagtaaattgctctgttgaatctgttattattatccaaagaagtatgaatacaattacatgaaggggactctatttatattgagctgagttagttgggaataactaactcagctgaagcaaaacaaaacagaccaagaattggttttaacagaatcagttgatagactaagggtagtcttgtaatactagttggtcaaaaaacgcataactcccgttaaaattaatggattaatcaatttttttttttatttttatctaattgtatttaaattaagtacagataaaataatctaaattaaatttaagcaagattaaatagtaaaaaaaataaaaaattactaaatcaaagttactaaaaataagtacatattaatatt

SEQ ID NO: 241116 - DNA, 861 bp, Cannabis indica
tttaatcaacttactttcatcattgattagagaatagtaactatcattttgagcctccataataacacggtatcctaacttaaccaaataattaccagaggaggtgaaataccataaagctttattgggaatatctctagaactcagagataaatctaaaatgagattataatcaacttcccaaaatattttctaaagataatcttcattccaacacagatcgttaatgaaatcagtaacattccgtagagggccaagaccattaaggcttgtgaaaggataaaaattaactaatcgcaaacgccaaggatcggtacgaggacgaatttgagtgccatgaccaacccactatctgtctaacaccgtactagtttaggcgtgttaacgtgatgtttaaatattgcaaattattcttaattttttgaaggattatctttctgttgacctaacactaatgtatacgaataagttgatgttatgcttctaaaaatgataccaatttttctacccatgttaccatctcaacatctatttaaggcagtgtgaaatgtttttcatgtcatatagtgcaaatcacatgaaatatagcattattgtcaatatatttttttagagtatatatgaaaggtaaaagatataattaattattatttctaagttgaatagaaacttttactgatgagctacaatattagagatggatacatataaatataattttatttgtttgaagagacaggtacatataactgaaagataagatgatatatgaggtttaaagttacgatgcaacctcataaaaattatttcaaataactatatataatggtgacgatttttgtctaggaatcatatttgaag

SEQ ID NO: 241117 - DNA, 677 bp, Cannabis indica
tggtttgttgtgtaagggtgatactgatatgcttaagtatgtcagaaatggagatgtgtttgtagacaagtactttagtgatatgattgtgactcatggagctgttaagcagcattttctgaatagcactttcaaagatgatgagtttaaagttaggatggcggtgttgcatttggttactaactacttgttaagcaaacctccagataaacatgttagtaacaggttgttacatttgataggatcgggtgagtttgatagtttcccatggggaaaggttgtttatgatactacattgtactatttgaggcttggtttgaaaggtaagaagggtgctaaattgaaagcccttgctaagataaaaggaattgataagaaggggagtgattcaaattctaaaacatacaaattggctgtgtttcctttcatcttttaagtttggttgtatgaggttattcctttttttagaagtcaaaacttttgtacttttgacccttcttcgacatataaggtatgtgtttcaaaaattaaatgctacttgtttacaaaaaaaaaaaaaaaaaaaagatgcaaaactaaattaccataattgagtgaagcagtgtagtatatgtgagaattattatgagaactgtttttttttaaacaagtagcatttcgtttctaatattaagaat

SEQ ID NO: 241118 - DNA, 1152 bp, Cannabis indica
tatccttgtttggcatcaacatgggatggaccccataaatcagtatgtattaaggctaaaggttggttggctcttgtgtcagaagtggaaaagggtagagtatggcttttacccaactgacacgcatggcaaaaggtgagatctttgatagaaccagtgtggggaagagagggtaaaagttttatgagagtgtttatggctgggtgaccaagtttgcaatgccatgaattaacatctttagtggtaaaagaatgatcacctcaggagagtaagcaatagaagtagatgttttattcattttaggactagtacaatcggttgctgcagtagcatcatgaatattattcatgttattacagacacattcattttcaggaaatggactagacacagattgcattgcagtgtagcggaagtggatgatgcagagtcatctcccaactgatacagtccatctttaaccttccctttgatcaacacttttccagtttccttgtccttgacaaaacaccagtgtttatgaaattcaagaaacacattgttatcttctgttagtttagaaacactaactagattctttttaatggaaggaatttgaaggacagaatttaatttgagggagtaattatttagagaaggtaaaatagttgaaccaacatgagagatacagattttcttaccatcagcgacagcaagagtttcgggtccattgtaggcagtagatgtgtctagagtctcaagattgtttgtgatgtgattagtggccccagtatcagcaaaccaagagaggtcaacaccaaaatcaggcaatacagtaggttgatgagaatcagaagcatcacattcagtaagataggcacggggggcagacacattcggtttgggtgttacccaatttttgtcaaatctgtagtggcacacagccgctgtgtgcccagatttcatgcaaacttgacaaatcaatctagaattggagtagaagccacgaccataacctctaggttgattctttgattgactgtcagtagagggatctttgccgtgagcttgaaagggcttgaaatggtcatttcttgaatttctcaaggcaagattggcttgcatttttagtgtgagttctgagacagaattgtgatgatcaaggcggctctc

SEQ ID NO: 241119 - DNA, 624 bp, Cannabis indica
gcgagtctcaccgacacaataaaaactttcaaattgttatgctatgattgtttagtggtcatttttaatatttgtttagtctttacttatgtttaaaaattttcacttgtttcctgtcaactgtttaaagattttcatagtttttgtcttaaagtcgacaatatatcgacattccattgacatattgtcgataaacagtcgactaaatgtcgacatactatcgacaaagtgtcgatacattgccaaataaattaaactatttaaattgtttttcatcgacatgtttgtcgatattatgtcgataatggtcatccttgaccttccttcgcatatcatcgatattgcattgatattctgtcgacaaactatcgataacctctagaaaacccaaatttcgacaaaaacagatctaccaaatctaccatttcagactaaaaaatacctgttccaacaaataccacagatataacgaaaacaaattacatactattactaatatctaacaaaatgcttaaaacacaacttacccattataattgtgaaatattcttgagtgattgggggtgtggcccggttttccaccatcgagagagaaagagcgtcgacaaaagcttagagagagag

SEQ ID NO: 241120 - DNA, 779 bp, Cannabis indica
tttataatttaccaaacactctgctcagtctttttttcacatttctgctacaactgttttttcccacaacacagctctaactgcttcctacagcacagctgtgccaaactaacccatattagagagaaaaaatattggtagttgtgaaagttaaagcattaatttatattacaagtgccaacctctaataagttagacttgcttggggtgttcattggactatatctaactatccagatctgatccaattatatattggatgttagattttaccatctgatccgatccaattaatttcagtcatccatttaatccaacatctattggatgttggatttgatcggttctatccgttgaatgtatgatatatatttattggtttaatttgagtttattcaatatttagtattttttggatcgtattgaatcaatctaatattttaggttcagtatgtattggattgaattatatctatctaatccaacaaaaaaaagaataaaattttaatgttaatttttatatatacatatatattttacgtataacaatataaaatccaattactcatccaaaataaataaaaatactaattagtttgattggatgttagatgtattggatttttagacactccatccaatatccgatccgatccaattggatattcaaaaataacatcaaatctgatccgatcacaattggatattcaatgtttagtagtcaattataaatggatcgattgattgtcattggattggatgatttatacacatcccta

SEQ ID NO: 241121 - DNA, 815 bp, Cannabis indica
tgaaaggcactcagattgacaaattgtcaacctgaatgttggggtgcccaggcaaatggtgctaaaaaataaacttactttgactctgatttcgatgcctcaaatttttctgtggtatgtttagctgatgtcctaaagcaaagtttaacccattttcactaagacggttccaaaaattgaaactctagttgggaatgtcaacttgggcgatgtgtgaaaccctaggtgcccaggttggcttttgggttgcaggttcgtgtaatttcaattcctaggcttgtatttgattggtctatgtatttatggtacaaaatactgaaagataatgggttagattcaagttatttaaatcattaataaaaatagaaggagataagataactgtagtttcaattggaagattgatactatatcgaagagttcaatttaaacatttgttttgccttaaaaagattcattacctatcattttaatttgtgaaagagcataaaatattgagtattgctattagatactgaccatgacacgaggtgcttctttgtatatagttaacgatatttcataatagtaattaaattaaaatatatagaatcaaatatttaataatgttaataacaatataatatttggtgataatgttagacatcgctactacctttaacgtttctcgataatattaggggtggaggagagcattgataataagcactaatattactcacactacccttttaaaaagcattgataaaactcgtaattaattacaccaatagagatatgaaaccgaacaaaaacagctagagtgatccaccatt

SEQ ID NO: 241122 - DNA, 577 bp, Cannabis indica
atatatatacacacacatgatatctttcaacgtttatagttgaagtttagtgcaatgctgaatattttactattattattattattattttgagaaatcaaaatcattgtatatttgtattgcataaactcaaatttacaacttaattgcactattacggcctttataatctattcaatttgtagaatctataaaattaattgtgttgtaaatttacaattgctcaaaccattccaagtctttttatttcattttttaggaaaaattaataaaattctaactttcacctcatctcgaatgcagaaaataggagtgttcacgaattggtttggtcccaatttttatagtttttgaaccaaaccaatataacagtttttttaatattaaaaaccaaacgagaccaataaatttctcaaaccaaaccaaaccatccaaaaaactatcaatttagttacaaaaaatcatccaaaaaacttttaggttggatggttttttacaagtaaattgatacttgggagggttttgctgcaaattactcttaaaatttttatttttattttaattactcattttaatt

SEQ ID NO: 241123 - DNA, 762 bp, Cannabis indica
tagaaattcaaatttccccttttaatatttcgtcattttttgttcttttactctctcattatgcgacattgttattattattttattttactttaattgataaagatagttaaaaatataatttttacataatgtatttttttttagaaaaaagctgtaatataatgtaaaagtttaagggaaatttgaattttcatgtttaataaacccataaattggcccctaaactaatactatggataattttttaaatgggataactttttcctaaaccccaaaatacccctcccatttttcccaaccgtccctctctcttcctctttttccaaaaaattgactggccatcgggctggccccatcggactggccatcggactggccatcggacgggcatcgggcccacatcagacccaattttcaaaacccagaaataagccaaattggtgtacaatcgggcacaccatcagacggcatcgggcaccccatcagacgggcatcgggcccacatcggacccgattttcagaacccagagataagccaaactggtggaccatcgggcacacaatcggacaggcatcaggcacaccatcgaacctgaccttcaaaacccagaaatgagctaaattccacgccggttagattacttcagtcggtcagtacgtcggttggggctgcgtggacggttggggtggtcggctgtgagttgagggtttggacggttgggacggtttgggtggggcggcgaagagatgccgagacag

SEQ ID NO: 241124 - DNA, 982 bp, Cannabis indica
gtaattggattggatccccttgtttggaccgagttattggcgaagatcaggtttttttccatttcaagtatgctcgcagatccggttggttataattgctagccaggctcgttctactcagggactgtgtcctacttatggacctcatcctgctcatggacctcttccttgagtgacttgcagtcttactagtgcctgtgctttcttgatcattattgcgatgagtactttctcctcctcgcgttgatcggctgtaggttcttgtgcgccttgaggtaacacttgcctcttcaatccctattcttctcccttgggtatggttctttgtatgccccccactggggtttgtacgtgtcccttccctattggtttgcgaagaacattggcggtgcctcattcgtgacccatgtgctctaggttgagtcccaagattccccttgtttccacgagggatttcttgttctctggtttttggtcgccttctgttctcatttttgcgagaaggctctggttgatcgtttggttgttcattttcaaggggaccgtcagttgcccaaggttgttcttcctaaggattttgagggttctcctgagctgtctcctgcctcttggttcgtgagccgcgaggtctgcctcgtggtcttctcactccaggatcaggttgattttgtgtattatgttcctgtgctaccctggctggggttgcctcacattccaactccacatttcgcttgtttgcctcccccaggcggtgcctgagttggcgattttctagctcgaagattggcacatatcttgttgaatcgtaggcaccatcctcgccaattggcctgggatgggctctaccaacgttcatttgaggctcttcataccttgttccgggattttggatcctccttgaatgtgtggttcgtgtacttgggccaaccccaggttgggtcctcctggaacaagcggtccgtttagattgtgaattgggacg

SEQ ID NO: 241125 - DNA, 722 bp, Cannabis indica
tatcgttagatgataggggcataattggtagagttgttgaaaaaaaggtagaagtaaaaaatataaaaagagagggtaaaaattaaatacaacaacttaaaagagatataccatttaaaaatattttccaaattgattagattttaggaatgtgctaaaagactttatgtcagtttaaggtctttagacataggcctgaccatgtttcaattcaaaaaagaaaatttagttttaaggttaggataaaagtgtcatgctaaagaccctatggagcttttatgggcttactagagtctggaaaaaattatattgtatacccattttattttatttattttaatttttatatatttttttttaagatatactatttttataaacaatgtccccatcatatttaagttaatgtaaattatgtgctagacttaaatagagaatgatggtatattaggtaatccattcacaaaagtaagtacatcttaataaaatataatacaagagtatttttgattaatggataaaaaaaaagtatttctaaatttatcctaatgataaaaaactagtcgagatggattgaagagtgtgagaaattaattgtttattacttgattatatagttggacagtataagatttattcatgaatcatgacagtatagttttgtcaacaaatagctttcttttcccttaacatccccagaattgtatatttcaatttatttt

SEQ ID NO: 241126 - DNA, 1095 bp, Cannabis indica
atcaatctagccctcagattaaataactccctcatctaacggttgccgtatatcacggaatacattccgtgaaagtacaatcacaggacaaaatcgtgtccctactattataatatataatcgatcaaactaccatgatattcgtttagtgcttgtaatcattgtacggtgataattaattaacttagtttatatgaatgactcacttatgatgaagctttgtcatttctaataacattataacaatctgtatagcaacaatcatgttattcattttatgatcataaattttattttgttatatctgaatatatgttatttgatttaattacaaagtaattgatagtaaaactttttcatatagtagattaactccatcgcaagtcaatattaaatcttatttgtccttcgtatcacagatgtaaggagcatttttaacgtctttccagagttaaattcacactcatataaaactataaagtcaaaaaaaaaaattatgaacattttaattttgggtaatattttcatacaaatttaaactagctaaactctctcatcttaaacttatattcctaatatgactctaagtatgacccaaaaaattgttatagatttagtagcagacgacccacatagattcagtatataggacatgatgagtataagacgctaaaaattctaggatgcccccatacttgtttgatatcactgttaaatgaagtctaccaaaagtcagtttattttaaaaaaaaaatcaagaaaataatatcttttttttaaaaaaaaaataataataagaggtaatacccatgtgtatgtatgcaagagttggatgttgttgaagtttagtaggcatggtaccaatataagaaactacattaataagaaacaaaacttcatccatatgtaataaacaacaaataaaaaaattacatgattcaaattaaaataaaaaatggaattaaaaagaggttagaatttagataattatcaacttcaactaccaaataatttaataagaagattaccgttggagcaactttagcagaaccactaacaatgtcaatgtttcgcgtcaacaattttattcttatt

SEQ ID NO: 241127 - DNA, 1113 bp, Cannabis indica
ctcaaaagtccatcatcagctaataagtcttttatcttcgctatgacgactttcccttttcctagtactagagagggtggccgagtaggtaaaatggctccctaatttgaatggcatgttcaacgggcctgggctgggccagatgtttcttcctccttttgagcggagtcactggctcttcctcagcctcatcttcaggattcaaaggctcatgagcatactgtttggcccttgcacctcctttcaacttagcctcacgcttatgttggaagagttaattctccttatgagctcgctcagcccggcaagcaccggattttctcttcctctacttcacaggcttaggaataaaatcctttggatagagcccgtacttcacaaagttgtcctcggaggtcaataaaattatatttcaggcatcccccggtagctcagcaagcctttgagctctatccctaagagcaagtgtgaagggagggcggtaatatgtggggatcttctggaactgagtatgggtggtgcccatgccttccaccataaagtactcgtaaacaaaatgcccaattttgctaacggccttgtcctcggtgcccgtcaacaacttaaagtcttgttgagaaaaatagaagttccccaacctgccttgctcaggggtggacttcaaatccaagaccagctaacctcatggggggaaggcatatcccacttctcggagtcgtagagaacgaagagggcaaacagatacttaatgcccttgggagtgaaatgggtcgaatagaggcggaagaagtataccacattcctaaagtatgggtgcaaaggcaacaatgccccttgcttggcatgagcacccgacaaggctcacattcccctttcagagtttgtggctcgattgttataggcgggaatgtagcagtctaagtcgctcaggtagccatccttatcgagatcccgtatgcatgcctcagtgactttggacggagggctcacccacttggcactcggagcaccttgccttctatgagcaaccgccgcagtaagttccccactggcatagtccacgccctcaaccaggacgtcgccatcagcatcaattggctccccagcctcatt

SEQ ID NO: 241128 - DNA, 1001 bp, Cannabis indica
gattggtccaattgattgttatcagaggtgacacggtgagtggctcctgtgtccgcaaatcatgacaatcatctccaaaatcttgaaccatggtagtagaataggccataggatcatattcaagatcttgtctagtgagataggctctcgggtttgtagcagcaggtttaggaacttgccaattcttgtcaaaccgataatggcaaacaggtgttgtatgtccaactttgagacacacttgacatacaactctgtttgggggaaaacgagagtaccctctcccacggccttgactgtgaaaggtttcttgattgccagttctggtagaggaaaaaggtcgaacaccacccgatcgtcctgagccaaaagcaagattggcttgcattttcattgacagattctgcatttgatgatgatgctccaatcggctttcatgagacagcaataacgcttgaacttcatcaatggaaagatcgtcactccgagctgttattccagaaactacagaatcaaagtccggacctaatccatttagcacttgaagaacaagatcctgatcttgaaccggagctccagccacagtgagagcatcagcaatcgtttgaactttttccacatattcggagatggagagacttcctttgtgtacatgagagaattggcccatgagttgcagcaatcgggctttggtttggctagaaaacttttgctctaacgcacgccagagagagtgagccgaggtatggtttgcgacagatgcaagaataacttcagacatagatgaccgaagccatgaaagaagcaattgatccttctttttccagttggtgtattcgggattgacagctccagtaacaagattttgaggtggggtgtgccggtgaagaatttcatcaagatcatgcccgattaccgtgggtgtgacttgagacttccatgaaaggaagttgtgacgatctagcttgatggtgagattggaggtgagggagtgagaaaatggg

SEQ ID NO: 241129 - DNA, 1763 bp, Cannabis indica
ccaaagcacaatgccacataagcaagtttaaaaagtcaagggaaataactaattttggcgacaatgtgggatgtttgtctatgaataagggatatttcgatagatctttatttatgtatcttttttattcattattttatagaaagatacaagatttgaagtgagataccccaatttgtaggggatcactaacaaaccctagtcttatataagacaatgatagactagggttaaaggatgactggcaagacctttgagtgcattcaaaaccttgggactcttgctaaatttcgacatagctgcctagaacacatcatcccttgagacctttgatcttcacattttccttaagttcttcacactgttttgacaccaagcccccaccatacttttaccattgacatacacagttaccaagaacaaagaacattctctattcttgttttcattggtgtattgttcccaagaatattatcaccaccattattatcaagtttatggtattgggtctcccatgagccttttattcataagcttcaatataaattttgcctaaaaatcgccttttgtaccattatccacacactcttgagaacataacttcggtgtgctggaatcaaataataaaaataaagtagatgtagccccattactatcgcgacaaggggggaactactataaatccttggtgtccttttttatttattgcggttttatttagccaaattaattcattccagtcctgttttttacgatcttcttagatcagtacttaaaaccacgttaatagtttggtgctttttttgagagtgctgcagtgaaaagtttggttgttttctcttcaaaaactcattagctcactattctcacaacaatgtgagtaccaaaataaccaattttgaggaagatgttgaagtcccaaggaaattaatcatcccttagtgaagaacctttgtccctcaataaccatatggatgaaagacttctcgacgccaagaaaagtgtcccatatatgccacctatgtcggatgatgaggggcaagtccaacactatctagggagcgcccaccaatcagatccatgacaatgcatgatgtgctccaagaaaatgaggtcttgcgtgtccagttggtagaaagcttacgccataacaaagaacaccaagagcaagtttaaaggcgtggggactaacctcctccacctagagagccttctccccctaggaaaaggagaggtcgcccatcaaaagagcatgccaccatggcacaccaccaagctttgccaaacattagagtatgtgcaagacatgcatatacaacccgtgcaccattacatgaagatgaccatggcactctaacctgccatcaaggtacccataaccaagcaaaccaagtcaacaatcctttaggcaacaccaatttgtcaatacccaacactggaatacgtgcctgacacactcataccactcatgcactatcaaatggattgtaaaagtactgtaggttattgtaatatgatattttaatttatcgactttcactgattttatattattattatctttaaattaattagtaaatttatttaaattattagttaaatataatatttgtagtgatttttattaattaatacgatattattttatttattttactaaacaattaatataataacaaaaaaatgataaagtgtaatttttggtgttgtggttggagtgaaaatatttttaacatcaacagtaaggtaatcattcctttata

SEQ ID NO: 241130 - DNA, 780 bp, Cannabis indica
ttaaattcataaattgttttgtatacctctttaacaatatttgtttaaaaattatctaaactgttgcatcattatgttaataaattaaaattatacttgagtaatctaatattaggttgtttaaaccgttgagtaaattgttaaattaagtgaagttagttgtgtgtcaactgttaacaggacataattgccactattctctgtcaagtcatatttaaaatgtgcatcataagttcattttatttgaaaatggtatttcatttacttaattggctgtagaccaattataaaatattctttagagaaattataaaagagtttgcaaattacctgtgagagatttatcagtataatccacctcttggttatgctcatcatcaaaaatggcaatctcaaccactgaagaatcacagtacaaacataacatcaatttcatgtcattcacctaaattaattaagataaacaaaagtgaggagataatatattttcattcttttttactaatgtaatttctacaaattaacttacaataaaaataattaaacaaacatgaaatttgctattcaattaatatatatattttaggacaaaactctatatttcatagaaggataaattctatctattcttcatgttattacattcattctaaccattaataggccagttcaaaactaatgaaagagaaaaggaaaaacaaaattaaaacatcaaattaaattgcatcatatcttcacctcaagaattccgttcgttttttcttttccactgctgttttt

SEQ ID NO: 241131 - DNA, 993 bp, Cannabis indica
cggttcaattgagagatacaaggctcggttagttgctcgaggattctctcaacagtatgggctagattatgacgagacatttagcccagtctctaagattataacaatacgggttctgttagcacttgcaactagtaaagactggagactatggcaaatagatgtaaggaacgcctttctacatagaactagatcgagagatatacatgttgtaattaagaggatttgaggatagagcacatcccaactatgttttcaaactgaaaaggtgctctatggattaaagcaagctccacgagcatggtatggaaagattgccaagttcttagtatatagcagatattccatggcacatgcagattcaagctattcgtcaaagaaatggaagtaaaaatcgcaattgtttaggtatatgtcgatgatctcattctcattagagatgatgacgcagaaatatttcaaacaaaggtgaacctatcagtacgcttttaaatgaaggatcttagagaattgaaacacttccttggattagaagttcaccgaactaaggaaggtttatttctttgtcagcaaaagtatgctaaagatttgctgcaaagatttggaatgctcgagtacaagcccatctcaacacctatggaagctaatgctaagctatgtgctcatgctggaaaggactttcaagatggagcaatgtatcaaaaactggtaggaagtctaatctaccttacattgactcgaccagatatttcttattcagttggaatagtaagtccatatatgcagcaaccaaagaagccacatttggaagtagtacgacgaatactgaggtatgtcaaaggtccattaactatggtctcttctataagaaaggtgatgaggttaagatcgttggctactgcgatgctaattatgatggagatcatgatacccgacgatcaactactgggtatgtattcaaactctgatttggagtagtgtcttagtgtagca

SEQ ID NO: 241132 - DNA, 1471 bp, Cannabis indica
  modified_base (34)..(34): a, c, t, g, unknown or other
tagattgaatatatatatatatatatatatatanatatatatgatataaaggatcggaaataagtttcaactattaattctttgagcttcaatttcacacgagctttggatctgaaaaagaaaaggaaactaattaagtgtgggtaatcgggcttccaatctctttaaactctctttagatgaaatttagttatttttcacagaacgagtgaggagctcggggattggtacttataggtgaaatactatatcagtatatatgccacattcattgtgagaatattttgatacttaattcaaaaaatcaaaccaaaaaataaattaattggtatattgaaaactatataaagaatatttatacttattaaataatttatttggaattaatggtaatgaatatgaaatattattcatacacataaaagtcacttaaatgattttatacttgaacacttcaaaaagtgatcaaccgacaagaaaattgtatgaatttgatgtttgccacgtgttacacaattagaattataaagtaaagaacacacaaaattttatagaggttcggcctccttagatagcaggtaatgacctactccccttttagttgtattgataccgagggataatactattcaaatcactatatgtgggatctgatacagctcccttaaggatacaaaataagaatcaaggatggcaaatctcaagtgttaagaatgcttgtatgggcgtgtgagagagagtgaggaagagagagttatcagacttagagacttaggcttagaactttatcacttggtggctagaatgagacttacgttttcgaagtcagagttaagacctttatataggagagcctaaaccctaatttacaattaaaatccttagatatttgtatattaaattagttaattacaaaagactaaaatgcccttaaacatggatattttcaagctatcttattgggctgttaggccctaattcgaagtccaatcctcaatccacgtgcaaaaccgtacagaaaaccttgttaggttggccagccagacacgtataggaagcaagctggatggccttttcttctctagaggctggccggccataggggtggccgacaactcctttaaggaagttggtctgtcacttaatgtcccgtttgagtgtcggagtccctgttggctaagttgctgacttggccatcttgttggtgagttgtattaccacatggctctgattttgtccacataaggaatgccatgtatggtggctaaaaattgggataacatttgccccgaagtccctgtgtagacatttgtacggacactactacaaaagtggcttttcccaacggtttataagagagtcaattttgaaaaccgttagaaaaggtaagcagagatttttcccagcggtttaaaatcgaagcaaaaaaatcgttgggaaaaacaaatgccaatagtgaagcagcgtgggc

SEQ ID NO: 241133 - DNA, 1088 bp, Cannabis indica
agaccaccataatttttggcacactttctcccaagaagccacatgaagtttacttctactcccattccaaccccaaaggaacccgcgacaaagtttcttaacctccctcgtgacactatgaggaagtataaagatactcatccaatagttccttagcccaagtgtgaagcctttgcttgattttcttaataatcacaccacaatcctccgctttccatttagttggtcttaaagggactccctagtatttgagagggtaatcatgttcttggagagccagttctgtcattatagctttctttacgtccactttcacaccaccaaagtagagctgagatttattgatattaatggtaagaccagattcagcactaaattcatccaaaatcctccttataacctgaatagaatcaagatctcctttgcaaaatatcatcaagtcatccgcaaaactcaggttaacaatcttaatactcttacataagggatgatacctgaattgtggttcatgggcagctagcatcaatcttctggtcaagtattccatgattagaacaaataagagaggagaaagcgggtcaccttgtctcaaccccttcttgccttggaaactcccttggactcgcccattcaacaaaatagagtaggatgtcgattttaagcaagtcataatccaagatatgaatctgcccgggaatttgaattcattcaaaagattctccaagaattcccaattgacagtatcataagccttgctgatgtccaccttaatcgtgcatctcggtgatatgtttttcctcttataattcttcaggaggtcttgaagaatcatgacgttgtgagctatagatctcccttgcacaaaagccccttggttctgattcacaatacccggaagaacttgagaaagtcttgaacaaagcagcttggaaatacacttgtatatggtagaacagcaggcaataggtctatactccacagccctagtcgggttttcagtcttggggatgagtgtgatcatggtagcatgaagttctcgcggcatgaaacctgtcatgaagaagctctcaatagctttagtgaattca

SEQ ID NO: 241134 - DNA, 559 bp, Cannabis indica
cagtttgtggatcatgtcttaaggttctttggggttccagatagattctgtcaatggattgatcaatgtatctctaccacaacacttaatgtttgtctgaatgggggtgaggttggtagaaccaaaccttcctgtggtatgagacaggatgacccgcttttctcgtatctttttaattgggttgcagaaatgttgtctagacttttaaaggaagctgtgaaaaaaggtgagatcaaaggtattagaattagtcggactggccctaatatttcccatattttctttgtggatgatcttatcttggttgggaaagcgaatatggggcaggccatggccatgtggaattgtcttgataaattttgtgattggtcgggacaatgtgttcataaactcaaaacatctatcttctttagcaacaataccctagagaggatgagggaagagattagaaatgcccttggtattggaagtccgaaaggcaacatcaaataccttggtttccctctgttccgatcaagacacaaggacgtagattacaactttatcctggaaaacctga

SEQ ID NO: 241135 - DNA, 1285 bp, Cannabis indica
ctagggctgaaagtagtcagggtaggactagttttagtgctttatttttgtgtgcatattttttcgtggccactctgacactttatttgtttgtcattttgaagcagccaggccaatggaggagcttttggcgactcttgcccagacctatagtcctgactctgcccttcctcctgtgtctgaccagacggtgacgctagggaggtcttcttctagcgtccccttaggccaaatcgtcctgattgacggagacggggaggtcgagaaggaagaggaagagggtgagatcctggcccccttggaccaaaaacgcaagggtaaaatggtggaggctaagtcttctaaaaagcctaggagggtggatacttcggccgtcagctctgatttagggattccacttgaagcggaggaatacactgtgcctccagcattgtccttacccccgttcccgcagatgaggagagacagcaactccagatcgtcaagcacaattatgctatggctgagtatacaaaggggaatgctgaggtggaggctttgaaaaaggtcttacgagaggcccaagagaattccttgcatgacgaggcttataagaatgcctgagacctgaacatggacaccctgacggacttgttcaactgcttcgttgggcctacccttgctccctttgcctccgagttgacgagccacttcatcgccaacttgacccaactcccagccaaaagatatgcagcatgcgcttccacgaactccatctatcagattcaggatatcagcgctgctatgactgttgtaagtctctgtaaatgttcttgggcttttctttatgacacccggtccccgtacttactcctttttcttgtattgtcagattgctgcagagaccagtcgcatctcatagactttaatcgatcatgggtacgtcatgtccgagtttggggtcatggacgaggccatgaagagtctgagagacttggcggctgaaaggaaggcgtttcgagaggaggcccaacagagggaggctcagggcacaggcggaggcatcaggaggcactgaaggccaaggctgaggaggtgaaggctaaggatgacgccttgaaggctagggatgaggccagttgccaaggcaaggcgcgagcttagggaggccaaggacgcaattgaagatttgactgccaagctgaagtccccggaagagcagcatcaggttgagttgcagacgacggccaacttaaccgtggaggtgaaggagctcagggatttccaggatgaagccttaaagaac

SEQ ID NO: 241136 - DNA, 825 bp, Cannabis indica
aagtttgtggtgtattgtgatgcatccagacagggtttgggatgtgtattgatgcaagcagacaatgttataggttatgcctcacgagaattaaaagactacaaacagtgttattcgacccatgatttggaacttgcagcagttgtgtttgccttaaaaatttagcaacactacttgtatggagaacggtgtgagatttacactaaccacaaaagtctcaagtacttctttactcagaaagatttaaacatgagacagaggcggtggctagaattagttaaagactatgattgtaaaattttgtatcatcccagaaaggctaatgtggtagcagattccttgagccgaaagggtcctgaccaagcctttagtgtcgtaatgattttttctcagtagacttggatatagctagggtaagcattgaatttgtagttggaaaattgcataatctaacaatccactcggacttactagaaagaaccagaacgacacaattggaagatcctgaattaattaaggttcgagaagagatattagctggtaaagctaaggacttctcaatttcaagcaatggaatattactgtttaagacccgggtatgtgttccaagaaatgttgaacttacaaaagagataatggatgaagtgcaaactacaccttatacactgcatccgggtaccaccaagatgtatcaagatttaaagcctcattatcggtggtacgagatgaagagggatgtagtggaatacatggctaaatgtttgacctgccaacaaattaaagcagaacatcagcgaccggaaggtctacttcagccattaacac

SEQ ID NO: 241137 - DNA, 1097 bp, Cannabis indica
tttttttaattgatatactaggcatgagctataggaaaataactaaattagaaatttaatccacagatatatgttgattgatatactagacatgaattatagtgtttttttttccagcattataattgtagtagcttgattgcaatttggtgttaagaatataatttttgttaccatttaatactttgttcgttttcttctgaatgtgtaaagattattactgaggactgcttgcagaaatttatcttgctaaaaaaattgtaattgctcccaatgagacgtattttatcaagatatttgtttttgtaggcccaacctgttagtgcgcctactccaatatcaacaacaccgtctacaacttctcagattcctgcctcagctgcagcacagtgagtgctttttccttccttaattgatagtgtgactatttacatttaaaatcaggtccttaaggcatgcatttcctactacaatcgtcattaatctttttctcctctgcattggttaaattgtgcaggccgcagtctgctccagaacctgctcctgcagctactacagtagctcctactgctgcttcgtgagtaattattctaagctgtataataattcattgtatcttttggtgatggtcttgttttcttatttgtgtttgggttttcgcagttctgaaactgatgtctatggccaagctgcatcaaatcttgtcgcaggaagtggtttggagtctactgtccaacagattcttgatatggggggaggaagttgggaccgagatacagttgttcgtgctttacgtgctgccttcaacaaccctgaaagagctgttgaatatttatattctgtaagcgtttatgctattctttttactcgttatctatttgtcccttggcctattattattattattattgttaattttgtccctgaattttctacactgccaaattgtacctccatagtatacgatttgttaataatacccctcaaaatataatttttattgtgaagcgagtgatgccgtggatgatagttgataaatagatgcaaattaaatgcctttcaccctttttactttaatgattaaaaaactaaaaata

SEQ ID NO: 241138 - DNA, 1125 bp, Cannabis indica
atcttcttcgttcatgaaacttgcaataaatttcatgacgtagtatccatcttgcttcccttcttgctgctgtggacatatcggagttatccactttattagacgatcattgtatcgagttgagcttttactaagcaggttgagcgacctacaaaaaaagtaaagttagcatataaaatatcaaacacacttatatactgtgatgtttgttgtagaactttcaagttaacaatgtattttaaatcttttgatatataactattgttggaatccaagtacgccaccgtatgtgtagttggtttgatgagtacaaccatccaatatacatgtcactacacaaacaaatgtgtaagattagtcgattgttataaattatgtagagttgtaaattatgaaactattaattttagatttacttgttaattgttgtagggggcaacaaccaatttagctgaattatcgatttcagccatacatttgagcagtgcttgacaacaagcattataatctccaaccttggtggtaatggtccttggatttaaaaatacatataatctgtttaatctattaatttgcagctattgttccttaaagaaaccttataaaaatacataatttataacaagctctcaaaataaattttcaagtttagtaagagttgaatatcatacttgcactagattgtaataggctggactcctaaaaattttatttggcacaattccttgatgtcagttgttgaaagccataccgagtaatttttaaccccaaataaatcttggttgacctcaaagtgaattgtcgattggggccacatattgaccaacttaaaaaaatgtattgattatcaaaatcttttgtggtgcaaataccaagtaaatcttcaaggacttgtctatttcaacgaatagattgtttcttctgcatttggttgttagggtgttacttctatagaaaaaataaaataattaagttagaattttttattaatcaataaacatataataagttaagggaattaattaaaacataacaactctatttcgactgtcgtaatgtagtccttcagccatgctacataaagtcttatatcatgacctacaatggtgtatgcttggtgaacgc

SEQ ID NO: 241139 - DNA, 837 bp, Cannabis indica
tacaaaaaaaaaaaaaagaataacaaaagaagaaaaaaaaaaagtcagaactgaaaataaaaaaaggaaaaaaagagagaaagatttacacttattatataaggtgtattttcttttaacagaaacccaatttagtaataaaaaatggtgtatttataaaaataatatttatgtaaatgaaatggagtgtacttataaatttgagaaaattatatacacactttactttatttgttttaatttttaccttcatttttacatattttaaaatatacacacttttatagataacttgtccattataccttaagttaatgtaaattatatactacactaaagtaaagggtgaggatatattaaataacacactcaaaaaagtgaatacatttcaatgaaatataatatgagagtaattttttattaatgaatacaaaaaataaatattcctcaacttattccggtgtaaacataggtctccttacactatttattgttagttacgtgcataaaataataatgcacaaaacttaaacttttcttttgtaatggattatgatgtttttagtactagtcaaatgacataactgaattggagtactattttgtgaaaagttggtaaaaaaaaatcactttcaaatggtttattttggttagccaatttgcattttcctcccaaatgacatttggttgggcaattcttttccacccacaaccatccgatataacataaaggaatttgacaccaactaagacagaattcaaagccatatgtacatttagctctgcttttcaattcaagatattaaaaaaaaaaagcaaatttggaagttcgaaccc

SEQ ID NO: 241140 - DNA, 1219 bp, Cannabis indica
tgtctgaaaggaaagaaaagagaatgtaaatataaagaaaaaacaatagttgtaaactagatgaaatggtcagcctaatcaatgcgaggaggaagacgagggccccggcgttcctcgagcaaagcgtcaagccttttgcttcttctcccggaacttagcaagggcttcctcaggtttgggataatcaagcttgatgatttggccattcaactgccagaccatgtagacgccatcatcaaagcgcttgacgcaatgcttacagccaattggggtcaggagctcatctcttttggccttcttcaaggcctaatctttaaaatccctcagctccttcacctccacagtcaggttggtcgtcgactgcaagtctgcccgatgcagctcctccaaggactttaacttagtagccatttcgtccatagcctccctagcttcccgcagctcgcgcttggccctcgctgtagcttcaccctccgccttcagctcctcccggtgccttgcctccgcttgagcctccctctactaggcctcttcccggtacttcgccttcgcaagggcctccctttgctgggcctcctcctggaatgccctcctttcggcaaacaagtcctgcaaaatcctcacggcctcgtctatgcccccaaattcgaacatgacgaacccatggtcaatcagggtcttagagaggcggccggtctcggcagtaatctggaaagagaaacgaaaatgaaatcagatgccttaagacaagatataaaataaaggagtaaaatcacaaagtactcaccgcggccagtgcagcgctgatgtcttgaacctggtaaatggagttcacggaggcataagcagggtatctcttggctgggaattgactcaggtgggagacaaactggctggtcatttccgaggtaaaaggagcaagagtaggcccgaaaaagtggttgaaccagtccgtcaaagggtccatgttcaggtcccaaggatttcgaaaagcgtcctcgtgcaaagtgttctgctgctcctcccgcaggaccttcttcagggcctccaccttagcatgtccccgactgaactcgtccagggcataattatgtttggcaacgcggagcatctacctttcctcgtcagcgggggccggggtgagcatgatgtcgtgcggcacagtatactcctccacttcgaaaggaatcccggagtcattgctaacagccggagtgtc

SEQ ID NO: 241141 - DNA, 1551 bp, Cannabis indica
tggctactgcagcgaggtttgctaggacattaaccctggtagtcactgctggtgtgttaggcgggtttgtgggagtgtttacaccttgatcgcccatttggggatcacgggcccttcctcgtcacgtggggcgtgggagcgtgctctgaaaacagcgttaaggtgatcacgcagattacccctgtgaacctgatatcgtcctccctgttgcgtctccacagaaccggacctcgtgtaccagctaggtgtgcgaccatgcgaggatgaggaggcagattctacgccgttgtctcccgaaggtctgctacgagggttacgtcgttcggggtcttcgtcgatctgtgtctcctggttgggatacctcgcagattggtctctcgaggttggttgattcaggtgagtccttcggggttggtccttcgttccctgcgaacatggttattacgacgtctagagtgggttacctgagggttttctatgcgagtagtgggggctcgaggaggacgtcgggccctaatctgtccatccacctcggcctgtagggtacgcagctggtcctggatcgcggtatcctggtcagtggttagctggacgataccctcggacactgccgccagagtgatgggtggaaagtgccccattgttgctactggcgtggatgtttctccgacttgtgggccagcagtttcagggaatagattgaggggtttgacattacctcgacctactccgccattgatgacatctacaggtggtgttctaaccccagacaatggaacgttcatcattccgatgttgatggattcattcttaacacctccgtttgcttggtttccagccatgatgatttccttcttgtatttagtaagaatgtacttctctgttaccatagacggtgccaaatgttgttgagcaaaattcgcaacaccaaaaatgaataataatattaataataaggagaaattatatgaagaacaacctgtgagtattcaacctaaaacgctgagtactcgaactgggaatataattacttagcaaaaacctagaaataacaagaagacaaaggagtatagtggttcagtcagatcacggtctgcttagtgcactgttgtaagagttttcgtagtgtcctatttcatggtggatcactcctttatatacaaagcaagtgtccagttagttacacaaggattgcattcattgtcaatccgtttatacattgatttatagtgattaagctaaaacgtaaacattaataaatgaataacaatttctattcactaaatacagtaacgtatgcgacttctaatgttcaagttggctgttcatattccggtgtaagctcgcgggcttaagatatacctaacatttagttaagtctaggatgtctgcgttcttagatagtcgcatttacggacatcatataacgagccgatagaacctagatgcacgagtctatattggtttatcgaggcctttgggtcatcgggaccagctcgcattatagagagtcgatctctatgttctcgcaggaggatggaaaggatactc

SEQ ID NO: 241142 - DNA, 547 bp, Cannabis indica
aaatagaatggttactgcacaaagccgccagaaaagttatgctgacgcaaagcgacagaatgtggaatttacagtgggtgataaagtgttccttcgagtgtcacctatgaaagggattatacattttggaaagtgaggaaagctaaatccaagatttataggtccttttgagatattggacaaagtgggacaggcaacttataaactggcactgccaccagtattagctgagacgcataatatgttccatgtttctaggctacggaaatacatgtcggatccatcacatgtgctgaactatgaaagaatggagctaaagcaggacttgagttatgaagtgcgattagtttgcattattaagtgcgacaagatttatgtaaacctcttatttattattttagataatagaaacaataataaatttattataaatttcactaaagtagctttatacatcaaaataccatttttgaaatttactgtttattttactcttaaccatatttaatttcttatgttgaccgtaaaagtgaaagaactatcgatt

SEQ ID NO: 241143 - DNA, 1340 bp, Cannabis indica
tatactttttctatttatttttattctaaaattgttttcttctatttctttttacggtaaggatcacttgtttatttttttttcttctctaagcttccaactgataccataattatgtgagactaccatcattggagagtacttccatcctatgactaccattggagactacaattacagtgtttctccatctttgcatctccatataaacccatattgcaactctaactgaaactcaaatcgcaacccactgtcttattctatctttctcttcacctgtgagtttttctctttccctttactttggtgagattatattctttgagagcacaaacctaaattgtaacttagatcgcaaccctatcataccaaccctaaattaccatcgaactattcgtcattgctacaatatgtccacggcgttccagtccactcccccttggtttcgctgacaatgatttcccaaatcaaaattcaagtcgcaactcaaattgtaactcaaatcacaatccaaatcgcaatcctaaattattataatccatttgatgtgctaggcactgcttacggcgttcaagaccactaggtatcgcaagatatatgatgtcatttgcttaaggtattctctaaaatggaaacccaaatcccaatacaaaccacaaccatctagactataattacaacatctaatttttatggtcagttgcaattctaattgcaactcaattcgcaacctaaattgcaattatctaattttatttttactgtgtgaaatcctaattgtgacccctttcttttttaataccataattttgtaaaaagtaaatttgaactgtatttttgcacaaattaataatgcactataaccttatatataagaaaagccctaatttttatatgttgttagaatttatgttattataattttttttgtttgatgtaatatgacttttatgtcacacacaacataaaaaagaatatctaacttcgatcgagaatgctaaaagatagtattgatgcctaatatctttttcagaattatattgctatttgtgtaattaagtatcgatcaggtttcatataacttaaaacaatagcttttagaaaatatcgctaactaatcgtaggataccacttgtaaaagatgttggacaccacatgtgcagaataatgatactcttaaaaaattatcaactaatcaatttttgtaaggttccaaatcaaaagatattattaattttagttcaaaacaaaataattgagtgcagttcatgaaattcctaaaaaaaaattaattagcacatttgatgctcaatcaagacaatctcatttattatgtaatt

SEQ ID NO: 241144 - DNA, 652 bp, Cannabis indica
attataatatgtttttttttataataattaaaatattaatagtatttaaatttatttattaattcaagaatagtattcaaattaatatattagaaaggaataattcaatcttattattttttaagttatcaacattattctcttcaagaggagttatattataagcaaaaatattgtaaggttaaatcctcaaaacaaacacggtaatatttcacatcacgctagcattaacccattccaaacagccccttaaagtattcttatgtgatctcaccttttaagttttcaatcacatacaattgttttcaaatttcgaatcaatcaattgagttattcttttaattttaaagagaataaatacacaagagcacttctatatgttagtatcgttaacttttcatattataatatgaaatgattaagttttagttaatttgcggccaaactttctgaattttggaatttggcacaattaatccctattaaaaaaaatttgtggtaaaatttttcaaattctaattttgttttgctcgtattttctataaataaaattacaaaaatattaaaaatattaaaaatttcatacaatagttttttttataatttttgtgtttatgtgaaataatccctaattaaaaaccattatcatatc

SEQ ID NO: 241145 - DNA, 1117 bp, Cannabis indica
acattatatatctacatataagtcaattaactggctatgatgacttcctaagaaccgagttggaatgcaacacatttagttaatctttatttttggttttgaaaaaactcaatctttttctttcaaaagaaaatgaaaattaataggtaaattggaagtcttgacttttgtcatggtttgtgagtgctctgtttcctagttttgtctcttgtgttttgtcctgttggttcgaatctgtgtcttggttattacccacgatttttatgatggcatcttctagtaatcttgatcaacagctattcgaaatagccatttaagaagagtcagaaggtggactcgatctggaagaactgggtcctaaggaggaagaggagtttgtgtacgattggcgtttatgtctggtgggtgcttttatcactgcaggggcagtggattttccgtcaatgcaacagaccctagcggctctgtggaagcctggtaagggagtatacataaaagaattggatgctaatcgttttttgtttcaatttttccataaaattaacattaagcgagtgattgaaagcagtccatggtatttcaatagaaaagctctaattatctcacgaatgaagaacaactccaaccctcgatgtatcactctcgctacgttggacctctgggttcaaattcatgatcttcaatctcaatgtatgacatctacggtgcttcaggcagtcgggaactatataagggcatttgttgaatcgtgtcctaataattttatgggtatatggagggattatatgagaattagagtcaccatcgatctgtctaaacctctaaaacaaagaatgagactccgtaagcttggcgaagagtggttttggattactttcaaatatgaaaatgttcccactttttgctttatctgtgggatgttggggcgctcggagagattctgtgtgaagctattcgatacaccagccaatgagattacaaaaccttacggagaatggatgaaagctccgctccgtcgacgaacaaagctcatcggagctcagtggttacgtacgagattcgaaagcatggatgccagctgcaacggtaaccagaaaccagatcatcctacccaaaa

SEQ ID NO: 241146 - DNA, 826 bp, Cannabis indica
ggcataaaacccaacaattcacacactggaaaaataccccaaggtgacgaacgccacaagtgcatcgccacatcacaagtaaaaaagagatgctccatggcttcctcaccccctccacagagaggacatttagaatcatcaatcggaaatctcttgctaatgactgctctaaccggaagggcatttgagaggatgcaccaccaaagaaccttttggcgctccataattttattattccagagtttattccacatagaaggagcgacatcacaatagggcgctctctccaaagcctgggcaagataagctgatttgcaagagaagtgcccattactttccaaagtccataaccaactatcctttccactactacgaggaattccatccttaagaatagctaaaatggtctcatggtcgaagagacaatgaagctttcccatatcccacccacccctcgggtgtcaagagatcaacaacataattgttatcctgcaccacaccctcttttggtttcggaacgaaacctttcaagtgagggatccaaggatccctccagatactagtatctcttccatctgccacccttttacacgcccctttccgaaggattgtgcatgctttaagtacattcttcaaaaaccaggagtcagaatctttataactgcagttgagaaactctctctccctcaggttacttagcctccagaatcttagagcataacgactgctttcccgttaataagttccaaccccacttggccaaaaaggcaagattcatttccttcgtttttcgaaaacccagtcctcccaatgatttgggaaggca

SEQ ID NO: 241147 - DNA, 560 bp, Cannabis indica
ggaacgaatcaaagaagcacaatggtaagatccagatttagtgaaatctcgagatagggtttcagctgggaagattagtgactttacagtggatgatacggggatgctacgctttatgaatcgtgtttaacttgtcaacaagtgaaggctgaggaccaaaggcctgcaagtttgttgtagccactaaatcttgtgaaatggaaatgggaagacattgccatggacttcgtggttggattgcctaggactatgggatattacgactttgtgtgggccataggtgacaagtttacaaagtcagggcactttttacccgttcgggtgaatttctccattgatcaatatgcagaactgtgtgttagagaaatagttcatcttcatggtgtcccaaagtccattatttctgatagggatccaaagttcacatcaagattctgggagagcctacatcgagctatgggtactcaattgaagttcagcacagcgttccatcctcaaatggatggacagtccgaaaggaccattcagattttagaggacatgctacaggcatgtgtact

SEQ ID NO: 241148 - DNA, 1356 bp, Cannabis indica
cggcctaacatgacgttgaatgatggaacatcaattatcaggaattgtaccatcacatttatgctttttggagcttgcccaatagtgaggggtaaacggagttgccctaaaggtgtaacactttggccggaaaagccatacaccaattgagtactggggattaaatctttaagttggagccccatattctcgtatgttgtcttaaataacatgtttctccattatctatcatggttcgggccactgttttatttgatatctgtacctccacgaccaagggatctttgtgcaggaagtggacgcagacaacatctacttcagcgaaagttatagtgggttcccctagccgtggtatgtttggctttctctcctctacagccaaaactgtttctttttgctcatgctgtaaggctcgggcatacctttctcgagctttgcccgagtctccatgggcctccaataataacttgcaaatgcccgtccactagtggaggcattagtagatcttgattattgtctgtttgggtggccctttaattctgattggccttgacgtatttttgcaaatgctggttattctttctaattaagaattcaatatcccacttcaggttgtcacactcattcgtgtcgtggccatagtctacatgaaaatgactgaacttggacgtgtctctcttacttacgtccttcatgggagtaggttttttgtatgggaccatagatgagttgtcgcgtagatcatctctagaacgtcagttaggacagagaaggcagtgaacttggaggtattttctctagaggtgtgttcggctttgcctgtgaacttttcctttttcccgttgccttgcctaccattgttattggaccttttgcaaagactgcctaagtttaatatgttggataattagataattagggttaatttatgagatttaattattaattatgatttgcatgtttgttgagaattatttaatattaacatgtattaattatgctatgtatgtgaatttctcattttctgtgattgtcctcggtagcagtggaaagcgacgttgggccattagagagtcacgtttttttttatggtttagaatgtttttattggtggagtatcattgttaggtattggaggttttgggaatttttagggtttgaaatgaccaatttaccctagagaataattaacttttgaattaagtaaataggggaaaaaggtcttttgacaacggttttattttgtcttatttgggaatttagttctgattattagtttaattaaataaaaaaaaataagggttttacacttaagttagaagaaaaacaagaaaatctagaaaaaaaaaacaacct

SEQ ID NO: 241149 - DNA, 1106 bp, Cannabis indica
gttattttatttgttttgtttgttaattttggtatgtttaaaaattttgggaacgtccaattacaactattatgctgccaaaattttagtagaattatgataaattttactaaaaaaagaaaagaaatagtgtctaattagtaacttacttgtgataatgttagttgatgtagttactatttgttataacttacttgtgatgattatgtttctttatgcagttgttatgttatagctatcatgtgattatatttgttaatgatgtaggtatatggcaaactcaggttcagactcaaattcaaatttaaaccctattgtagagtgtcctaaggtgatacctaagcgaggtagaacggagatgaacgcaatcagtaagttgatggaccaagaaaaaagacttcctctccaaatcaacgataaatgagagtattgtggcaaaaactatagcaatctaatatcacatttaggagatgccatatgataattgggctgtcatataaaaattggaagcaagacaaccctcaacttaaaaataatatttacaaagatatataggtaaacgattatgtaataccctaaggttaagaaatcggattagcaaccctaactagtttaaatatgaaataatgtgaaactatattattatataatttaatatgtgaaactatactgataattacattttaagaccccgttggtataccagggcatttttgtaaatttggcccgagaagggtaaaattgtacttttaatgatatatcgtgcttgtggactatattatcatatagtatgtttattctgtctatttgcgggtattttttgacaagtcggcgtgatatagtcataactaggtattttggacggaactgggttcggggcccaaagtacattttgggattttattttggcatttatatgataagtgagaaatctcaaattatgtgttattatgtgtgtatgaaatgacaagtttacccttgccaatataaatatgcttattttggactatgagggtatttttggtctttttgaacatttaagcattattcaaccaaaagtaattttgagaatattgaaaaattattattctaattttctaagccct

SEQ ID NO: 241150 - DNA, 902 bp, Cannabis indica
gaagcatgtaagtttatttgtactggtttaagattacaaactgtcttatttgtctctttatgaattaatactaatgttagcatcatttgtacttttaacataattacccaagacataattaacctagttttattctatcttctactggtaatttataatctcacaactaattgttatttttatgtttggcttaatataaaagaaacaagggaagttctctggcttggatccttccggcatgaaatcttgaatgttgacacttttgttggggatgggtcaaaggaaaggagaaagaatcttgaaggaagtgggaaggaggaaggatatatggatggtgaggccaaggagtaatgtgatacttagcgattctaaggttaaattccattgttatttatttcattctttttcaatttctgattaagttaattgttgttattaagtttttgctatgttacaactatattaaatctctgttctagttttaaaattatctatgacaatttagaatttgagtgtgtgttttgtttggtatatatggtcaaatcgaaaatataattagttcatatagcaatgtaagaaatcaaaagccatgcatgctggctatggttctctaattgttattttcttctcttaattcaacatacaaggattaaaatgacaaaaatatatgtttagtttaaatgatataagagaaggaagagaagtaaatcatagaactgttattgctcaaaacttcaataaaagtgtatcaaagtacattggtcgatgagtattaaattatataatttttattaaactctgtataattttttatttcttgaaagattttactttgtttattgattggttttttgactataaatagaaagaatggcctggagtctacgattttcctcctctct

SEQ ID NO: 241151 - DNA, 1154 bp, Cannabis indica
caattttttcgtctggtatgatgcgatccgatgtgggcctgatggtggtctgatacataacgtaagtatcaagacaaggatagaagcccgattctggcccgattgtttgtccgatgggtggtttgggacattatttttatgatgggtccaatatgagcccaatgggtggtccgatgggttgtccaatatgggtttggggacattatttttggtggggtctgatatggaccctattgggcctgataggtggtccgataggttgtccaatatgggtttggggatattatttttgatggactccgatatgagcccgatgggttgtccaatatgggtttggggacattatttttagtggggtctgatatgggcttgattgggcctgatgtgttgtccaatatgggttttgggatatttttttgattgggctcgatgggttgtctgatggtttatagatttattgcattttcaagaatttggatcacttttctgtgagatttgtgttctaaattgtaatttgtattttttttaatctatgtgacaggttcaactgttaatgcgtttgttatgtataatggtattttagagtttgagggtagagattgggtttataaccgggtcgaaacatttgacattgatacgaacgtaagctactcatgtttggttgatcttttgtatgaagaactagatgttgacaaagtgtagtatgacttaaaatgagaagtaaattacaagtacataaaaggcttaatgtatcaccttgaacttattggaaatgataagcgtgcaaggttctttttgtctacacttgcgaagaagccagatgaatttactcccttatttgagaatttgttaaaaaagaatgtttgtgtcgatcctagtctcataccaagttctttaaggaaactcgtagcaaggttgggagttttgttccagtaaacaaatccagatgtgttggttgacgatgtgttacttgaattaaacactatgatgtcaagtgcggatattatagcgcaaatgcccttcattgatggtttttatgatggtgcagaccctgaatgctgtgttgagggcactgatgacgtaagagatgatcgagatatagaggtccctgctgctgtatctttgaacttggctccactatcgtacaaatgcca

SEQ ID NO: 241152 - DNA, 1006 bp, Cannabis indica
gcagctattattagctaacgtcaatataatatcacctatcaaaagtcaattccaatttaatttatcaatatatatagtagttacttaaaaaaaaaattaggaaattaggatgtccctacctgtgcctactgcggcacacttcctactctataatagactaatcagtctaatctattaaaaatttaaaatcatttccgtaatccctacagcctattataagtctattatagctcttgctcatttaaattattttttcttttcaagttatattataatcgcctaggggtaagtggtaactatatatatatgcatatatattaataaattaaattggagtgagaaggaaaaacaataatattttatatatatatactggtagtgatcgtccattctctctaatctatcaaactcaaagcctctaagtctaatctatcaatatttatttttagtactaccaaccattctcttggtattgtttctatctctctatcaatattcataattttttacaacaggtataaaatattttatttattcaatttttgtgtataaactatagataaattacataaattatagtatattgtacaaatacaatctcgtttgtatatatatattttttattattattatatataatcattatttgtgtttataaatgtatatatttagtcatttatatattattctaaaagtaattgaaactccatgaacttcactaattggttttctccacataatttatcaacttccagtggcatcaaatatcgatcgttgatagacaatgcaccgacgttcacagagtacacaccaaactccaagtatgcttcgagctcttcttttattaattatatataatcaaaaatattcatacctgattatttatgtattttaccaattttaatattttaaattgtctatattttgtgagtttttattgttttacttttgttatatatatatattgaaaaaccgtgtttttgcaaatgtcagttgtatataagaa

SEQ ID NO: 241153 - DNA, 1736 bp, Cannabis indica
gcaatgtacatattgaccttactggcctgcgtgtcgagttgacaggagttgttttaggctagttgtatctgctgtgtattttaattttgtgtttaattagttatcgtatatatttttttaacaaagctttttatagtagggattctcgaaacacgctttttatgccgttataatgtccgcttatagtgttatatattagtcaagttttttatattatcacggtttttaataattaattaatctcttagtattaaattagtttataaaatcacacacgtggtgtccctataaattagggcattacaggtttggtagcatggatgcatggtatattttgagtttctgtgtttttctgggctctttgtattggaaatgattgtgtaagctcattatacgtattctggaaagtttggtagaaattggatatgttttgagcaggttatgaaatgttcggagaaacctggagcaaaccggttaaccagtttgccaagatctgtaaatctagttaaccaattttggcagattcctcaaacaactcattttctcgattcgtgtccatttcagtgccttagttggttaatttcctttttcctagggtattgtggatccatttagtaatagcagaaccttaacttgtaggttcaggtttcccgaattagggtttttaagtgtgatttactcggtttcaatatgtgattaaggcatccatccagcacgagaatttccgttcaggtcggccaactcacgtgaattcggaaaagaggtaagaatagtgtataatatgtgatatatatgcgaatatatgtatgtgtgaaatgtatatgcatacttgttatggtatctacattaccaacacttgtatagaaatggtacaaagtgcattggtatagtgtatattatttaatgagtacattaaggtgttaccagctcaaatatgggaagtatagggtaagtgtggtataatacttagtggtacttagggtacgaaataaaccctaccaacactcgcacactgttggtacgaagtgtatgtggtacattggttgaaccctagtatggaacgttcttactcatttgttaagccttgtaaataggtgtataggtgcctagatacaagtcgctattaagtgatatgttatatgctttcttattgagtttgtcgactcacagttctacttttgtgtgtaggtaaatgaaaggcaaaggctgaacaggagtaagcctgagctaggatgaggttgtacatgtcatggaggtgcgacctagagtgttcaagtcttgtaacatctggggatattattttgtagttgttgtgcgacctgacttttgtattatgaatattttgtaaaaagtttaacaacaggatcccgacacttgtaaacatttttataaattttataaagtttcatagttaatcttaaaagtttaaattttacaagattttcaagaaaattctttgattagcaaagatgcacttcaattgaaaaatcactgtaacgtgccttagcattagggcgttacaaatatagaactaaaagtgtatttcaattaatctcaatatcttaatatccagatcaagtgtagtatgtagtattctctctataacaggatctgatatgcttcattcaatacaaactttctccaccattacatatcctgaatcacaaaatccttgatattttgaagttcctctctatatgtctactcctctaaagatactggattctttacttttt

SEQ ID NO: 241154 - DNA, 1076 bp, Cannabis indica
tagatcaatctcagccgtcagatcaaaaaaccccctcatctgacggctgctgtacatcacggattacaaatccgtaaaagtacaataacgggacaaatcatatccctataaatatatataaaatagaatcaaatttaaaatatataaaaaaaatgattaaaaaattattaagtttttttttttatcttggagtgcaacataatggaaaaaatcatttcattaaaatgagattttaatactctaaaatgcaactaaataagtgaatggaataaaaattgtttcctttcctttttttccattccattcaattgtatttcactacttccaaccaaatgccactttaatgtattttatcattaaaaacatctctaatgttattccctatttttaagctgaaaaattaaaataaataatcatttttattatttttgttttgctcattaactactttagttagtatttaattattttaataatattttataatttaaatttattaaatataaattaatttaataaaataatagaacttttaattaaaatattattaaaaaaaaaagtagaaaacttcatatccatcatttattataaggagtcattttgttaagctcactccttatttgattgaggatgctctaatatgtaaatcaggagtgattttgttaagctcactccttatttgattgaggatgctctaatatgtaaatcagacgaaatataaagtttaaagagcaaaatcaacaataataaacttatcaagctttttattgtaaaagaaaaagaaaaaatctaataacaaccccaattaagaatctaataagccacctatcattaaactattaagagcatctctaatgaaagtgtaaataagtagtgaaaagctaaaatatagtttatttaacaaaaagtatgctctaatagtgtgccaaaaaataatgtaaatttagctcataacaaattttgtaaagtatgctaaaatatagttatttaagacatcttataaaatgaagacctctattttctttagtaaaaacacccctagtgccatgaaacagaggatcaaggaaacgctggga

SEQ ID NO: 241155 - DNA, 894 bp, Cannabis indica
gatagaggtgtatgcttataaagagactgtgatcagacttggaagaagcaaatcccagggacaacatgcagtgatggagtttctcaaacaagggtcgaggagcctgtttgagtcaatataaagctttttgaagtttgcacacaagatctggagaggaagggtcttcaaaaccagggggttgcaccatatacaccttttcttgcgaatcatcatttagaaaaaaattattgacatctagttgctttgttgtccattctttggtgagagcaagggtaagaacaagtctaattgttactggttcgacaacaggactaaaagtttctgtgtagtcaaaaccaggttgttgatgaaaccctttggcaacaagtcttgctttcagcttgtggacactcccatcaggattttcctttttcctatacacccatttgcaaccaattgcagtccttctaggtggaagcttgacaagggtgtaagtcttgtttcttttcaatgcaagaacctcatttgccatggctttattccaatgtagttgttgtagggcctgcttgagagtagtgggaatttcagtgacaatgtaggcttcaggctttttaattccattcttggcacgactttgcatcctgtgagaattgacagtggcagtgacagatgaagattctggtgcagatgtcggcacaacaaaggtttgaggtactgagacaacatcaatattggaagcaatctgtccttgattgatagtagaaactgttgaaggctcaggatcaagaactgaggttggtaatggatcaattgcaggagcaggtgaacaaggaagatatctaacttcttgtgaactgtgctcctcaccacttgcagtcatagataagtcataaaaaccagcagcattagtgtgag

SEQ ID NO: 241156 - DNA, 1348 bp, Cannabis indica
cttaccttgagttgaatcaaaaaaaccttgctaaactactcattgcagctaaaaaatccctaattattgttggtttcccttgagggttcaaaaaagagagagaaagagaagtggttttttcttaatttttttcctatttttaatatttcactaaatgaaagataaaattagactattttatcaaataatggccagctgccacactaaaaactagccacctcacgcaagtcaaaatgacaaaaaatgcccttctcataacttaactagtaaagtggcctagcggtaaaatggtcatttttaaaatcccgactgatcccgacatttccaatatgcctatctaggtttccccgctattactaaattactaaaatatgattctattgaccaaacgacgcgttctattattttcgggcacaaaacatgaaaaatataaaatttcatatatagcataaataatacaccctgaatttaaataaatctccatatattcataaattataattaataatctaatttcataattaagccctaattatctactaattccaaattaaaattaagcagtctttacaagtgttggtagggtttgcaccttacctcgagtaccactaagtgttataccacatacactacatacttatccgtactagtgttggtaataccgtattgtatcattgaacatcatacactataccaatgcactaagtatcactatcgtactagtgttggtagcatacgaatcacaaatagcatgcatctattacacatacacatattcatatatagatacattctatgctagtcttacctcgttccaagttcaagtgtgtcggccgacctgaacagaaaatcacgcgatggatggatgccctatgtcacattcacgtaaatgggtaaacaacttgcaaaaacctaatctgagaatctaaactcaaaaccaaagtttccctatcaataaaaaacaagacaataccctaaatatcgaggaaacaccaaaaataaggctctaaaaatggcccaaaccggtaaaccagaatttttagagtaacagaaatctccaaaaattcataactcactcaaatcgttccgaaacttcagaaaacctaccagaccacctataataacatccaagagtagattctaacaagaaacaacaacaattaatcacaaaaattcaaaacaccatctcaaacttgctcaacacaagaattaggcaccaaaaccataaaattcaagcctaaaacaaccttactaaacaacaagaaacaaagaaatgctaaccctaatttgaacagagccaaaattccaaaaattatatgtccaaaaaccaaaaaaaaaaaaaaaaaaa

SEQ ID NO: 241157 - DNA, 834 bp, Cannabis indica
aattcctcacttatggcagagaaaaatattatttcaaatttggggaaaatacgaagtataaaaattaaaataaaaataaaacacaaaacgaagtatggaaatgaaaagtagagtcacatgacactagctttatatattttaccaccattctctacacagatctataaaagagaaatgaattgagttgctctatcaatttttatttcttcatgtgtgtatgtttaggttgcacttcttgcagcatgtgcgcgtcggggtttgaaagtcttatcagcaatgggagctggtgctagagctgatcctacaagaatacgcgtggctgatctgagggaatcaacaaatgatccattatcacgttctgtaatgtctctgccgctattttctcttcttgcttaaacattttctgttttaatggattttatttggttttcagaggtattattagggagaacagtaccatgtatgtaatatttttcaaaggttgatttaattttgttttttgttgctctgtcttgagtggctgtctagtataatgataaggataaatgagagctttcttatatttgtaaactgaattggagtgcaaggtttaaaatgtaaactgaattggagtgcaaggtttgcaaggtaaactgaatttgctttaatttcattttttgttgctctgatcttgttaggaagtggcagtgcattatgtaaaagcaaagatacctacagttctatgtctgagttcaatgatcagtgattttatattttactttgggaaattattattgtgtaattagtttaatttgctactgataaagtttaaacttattagtagtattctttctt

SEQ ID NO: 241158 - DNA, 1132 bp, Cannabis indica
agaagctaaactgtatcttcttggtgaacaatgatgcgaaagtatcccatgcttctttcggtgtcttcgccggcctgatgtgctccaacatctcatcttagactgtggtctgaattgcaaacatggctttgcctgctttaatcttccatttctttaaagcggatgtgtcctccgattgtgtgacttcattgccaccagtgaaatatgcctccatgtgcatcgaccacgtgttgtaattttggttgttaagtttcttaattctgccgaccacttgaaggtcacccatcgtgcaaattttgtagtagtaaaccacacacgatcactctataagaaactcaacaaaggactctttcgaaatgaactcgatccggctctgataccacttgttggacaccacaatatgtgaaaacttaattactttattactgtaaaagcagttacaccaagacttgaacattttaacttgatcacaatacacaccaagcactcactcttttatttaatagacactcacacttaaaggtttacttgcacattgtttgatgagacactcttttagagttttattgggacttatacactaggacacacttcatttgtacacttaactcaccatacaccaccaaagcacccactcccctatttatactactcaaaagatggtacattattatggtagaatgttctagcaaattatcaatttattatagcttaaaacattcttgaaacttcttatgactattaactctctatgattctagaaaaattctataatattaccaaaatgatagaaaattctagattcttatagagtaggtgtttctcttttaacaccaaccttatattattggatattgcttatgtacaatcacagaaaatatttgtacataagggtagtttttttctcaacatgtgtcactttatttatttactttgtattttattttatatttttttatgtatattttattattataagcatcatcctatattattttattatatatttataatgtattgacatatatgctaattagagtatatttatatatatggaggatgtttaatagttacatcaaatatgtaactatcatggttacatttatttttaaccattagatcattgttgaat

SEQ ID NO: 241159 - DNA, 1574 bp, Cannabis indica
ttgttttggttcccgagtgtgggtctgggtcttggtatgtgtccgggtccgggtttgagttcgagtttgggttcgggttctggtctaagtcctagatctatacaccgactactggtcggatccaactatcgagttccgaatctcaggtctcgaggttggtcctaggtccaagtttcggtctagggtaaggtctcagatccctatccaagttctgaggcccaagttctggtcctagtttgggggcccaattcccgggtctgggtcccccatctatgttcggttcctaggtcccagtccaggtccaatttttttttcgggtttgggtacgggtccaattcgagacaaaatcttggtttgggttcgggtccgagtttgggtcccagtcccagtctggtccgagtttcgggtcctaggtctgagtcaagttctttggtcctgggttcaaccctggtttttgggtctttggttttggtctgtatctaggtcccggtctcagtttaggtcccaggtcacaggtcgcggtacccgatcccagacccaaacttggacctagacatggatctggatacgaacctagacttgaacccagacccatacccactgggatcgaaacttgggagttagattcggaccgagaccaagacccaaaccttgacccgtgcccaaggcttggactcggacctgtagccaaacccagatgcagaccgggatctggacttggaccaagacccaacccttgactcgaactaggactcaaaccccaatctagacagagaccgagaccaaaaccagataccggtcacggaatcgaaattggaactgggactagaacctgaaccgaaacatggacccggactaggacctaggacccggacctagattggggaccttgatccaaggcctcaaaacacagacccagatcgaaacccgagactcggacccggacctgaatcaagagtcaaacccaggactcgaacctagatctagacccagaccgggatcgaaaactcgaacccgaattcagactaggacttgaaccccaaccgggtcctagacttggactgggacctaggaaccggaccaggatggggacctggatccaggacccgggcttcagaaactagcaccgagacctaggacctaaccccagacctagatcctaaacccggacaaggaccaagacctagaacccgaagtggaactagactaggacctgagcccgggatcctgatttagacccggggcttaaacctaacccatagtcaatgtttggatctggaacccatacccggactaaaactagacccagacttggacctaaacccggacccaaacccagactcagacctaaacctgaacccagacctaaacccgtaccccgtgacccgaaactggatgcgaaactgtaagcgtattgggacccaggaacaagaccgagggactgggacctagtctcattcccgtaactagaatctgactaggaccaagaccctcacccggaccgggacacgaagccgaattataactcagatcgggactcaggacacgaacccgaacccagacacggacttgga

SEQ ID NO: 241160 - DNA, 718 bp, Cannabis indica
tcaataatgtatttcttcataggaatttacatgaagacatatacatgaaacttctcccatgttataaacctactgctaaacttcccccaaatgttgtttgcaaactttagaaaagcatatatggtcttaaacaagcttcaagacaatgtatgaaaatctaagtaccactcttatctcagtagttttatccaatcccaatatgaccattccttgttcatcaaatcacaaaacaacttattcatggctattcttatctatgttgatgacattgtaattgctagcaataatgctacaacaactagtgactttaaatctttcttgaacaacaaattcaagctaaaagatcttggccttctcaaattttccttgatgttgaaataagtcgatatcctcaaggcatatacatttcttaaaggcctttcactcttcagttactaaaagaatctagttaccttggtgccaaaccagtttcaactcccatggagcctaacctcaaattaagcaccactgatggccagccattatatatcggaccccactacataacgaagtctcattggcaaactattatatctcactataacaaggcctggtctctcctatgcagtcaatagactaagttaatacttagcctctcctagaaaacctcatttactagctgctcaaaggatcttacaacatctaaaatcaacccctggccaaggtctattcttctcaa

SEQ ID NO: 241161 - DNA, 956 bp, Cannabis indica
ttattaatttcctcagatttcatttctgatttcatgttaattaatttcgactactgcaatctgcaacacagtaattgtatgtatatgtatatttatatagccgccatatagaaattttaaaattaattaagtaaaaagtgagctaaattgtaggaatgagagtacggaattttgttgaacaaaacaaaaatttactaattaaattataatcaaattcaaaaatttttatgaaattaaattataccaataacgatatgacatataaagcggtgctagacactatcgatactttttcgtgatattttatatcaatttttaatatctatcatatatattttcaattattatatatttttattaaatttgatattatttattcctaccatatatttttatttatatatattacttgaatttaattattaatataactaattattagtattttttttaatttaatttatagcgtaaatatttaacttttaaataaataattaagtttaatttttgactgttttaatacttaagttataaaaaaataaaaatttaatgacatggatcaattataacttaaatattattattgtaaaaaataaaacttatatatttatttgcaacttaaaattaaacttaaatatttataccgtaaattacttaatttaattattattttagttattgttccattgatattgttttgggtgattgtgatgctttttggagtggttttatatatacttatgtgtcaaatcaattataatttgttatttctttattttttaagaaaatttattttaattcttttgattagattacttaacaacgttataatttattaattttatggtgtattaaagaagctttaattgatatttaattttattatgatatctattgaaaattattttgtacctttaatttagtgttttgtttgtgtatagttttgtaccataata

SEQ ID NO: 241162 - DNA, 1339 bp, Cannabis indica
ctttagagttggggtcgaggcttaaaaggtttatctttccacacttcttctatgactatgggaggatcatgagtttgagaaaaaaaatgtgaagaagaggggtcaggtgcggctagaggtagtagaagaaggagaaaaaaaaagttatattttaaaatatatttttaattttaattattttttattaaaattattatttagaccaataacgactcaacacgtgtcagttatgaataactttttttttttgatgaaaccagttatgaataatttttttttttgatgaaaccagttatgaataacttaacgtaagtatttttgacgcagatgatttctctaatttatattatagccttgttaaatttttttttcttgtggaatttattagcttggattttagttcttgttagaaaattaaaataatatattaagaaaatgataattctagtgttgcataaaaaattgtatttactatatagccacatttaatttgtccacatatatacattcaatacaaatattttttaattgagtatttttattgagtatcagtagtgcaaaatatttttatatgtcataatttataattagttagagactttatctaaaaattattttattaagttatatgagactcaatatttaattataccaataatagtataacaccgaagatgctaagcaccattactaccttttaacatttttttaattaattttatgttttagaattagattaattaattaatgtataatataaaatatatgtatatatattgggttaattagcatacgttttgagaaacatgttaattaattaattaattaattatacttttagggtttgaaacattaatggttgtgtgggttattcttgtatgaactacgtatatatagtcagaggcggagccaaaatgagaagttaggagggccgaactatattataaatttaggtgataaaatatttcaaaaacaatttattaacttcataattaaagtttctttaaaaaaaaagcttcataattaaaattaaaacgcaaaatctttttcttgcatattatgaaagttattgttaaggaatactaatttttttgacgatttctctttttcaatatacaatactagcaaacaactacttaaatattcatttttatcttgttgccaagtatagtttttattatattcatagttgaaaaagattatctttaatttaataattctagaaatgtaagaataagaagttatcactttatatataattaaaaaatttaaagtggtacgaaaaaaaaaattgaagtgatcatatcttgcaaagcaaatcaatattattaattttttt

SEQ ID NO: 241163 - DNA, 849 bp, Cannabis indica
ttcataacatccaaaagaaaattacatataaatgtgttgactatggatttagccaaccgacacagagtctaactaggatcgtcgcttatgactgtcatgtgtggaacgataataaatgtaaagagacaaataaatttatagaagttcacccccttttatttaggtaatgacttactcaccttgtagttgtatttactctcgagataatgttgggattttatgctctaaataaaattcatttcaatgtaatctgattcgttatcaatagaagattagaagttatttgtatttacatgtagtttttatgtcaatggtttaatatatacaatttctgttaagttcagaacatatagttattcacaattatagtgatgtcaacacagtggaaggtaattgtgatcatatgtttcaaaagataatgtcccatgattcatcagtgcactggatttacactgatgtgatagtcaacgataaagcttacatacaccttaaataactgttatgttctttctagaacattggcaaagtatgctagtgcctaagtataagggcgttacattctcctttgaaggaaccctgaattcttctattcataagaagattgtagtttgttccttttaaacagaccataatccaattgataaatctcgaggaaagcaaagatgtttcaacagctccttcataaaatgtaaatcaatagtattataggctttacttaagtctatctttattatatatcttgctaaaatattcttcttagtataccatttgagaagattgtggatgatcaaaatgttatgagcaagaagtatattcttaataaaagtcccttgattgttatgaacaaga

SEQ ID NO: 241164 - DNA, 951 bp, Cannabis indica
tcctttggagtcagcttgggaaagtttctgggctttattgtcaacactcaaggaatcgaagccaatcagagaagattcaagccctcctggatatgaagtagccaatacgaaccatggaagtacaaagtttgactggtcggatagccacactcagcagatttgtttcaaaatcaacagacaagtgtgttccattcttcaacatcatgctaggaaataagcaattcgagtggacagagggatgtgaaaaaccttttcaggagctaaaaacgcaacttgcaaagcctctcgtactctcaaaacctttggatagagaagagcttgggatatacttggtcatcacggagcatgttgtgagtgtcgtgatgatcagggaagaaaacagcatacaacaccaggtctattacattagtaaaagactcattgaggccgaaggccagtacccgttgatagagaaactcgcttactgcctgattctagcaacaagaaagttaaggccctattttcaagctcatcctgttcggggatacactgcccaaccattaagccaaatattgcaaaagtcggacgcttctggacggttactcaagtgggcagtggagctcggtcaatacgaaattaccttccaaccccgaacaacaatcaaaggtcaggccctagcagactttgtggtagaatgcataggcaaagaagaaagcatatcagaaggcaaccccaagcctgtacaaacacctcagccaagttacagtgaagacaagccgacttggaagctacatgtggacaggtctgctacaaatcaactatctggtgcgggaatcgcccttatcacacctaggggcaacacctgcatgccgcagcgaattttggattcaaggcatccaataacaaagtcgagtatgaagttttgatcgctgccctaaaattagcccttgagatgaaagtcgaacacatcaa

SEQ ID NO: 241165 - DNA, 1169 bp, Cannabis indica
ttttttgaataaaatttaaaatttcattaatacgaaatttcacccattacaatagactgaacttcagcgggacaatcagtccactgaagatcacgacctgaagagaaacaagagctccttgcaatacaatgagcagccttatttgcagatcgtttaacaaaacgtaaagtaacattactaatagcagaaagtaagacacgacaatcgttaacaatgaagccaaactgagatgggagaatggcattactaagaacagattgaacacacaaaagactgtcggtttcaagtaccacttgaggccatggaaatttcttaatccaactcaaggcctcctttatgcctacaatttcagccatccccgagtgcaccaaaccaaagaagctggtgttaaaagcagccacaaagttcccagccgagtcacgggcaatggctcccattccaaaccgctcttcattctcaaagatcgccccatcaacattaaccttgatacaatttaaaacaggtgtagtccaatgctcaatattcttccctccatcaagatgagaagaaagggataatcctttccttgtttgagcaaacttatattgttcaagaactgttcttgctgaaaagacaatagcagcagcagaagaggttttgttttgccaaataaactcattacgggacttccatatcgaccaacttaacactgcaacttcctctaaaatggccacactttccttctcaaaaaccaccagcaaccagtcgaaaaaaccagctgcatcagtggcttgcaaattgacacccgatcggttccagcaggcccgagaataagaacatgttaccagagcatgcatcgtcgtttcatcttccaagttgcaccgtgaacatactctgctgacaggtacatgtcgatgctgaagctgtacacaagtaggcaaggtatttgtagcagcacgccacaagaagttgctgatttttggggggacttttaagtcccacaacttacgccaaaaaccagcattagaatgatcaacagcagccgctttcaactctctcaatcttctatacgcactcttgaccgtatatactccttgagaatcaaacttccaagcccatgaatcaatatcagaagtcgaactcaactggatggacaagataagttgctgatctctagagtcaaaaatgtc

SEQ ID NO: 241166 - DNA, 1120 bp, Cannabis indica
gaatattacataggtacaattttaacgtaaaataatttcatatataaattacataaaaattttatgccccaaattggcttcattattttttaaaaaaataatattaacaaaacctacacccaattatatcatataattaacgattcatcacttctcatacattcacaataatataactatccgttcacatacataacacgtatatataaatgcataaaatccacacaacatttaatgtatacacattcatggaactgctcttaacacgaattattggttttatggtactaaatcaggtacgcaatgaaagagtttcatattatttgattatcattctaccatatcccaatggatctccagatgcgtgtacattaaatcaaaacaataaatagttagtttagaataaatacctcttgataactatcagggtatcctcgagacttcatgcatgttctatcccttaatccagatgatgagaaaattgtaattggactcacacaagtgtcttccaaattattccaccacacacaatgaatagtgtgggctattaggataaaatgtatatgcttgttcttgttgagttctcaacacatgagcaagaacagatgagagaaaaattaatttcctttttctttataaatttcaaaaatttaggtttagattaagtgttcagatttctcaaatcaagctactatttataatagttaaaaaccttttaattaaatcatatttaattagttaaataaataaatatttatagctttatttggttactaatatttatgacagattctctcaactacttgagagaatatcacaataaccttaaaatatctataatcacttttcaaattagatatttacctaattgaattaattaaataattaattaacccaaaaagacaaaaaggacaggacattagctaggcgcctaccgtgttgttttggataaggttgatgtcttttgtcttaacaatttttgtctcaacaaatcttgtcttgacaaattttatcttttccctatttaattaatttgaaaaaattatttatttattacaaaaataaataactactattttgctaattcaaaaatagattttttcaaacatctttatacaat

SEQ ID NO: 241167 - DNA, 882 bp, Cannabis indica
gcgataaatttgcgagccaacaattggtcgcctcgtactacacctactcacgcttatgttaggaattttagagataagtgcttgattgaacttacaacccctagtccaatcaatggagggggacccatcaatacatattagaccgatggaagatcaacaactaagaactcctgcattagcgtcattgataatggtggttctcctatagttaatggatgttccatgattccttcgctggcgactctatcacctgtgaacccatatagcttaccatgcaaggctttaattttgcatcttgtaatcccattttctttaatgtatccttgtaaagaatattcaccgaacacttgttatccaccaacactctttccatttaatttttctcttttcagttgttctagagcaaacatcgattgtacattcttcatttcattgatgtatctttcctgggtaatattactgtttccagtgagatgcggccctcccaaaatgaccagtatatcctcacccttaatatgggaggttgtaatctctggttatatgggttaatggggttgctgggctggtctacctcgtttccttgttgtcttacatattgtctaaaatatccatgctagattaaactctctatctcgtctttcagttttcaacattcttctgttgtatgttctatgtctttatgaaatcgacaatattttgttgagcctctcttatgtctctcatgcctcatgggctcaggtttgcaaaatgcaatcctattttcatttgcaagaaaaatgttttcagaagtttcattcaactcgttatatacgaagtgtattgaaatatatttgtcgtgctttttctgtttcttttttattttgtatgattctctcgagtcat

SEQ ID NO: 241168 - DNA, 895 bp, Cannabis indica
ttatctacctcttttttgagtgccccttgtctctcggagtctaagggctgtcagttttgcctttttgctgggtaactagggtcgatgtttaaatgattgtagattacattagggtctatccctatcatatctgtatggctccaagaaaattgaccccggttcgccttcaaaaattcaattaattgctattttagtttttcatccaaattcttcccaatgtatacacagtttgtaggattatttggatctaaaaccaccttttccaactcttcaatgggtttaagctagttattctcatcttggactcagggatctagatcttcatcttccttctcgcctccttctgttatgaccactattaattgatgattggctcttctattttgaagttctatgcgataaatttgcgagccaacaattggtcgcctcgtactacacctactcacgcttatgttaggaattttagagataagtgcttgattgaacttacaacccctagtccaatcaatggagggggacccatcaatacatattagaccgatggaagatcaacaactaagaactcctgcattagcgtcattgataatggtggttctcctatagttaatggatgttccatgattcctacgctggcgacactatcacctgtgaacccatatagcttaccatgcaaggctttaattttacatcttgtaatcccattttctttaatgtatccttgtaaagaataatcaccgaactcttgttatccaccaacactctttccatttaatttttctcttttcagtggttctagagcaaacatcgattgtacattcgtcatttcattgatgtatctttcctgggtaatattactgtttccagtgagatgcggccctcccaaaatgaccagtat

SEQ ID NO: 241169 - DNA, 787 bp, Cannabis indica
atttgattaatattgagatatagtttgtaatgaccgatacttaaaatatagaattagtaatctattaatattaattatttgcattatatgattatgtgcgtgtatcatgtcatatgggacctattctcaagaaatagacatttgatttataatttattaatttcagagattttattgaattctaggtgtatcatagaggatatacatgaattttaatattttcatggttttattttcggtaacagtggaaatacgacagacggtcattttagtcacatggatacaatattgtatcaattatttgacgaggcattattattgagtgttttggaatatcgggatttatcagggtaatgcaattggactattttacccttagagttttaaagcttacttagagtgtaagtaagggcaatagggtaaatttccacctttgattaagtttgttattatctttcctttagttaattaattagaatgttagagatttgtgttagaaagggttagaagaatgaggaagttacttaattgatgataggaatagagagacaaaaaaaatacaaaaattcaaactcatctctcttaaaccttctctctctcggcttccattggaacccaatgaaccagacataatttatctaccttctcaagggtttcacaactaggatttgaaagggattggatagcaagaacaagataagtatggttcttcttctcctttagttttaataataaaaaaaacttaggttgaatatgtgaatttgagatgtaggtgttgtctgagttt

SEQ ID NO: 241170 - DNA, 1037 bp, Cannabis indica
aaagagaaaaatagaagagttttttctaccttggatggaaaaggcttgaaggcttgataaaagtgaaatctcgaagtactctttgaaaggctatagacgtgtggaagagaagaggaactgtaaaaaattggttctcaacttacttatttataattgagttcattttcctaattctaaagctaatgagagtcttttaaatttaaagcttcctaatgaagaggtaaatgacaagtaaaatatataattatatcttttccatgctcttttttaaagctaattttaatttcctatacaactaggaatcggaatacaaatttaaaaggtaacaacaattactaatgctattgggattaaggaaaaattagagaaattaaaagaaaaagataaatgataagcaaaaggcaaaaagtcttttctcttcttcctttctctctctaattttgaatggcatctccaactaggattaggattccaatctaattaatcctaatatcataacaaaataataagaaaatattaaattttcaaaagaagagataaaagataagtggaaaaaagataagactttttcctttttttctttgctaatgaattttttaaattcgcaaggactaataaaaagtgttcaaaatattaattaacttgggagtgcttaaagaacagatacgagtgcataagaatttcaaaattaatgcccatctagtagttttgagcaaaacgggcttggttcacatcatcaagtcaactctacacaagtgtgaaattgacttgggggcaaatgttaacccaaaaactttcactggagacgtggacatcaatgtttgacacatggcataaagattgtatcacaaagttgagtagacttgagtcatagcagtcgacctgggagggaaccttagcgttgtgcccaagttgactctaggatatctgggatggaagttcggacttcaataacttgaatccaacccactatatttcagtattctacaccatgaagacatggagcaacctaatccaaggtccaagagctgaaatta

SEQ ID NO: 241171 - DNA, 977 bp, Cannabis indica
attaatcacgatttccataaacctcgttgattcgcaacgagctgcacagtacgtttaaaaaatcacgtaatacgcctttgctagttagggtgttccaataacctcgtggagacaattccccaaaaagttcttggcagaacatcacaccttgtgtgattataccgtgctacggaaaagtctaaaaattgtcaaatagggaagacacgagagcgttaaaaattacactcacggttttaacgctcaggcgactagagtaggaaggttcacaaatactaagcataagataactattactacaagggtttaccctagtagtaaaatgttacacaacaatttgaaacaagagatgtaggatcttgaagatttctataaaagagctaaaaggtacattagagttaaggatggccatgaaaaccttatggtggggatatctcaagcaaggtccctaaacaagcaaaagatgaatagagaaccaaatacctatcgagaagagcaaagaagatgagctcagcacaaagagaaaccaagggaaaggagaagacctcaaccgtttacctactatacaaagtagaatgaaactagagaacagatactcctcccaaatgatggaagggttccctttaagtaaccatcgccaatgaggaaagacatgtccaagaaatattagagtacatattgcaggtttcactgagatgttggcaacacacagaagaatgtaatcaccacaagatagaaatccaaggtttattacgaagaagattcttggggggattctgcagagacaacccgtagtatagctggttaagtccctatctgttcaggcgtctacacaagaacttggtgcaaaaatgttatcctaatttttgttctcatgatgtggcgtgcttatgtggacaaaatcaatgtcacatggcagtataactcaccaataggaaggccaagtcaacgcctaaacaaacaaagaccctagcactcaa

SEQ ID NO: 241172 - DNA, 358 bp, Cannabis indica
tgtaaagtggctttagtgacgcgcaatgcgtgttggtatatatttttccagtctctcttagagtgactctataggtgaacatttttaattaaaaaaaaaattataaaattatgggcattaatctttagtgacacttcatatttttagtgactcaaattataagacactaacattaaattttagagactaatcatgcatgtcactaaaaactactcctaaccttttagtgacccgcacaaatgggcgtgtcactaaagagtgtcactaaaaggcaaatttgtggtagtgtcaacatacttgtgagtagatctaagatcctggtaaaacaaattccaacaatttgggggtgccctgctca

SEQ ID NO: 241173 - DNA, 713 bp, Cannabis indica
aaaaaaaaaattattaattttttaggtgacaaatgacaatataaataataaatagtgtaaaagtatcatttctatgcaaattttaaaataatgacatttacttataaaatactatgatttgggttcatttactatatatttttttttttacttttatgtaatatttgggtcaaaaatatagttgtcaacaatttattttaacaagaatataaaaagtaattttatatcgaggaaattataaattttatgggtttttatatatatttatttttgtacaaaaatatagttattttttttacaaaaaaaaagtttattttatgaaaaaaaattgaagaaaaagttgaaaaatatgagaaaatcaagtaaggtaactagatacccttacgataactgttacactcaaatttcgactaacaaccagaagttgacacatgtaccaggaaatgaatatgaattagctcaatgattatgctattatattacatcattaaatgtaatttaaataacttatttcaagaattacgaatgataaaaatatttaaaatcgctgccacataagcagatacgagataagaataacaaccattaacaggtacagttggcaaggcaataagtccatcttgggataaacagagtacataataaaaattgttcaagatgaggaaacctatacttgagaataagagctttcaactaattgatccacatatttg

SEQ ID NO: 241174 - DNA, 864 bp, Cannabis indica
gaccgcttgatgaccacgtgaaaagttactgaagaaagatgagtgtgagggcttagctaccggactcagatagggacatatataaatatgtgttcagaaatttaattcactcatcaaatttgtagaccatttttgttatgttagtcaaaatatcaaccctttcaataagtctataataaagtatctccgtagctctttaataaaatattctaatacacaaaaaattactagtgttcataaggagcaaaagtcaatgtaatagcaataaagacggttggtggtgctgggttaaaacaagctatatatacatgtagatacttttatttttacttaattatttgttcatggaattgaagacatagctaagtatagttatagtttcatgtatacacaattatgattttcatttggttatctagattgggataatgtagaaataggctgtgttaatggaatcggttaaaactattagagagaggtgttagtttcgactagctgttaagtttgttacatttcagttagtaagttagctcttagttataacaatcattttgtgttaaagattgttcaggtatataatgtataatcgattcccataatcaataatacaattattttgtctcaactgtctttctcaatctttcttttctgttaatattacaatatcacgaaaattcaactgccctaatatggtatcagaactttttttgccattgcagcgaacgttgttagctccaatcctagaacaacgacaaaatggtggacttctgaacaatcctttgaatcgcaatcaaaacagagatcacgatactcacatgtgtacttcaatcattcgatgtaacaaatgtgaaataagatattaat

SEQ ID NO: 241175 - DNA, 1041 bp, Cannabis indica
aagtaacctcgcgagataaggctttctatcttgtcatttaattgacaacattcttctgtcgtatgcccaatgtccttttgaaatttacaaaattttgttgcatctcttttgtgtctcgcatgcctcatggactcaggtttacggaatgtgactttgtgctcatgtgcgaaatagatattttctcgagttttattaagctcggtataaattgtgtattggcacgtacttgttgtgcttcttctattttttcttgtctttgactggttccttagaggcatctttcctcttacagcctcctggattgtcagcctttgttgagatggtacttgtcgagacactgctgtgcttacttcccgagccagtctttaacaacttcatctctttccttgcttcctcttttcgaacaaacacctaaggtctctcattgaactcattaatgtttttcactaggcaaccctgcaagtcatcccaaagctcacctccagcagttgagagatgagtcgtgattccaacttgaagagcagtaagctggacactgtcgttcaaatttataaccctcgcaggagctgtactgaaacaacttaagtaggccttaagcgtctcgtctggctgctgcgtaagggaagacagttcgggtcgcctgtctcttgcttcctagaaatgtttcttaaagtctttagacaactgttcccaagaagtgattgaatgatgggtgaattcattgaaccatctgcttgctgccccgactagcgaggtagagaataaaatacagcgtaagttattcgtaacattactggctcacattattatgttaaaattcttgaggtgagagaccggatccataatcccattatattatgagacttggggtttttaaagtcactgagagaattcagcgctcataatgtctaggtagaaaggctcaggctccttgtccgagtcataactaggaagtttcccatattccccatcttaatacctcttgaatttgtcttccaactcaatgctttaaattggataggatcctctcgcttttgattg

SEQ ID NO: 241176 - DNA, 1353 bp, Cannabis indica
cacaatataaatataaaccctaattatttaccattagacttatcggggtattacaatttggcgagcacagaatgaatttgtttggcaaaagaagagttggtatgcatcaaatattgttgcatcagctagaaacatgcttgatcagtataaatttgatcaaggagggaagggtctttcattgtctccgatgcatgaaggggggcaaaatcttgagcgtcggattgcacctaagttaaacaagatcaaagttaatgttgattgggctttatttaaataagtggggcacattgacatgggttgtgtagctcggaatcattatggtgctatggtagaagcattcaaaaaggggaagattaattgtgttcaacccgaaattgctaagataataggcattaaagaagctttgagttagattgcaactcattcatgggatagagtcatgttggaaacagatagcttgctgtgtgtccaagcgattcaaagaggtatttttatgccttcacagttttgtcttattgttcaagatgttcgaatttttttttttggctttatcttttgttgatttgtgttttgtaaaacgatctgcaaataagttggctcattgcttggcaagagactcttatttctctacaggtcgtgtgcttcagctggaggactgttcctctgaagtgcgttctattgctttgaatgaatttattaattaataaatcttatgatttttattaaaaaaaaatacttaattaattagataagtagattttttttctttaaaaaaatcgttcaaagtagtttgttttagtaaaaatagtagatttttattttcatttttttaaaaaaaattagaaaacgtgatagatagatttggagtaatatctttcttattattaataagtaataataaataaataaataaatttttatcaacctaatagaaaataaaaaaaaaattaaagagagaacaataataataaatacatatttatagacttaataaaatattataaaatgagataactaaggatagaatatattgaggtattttgagtaattttaaagcgccacatcactacctcatatctctcctttatatctattctatataaagtgtggctatgtaacagaattcttggtttaacgaagttttttagtttctacgttaactttaacagaatatcactattacttaatagaatattctttattaattttataatattattatatgtatttaaaattaaaattatttagatattttatataaaaaaaatctatatatataaaggagagatatgaggcagtaacgtgacactttaaaattactcccaatacttctatttattctctccttaattc

SEQ ID NO: 241177 - DNA, 737 bp, Cannabis indica
tcctcaattgcttactgaaatcaactgaaattcactccttatatagccattagggactaaaaagatagaaaatcgcacatgctgaaaatcctattcaactttgaattagatcaccacaccaagcagagaaaaaactcatgtcttgcttcataggggcgggtcgcgacatgcttttcctgggtcgcggccagtgtgcacttttcacacgcagattgcaaggatttaggatacgggctgcgacatgcccatcctaggccgcggcctgtgttgcagtttttgcatgctatcttttttttcctaggcacgaccccaattttgcacagttatctttagatcattatcttttttcatcttattttcttttgatatttttcaaatcttctattttaaatctgcaaaaataaaagatagcaagcataaaattgctccaaacacgagcaaaactaaattaaaaatacattagaattaatctaaaaatgatactaaaaacaacctaacaaatctcccaaactaaacatttactcgacctcgagtaaaacactaaaacgaaaaacaaaacttaaacaagccaatctccagaaaatgagtaattttcaagtagactcaaaaagggacaaaagtatttgattgatattatatacacatgatatatattatatacacataatatatattatatacccatgtctcatataaatacatagaaaatatttatttctacatatttaatctcacta

SEQ ID NO: 241178 - DNA, 852 bp, Cannabis indica
ttttgttttttatttttcattttgtccttccattttccattttcgtctctgctagggcaaaacactcttctttcttttccattttctttttcattttccattttgttttttattttccattttcgtttcaggtggtaaaacccatattgtacattttcttcacttttcttcgttcatcactgtggtgtacattactcgaagtctaccattgttggagttgttacagtggtgggtgtcgacagtgggttgtacattaatccgttgtactttacataaatttcattattcacaaaaaaaaaaatatttttcaagggaatgtggtgtgaggtccattttcgtttacttaatagttccattttgtctcaggtgtcgacggtgaggtgttgaagggagtttgcatttctgtgttgaggtatttctttctctctctttctctctctctcaaaatctctctctctctggttctgtgttgaagggagtttgcttctctctctctctctcccccgtgcatgtgttgtggttcttagtgtgcaatgtactgtaatttgttttgagtttttcgttttagttttttatgaatctatgattttggtattttgatttaggttgttgcaataaagaattacattgtttaaattgaattggttgcattgtactgtgatttagggattttgatttaggtatttttggaatttgttagttgatttggttggattttgaatatttggggattggataaatgaagattttttgagcaatatttggtcgaaaagtctctgttgtcaatttgtatatttaaaattctgtttgtcatctatatttgttgctccatttgtggaaacgaatgattag

SEQ ID NO: 241179 - DNA, 648 bp, Cannabis indica
ccaatttgatcactccaagttttaaaactattgtctaagccacatgtgtttttctcaacaatgcaatgtactctcatcaaatgggccaaagtgaagatcaaaatctaagtagggttggcctaagcccaatttccaagttgtaacttatgccacatatggttggcttggctaattaaatggaagtctcactctccaattaattgacactaagctagcctcctatggtcgctcttggatctttcaacaaatagaagccacgtccaagcacaacactaatgggccacgtctgccacatgttcctcatatgttgcaaatcagtgccatttctttacttctcttagctttcagagccactttctccactaaatgaggcactaaaattttaatttgtgggagcaaatcttcactgaattactataaatagtactcttagcattgtaaaaaggcatcagattttagagagagtagaaaattattttgtcattttatttttctcttttattactattttatctatacttattttaatgacaaaaatgagtttattaaaatactaatattggtgaggttagagtgtagcttttgtaattcttatttccattattgatattaattcttttatgcttcatctccatatctcatttatta

SEQ ID NO: 241180 - DNA, 1244 bp, Cannabis indica
attgattgtgatatttatattcatggggatcatccatataagcttgacattcgtagttcaagcctaaaattcttggtaataagactcgaaaagtttcatgttttggaggttaagcaaattgaagccataaatcttgagtcattggaactagttggtgttcccattgacaaattaaatctctctggatgcaaggcaattgcaaatctctcaataacttgtgattggaatattgaagagtcttcatccttagaatatctcatttcgagtcttcctctccttgagaattttactttgggcaactgcgaaaagaacaacttgggtcacattaaaatcttgagtcaacacatgaaaagtttcaatgtgaataatcataatgatgtaatgaatgttatgaataagtcgcctccacaattagcattattttcttatacaggtgatctccaatttagtataacaatggagtcatccaattctttgaatggaacattcaaaattgcgacgtgtgaggactacaatggagattggtttatatacatgatgaattttcttacgaatctcaattgttcttggaatatggtaacactacacgttgacaaagccaaggtatgtttattacttgtcttatttcgttatgtggtgttatttcttggaatagaaatatggtttatattttatttcgttatgtctttacatgaaggctctcatctttccaaaacacatgaagggaatattagaagactggaattgtattactatggttaattgggagcatcttagagtaattactgaatgtaatgaagaggaagaatcagaattgagagatactttgatgtggatttttccttgtttgaagaaattatctatagaaaaaaggacatcttattaaaactttgccataagcgacttataagtatgtttcaacttcttaaacagtgattacgggtttgtttactttgttaattgccaccttagttctcttgagattgtatttattttatggttggtttaagaatatgactttgcatgcctactctgcttaagaatggggctttgtttttattatatttgtttgtgaatgagtttatatgataagctttattatagcagatttatttcacaaatcatactgatagaactgttacaaaggtttgtagtttacttcagcatgtaatggagtcacctaatttgttcttaggtttctcttttgattttcctgtaagccttaaaacttttttttttttttt

SEQ ID NO: 241181 - DNA, 790 bp, Cannabis indica
tggtggtgagagtagtttgattgaaaagatacatatgcaatttttaatagttgtgcatgttttgttttggatagtttttttgaattttgttgtataaatttttcaggaaattgttggagttgctgctgacagcaatatagctcaggtgctgtaattttttgttattattgttgtaaagtttttgaatatctatttatttattagtagtttggtcattttagtgtttttaaaacttttttttagctgtttggttgcatttttttatttaatcaacaaaaaaagctataaacttatcactagaggggaagtagatctgtttaattatttatttattgttttgtttgtttgtataaatattttacaagaataataaccaattagttgttttgttttgtttgattttttctaattttttaggatgttgttcaagttattgctgaagacgatttagttcaaatggtatatctatattttttttttatattctgatatattttttttttttaattttttaattgttatttttttattaatacacatttttcgtagaattcaaatgattactgtccaagtttcaacttaatgaagtttattaatgagccttagttgtttaatgataatgctcccatggagtttgatgatggtgggcaagttggtgacaagggtggagatgatgccggtgttgcagataaaaaggctatgggtaggcaggctactgatgatagcattacaccgtttgtgatggatattataaacgagaaaatggatgatatagaaaagatgtgtgcat

SEQ ID NO: 241182 - DNA, 1049 bp, Cannabis indica
cataaaacccaacagatatttctagttgctacaggcgcttcttgcatgatataaccgaaggcaaacactgattcttgcaagaagtagcctggccggaaccacccagcgcgtcctttaaacctgtggcaaagcctttgttttacccatcgtcataattgcttttgaactaggtgacttggatttcgagattgtgcctcccaagccacgtacgtgtaaatctcctcaggatcccagcgtcaccttcgaggctgagataatagaatcaatggtgcaatctatcttaggctatacgggcgacctgctaaagacctgtggaatttcacttgggaaatcatgccaggttaggtcagtgcgagagggtgaattcagttgctaccccctggacgctttaccggcagtaacccaggaaccagtggtgagactagtactggtggttcaactagtatgggcgcctgaagccttgagcatatttgtgcaggggccgtcctccctcttccggactactttaaagactacataaatcacattggggttgccccattccagttgactcccatctcctacatgattcttgctagtttgaaagtcttgtacaaaattatcccacacccgttgagattgagtatctttacttagttaaggtcgttccatcgaggaggaacaccatagtgggctttttctatcttggtactcatgcgagcgagctaaaaattattgtagacttgccaaataaggtgtctttcaaggacaacttcttctggaagtttggtctctccatcattggcataaccacgtttcgtaaactccataagtgattgtcctcttcttacttatttacattagtcttcctttttcaaggacttgactaatgttttgtttgttctgacagctcttctgatgagacctactcctaccctcgagatggttagtaggcacaagtgcctgatgactctcccttacggtcttcgatcatgcaaattccttttgaacgaagttaacttgcaatcggcgggccttctcgctgacaaagaatacacttgtgattacaa

SEQ ID NO: 241183 - DNA, 804 bp, Cannabis indica
taactcatacatactattttttttataaacaattatacacatgattaataattatgcttttcttataacattatatcttctagatgctcgtatgctgcctatgaaaaaaagcagtaaacatttaatcacagaagcaattaagcatttactctcaatacttactgcaccacgagtcgagcttgtcttcggcgatgattgtacatgttcggtcggtctacatgaagtgtaaaaaccttggcgctctaataccgaattgtaatgtcctaacataaggaacgtcacgtaataagactaaacataaactaatcctgctaattttggatataatagagccaagagcgaaaaattaaacattaaaatacatgataaaataataacttgtaataattaaactttaagataaatccaaaaagagtatatttgattcggggatcccgtaaaacatttgcaagatattacaagtcattagtatacgccgacctaagcggcaaaagtagagattacaacaattccccctggcagacccaaccctcgtgatctagcttagcttgaacatgtacaatgtacagcaaaagccctcaatctcatggctactcaactaccgacttaccctttcctacacaatagagcacccatgagccaaggaccagcaaaatagtatatccaacaattataatcactcaagtattgacgccactgcatctatagttcatttgacatagacctacgtgttacgctctcacgtctatttacaataaggctttagaattgtttacctctattttgaataccgagtctaatcta

SEQ ID NO: 241184 - DNA, 1434 bp, Cannabis indica
aatatactttaaggattttatcaagtatatttttaatttctcgtatgaatagttatattatctatcaattttctaggtttaagtacttttatcaaggggtcattatgcctcgttaagcactttcctaggtcacgagaactgttagtattcagttttatacgcgagttataacttttgattttcctctcccgtcaaataggttataaatcaaaaaattacagttgtttgatcccttcttcttcaaaaaggtttgatcaaccctttcacgtcaaaatggtttggtcggggagttataacggttcgactccactttaatgaaagaggtttagtcaagaacctttgaatttcaaaaaacttgaaatggcaagtttgcattatacaatgtatttctagatgaattccggttagtcatacataaatgccccttaagtaatttaaaagtaatttaaagaatgaaactttgtaattagttaatataaatgattctctttattcataactgaactttaaagtttacatcagtaatgcgagttacatcatttatttattgatagtagggtcacaaatgttctacgttccagtagttctttattagcgagccatcaagtcgagccactttatagactccaactccagctactgcttcgacgacatatggaccctcccagttcgggttgaacaatcctattgatgcatctctcgtatttgtaaagactcatcttaacaccaagtctccaacattaaatagtcttttcttaactcttttgttaaagtatcttgtgagtcggtgttggtatgcgccgttgttgatttgcgactcagtttatttttcctcaagtagatccagggaaaattttaaaagttctggttttcttcttgattataaaactctctttagttagtcgatatattcacttcaacaggcagcattgcttccgagccaaatgctaacaagaaaggagtgtgtaccgttgctgttttctcaatagttctgtgggcccagagcacctgaggtagctcgtcaacccatctgcctttggcagtgtccaacttcttcttgatagtatccattagggttttattaacggcttccacttgtccatttgcatgaggcctggatactgacgagaagcttttgataattttattcctctcgcagaatttagtgaacaagtcgccatcaaattgggttccattatgggatactatcttcatgggaattccaaacctacagataatgttcttgacgacaaagtcaaggactttcttgcaggttatggtgacgagaggctcaacctccgtccatttagtgaagaagtcgactgctacgaccgcatacttagctcctctacgcccagtgggtaatgccccaattaggttgatcccacatatagtaaatgggtagggcaaggtttgttggatatattttaccag

SEQ ID NO: 241185 - DNA, 795 bp, Cannabis indica
atactaataaaataatagaaatgccataaatgtaaataaaaaaaaataatgtatttattgtagtgtaaattttacatcacagcaaatattatgccaaatttagtacaaaatttactatgtgtcaaatctaaataactttttggcacacaatacttttcgttaaatgaattatattttagtttttcactaatcgcaacgacccaattgcaagagcggagctctaccaactgagctatttttagtggagatactttaatgatttactttttaatacgcttattattttaatgattattgctattgggtattgggcaacaatagtgatcagtatcttcacgcattataattgattagcttgttgaaaatagttaattacatagaccaagttaggaacagtagtgccttttagcaaaaagaaccaaatgcgcgccttttcaaaacagtacctaacagctaaacaacagcctcttcataaatgataaatcatagcctccaactccatctcatctccatgtccataccaaacaagattgttcaaaattacggtctgatctgatggatttacagagcggtttttccattactattccaacagtacaagtcccttgtcaacaagaatttctgctttcatggcggactaagacggccactttcctccaaatattcgcctctttcttcttcatcttcctcatcttcgcaatccagaaagctgtcgaggctcgcttctcttcctccaccgctttcaggagcgttcttaatcctcaacctcagctctctttcccaatccccccttgt

SEQ ID NO: 241186 - DNA, 773 bp, Cannabis indica
aaaaaaaaaaaaaaaataaggtacatgcactttatattattacccataatactctcttcttccttctattctcttctaactttaccattcatataccgatggtggtccaatggtggctgaatttaattactagattgtgtttgagtcaattgttcacagctttctatgggaatatctcttctttcaatttttaatttttttttaaaaaaaaaaaaaagaaagaaattgttataacaaatattgtattatcctctaactactattataatttattactattaaccaaaaaaaaaaaaagactaccactataaatataaacacatgataattaacccaattaagattaaaggtattctcatttgaaaataatcatgatatagcaaaagctataataataacattacaatggaagtagtagagcaaatcctccacatgaatggtggtgttggccaaactagctacgcaaccaactcctctcttcaagtatgttcattcaatctttctttataatcctgttgttttaacttttacattattaattaatatttgcgttgttttgtaataaaatataatagagagaggtgatatcaaatacgagaccaacactagatgaaagtattacaatttatgtaataaagtgttgccaaagtgtttgcgaatagcagacttgggttgttcctcaggccccaacacactcactgcagtctccaacatttttgacatcattgaagcctcttgccaatccttgaacatcaactcaccaactttccaag

SEQ ID NO: 241187 - DNA, 534 bp, Cannabis indica
aagctcttaaagaattcattatctaccccttccaataatatagtttcagtctattatacctgagatgacttctatctttatcatctcgccatatgttgtttatcttgctgtcttattggcaacgcataatgcaagacatatatttttcatcatttactatctcctcgaggcttttcatttattaatgagttttctataattttcgtgtccaattatcctcgtctcatgtctatatttatggctcgaaatgtgacataacaaatatgattgtagaataagtgctactaaatttttgattggggccataagtgctaactcaaaaaaaaaataggagttttgccgcaaatatactatctacttggacaactttttgatagaagagggtttggatgcacaaataatcggcggaagggagttttgtcaccaaatgtttttaggaaattatagcaaatgaccccaaatcataacacttgtaagtaaatgttctcattttaaaacttgtacagaaatgacccttttatattatttattatt

SEQ ID NO: 241188 - DNA, 1043 bp, Cannabis indica
attattattgttgttagtttgtggcttatttttatagtttgtgctattttttttggctagtttataccattttatttggtttttttgtaccatattatttggctattttactgtatattgttggctcgtttgatagtgaatacaacatcaaagagtgctactacaaattttcaccaataaattttaaatcttacttttaattatatttaataattttgaggaattttcttcttttattttatatcattatttttatcattttttgctagcaaataggatctgttatcttgtttggcaaaatagttaattttagttgagatttgatttattaaatttgattaatctctcaaatcttatgtatggtgcagatttaattgactagtatatttataccttacaagactttgctctaatagttggacataacaaattagtatctatataatggtgacatgctgagtgaaaaaaacttcaaagaaaagttctctcgttaaaataataattgtgttttatacgtaatttaaaaatttacattattatcgttgtataatgtgctaatccacatttttatatctatttattttgtaaatagttttggtccaattagttgtttgtatcagatgcctcttgaaggtggtctcaagttattttgtctaaatttttgagataacttggtcttatacaagttgatttgcgtggagtgactcatattctgactttgtatatctttagctagacaattagcttgttgactgaaagctcctccgcgtcgacgattgtcatagtgtgattcaaatcactctcaaaaaaaaaaatattggaatgacattctaatggaatgctctttccaccattttggtggaatgactattccattttaaaaaggaaggaaagaccattccaatgtaacaagagaaaaaatttaatgatttttttatcaattttttttatgcattttaaaatttaatccattcttattcctattcacattctcattcctattcttatcgccacctagagaatcttttattattattattatt

SEQ ID NO: 241189 - DNA, 806 bp, Cannabis indica
caaaacattccacatgtaatacaaacctgggaggaaactaattgcataccaaagagcatatggaagacatgatatatcataatgaactaaggcattctaagtagcatataccacaagacaaatcaacaaacataaatcagaagaataaaaaaaatgaaaagttactataaaaataagttctataatgtcaaatcacatgttgtataagtgcataggttacgaaaaatagactatacctttcactcttaccaaaaccaaagcgggcaccaaaataaaacgcaatagcaagcaaccatgaattgctgtgaactgcgaccaatgacaaccagcccttctcttgcatccaatcccttgcaaagtttacacccaaggccagttcaaaaagcttgggaagcacctcttaaacaggtaggttaacttcgcatgtctcatttagaagtccatacaaacaaattttccttttatgtacaacacaatggctaaggacctattgtgtgaagctgaagtatatatttgatggttgttgaaaacaatgcaatgaaattaaaatgtgaatgggttaaaactaagttagaaatttacaatttaagcatgaattttgcacataaaggaatataacaagattattaaaatggattcaacaacatattatgaatggaggcagaagaataacttgagacattaggagaggaggattcccaacttggaatattatcctcacttaagaaaagtaaattatgatctaagatgatggaataaaataataactgtcaaaattttagatagaaataaaaagccaaaaaaaa

SEQ ID NO: 241190 - DNA, 1354 bp, Cannabis indica
aaagatgatcacaaggctcgtttaaattcccaaaaccagcaagcttatcccaaagatcttttcgagtttccatagaattgctcccataaatcgatgtgacaaaaaaaaagccttcttttgatcaaacaacttgactttgcaatgcacatattggctgtcctacttatcgtagtcacctgaactaagtgtttctgccaaagcaagattattctcccagcaataatagtactagagtagtaattccaagaagtaaaattctcctccatactagaacaaactttttcatgcttaagtttggtctcaaacaaagcaccaaacccaattttattcactctcgaaacatcaaggatagcaagttgcttgtcctttttattcatccctctaacattccaccctaacatatttaaagcatccttcaaaaatgattagagttaggaagcacaacctcttctattgctgcaatctgcaacacttcatagccattgttactgctggttctattgttttccttcatgtctttagcagtgttaaattgtctcagccctttctttcgaggggttatccacctattctgtccatcagcttcattagcatcactcgacactacctcccctgccttattttgcaccagcaaacttgtgtttgcctcctatttagcatcagtttttaacactggttctttgtccgaattaacctcctgttttttcttcaattcaccattgtcaactccttgttttttcttccaaacaactttttgatctctattacaattagctacagtgtgtcccaagtttgcacaagccgcacatttggtaggaagccactcatactccactggttgttcaactagttgctttctttcattaacaaaagcaatggttttcggagggtcatccgaaatttcaatctccacaaggacacgagcaaatttcaccattgatcgctcttgcgtaaccttgtctatcatcactggtttgccaatagtactaacaagcgcacttaggttgtttcttccccaatattgcagccccaatccatttagatggatccagacgggaactgaattcaccattcgagttgtattaagatcagtggaccaaggacgtaaaactactggtttcttgtcaaaatgaaccacaccagcctcaagaatcagatcaggggtagcttcatctctgaagttaaccagagtacacgtcgaatgcatacgaacgatcttctctataccaagattgccccaaattctcttcacaaatccttcaaacaccttgaaagggggtttgcacctagaacaatacaaacaatggcattcttccagaatgaagcttcaacttctatttcctctaggtcaagt

SEQ ID NO: 241191 - DNA, 536 bp, Cannabis indica
gttatttttagtttatttctaattgatttatagttgtcatgtttcaactcaaaaatttggattagacttctaagtcacactcgctcgctagattggtgagaatgaataagtagttaagttattgtaagaaagacacaataaatttatagtagttcactccttgtatcgtgacagcaatggaactatgctatttcgagtttttatttctcacgagatggtattataaaaataggctaagtgttagaaactctgaattctagagagagaagctctaacttgtggatagttttttaaaagtaaaaaatgagctaaggaagttctcattttagaggtgaaggaggtccacaaaaataaagaaattaaaaaaaaacagattatatgtttttgaccgtagatgatgatctaacggtaaaaattagcttctggtggtgatgactaatttttggagcccagcgagtcccgctgcgggtaacccgaagtttattattgtaactttcttggggtgaattttgatgttgataacttcagaattgtga

SEQ ID NO: 241192 - DNA, 1378 bp, Cannabis indica
atttgtctgccaattttggttttgatgggagagttactggtggcagcaggtggtggagtttgtgcatcagagggctgtggtgtaggagaggcagtcaaaagagagtctgctgcagatggtgttgttgcagcaggttgtgcagcaggtggttgtattggagaaatgtttgtagtgctgagatggaagaaatggtccaggctatgagtggtagaacccttgaggggaaaaatattttcatagaaaattacatctcgtgagtgaaatatggttttagttgctatatcaagaagtgtataagctttcatcccttggggatatccaatgaaaatggaagcattggcccgaggggaaaatttatgtcttttgcttggtaaagttgaagcataagctaagcaaccaaaagttcgtaagtgatcatatgcaggaggcttatgataaagtaattcatgaggtgttttctgttgtgtgtttggagtaggggttctattgattagatacacagcactgtgtatgaagtatggccaataaaccagtgcaagagatgactggaatgctagtgctctggcaacatttagaatgtgttggtgtttgcgctcaactactgagttttgttgaggtgtttccacacatgagttgttagtttgaatccctttttgagcaaaaaaggaagtcatattgagttcttttgcattgtcacatctaatagctttaatattagtggaaaattgtgtttgtatgaatttgtaaaaatctggtatgacttgttgagcttcagatttggatcttaacatgtatacccaacagaaacggctatggtcatctactattgtcaaaaaatatcgaaatccttctatgctatgtacatgaaaggggccccaaatgtctagatggataatatcaaaactgaaggcagcaaaatgattgttagaaataaaaggtagccttttttgtttagccatatgacaaatattgcatggtgaaaaattattgggagctttaacatgaagcattttattgataaaagatgtagtagacatagaagggtgtccaagtctagcatgccaagaatgaacactaagacatgatttattacattcagattttgaaaaaacatgaaggggaagaacaggttgttgcatcagaaaatagagatgtctaacccgtttagcaatcccaatcttcttgttctgggaaccctggagaagacatcaagattttgtaaagaaagcactgttggattcatcatttagaattgtagggacactgaacaaattgaattgaaaatcaggcacaaataagacattatgcagaaccagagatgcagaaaacctgatgctacccgatttggaaattttgatttgcattccagtgggtaatt

SEQ ID NO: 241193 - DNA, 1154 bp, Cannabis indica
cctggagacaatcaataatatcaaaaaaaaacgtggtaggcccaggggccaaggtagtgataagtggaattggactaaagaatcaaatagtctcttttctactaaatctacatatctgctcaggccttggcgtgcgcgcctcctaccaatgttactcccgctctttgggataaactttagaattctagaatcttagagcgccacaaagtcctttggtggagtattctctccaacgctttatctatcaggacttctcttgctagaaagatgctaattgaggatatggcatgtcctatttgtggtaagggagaggaaaaaatggaacatcttttcctctactgtaactttgcttttcacctctagaggtcttccccctagggagtgattccagtgctaggtcaattcttatggagcctaaaggaaaaaggagtggacgtccaagaattgtttctgtatgctttaattatagtggacacgatatgaaaaactcaaaacgataaggtgcataataattctacatgtaacattaagcattgtattgactatatttctatatgttatgcagattttgcttcttgtttatttcctttgccagtgatggttgggcctcctatttggtctccccctctaaacgattgggtcaaaatcaactatgatgttaaagttgatagttactcaatgtgtgtggtggctttggctagagaccacaaggagtcggtttgtgggtggctagcaacatcctcaacttctttgaccctctcattggagacgctggtacctatttgctagccctagaatcagcgaccctttagaagcattcgtttatgataattgagagttattctgagacggtgatcaacacgctaaagggaactacttccttttggggtattggtaactatgtgctttaatgtaaaattttctcaaccttttgactagttattagttttttttatatctagattatgtaatttcacagcccataatatggttaagtggacttttacctgtaatataattggtatggtcgacccgtcctctatacaagataacttattatgtaatgactatgaagtttaaccctttaagctttaatatatttacgcattttattcaaaaagaaaaaaaaaaaaagaagaaagagagagagagag

SEQ ID NO: 241194 - DNA, 927 bp, Cannabis indica
ttgctctcacatctcttttatatttatgctatttatatattgtgtttatgtaggtagcttattgctttgagttgtaattcttctcttctctccatattctctattttatgtgtacattttatttagtgctataacattatttaatacatgattttgtcctttgtattatttgtcatagagttgtaatcttgttgatttgatatttcttttagagcacaacaatttccaacatacttgacattctgtcatttacatgttcctttctatacaacatgcaatcatttttacatgcatcaatttttcataattaagtccaagtgtgttgattaacttttttgtctcataaaaaaaattgggtaaggtttcaccttttggtagtgctcttttaaataattcaagtaccttgccaaatgaattatcactccatccacacatacacttaatatgaaataattcaatgacgaatgagagctttgtaaaacttgtacaacctgggtaaagttctgtctctacatcttttatcaaatcataaaattcttttgccttcgtatttggttcatcttcctcaccttgaagattatcatcattttcaatttcacattcatcatctctactattttgtccaaaaacatcatgtataactccttgcatatcaatagtaggagtatcactaacagtactctcaatgttttgtggagcatgtgaagaagtttcaccgtgtaatatccatttagtgtacccctccataaatccattgcatatcagatgttgaaatgcaattgatcgagtgacggtgctaataaggcaacacttaacacaagaatatacaatttttctttcatggcttccatttttaaatgcgaaaatcaaaaaaaaaaaaaaaaattaactccttgttgatataaatcactcaatctagattgcttc

SEQ ID NO: 241195 - DNA, 1217 bp, Cannabis indica
aaacaatcaagaaggaggagcttcaacacctacaagaagtttaagaaggagacgatttacgaggctaggatagtcgtggtggaggacaaggataatgagttgcactattacggaagaggcgtccgcgtaagtacataacaattcataagctgagttgagaggacatttatttttgcgggtagttggtgcaagagaattccaagcttatggaatggctccaagctcaggatgaaaagttgcattgcaataagcggtaaagcacgagaaattcagttcaacagccaacacactgctttgagccaccatatgaaaaaaaaaaaatcacagacatttgaaggaggctctaatccattggaagggaaggaacgacctaggattgtagcacccatattgggatatatggaacgcaataatagacaactgacgaatgacttgatagagctggaaatgaagaatcatgacgctgcattcgatatggattggctatccattcatcaattgttaaaagtatttggtcgcttttagaaacaaaggccagagactagtttactttcagatgagttaagatagccttatgaacttctttaatctcatccttaaagactagctagctaaggaaggtatggtgtcaagcattgttggtcaatgtagtgcaccaagcagtggagacacaactaataagaaaaaagatgcacatagtctgtgaattccaaaaggtatttctaaaagatctactggggataccctcagacagtgatgtggagttcacaatcaagttagctccaagaatgcttcgattttaaaggctccatacaaaatggcaatttacgagatgtagaaactcaaagtatagctacaagagctcctagacaaagggatcattagaccaagttcctcaccttggggtgctccagtactcctcgtcaagaagaaagatggaagcattgaggatttgcatagactaccgtgagctcagcaaggtgaccatcaagaataagtaccctttaccaatgatagacgatctcttcgatcaattgcaaggctcgactgtatttttgaaaatagatctaagatctgggtatcaccagttgaaggtccggaaggaagacataccctagacaacatttagaacacgctatggacactatgagtttttggtaatgtctttcggtctaacttataccacagcagccgtcatggatatgatgaataaggtg

SEQ ID NO: 241196 - DNA, 1266 bp, Cannabis indica
ggcacaatcatgggattctttcccagaatgcttagctggacgagcaagggtgatatagggaagaaagacctcagtataatattttctagacggttatgagtttcacttatatttagagtaattatttaacataaatgctgaatcgttttactcttatatcttttgaaccttaaacagcatcttgaagtggtgaaggggctacttccacagacaaaagaggaggcatatgtgaggaccatctcttacgatggtgtggaaaaactggttgatgatggtgtcgatgacaaagaggctgaggcagatactcaggtaccaatttttggaactttttttttatgattgtataacttgattatttctgttttctttgttctgtgatattaccgtatgattatcgtatttttttgggatatattttttcaggccactggttcagaccctcagcccagtgcaccatcttcatcaggccttggtggtgccgattacaatgaattattggggaggttggacaggatcgaggctgatcagaagggtatgtacgcttgtcatgccgagctaaagatggcatatgagaatagccatgtagagctgaaggatggtcagaacctaattatggagcagctcagaactatattgagcatgttgcatcgtactccaacgacaacttcagcaccggaggccccaacagatgcatctaccccactaccagctgcatcaccctcactacaagatgaggaggtctttcctgacgggtttgatccttatgagggagatctacctactcctatcggtgcaagtgttatctgtattgatgacagggagtcccagggtgatattttggcgatagaggcacgacctgcatgggttaagtgtgtgaagaggaagaaaaatcctgttggaaatattttacatggacctagatttactaacaagtatgtttcattaacatcttcttgttgattggattcttcacaatcttccatactatgattgagataccacttgatgtgtgtgggcactcactctatcactcaaggttcgaattttaatggtgaagaagaagacttaaagtggcggctaggttagggagagaaggcactcagtttttctgaagaaaagatgtgtctttttctgaagccatcactacctatttatagcaaaccactagggtagggttagaattatttggcattaaaataagtggccggccatgtaagtgaataatgggccccacttttgcaatttgctgttttatcatttctgcat

SEQ ID NO: 241197 - DNA, 843 bp, Cannabis indica
gatggagagctttggttaagatatcagcagcttgttgtctcgagggaatatgcttcaaggtgatgatcttgttttcaatcttttcactgatgaagtgacgatcaatttcaacatgtttggtcctatcatgatgaactggattctttgctattgctatggctgattgattgtcacagagaacatctattgggccttcaagtttgattctgagttcatcaagaagacgtttcagccacattccttcacaaattccatgtgctaaggcacgaaattctgcttctgcactgctgcgagctaccacttgttgcttcttgcttcgccaagatacgagatttccccaaacgtaggagcagtacccagaagtggatcttcgatcagtgagagaaccagcccaatctgcatctgtgtatatttgaagatctttgttgagtgttcctgaacattaacccttttcctggtgttcccttgaggtacctaagaatccggtagacagcatccatgtgttcctcaaagggattattgagaaattggataataacactcacaacgaagcttatgttagtccgagtgtgagttaggtatactaactttcccacaaaactttgatagcttcctcgatcaacttttgtttcgtttgtctgtacttcaagtttggtattatggtccattggagtttcacttggcttgcatctgatcatcccagttttctgtaagtgatcaaggacatatttttgttgagtcactgagataccttggttagatcttgcaacttccatccttaaaaagtatcttaattggtctagatctttaatctcaaattcactggagagaagttgcttgaga

SEQ ID NO: 241198 - DNA, 1055 bp, Cannabis indica
aaataaataaaatagtccagtctattcttaaaccaaactcaggattactttcagcataatccaatcttgtccaatccagtccaatccttttcagtccaatcctatgtaccaaacgggcccttagtgcttagagatagggaaaataatcttttgaacaaaggtgtaataccttgttcaagttatggtgatccccactattctacactcaaggttgtgagtgagtgtatatatatatatttatatctatatatccttttctacattttttatatagtgtatatatattgtatattatgtgttgtaacatttttttaatctctttgttggtctttatattatattggaatagagctgtaatatcctagttttctttcattgtaataaaatctctaacaatcaaaagcttatcccccttttcaatggaagaggatataaatcaagattgtgagaatacaattaataagagactttatgtaaaaatcattcatagatgagcatggtagtttttaattttgtcttttactatttaaaataatagtaatctatgttaacatattcttttttttttgtgtagaattggaaagttttaaatttaatatataaagaattatatatatgatatatatatgtgtgagttataaatatgtatatgtgtcctatatatgtgatcatgagtttatatcatattgttatatatagtgatatagaatatgatatttaaatttataacatgtttatatgtgtatatatatatataggagatatataatatataacgtatgaatatgagttatgcgtattgtatatttgatgagacataatataatatgcatatatattgtgagattaaatatatagaaataattattttctatgtatttatatgagacatgcatataatatatatattatgaatatataatgcatgtgtagtaaagtgtatataagttatacatgtgtaaggtatgtaacatatatagttgtaataaaattaaagcatatatgatatatgtatatgagatatataacatatatatttatataattaatattat

SEQ ID NO: 241199 - DNA, 622 bp, Cannabis indica
ataaatatctataactgaattaatttgtattatttattcgaataataaaataagattcaataaatagatttgtaaatagttaattaaatgaaatattcgttaagtttatttgaatataccgtataataaaatctgaacataagtcttggaatagaatttttcacgtaacttttttgaaagcctagaaagggtttttaccacaagctttttactctttatcacataagaaattgttcttgcacatgtaatgagatatatacaagaacttcatatacactttatcctagtagcctacacttatttttttttttttttgttgtaatggatcaatctgaaagattactgtgtgagtttttaatcaatctagaaaaacaaaaaaaatcaaggatacctgaataggcatcaagaggtatttatttcttccatgtaatttatattttttagtttaatatatatagatctggagatccttgggactatggtacaatgataatcaaatatataattttttcactacatacatgatttagtactataaaactaataattagtatcaagagcgattccattatgtatatatatttaatttgtgtgaattttatgtatttatatatatgtaaaa

SEQ ID NO: 241200 - DNA, 1095 bp, Cannabis indica
tcccgctaagaaataagttctaaacttatccatgtgactctaacggccatcccatcccatttttgtcgtcgccgagtaaaaatcataaaaattgcataattcatatttaatataaataatactcctagagtttaataaaattttcagaattgagaaactataactctaatgcccatttctgaaaatgggacccacaacataataaaatcataaataattataaaaatattaataattagtgctaattgtctttactaatcaatattctatcatgagatcattacaagatgagatttgagctccaaaattttaggatcatcatccgaagtcattttcactattagatcatactgaatggtcaagatcagccgcaaaatatttttccatatttttgtaatattttacttgtattttcataggacctccttgcctataattctttagttcacttttcatatttagaaaagccccacataatgttagagcatctctctgtggaaatatagagctctgacttgagctaattttcttgtattttagtgcgcaataacaactcaaattagacgtaactccattatcattgcgacacaattgaactactataaatctcttttgtctctatatttgttttacttaacttttatttcatatatatcaccaatcaaaggagcaagtgttggccagtattttgcatcaatactataaaaattacaaatttgatgtatttttatagaatctttgtgaaaatgtggattttctttttagaaaaaaaagttattttatgaaaaaaaaaattcaagaaaaaattaaaaattatatatatataggaaaaaacaattaagagtaacccattactttatattgttttaacatattttttattaatttttttcttaaaaaatataataatcataatacccataaatatattttaaaaaattaaaaaaactatggtggtgtttggtaacacttttttaattagttttttgttttaaaacttagaaaagtaaaattattatttaaaatcatgttctataaaattgtttttatttttcaggcctagactcgacttaaatgaaataaaaaaataaaaat

SEQ ID NO: 241201 - DNA, 740 bp, Cannabis indica
attattaagtggtatttctcattaagtggtgtgactcaatatttttacatttaatttacgtgggataatattctctaattttcaagactaaataagaaagagtcatgtataattttagaagacaatacccaaaagattatctttaataataaattaatgtatgcatccactatttatgttattattctctttgaagcattgggagtttctttaaaaattaattaagatctcatgtttaagcacttgtgtaaacatgtatgtacaaatttaaatattttatgagtgcacaaaaattctaacaaaattttttacttggtgtataatttttggggtactcaacattggcttgctaatttcataataagaccccaaccctaattataaaccgttgggatttttagaactcaatcataagttagagctaaaatatattataatatttacacatatagaagttgattggctaaataacagttaataagtgaacttggtaatatacaacttatgatcaagagcgcacaagtgaggatttcaaactataaaataagaccatgtatatagtgtcaggtggcactgcatgcattactattttccgatttggttagaagtagattggacaaataatttggtgagttagatatatataatacggtttatcaagagcacaagcgagggttttcaaactataaaatacaaccacgtatgagaaagtggtggcccactacaagaaatgtcacttt

SEQ ID NO: 241202 - DNA, 1086 bp, Cannabis indica
tttatttagggcataaaacgcaacactttgttgttaccccttctagcggagtacgggaaatcccacgacctttgggatctccgatgctggcactgacagccatagcgaaaagcactatgccggggtcttctaagaaaaggccaattagggagtgtgaatctcttggtgatgatcgctatttgtctttcgtattgcatttcttcattaatttatgtgttattatatgttgctaatcatttttgtgtgttttgtagatatggccagcctgttacgaaaaacgacctaccaggagcaagaggggtccccctataacgcctctcccatggctcctcctggtaaggttaggaagactaactctcgcttgaccgtccatattcacacccctactgttggatcgccaatctcatctcggctacctcctcctgactccgcatctgggtccgccaatgatacaatcctcattggctagacgtccacgggggccgagtcacttgctgcactgcccttagagggtcgttgtcaggctttgtccacgagtttgacagtggcacgtagccacaccgagggcctcatggatatcatggacaagaccatgtctaagcttgagtgtttgtcccctgcccagatcgttgctcttgggtgctacgagatgatcagagtaagtttctcctacttgtaaaaattctttcctttaaccattatcaaacatacatgttatgatgtgtgacaggctgcgactattacttcctatggtcaatctagggttctcgccctacaagaggagcataacaagcaaggagcagcctcactccaacttgaacttgatgtcctccgtcaagaacactcccagaggattcatgacctagaaacttctgttgagagggttgctgctaagaaggagcgtctcagaggtgagcttaaaagcgagaaggatgctcgtgccaaacctgccgaggaaaatgaaattaatgtcaaggagcgtgagaagctagatgcggaggtgaaacagatcgaaaacctctttaccgatgttttcttcaaattttggctaaacaacaagaaggctgactttagttatctgggtaa

SEQ ID NO: 241203 - DNA, 740 bp, Cannabis indica
cattactctttcaactttattgacattcaaattatcaacccgtcctcttctccctggcgacttactgggttgtatggtgaacccaacagagacaatcgacaccaaacatggaatcttattcgaagcttgaagcgaacgtcgactctaccatggtgtatcatcggagacctgaataatgttaccagccaagctgataaaaatggtggcaaccactaccctcagagtttaatcgacggatttaataaggtactaaatgactgtaatctcattgatcttgatcttgttggttacccattcacatgggaacgtggaagaggctcccacaattggattgaggtgcgtctcgatcgtgcgcttgttagtcaaacctggaatgatttattcaattcagctcagcttcttaatcttgaattaactgcctctgatcactgtcctattctactccagccaacaacccaacaatttttcgtccctgtaaagcatttcagatttgagaatccgtggcttagagaaccgttatgttctcaaattgttcgtgatgtgtgggagattaactcaagttgtggtatagtggaaagaattcggctttgtggagaaaagctcgctgtctggggtcaagattatactggaaacttcaaaaaaaggatagctagctgtaaaaaagagatcaaacggtggaaaagaggtcatgattccgtttcagttcaaaagtttaacgaagcccagaaatcgctcagtga

SEQ ID NO: 241204 - DNA, 1051 bp, Cannabis indica
gtgctttgggaatggaaaatttgagagagacgaccatgggatggcacgtgtcagataattcatgtagagaggcacaagtgttgtggcacaactctcctaaaatcccttatggcccacacttagttttaaatctaattaattcccaagtaaagtgtgccaacttgtcttataacccaattttgagctcgataacttcaaaattgcgctatgaaaaatatctttcaaattcaagttaaaacaaatcaattggataaaatttgagggagttatgcctattttacccaagggtagtatgcacttttcagctccaaattcaacctgtgccatgtcatcatgattcgtgacacctcattatggtgcaggtcagccatacatgttctcgaacacctcgaggtgtgttttgactttttttatggtgaattatattttgggggtctcgagaccccaaaacctcatttcgacgctcggaatcttaacgggagacttgcaccatcttttggtgccaaaagatggcacaagtcggctagggtttatgggaaacccttgatggtgtttcttggttagtttagtcatatgaatgctagaaaaatactttagtcatattagttcttggccaattggtaggagagacatgtgccatcttttgggacacaaagatggcattggtcggccataagtgttctacacttcttggtgacttttttcacttgtattggattcattgatgttggaaatatactttggccatataaattcctctccaattcatgtggtcgacctgtgccaaagatggaacaagttggctaggggtctctacaccacttggtggccttcctcacttggttttgatatgttgatgatgaaaaagtactttgagcacaaaatatcattcccatttggtgtggccaacctatgccactcatttgtgcacaaagttggcataggtcgactagcatgattcttcggtgaaaaatagtttctttcactttgtggtactccttggtgttgagggatcatatttggacaagtcttatttggtgtttcaaaagta

SEQ ID NO: 241205 - DNA, 904 bp, Cannabis indica
atttgacggttacgacttagatatatacaacctagaattatattggataggtaaaataacactataactcgaccaactactctctctctctctctctctaaacccaccccgacagaaccactaaactcgatcaacttccaccccgtctagcacttccatgttgtatgttgagaaattcgactcatattctaaagttatgaaaccctagaactgcagtcaaacctatcatatgagagaaaataagttgaaatctcagataagaaatgtaaagttgtttgaagtagaaccatagtattagtcaagatacttgaagaaacattaaggtggaaggaaccacctagaattagaatctaacttgagatcttgttgtctgaagttattcgaattagattttgaggacgaaatccttttaatgggggaataattgtaatgaccacataattaaatcatgggaattagcagataattaagatgtttaattattatgtgattttgtgcatcttagtagaaattagggcttattgccagaaataggccttagaaaaatattttctcaattacagagatatatttaaatgctaggtgtattatatattatatgtaaatttttgtgaatcgcatattttatgctcggtaacagtggaatgcgacgtatgacctgtatagtcacttagatatggtttagtaccttagagacagtgaggaatatagtaagacatttagaatgtcaggattactcgaggttgtagttttagaccatttttgtaacgtccccgcttcaagcctccattaggtcctcacagccacggaatgaatgactcttatacacgagtacgtcactctgactacttcatggattgatgactgaccctacatacgaacacgagtgtttccagcatgcttt

SEQ ID NO: 241206 - DNA, 1591 bp, Cannabis indica
tttgattttttgataaaatgataaaaataatttgtttatatgctataatcaactaaataaacacataacaatcagattatcaatttaaaataaagtccactaaaggacagcacataaatgggcaaaaagaccattttgcccctccacactaaaataacataaaagggtactaaagggtatttttggaaattctaaattcccgaccaatcccaacattctcaatgtctaaataaactgccccaatataataaaatactaaattgtgattctattgagtcatacaccgcgttccttgttgcgaggcaccaaaaatgcaaaattatgaaatttcactatatgacataaaaaatacattcagaattcaaatataacatcataaataattatttaaatatctataaataattttcataattaattcttaattaactgttaatttccaaattaaactaagcggtctttacaatagatatggaatctatagcttctataagtatttagaaatgaaatgatgatttcctttgagcttggctgaatagagataaatgattaagatctcatttcagtaattatattagtttactgaaatatcatctacatgtagctaagtgttttgaggataaaatacatttaaaggtagaactgtaaatttgtcacttttcgatgtagatcatctatatataggatctttgactattaagattatgacaatggattatcataacatatatatatcttggtacatatagagtgttctatataattgagagtgcaattcaattccgaatctatagtggcgcaaggaggaattaatgagttaggaaatttacttggtgaagtctaaatctacttattggaaaagctcggttatataggcacttggttccctcactagttgagatagtattgcttgcagactcagttaattggttttaattaatcaattgtaattctaaaattagactatgtcttatttatgaattttcactaagcaagagcttaattgtaaagaaaagaagttttggggtcgatttattaattaagagactttgtatggtctaattaataaataaattaatgacaattttatttgataattaattataattattaaacaaatagttttggtattgataggattgaaattggaaatatggcattattaaaagaagaataactggttgaaataaagtgacaaaattgtaactagagattggtccattaagtggccagccgctctagtgattttatcccaatattttattttttttaatatatataattcagccctaagtcctagttaaaataccataaaataaacatgatgctctcatctcatccaactgaatcaactattgacttcaaccaaatcaaacctagttttcattctctgacaactagtagatgagagacaccttctatagtgattcaaaccctccttcattgttcttcaaccaatttgcccatagttttcattctctgacaactaatagatgagagacaccttctatagtgattcaaacccttcttcattgttcttcaaccaatttgcccatagtggtacatgttgggaattattttaccaggatct

SEQ ID NO: 241207 - DNA, 715 bp, Cannabis indica
aaagataaagtggaagtagttgttggttgtgttgtgaggagtgaatctgatgacttaggatgatgatgatgatgatgatcatgtgggcagtgggacaagtgccgtacagtgttatttgttggcgacaaatatgtgattccagtcttatcactcagaaatgttaaatgtcttttttttgctctataaaaactcagacattgttttttatttattattattaacaaaaattgaagagattgttaatgtgggccttagcgcgtatgaactgtacagcagttctacaatttctactatgtttatgtatctggtatttggttgaaaccaactatgtgtatttggtagctactaatacttttattcagaaaaaaaaaatttattgttattatttattaaataaaaatatgtaagatttgatattaaattataagttaattagaaatttttctctccgaactttgacattaaccaaattatgcctttgccgttaaaaattctccatgaactattgagattgttagatttaatgacttttgtctaattttagtaaaaatattctagcatgatgaaagttcagggggacatgatttagtacgtatcaaagtttgaggggtatgatttggtagatatcaaagtctggggagcatagtttagacaagacgagagagaggccgagagaggtcgtcatagttggtcgagccgagagagagagagagag

SEQ ID NO: 241208 - DNA, 408 bp, Cannabis indica
taaaaattattaaaatttggtgtaattataaccttatgaagtgaaaataaaactatatttgtcttctttcattttctctccatttttttatagataaattttggtaggtgtcattcctatcttttctatctattttttttttctacatatttttctctcattctaagcacactcatttttatcttctccacttttcttttcttcccattttatcaccataccaaacaagctcttgcagattgtgatggaaaaaatgagaaaatactatcatattttgattaatttataaggacaagtttaaaagggtggctagccaagattgcttgtgaggttgtacaaattacaaggagcaatggtgccaaactaagcaaataaaaacaaataagaaaattactttatatactattt

SEQ ID NO: 241209 - DNA, 1143 bp, Cannabis indica
gccttgtgcaatttgcacaccaagtctgtatttccagggacctcaaaccctaaaggttgtaacatgtacacctcttcccgtaagtctccattaaggaaggcattattgacatctaattgtctaataagctaaccttttgacaaggccattgtcaagacaaccctaatagtaatttaactactggaaagtctcagtgaaatcaaacccatattcttgatgaaatcccttagcaacaagcctggccttatgtttgaggatagatccatctagattttcttttttcttgtaaacccacttgcaaccaattgccttccttcatcactcattgctttgttccaaacaagttgaattagagcttcttgaagagatgatggttctctggttactaaaagagcttttggtttgtggatgtcagacttggatctagtcttcatatgatgtgtgttatgctggtcaagaggttgatggcatccctgaacagtatttttgccaattgtcattgctagagtaacaacagtattaactaatgcaggtctgctcaaaccacaattgagctgagcatcagttgtagcaggaggctcaattgtggtgagatgttgtgtgtccagatgttgtttagagtgagtaatagttagctgagaatctgtagcaagagaggttgacaaagtaacacttggagtatcaacctgagcatcattttgtccggaagattgacctacattaaaaatagatggttgacttggaagccaactgttagtagtagaaaccagttagggtggatcaatatttgttgtagcaggttggtcaatctcagattggggattcattagatcagatatggaataagtgcaatgatgatgagagcatgtgcggattataacagacactattggggatttgtcagaaatttttaagtgagatgtgtactgactaagtgtttcatatggaaaagaaaactctataaagattacatccctagagatgtaaagtctcccattaggatcaaggcacttgtatcctttgtggttgaggctataccctaagaaaatgcatagtgtggacctatactcaagcttatgcttattatatggtcttatatttggaaacacctacatccaaaggttttaaaggctgtataatctg

SEQ ID NO: 241210 - DNA, 1225 bp, Cannabis indica
ttcaaagaaagttcatttttgagcacccaaagcacctggtgcctgggtacccaggttgacaatttgtaaatcagggtgacttccaagcgtcatatctatgatccaacttttgcatcatctttgtcttcatcaaaaatagggaaataggtacttttagggaagaaataatatcatgggtgccaaaagcaaggcctagcacccaggttgacattttgtcaacctgggacaattgcgatgatgttttccaagaattcttttaaacatattctctttttcattaaagattaagattcaactatttttagagaccaaatggaacttccaaggtatcagaattgggacccagcgcccaagttgacatattatcaatgtaggttgtttccaattagtttctcaaaaagtgttctgggcatttttttatgtcatcagaaattatgaagattcaagcaaacttgggggaaaaccattaacccgaaggcctcaaagctgggcccatcgctcaagttgacaatgaacctggtgcgttggtttcgatcattcaaatgccaaatctaatccgtgcattctctttgaagtggtcaaaaataggattgaatatcttttcctcaagtccaggaaccttggaagtatcaaaatgacaccttgagaacccaaaaatgtacctagcacacaggttgacgaatggcctggtgcgctaggttctacttattcgattctgattttgtttcaactgcttttctaatttttcacaataactaagatccatgaagtcaaagaagtcaaatttactatttctcattttcgacatgggaaaactactcagaaatgaagagtttcaagtctctcatttcagtagaacaacaacatcttcgagaactgttgaccagcttcactagaacacagaaatagacaaaatgatgtaaaactatcacttaggcatcaaaagtgcatcccctggacatttttttactcacccagcgtccaggttgacatcatatgtcaacctaggcgctggattacaagctactttcagtaaaatacccataaatcactcaatattaatctaattgatgcggttcaacttgcattttgaagctaattcaattctctatcatgtcattattgttatgccctaaataaaactcatttcaatataatcagatttactaattaataaaagatcaaaaatcattttatgttgcatggttcacatgatttctttcat

SEQ ID NO: 241211 - DNA, 1529 bp, Cannabis indica
cacaatatcactttgctattccatatttttgctttttatattttgctattacatatatttgttaatgtatgagtgggtcttaccatttaaaatattattttagatatatttgtaagaaacactcaaactattatattacttaagtatctaagttattttttagcagcaaaaataccaaaattattatatttgtagcacataaatatctaaattattttttttacaatcaaaaacacctaaatcattaatatttaagtacgtaagttgttagttttttattattaaagtttttaaattattaacagatttgacactacgtatgcaaagtacttaaattattaacagatttgacactacgatattacgatatttataattttctaaaaaatttataggtcgactaatagtagtaatatcgtaagaaacttctttggtgcaccgatgcacttccttaatattttggtattcaagagaattttttagtcaattaattttttttatagtcgtgtacattgtagttatttaagatatcttgcaaaattttaaaattaagaataacttataataatataaaaagtaatgttcaaataatctataatgcccataaaaatttgttccttatacttgtatttttaatataataataaaatatgtatttataatttgcacaataattaaaatgcaaaaagaaaaatatataaatttttattacaattatttataaaagctaatcaaaatataaataaaattgaacataaagagttaggcacgtgcattgcacgtgtagcctcacttagtataatataaaaagttttggataagcaattttatttgaatgaaacgtatactaaactaatttataattatgtacaattaataattaattaaactcatcttattaggtaccttatatacatagctttatgacacatgcacacacataaattaatacaaaaataattaaattatgagtacaattatagaacatcagtggtatctaacagtatatagaggtggtaccctattattatttatcaatattttttaaaaattattatagtgaagaaattactaaatatcaccactgtcttttagtatttttcataaattaaaagagcttagaattaagacttaaatgaacctatattataatttttaaaaaacacattttttattttattttttacctaacaattaattaataatatacacgtgcatatatcaaagaaattcccatctacatatcttgtctctttctaataatttcatttattatttatttatctattataactcatccacacctacctttatatagagagaggtacatacatataacataaccacatcaattgcaaccaatcttgatctagagagaaaaagaagagaaaaataatatctatatatatatatatatacacacccaataaattagtttctactctactaattaaaactaaaaatacgttgaagcctcatgttcaagtttactagtatatatatagaaatgtatacgtgtgcatcgtcag

SEQ ID NO: 241212 - DNA, 1323 bp, Cannabis indica
atatgtcaaaagaaacacatttcaaatattttatatccacaacaaacacgcagctaccacttcatgcaatcaaaaattcaaaaaatatatccaccaacagatccatcgatgacccattttgcctccatcgaatcaacgaccaagcctcaatctcctgccaaatatgaatcaacccagtgcaaaaaagtacatcatgggagatagatttttcctttttcccatgttgttgggcacacaactccatatatatgtttctcttagttaaactatacaatttccactggaatttcttagtaaaataacctccaaaggaatattttaaattttggatgaatatttagttcccacactattctaccattttgaagtcacctccgctccacgcattcactcttaatacacctttttgacgatagaatctcgtcaaccaaattattgacaaaatttaaagttcaatcaaaactcaagatgaagatgaaggtaagtaagagtgagaatttaaagaggtattaagagccactatgaaaaagagaattgtttgtattccttaaggtcaagtgttactatactttttcagtcccctctcacatcagagaatagggtatttataagctctaatggccttagatagacagtggttcccatgggacaagctgaagtcctagtattgcgagttctaggtgtaggaggtggtcgtccgccttgtaccgtagtttggtgctcggtggttctgagttgaagaggtggtggtccttgtatacccttggatgtcaggacttacatgtggggtggatcaattactcgtaccctttctcactaacaaaccatgtaggaggcgttgttatactccattggcgcgcacgcctcatccttgtggttgtacgtttgcttcttccatctttaatacttaagaatatttcacttagtattggttgtgtttttgagaggagcgtagtcgggattcttgagtgcatgctggccaagacgcatgcaatgcatgctggctgagtggcaatgactcaaaaccctcacctaagaggtaaaagctaggtactaagttaactaagtgtgaaaaatggtggtatatgtcctaagaagaatgcatgtcaaacgactcaaaagaaacaaataaatatttatagagaaaggcaacacacgggaatcataacgttgagccaataattagattcagaaagggagatagtgagaataaaaatagtaagttcaataccttagtgcagtgatggagattcacaggagtgtgaaagttagctagggtaaagtaggatacgtgccatacaaaaaataaaaagaagaagtgca

SEQ ID NO: 241213 - DNA, 696 bp, Cannabis indica
gtcttggcttgtcaattccgtttcgtctgaaatagcacaaatcattatgtactttgatcttgctaccgatatgtggcatgatttgcaagaaagattcagtgagggaaatgaccctcgaatctttcagcttcaaacccaattaacacatcttcaacaaggtgatcaatccctcacctcttatttcaccaagctcgaaaccatttgggatgagctaaaagaattccaacctaacactacttgcacttgtggtgccatgaaagttttcttggaatattacaatcaaaaccaggtccttcagttccttactggtttaaacaagtcttatgcatctgttcgggctcaaattcttctcaatgaacccatccccaacctctctcgggtgtttgctatgattgttcaagaagagaggcaacccactcttggttcttcaactacttcacttgctgcctctgcccgtgcttcttcgaacaatccacctcccaaatctaagaagccaagaccttcttgcaccaattgtggcaaaccgggtcactatgtggataaatgctattttctacatggctttcctcccggttatggctataaaaagaagcaagacaaagcaaaacctgctgcaaatcacaccagcaccagcaccaccacggatgtgattccctcttcaacaaccaattccgacttgactactcaatgtcaaca

SEQ ID NO: 241214 - DNA, 547 bp, Cannabis indica
gatgtaaaaaagaggtattcctctcaacttatcccaaaataggggtttttacaaaaatactagatttttgaacaaaaatttacaattttactgtcacacggaattttttataaaaataaggttgtcttttaataaagcaacctaaaataattgtaaaacaacaaaatagaacaattaaaagtaacagtagaacaactaaaaaataaccgtggaataacagtgaaaacttaacatagtatacagtatttttgaaaaaaaaaatctccctcacaataaaaaagaaaaaaaaaataaaaatttcagcatagtgtggaaaaatctcataaaaatattatgtgtcttttctattatatttttaaatatttgtatatattttatattatattatttgagaactcgctaatttacgtgagtatgtttatttattttttgttcaaatgacctttgaatactttataatttagtgttaagaattccttcgataacaatatatttcttttttatcgtataatattcttagatcatatttattttatattgttattta

SEQ ID NO: 241215 - DNA, 782 bp, Cannabis indica
acaaaacaaccaaatattataaattcaaaaaaaaaaaaaacagctagatagaatataatcaaaatatgtttttattacatataaatattttttttaatatgtattagatgtaattggattgtatcagttgttaattagattttgagattaaaatctaataaccgattcaatctaattaaaatctaacttttaacatccaatccaatcgaattgtaattgaatatccaattttttgtaattaaattggattagattgattaagttcaattgaattggattagatcttgtccatcccttaccctataggtgaaagaccatgacctctcctggaggtcttcctctccacattttgtaaagttttcttcatcttcatctgattttttctctccatcttcattatactactcaagcctttcttcttcgatgatatagatattgaaatcattttaacagtatcttatttattatcatgtattttaataattatcataattattaaactatcaagaatgtgttctaaaacagaaattaaactctttaagtttgagtatatttacagcggtgatgcagcagaatgaatgactcctttcgttcagtactctaatcttgaattatttctgtagtagagtatcactaatgcgtgtcgtaaactgcaacaaatttactaatattttaattctactacctccaactattttagtataattgtaagtaagggtcgtcccacgcggactatgtttattcaattattcacaaattagtaacaagaattagaagagggg

SEQ ID NO: 241216 - DNA, 891 bp, Cannabis indica
gtgtgagtatttttgtaaaagttaactcaaatttcagtattttttgtaagttgcccttataaatataaataagtttgattgttcttcaaaatatattagtttatttaaattatttattggattttcaataattttagtttgattttgtaagatacgtattgttgaccgagatttttggcaaccaattaaataatagaatgagaagagctgtagaagctttaatgggagtgatttttacatggttcgcgcattaatgagtcttagtccacgagtgtttgttatttatgagagtgtttatacagagaaggttcttggtgaatctctctctcttctttactcccttcgattccttaattgatcgatcgacccccttttccattctgtatttggggtatttatagtattttcgggagaatccctagaaatggatcatttgtctttaagtgttagcctcttaggggcacaaatttctagcatatacaaaataggagatacatgacctatgtcgtaggtatcttagggattaggtgaatataatcttttatcctcccttgattgatgtgagtcttcattatggagtcgtcactagactcgtcgattatcgtgtaatcgccgtaaaaagaggcttacaccatctgtcaaattctcttatggaggttctgatacgtttccctcatgcagcattaaatgcgaagtgactgttcgaacaatctctttccctcccggagatgccttgttacatttccagcctcccggagagtaaaggcgtgttttatgctcctctctctccgggaggctcgctccgtgagatgtacttctctgtctatgacttaaccaatttttgtgactggtgttctttaagatctgtgtgtcgcacgcagccgctgccac

SEQ ID NO: 241217 - DNA, 955 bp, Cannabis indica
atagacctaagatcaactattgatattggcttagaaagatataacggtaagtttatgatatcttatcgaagatcaatatcagtcccttccaatgtatactccatacatgcgatactggtaaactttgccaatgccctagaaaggatatgacacttatcaaaggtgtaagtataccttatcgctgattatcattacaatataaatccagtgaactgacaaattatgggaattaaaattttgaacatataatcatgattatattccactgtgccgacgacactataatcatgcacgaatatatacatatttatatatgttttggacttaatagaatttatacattaaacataatcatgaaataaatcatgtgaaccatgcaacatagaatgatttctgatatttgttaattactaaatctgattatattgaaatgagttttatttagggcaaaaaagtcaacaggtaggttatgtactcagctcctataaaagaaaggttgagaggacacataacagacatcagaagaaaagaagagtttctctctaaaaatctcaattttcatcattgctccctattctcttcccttacatacaaccgtcttgtctcatcaattctcttcttacacacaactatcacatctcataaaaactttttcataaatatccatctcgttaataataactctctctaattaatcacacctttaccattaaccaggctgcctatttagcaagctcctataaaaaccaggcagcctatttagcaagctcttataaaaaccaggctgcctatttagcaagttcctataaaaaccaggttgcctatttagcaatctcctataaaaatcaggtggcctattaagcaagctcctataaaaatcaggctacttatttcgtaaccttctataaaaactaagctgcttatttcgtaacgttctataaaaaaaaaaaaaaaa

SEQ ID NO: 241218 - DNA, 1107 bp, Cannabis indica
agatgaaccaaaacatacacaaatgaatgaaaattacttcattttctttattgatgttgaataaactggattacattgaaatggagttttatctagggcataaaacccaacagcatagtgggccactttatcagagattttcctcaagccaagaaagaggatccaaaaaagaatactactcagaacccggggcgactttttaccatgactctggttgacgctggtgacaggtcaattatctataaatggttgttcttatactgtattgtttgagtcgggagctactcattcctacatgttgattaggataattgaaattttcataaaccatgtgatggatatgcttcggggtttggtaccctgttatctttaggagacgttatagtatccacaaggtggattcgatctttgtctttttggattgacggttgtgaattaacttcccatctaatagagcttcagctgtcttattttgacataatcctgggaatggattttctatctaagtatggggcaacgatcgactgcaagcagaagatggtggtgtttcagcccgatagtgccaacccggtattgtttgtgggtaaagttcggggacacgcataccaagaataacacttctgaaaacaaaagattggtgagaagaggttgtttgggattcatagttactgcagtggataccagccaacctgtgacatctggacctgagagtacaagattggtatgcgagttctttgacgtctttctagaagatatatcgagattcccacttacccgagagattaaatttataactgagttagttcagggagcggaaccagtatcgaaagcaccatatcaaatggctgctgtagaattgaaggaattaaagatccacttgcaagagttactgaatgtgggattcatgagaccgagctactctccttggggtgctcaagtattatttgtgttatcccaattttggcactctgacgtggcatcgcatgctggtgacacgtggaatcaacttcacaaagagatatgccaaatagaataccgcacatatctacacagaggaagctttcctagttgagtagtggacaacccaaacaagatgccaacacttag

SEQ ID NO: 241219 - DNA, 889 bp, Cannabis indica
aataaagtaatatgattatttgagcaatttgtttttaaaaagtatactatgggtactgtgtttataaagtatactatgggtactgtgatcattaatgaaaataaatcaagacaaaaaagaatacacccaacataaatatacatacttgaaggctcaaaattatataacacatcagaacgaaacacctaccttttaaagaagatagtttaggaataagatattcacatgaaatacatgtgaaggagagatatccactacttagtatggaaacaatgagattgaaaaaatacattaccacatgaaattacaagttaaaagcgcacggggaatcatgagtccattgctcattgcaagaaacatagaaccaggtgataaacccttaatattgtcaggaattaagaaacttgtccgctgaaaaaataaaaatcatcaaggttacattgtgaagttatttaattgagcagaaacaaaaacactaactaaaatatagattattaccatttgtgatccacatgaagagaagtgtagtcgttcatctagatatagatccaacaaatttagtaccaatgtacgaaaatttgaattacaatacttaatcaaatgcctcattatcattaagcatattcaaaactctaccaaaattctttcaaacatgtatataatacactgtacaacaacaacccaataagaacccaataatacacagaatatggatcttatgagttcatacctaatggtatagcaagagacttgcatcaaatgacaatggtggtactgatttgatcaccaccacagtacaacaacaacccattaaaaatcctcaattttgtaaataaatacactcataataaacattgccaaacccgtaccatttgactgcacatatcat

SEQ ID NO: 241220 - DNA, 1635 bp, Cannabis indica
agacccagatcaggatccaaacctggacccagactcggacccaaactcagacaaggactaagaccctgacccagacccagacctggacccaaacccagacacagaatccgagtgtgggtctgtgttcgagtccgggtcctagtcccattacaatttttggtctaggtcctcagcctattcttggctcccgatccgcttcttgtttcggttctagtttccagtcacgaggcacgagtcgagtccaagcatcgcgtcccagatcccaagtcccgaggtgggtcctacgtccaggtttgggtatagggtcgggtcccgaatcgcaatccaagttctgaggcccaagttctggtcccggtttgggggaacaattcctaggtctaggtcccatctatgtttgggtcctaggtcgcagtccaggtcaaagtttgtgttccggttcgggttcatgtctcaggttcctgtccgagtccaggtcccgatttgggtttgggtcccatcctagtctgggtttaggtttgggtctgaagtccgagtttggttcttgggtcctgggtttggccccaatttttaggtttgggtcttggtctgggtccaggtcccggtcttggtttaggttccagatcatgggtcccagtctgggtccaagtaccgaagtgtgttttggtctaagttttggtttaggtttgggtcctgttatagtcccaggtctgggttctcatcccagtcctggtccgattccaattccgagtctaagatcgggtttggatcccagttcgggttcaggtccgagtcttggtacggatctgggtttgggtcctaaattcaaatactgactatgggtcaggataaagccttaggtctagattcatatctcggtcttggtttgggtttgggttcagagttgtgtcccagtagtcagttcctaggttttgggtccaaggttgagtcctgtgtcttgagttttgggtgaagttttgggtctcggtcccggtcgggcccagttttgggtccaagtcccccatctaggtctggatccttggtctaggtcttggtccaggttcgggtttggggcccaggtccccaatctaggtcacggtttggttctcaggtcccaagtccgagtctcaggtcccaagtccctgtcctggtcccaatcgggttctagtcccagtacaggttcaaggctcgatccaagtccgagtcccgggttcaagtttgagtctcgggttcgtgtctgagttttggtacgagtctgggtctgtgtctgggtctgggtctaggtctgggtctagatctgggtttgggttttggcccaggccggggttcgggtcttggtctgggtctgggtccaagttttggtatatctctgagatctggtctaggtcccgggtcacaggtgctgggttccaggttctaggtcacaagtcctggcacaagtctgggtctgagttgggtctaggttcgggtatcgatcccaatctaggtccgtgttcgattccgcatcaagatccagttctgggtccaggtccaattcctgttccaaggtgctaattccagtgcttgttccgattttaggtccttagtccgagtctaggtttgggtcctagttttgaaatggttccaagtttgggtctt

SEQ ID NO: 241221 - DNA, 1319 bp, Cannabis indica
atattaggtttataacctagaatctttaaaacttcatataaagggttaattttcactaaaccccaaatgggcaagtgaaaccgaatatcgtgaaataaagtcagaatgcaattacagtcaagtcgtatggttaagcacaattgaagtcccatattcttaaactagattttttatggttttcctagaataagttcaaggactatcgaattttttacaatggaaacctagaaaatcaattattcaaatataaaagagaaaaaagaggaagaacttactcactgtttgaagctttagagttgttcggatgacacggatcgacacttcctagaaattcttcgaagaattaaagaggaaaggtgttcttgctctgaaatcgtcaagaaagaaaaatgctaaaagtggtttattagggatttctgccctatttataagcaaattagtaaggaagtgtatcatttaaaaattaaaatacctcgattttcccccaaaagtaaacgttaggcaatcaagtacctgaagagcaaccatcaaagcatgcaaatttttggagaaattcgaggtacaaatcaatcagcattaatgagtcggatatcgaagagacgcatcacacacgtgtcacccgttcaaataaggattcaaactgagtgaagtccacacgcgacttcaaaagtcctgcacagacttagggggcaatgttatcccattttttggactacgacgtggcagcattatcagtgacacgtgtctgtcatcccttacacttgagcggagaaatgttccgaatagacttcaagcaacataatcgcctgcacgaagtctgcttgatcgagcagagtaaagggcagataatctgagcaaagagtgaagttggttccccgagctgtataccaagacttaactacttcagagttgatagcgtgaagcccaagcccaaaggcaatccctacaatcatgagattgaataaaagggatacgacaggctctcttaatcccccatttgatgtattctaaatatgtaatgtatgttcttactaattatagatattgtataagtaaaaggggaaccttccctcctgcatttagccctataaatagtgatctagcttcactgtaaaagggatcgaaagaattgctttagagagagatataagagaaaacactcagagatttcattgtgagagctttgagagaggagtaggctattaccgaactaaaggggacaaagctctttaaaacctggtgttcgttattgcttattgattttttctctgtctttattacatttctaatcgcttattaattgactcagtgtcgttggc

SEQ ID NO: 241222 - DNA, 888 bp, Cannabis indica
atacaagctgccacaaaacaaaaatacatacatttataagcactatagtacacgagcgaataaaattaataacatcacaataagggcaaaactgacctataaaaatatggtgcaactgaaaacatttttgtgttcttagttttgtaccgctatagagagtcattagacatcgaaagccagcagtcggccaattcttcttcttaattgaccttgtatcaattaaagagtgcatgtagctagtgctgacctcagtatcattcttgggcaacaagagttccaatacaaacaagcaaaacttaatgagaaacaggtaatcgctctcgctgttttccttcagctccttctccaacagagtcggggaaaacctatagtccttggccttcaaaattttgtcaaactcaaggaggtcacggtcactttctgttaccacaggttctcccccatccctaattcccatgacaccatgaaacagcttggatgatagttgaatcgttcttccaaatatctccagcctagaagtggttggatccacgtgatcgataagccaactaactatctaagcatcaatgtacgggccatcctcctataataatgtcgagaaataggcatttctaacaatttctttttgagcgtcgttgagaagtgggactattctaccaaaacgtttgaaggagcaacgactagatatttgaacatcccctaccccttcattgttctcaattccaagatcaggagataatgtctcctttaacttcttccctttccctttaaaaccaaccttcaaaggggaagcctcaacttcatatgaagcccaattctcaatctctcctcactaagaagcttaaattgctctttaaaactccaaggacctgcaaaattaagactctc

SEQ ID NO: 241223 - DNA, 1468 bp, Cannabis indica
tatttttgtaattagtcgctaggcgacaagtatttgtatagacagtaaaattttgtaaattgtactgtaatcgggatcccgagtattttatataaatattttacaagtttaattaaaaagcaaaaattttaattaatcacgttttccatgaacctcgttgattagcaacgagctgcatagtatgtttaaagatcacgtaatacgcctatgttagttagggtgttacagcaatgatgaagctattgttcatgtgataagctttgaggacattgtctcagtcctttctacaattttgtttttagcatttagctttagtgtattagttggtctttcccgggcggcctttccatgtggataagcctcagtaaaatgttatcaaaatttatggtagttaatttagatattattttcaacttaagcaagctgttattccaattattttcttttttattttactttatctgttactacttgaccgtttaacacttgcacaatacaccatgtcttaagaaactcaatcacaggaagtaatgtcatttcttcttaaagttatctttaccatgagattacttacacacacgtgcaaagaaatttttttaatgctagtgtaacatatggatctcgtataccataacataacctatgtgccccaagtgatcaaggaagtgccttcattggtcactttccataccaaatgcccctgggccttcttgatcattactcttgagtggtgttacatgttctccacttatctgaggattcgtgggtggcggtgttgaactcactaaagaaataaccaaagttatctcaagaccaaccctacaagttttactcagcgcttgagaccggcattgggtctgtgatcttcaattgattaatttaaatgaaataccaaaaaaaaattgttctacgctttttctcatcaaattaaatacaattacattactgtgagctaagttggaagaaagaagtatactttaaagtagtagttgcagattccctccttcatcaaagcttagctgaagtgatccacactacactaatgccttgtttgaattttttagtataggagccataccatagaaatggacctcttagcctagagctaactttgtcgcatctcgtcggtctaagaggcaatcaattcacttgcacatggtaaagcgaatctcactatgaagcaatctattttgaagatagctgctattaatggtagtactgtcgtagatgcaccctgttctattaccttggtactagcactggattcaagttgtagtcatagcgtgccaacttgtaagttttgagttcaagtgctttagtgacggcatatggcccttcccaggtaggcctaactactcttgttgatggatctttcgtgtttaagaatactcgtcgtaacaccatgtctccaggcttaaatttcctatttttaaccttagagctgtagtgttttgtgaccctttgctga

SEQ ID NO: 241224 - DNA, 792 bp, Cannabis indica
gaagaatgagattcaggatcgttaacctcgttatgcagttgggccctgctgcaaggattgcgtcgctcgggatcctcctcttgtggcacttcatagttggagtttcgtgcgacttgttccctttgcattagttgattcaagtcgagtccctcttatccagtcatgtgttctctggggtgtgattagttcatcacctagtattcgttaccaggggttatttgaatgtgtggttggtgctcgtagaggacgtcggttcctcacccttccattgatttcagcctgtagagcctgtatttgatcttgtaaggcagtatattgggctgtggtcaattggatgataccttcagacacaacaccacgcatgataggcgagaactgccccgcaatggccgctagtgtagatgtttttccaacatgagcggcagtttcaaggaataagctgagaggagtaacggttctccatcccactccttcgttgatggcatggacaggtgtcgttccattacgtgggagtggaacattcatttttcaacattgattgatctagtgttgttatctccattcctcaggtttccaaccatgatgagttttctccaaaattaacataatatttctttcccacagacggcaacaaatgttgttagaggaatttagacaacaccaagataaataatattttataaatataaacagaaaatgtgcgagtactcaacctagaatggcaagtattcaagctatggatacacagaagtactggatatataaaggccacaagaaaatatagttcaatca

SEQ ID NO: 241225 - DNA, 1222 bp, Cannabis indica
ttatttaaataattagttaaatataacaattgtggtaatttttgttaattaatatgatattaatttattttttattttattaaaaattaatataataataaggaatatttttttagtgtaagttttagtgttgtggttggagtagaaatattttttgacgctaaatttggtgatagtgtaacactaaatttagtatttctttggagatgcttacatatatattacttttaagcaaataattaaatactctttattttatttttcattatttttgagttttatcttccctgttcatcttcttcttcttcttctttttttctatgtctacaacattaaccaaagaaaaactaaccctctccttttgtagtgggtaactaaaaaaaagagtatgtaaagtaggaaaaagaagaagatttgagaaagataaaggtgtggttgtgtgtgagagagagaaattgagagcttgctttgtgacgagcttcttgtagaactctaatggtaggttctctactaaatcagcatatctcatccaagtcatgggacgggctcctttgtgtaatgtagctccgaacttatggaacaagctgtggaattcaaaaaaattggagtgtcacaaagtcctctggtggagtatcctctcgaatgatctacctgtaagggctatcctttctaagagaatggttattgatgagatctcttgccccttttgtggtaatggtgatgaaactatggagcatttatttctctactgggatctggcgtctcacctttggagatcttccccttggggggttatgcatgttgtggagtctggggcccgcatgtgggactgggttagctttctttggaaccttaggaccagaggagtggatactgatggtttatttctttgcgcttcaatcgtggttgacacgatttggagggctcaaaatgacaaggttcataataacactttgggtagcttgaaacattatattgactctatatattattgttatgcagattatggatccagtttgttcaagtctcaccaggttgatggtactctgggttggtctcccccgccagaggattgggtcaaaatcaactgtgatgttagagtcagagtggaaaccatgtgtgcggtggtgattgcgagagatcatacggagtcgattttgtgggtggcaacaaacaagcttcacttctttgaccctcttatcggggaagcggcggcttgtat

SEQ ID NO: 241226 - DNA, 1885 bp, Cannabis indica
tttaatacatcccacaaaaagacaaaatacaacttagcaaattgaccattttgccccttaaacacgaaaatcactaaacgccactaaaaggtaatttgggaaattctaaaatcccaaccaatcccgacattcccaatgtctaactatatcgccccactatactaaaatactaagatgtgattcaactaacccatacaccacattccaatgttgtcgggcactgaaaatacaaaattatgtaatttctatatatgatatataaaatccattctgaattcaaataaatcatcataaattaataatttagaattagtagctaatttatataattaaatgctatgtatctgcaaatttccaaatttagactaagcggtctttataactactatcccccttaaaaggatttcgtcctcgaaatctaacctgaacaactctggatactgagctctcatgtctgattctaactcccaggtggcttcctccaccttgctatttatctagagtactttgaccaaagctatggtcttgttccgaagaaccttatcctttctgtcaaggatcggtactggttgtttttcataagacatatctggttgcagctcaagattctcataactaagtacatgagcaaggtctgaattgtatttcctcagcataaacacatgaaatacgttgtgaactgccgcaagagctggaggcaaagctaaacgatacgccacttgcccaaccttctcaagaatctcgaaaggtcctataaatctagggcataacttgcctcttttcccaaaacgtttgatccccttcattggagatactcctaaaaacaagtgatcccctacttggaattcaacatctctgcgttttggatctgcatagctcttttgtctactctgagaggcaatcattatagctttaattttctctattgcctcattggtccgttgtactgattctggaccttggtatttcttctcccttctctcatcccagtgaatgggagatctacactttcttccatataacagttcatagggagccatccctatagtactctaataattgttgttatatgagaactccattaacggtagatacctactacaagagcctttaaaatccataacaaaggctcgtaacatctcttctaatatctgaatcgtcctttcggactgtccatctgtctgaggatggaatgttgtactaaacttcagtttcctacccatagcccgctgcaaactctgcaaaaacttggaggtaaactttggatctctatccgaaactatggactttggcacaccatgtagccttactattcctttgacatacaattctgctaattgatccactgaatatgttgtttaactggtaggaagtgagcagacttcatgaatcgatctaccacaacccaaatagaatcaaatagactcgtggttctaggtgacccaaccacaaagtccatcgatatgtcctcccacttccactcagataaggttaaaggttgtaacaaccctgccggtctctgatgttcggccttgatctgctgacaggttaagcatcttgatacgaattctaccacattctttttcattccgctccaccagaagtaagatttaagatcctgatacatcttggtagtgccgggatgtagggaatatggagtggtatgagcctcctcgagaatttcatttctaagttccacactatatggaagacaaaccctggctttaaacaacaacatccaactgcctgatactgtaaaatctctggcttgaccagctgaaacctcttctctgatctttactaactctagatcagtcatctgagcgactttaattcattctagtagatcggattgcagcgttaagttgtgaattttgcctacaac

SEQ ID NO: 241227 - DNA, 525 bp, Cannabis indica
aaaacaatgggacattcatatttgaaattgcaccagaactcctctgtattatccttcttaactctctttcttcttttcaaaggcttagtgacatcaagtgtgaccctcaaacacatataagttctctacattaccatgaaattcttgggatcggactccacaaatttttcaatgtaattacccatattctttaccaccgcctcagacatgaatcccggacggaggtcatgtaattgaacccaaatatccacattagttagatggacaaccaatggatcatctccttactgtagttgctgcaacactagtaaagagcaattaaacatccaaggacttttgtcaataaccctccgtatatcgacttcatgataaaattggaacagatacaaattatcacccagttctttgacaaacacttcatggcctggttgccacaaggaggccattagttgttgcatggcgtcgaaatcgatacttcgttgggttaagaacctacccaccaaatgttgggttttattccctaaa

SEQ ID NO: 241228 - DNA, 1177 bp, Cannabis indica
ctcttctcattatatcatttaattggttgccgaaaacctcggtcaacaatatatataataaaatatatattatatataattttttagcaacaatttaatacaataataagattagtatatatgttatgccattaaaagtttgataaagatagttttttcttcttgtttaattcctgaaactttattaggctaatttttattttattttagtatatgataatgatgataatgtaaaccgcctaaaccgcactccaacgcactatatttttgcagtgtggtttttacagttttaaaaatcatattagacattagattcatgtggttagttgacataaaattattaaaaatataaaatatgtaagaaatataaaatatttttttaaaataaaaaataataaataaatattaaggaacaaaggattatttattttacgataatatttatatatgggtaaatactatttaagaccttgtgttttgtaaaaattaccaattggaccctctgttttgttaaatgacaaaatggactctctgttttgttaaatggtaaaaataggaccctcagctcaattttttaaaattttattttttaatataatcaactttaagacaaattctaacacgaacaaatatagaaaatgtgactagttttgtcataacatctgtagatcggattattaataaattttattttgacaaaaaaattagttcaaggtcctagttgtatcattttggaaaatacagggtctattttgttatttaacaaaacagatggtccaatttggtaacttttacaaaatacagggtctaaatagtatttaccctttatttattttaaatatttttatttttagtaatgtataataattaagtatacatatatttaagtacaaataaatttattattttaatcaaatttatcaaaacaacttatacttaaagttaggttgtaccaactttagcttttaactttacattctccataactttatagcataacttttccagaaagcaactttttgttttttcaaaaattgtgccaaactggccctaaatgtggtatctattgatgaataaatctggccaactcacttgtatgtatagacaagataaaagttagaagtaattaagtaaaatagaaagaacacacaataatttatagtacgtagttcactac

SEQ ID NO: 241229 - DNA, 1135 bp, Cannabis indica
accactatttattaggatccaagaatgatatttattttatttgttcttctcttgataatctttcatgaaacgtgaacaatcttcatgtttcatttgatttattatatgtgggataaattaatttactactgaaaacttctaattatccttatctgaaacaattacttcatagagatgatatatttgttatgtgtctcacgttgtacgagaatgagacgacatatgcgagacacatatttagacattcttcttgtatcgatcattcatgatgaaatttttagataattcttatataagcttttaagtaagctcttcaaaatatatcatttatgctccttagattgaaatcctttaaactgtcttgttcgatcaacaaagtcttttgtatttttttttttttttgtactatgttgttcttgagatgattgttattaattttgctagtctactagtgagctattattttgacttatatccttagtcacttaagaaaagacttcactttattacactgactattttcatgtgtttaatttttcaatattcaaggaggtataatattacctaatttttttctacttgactagctcaacatattcttataaactacaaagcaactatgatgataatattttaggaaaactcaagtattcatttgattctttatttctagtaacctatctagaaatttactaaaattttctacttcacaaagtttgtaaggttaaggtgggtgaccatagtattgggagaaagggtaaaagaaaaaaaaataataataaatttagagtgaaaattaggaagctcacaatcatatatgcaaggttatgtatgttgctatcttgacacccttataatttagttagcatgttgattaattgattgacaatcataatagtaatctaatctctatgcattttcaacaatcttcgtgtttcttatggtattatatgtcctatttgactaatgaataatatattaatagaggtctgaaacctttcacttggattaatgaaaataaaagatctttattaataatgatagtaattagttacttattagatacttatttaagatcttttttttttgtgccaaggtacacatattgtgacttcatgtaatgtattctccaaag

SEQ ID NO: 241230 - DNA, 1427 bp, Cannabis indica
gattgtctcataaagtaatgataattatatttggttgcctcatatggtgaaagattgtctcattaggcaacatattgaaggttgcctcattaggtaacgagaattgatggttactttattaagtaacaatatacgtttatattactaatcaaaatgattattactgttgcatgttttgatattttcttcaataaatgggatggcttattgtttctgatttagaatatgtgattatcagattctgattatctgagtttagttgatgatatctgtgtaatattttgagatgtgttattgcttttattgtttagtcattgtgactcgcgagtgttatgtagtgcaggtaagggttaggtaacatttggtcagccatgcgtcagggatcttctccaacaaatgtacatatcattttatccggcaagtagagctgaattatcaagatttatgttttacgatgttgtggattttaatctatattttattgaaataatgtaatgacatcttttgtaatattttaaaaggggatctccgatcttaaaagtgttatgccaataatctttttatttcaaattagttaacaagattttaattaaatcataattttacataaactattagtttattattataaactaatttataaaagcactcacgtgtcgtccttatgagttagggtattacaacatggtattagagcaaccacaattttagaggtcctaaagactgactggatatgtatatttattgtgaagacaagctcgactcatggtatagtaaatattatttacctacctatatattatgtgattaaatctttatatggtatggttagaaatatgtttagaaaatcataagttaagtttgtcagtagtatactatgattttatactaattgaatatcatggtagaaaatatgtgtttaattgctaagtaaagtatagaagaaatgcttattagcgttgttatttctcaagaattctaattgatacgagttgatgattggtgaagtattgaacaatatgtttaaggtgatctaagagatttaataggatgcttgacggctcaagaatgatcgaagagatggtaattcatcaccacccaagactatggagcgatgtacgctattacataacagattatttggaaaggtgagccgataagagaactaggtgtagtaggtttgatgataaatttatttcttagacatgtctggttgtgccgcaaaatgagaaaaactgtttagagtcgttgtatgagcggttaaaaaaaaatagaactttcgttcaaagagtggaggagcacaaaacatgagatgtgattataatggctaatcaacatgtgagttaatagacgtatactcaagaggttaagctaggtattactattgatatggactgggtattagctataaaggaaagatcccttga

SEQ ID NO: 241231 - DNA, 928 bp, Cannabis indica
atgctctctctctctcgagaagagccttcttgtagagatgctggaaaagcctgataccaccatggatgacctgcttgctagaactactaatctaacagtgctagatgaggaaggatgggaagttaatactgtcggggggactgaagtggcctcattttgtgcaatggggcgtttgtgctccaaccgtccgatgagtcgttctttattcaaaacgattctgggacgtgtttggggaatttcagaaagggattggggagtggaaattaaacttactactaaaaaatcaagttttttggtcttctccttcaaatcatctcaagatttggataggattttgaccaagaacccttggttccttaataatggctttctaattgtggagaggcttgatggaattcctcaagattgggataaagtgctcactcgtttccctcttagtgggtgaattcttcagttgcctactcgttcgatcacacaagggaacttggagcgactggcgggttatccgggcgaagttattgaagttcagaaagttgatatctctaagatcgtgactaaggaatttttcaccttcaaggtttggtgtgatatttcaattcctcatatgtccaggcttcctttttccgagtgagggtcgaaagatttggttcccattcaggtatgatcgtctaccttttatgtgttttaaatgtggttttgtgggacatgatgctcgggtttgtgcagagccagtcaaattttttgaggatggattggggaatcaactgccgcgatatggttcttggttaaaggttgatgatagaagagacttatctgcttcgtcttctcaaggttcttctagcagatttgctcagaccaccactccccctcgctttccagtgaaaggggtctctcattctgatgttttgcccactaatcctgggaaggt

SEQ ID NO: 241232 - DNA, 508 bp, Cannabis indica
acaaaatttgcatgaatcaattagagagtattcaaccatgcattggtgaattatatagcttcacatgttggaatcatcccatatcttcttcttgctgtgccacaatcctaaatattcctccttccgccattgatcgttgtcccgatctcttagcttattatacaaataatttcgctttctttcaagctcgaaaatattgtaccgttatgtataacattccatcacaatcaccaccatcaccgccaacaccaccaataccaccaacaccgccatcaccacatcacgaataaaaaaatgtgtagatcaagaaacttcttccaatgtttaatttgtagagatgtcgcagtaacataacttgagaaaatccatctgctcatctttgttgcaacactataatcgacgttataagtgccctaaaaatgttggatgggctcctataatttaaaaatgtttgtactattgatagggttttcggtctcttgcttattgtgagttgtcgatagtccaa

SEQ ID NO: 241233 - DNA, 861 bp, Cannabis indica
atactatataataaaataatttaaaatttatatcaatttataaataagaatataagttaattataaccctaaataattgaaaatcactcacccttattctattaagcacatgatccttatattgttggggtatatcgaaaagattataatgatgacctggacacaaaatggatacttgctagcccataaatcgaatgtaagcgctggcttcagtcccaactactttgtcagtttcaagatccacctcaagctctaatggcttaccagcgtccgtccttctttgttcatgtttagcatttgatgcaaggccacgaccctttctaaccgttggtttagctttatttattcgagagaaaaaatattctattagtacattaaacatttatcatgtacttatattaagaataatgttagagttgagaaaatatgaaacctgattcgcaggacgagggtaccctagaaggatcagggggatccctaccatcaccatccccaccgtggtatgtcgctagactagctgacattatactttactttgaagatgaaaaatataaaaatgtaaaaattcacaaaatgtaaaagagatcaatcaaagatgacacaaatattaatacgaaagaaaaaataaaatatcatttaatcattagagttttatttacaaacaataggaagattaaacttacaatgaagaatcagtatcatttctatcattcaccaagtttttattttcatcctcaacaaattcaactagtaaatcatttattttttcagcaacataattttcatcaagttcattattttccatctgaggatccactgactgattggtcattcgattgcaaaatcaactctccaagatca

SEQ ID NO: 241234 - DNA, 739 bp, Cannabis indica
ttaattattatcgagattaagatacggttataattgttatgtaataaagatattttcttattacataatgatataaagattattttatttggcaatgataaaaagattgtcttatcaggcaatgatagaaatattttcttattaggcaatgataaaaagattgtcttattaggcaatgatgaaaatattttcttattaggcaatgataaaaaagttgtcttattagataatgataattggatacaaaaggttaggtatcaaaagtcatgactataagctgaaactgttgttaggtttctcatattagggatactggtggccaggtatttggattgtttatttaataatgatggtgacattgggataccggtaataggcatcaaggttgtcttattagacaacaataaggatattaagatgtcaggttaggcatcagggttgttttgttaaatgaacaatgaaaatagttattttataaagtaatagatatgacttgtactactagctcggtaattgtgtattactgaatatctttatattgtcatttatttgttactcaaatctgtagtgatttggatttaacgatggtgacatttggctaccggtgatagatatcaagattatcttattagacaacaacaaggatattaagatgccaggttaggcatcagggttatttcgttaaataaacaatgaaaatagttattttataaagtaatagatatgacttgtactacta

SEQ ID NO: 241235 - DNA, 675 bp, Cannabis indica
cttcttcttcttcagtaccccattgaagagggtaactccttaaaaaagcccttctgttgttgtaatcttcattgcgaaagcttcttgagcgcatcccattccctatttgttgatcatgatgatcactactactactgcctttgaaatgataatccatagctttgaatttatcactaactaaacaaaaggtaacatatatatattgacaaatgatcacattaactaaagaatgtagtttaacgtacgttgaaagcaatggtatttttattttattctttttagcaaatagatattcttacaaatataatataactaataaattcacaacatttttggtttggtgtataattgtaaaaaagaaataataatactattatactattttgatgaatagatcagttttatacttatataatttagagaaaattgaaatatttaagtctattatatgaagatattgctatactacaattttttttacttttagtcacaacaaaatttgtgattaaaagtaaaaaagttatgactaattacaattcatcattcttatatgttgtgacttaaaatgtccatatataatttgttgcaactaaatgtgtttttagtcacaatacttgttatgattaaaactaaattagtaacaacttgtattttttttttttgaaacgggattca

SEQ ID NO: 241236 - DNA, 1185 bp, Cannabis indica
tcggttttttttaaacggtttcggttatgacgtggcaccattttctcggttttttaacagtcggtttattggtcggtgtcggttttgcggtttgaatgttcacccctagtagagattgaagatcgtagtcggcaagccactgtgctgatacgaagagcataccaaactgtaggtcaacaatcgtcgaacgtcattcccctgggagaaacggaagaagacccaacgatgaatacttgccagactactaatggtcaaccgcccaatccccggtcacgagttccgctcgtgggcccagcggtaggcgagcagactttgtccgataattcatcaagaggagtcatacctgacggctccaaccagactaatggtgccattttacccgtcaaccaagcgaatcaatcgctaaggcaactaggctcttctgtgttcgaaaggttgggagcaacccatgacctaaggaacgatctaaacagaagaaggggaacggacgaacagaatactacaatgatcgtgcgccctggagcccgtactcaaatccccgcttagaaagacgctgacataatccaaatcgaccagaatgtcgagtaggtcagcccagccgtacaggcccagcttgacgaattgaaaaatatgtttcatggcatggctggacagcgtaataatgatcttgagttagaccgagcacgcaaaactcccttctcaccagagatcaatctcctgccactgcctcacaagttcaaaatgccaacgtggaagatgtatactgggagagaagatcctctttcccatcccaagtactttgagatgcaaatggatttacaaggagtacggggtgatgtatgctgcaggatcttccccgccactctgtcggaagccgcacagcaatggtatttcaagttggctcctggaaagtttaattcatggaaaaccttctctttggaattccatgcgcaattctcctcctcgcgccagctcccattgcatttgggagattcagtcgaagtaaagcaacgaccaggtgagccactctgggcatacatcagcagattcatgacagaagcgaccaaagtttcgcgggtaaccgaggatggaaatttattcgcgatactggggggcattgaagtccttggtgaacttttgaaagatataaggaaaaacgtgttggaatttattttaccaggatct

SEQ ID NO: 241237 - DNA, 652 bp, Cannabis indica
aagtagggaaggccctaataattcaggtgtcttaaaggtgttagttactgtccttttgttaatattttccattatcatagttaaaggaacatatgtgaattttgaaaggataaatgactttttgttatctttttcagattataattatgccaaaaaaggatgaccatttggaaagatctaacaccttgcggccaaccaagtcaaatgtcacaaccactctgtttcgctttgccttctcttcttcttcaatctcctcacactttttcctcaagagctccttctcctgtaaatggaaaaggacagaatgaagaatcattgagaaaagtctttaagtgaatctatcaacaaatacactgatacataaatgagtccttgtagtcagacaatataaaatttacctccattgacagccagttgttaccctccatctcatagtaatcactttggtcatcaataacagttgtacgagctgcagagtttcgatcataatcaacaagtcttttagcataagcttcagctacagcttcagcatctgatatgagaggcagactttcatccaaaccagcgtatttgctcccttccccgagcacaagagaaccgcagaagctgcaaggaccctccccctcttgttcacatactatcttcccacaag

SEQ ID NO: 241238 - DNA, 1109 bp, Cannabis indica
aattttagacagtaagtgggttaacccagtgcagtagtaccaaagaaaggagggatgacagtgataaaaatgaagaaaatgaattgatccctacaagaacgattactggttggcgaatctgcattgactacaggaagcttaataaggcaaccagaaaagaccattttcctttgccattcattgaccagatgttagaccgattggctggacaagagtactactatttcttagatggctactctgattaccatcaaatagccatagcaccagaagatcaagagaagacaacttttacatgtccatatggcactttcacttttaggagaatgccatttgaactatgtaatgctccagtaaaatttcagaggtgtatgatggcgatcttttcagacttaattgagacttgtatagagatctttatggatgatttcttagttttcggttcttcatttgaaaattgtttgaagaacttggagaaagttctaatcagatgtgaggagtcaaacttggtacttaattgggaaaagtgccctttcatggtagcagtgggaattgttctggggcacaagatttcgaaggcagacatcgaggtggatagagccaaagtgtctacaattgagaatctaccccctccggttcctgtaaaaggagtaaggagttttctaggccatgcaggattttaccgaagatttatcaaggacttctcaaagatctcaaaaccactgtccaatctgcttattaacggggtaccttttgagtttggagaggaatgcttgaaagtcttccaagctcttaaagaaattgatatcggcacctatagtcgcttcaccaaattgggagttgccttttaaactgatgtgtgatgcaagtgactatgccatcggaactgtcttagggcaaagagttgatagtgtgtttcataccatctactatgctaatagaaccctgaatgatgttcagctgaattatgccaccacagaaaaagaaatgctagcaattgtgttcgcgtgtgacaagtgtcggccatacctgattgggaataaggtgattgtttatacagaccactttgtaataaagtaccttatgaccaagaaggatgcaaagccaag

SEQ ID NO: 241239 - DNA, 783 bp, Cannabis indica
ttcttctggccaagccgagcacatgatctcaaccatatgaccacttccctctttggtaatgttaacaatcgtgctaatgtgaaactccacatcatcttttccaacaacaggtgcaccagtttttgaagaagtaacaaccccatcaaacatggtagcttcaattttaatgtcttcatcctcaaattttcttttcaaactaacccattgctctccaggtcggttatcaattgtaaatgaatcaaattttgtaactggctgtaacaggaagaaacaaggcatagatattagactcatgatgcaataaccacttgtttgttctctatggtgcggtttagaaagccaatattggaattgagtgtaattctgaataattagaaagtttgacatgtttattcaatcaagcaattacaaagtaaatcatgtacttcgaggtagtacagggtctcaaatctcaattacactaccgaattctcgtgaaacctccaactgagtgtaattacactttgtaattacaaactcgtctttagataattaatgttattttttaatgtaattactactaaacatgaaaataaaatcaaaatttaatttgaaagattaattcccagattagaggaaacagaatgactaaatgctgtactgctctttaaccaatcatatagagaagatttatatagttgaagcatagaaacacacaaaggtgattaagggatcaccttcacaattctacaacactgaagagaaaaataaaaaggtacttaatcaccttcataatttagtatg

SEQ ID NO: 241240 - DNA, 1114 bp, Cannabis indica
catttatcctcaacggttagtaatcttctttcacttgatatttcaattgcagttgagtattttcttagttgcattccatcacttgttttcaacttgtgtacaagctcttcatatttgtaatcccttgaattgaattcgctactagtttcgtaatttacataattcattcattgatcaaactgcccattgaaaaatatgagaaatgaaattgcgtctatttcctcacattttgaaaattcaattatagtcagtcaactacgagaaaactctaaagaaactgaaatgcaacaatgaattgaaagtaatacatgtgttgttaggcactactttacaaccttaaaactagggctgtacaaaaatttacttataccgcctaactcgaataacccgtccaaatcaaaccaaaaaaatcgataaaaaatacaaatcgaaaaaatccgaccaaatcataaattgcccaatctattaattggcaggttgaaaataggtacaacctgcctaatgaactcaatttaacccgaattaactagaccagtatcattctttttagttttgtacttttaaatttttaacttttattataacataaataataatgtataatataattatgaaaaaaaaccccaatgacctgacctctcacacactccctctctttctctctaatgtttcatgtgttgaaatttcatttacaactaaaaaaaactttaggtcggttttgacgggttaaattgaccaaacagtcgatcgagttactattttttttttgaattgggcgagtggcacttagaattttgcaacctgatgtttacataggattagaaaatatgtagtataagccgatcaaattgaccaatgtataaccctacttaaaacaactaataattcccactatgtaatataaataaacttaccacaatagagtttgctttatatgagttgtgtattgccaattttgagccctaattttttacataataatattgtagtagcactactattaggcaactaataaacaatgcaggcgcaactatgtatgaataatgtgagtgaacatcgttaagaaaaaatttgataaagtattattgtacttgttgcccctgaattcacccaa

SEQ ID NO: 241241 - DNA, 906 bp, Cannabis indica
aattttttttttcctgtggcccactttgtttcaggaccggccctgctcactgctcatttccccctacaataatgggtaagttttttttcaaaaaaattgtaaatattttgaagagtatgtagttcatttccagtagatctgtgtggttattgtttggattggtgttatgttgctgcttttctgtaaaatggcaggatctggttttttcagtgagatatagatttttcacgctatatcaatggtttatgtcgatgttttatcgttgataagggtaccaaggttaggaaagactcttatcaataattttacgataattttaggatagtttctcgataatttccatggatgtgtgattttttttattttgtatttttagttttttattgatggtatcttgatgggttatcgatactatctcgatagtcttgagaaatttatcactttctatccatcacaattatttatcgacagcttgtcgatgctttatcgattgttgggagaaaattattattttgtctccatcatgattatttctcgatagtttgtcaataattttttcaatttctgcctataaaatattgttctgtgtccgtcacgatggtttaacgatatgttctcggcgaaatgtatattttgctaattttgagtgtttttgatatttttttgagtaatttgcggcaaaaatacctaagttttatgccgagtagcagataaatacctaagtcatatttttggcggtataaataccttccgtcactactttggaacttccgtaggtacctctccgttttttgcattgtaatgtgtcaggtgtcgtgccatgtcattaaaatgtatgccacatcactcacaccacttaaacttaacaatgccacaacatacattaaaaaccctcttaaaataaaa

SEQ ID NO: 241242 - DNA, 803 bp, Cannabis indica
tatgccgcaatttacccttatttctatattatttgtattattagtgggcaagaaccctagcactataaatataagaaaatatattcatgcagagggttagaatctcaattcttgagtgcttaggtaaaatctagggttccaacacttgtgtaagtcatgacttttctaatcttatagcaatattaactcgtggactaagattcattaacgctccaaccacggaaaaactctgatttcattcttcattgattatttttctttagctttattatattctattggtttctaaaaatcttagtaaataataaatattggtaaaaataaataataaaaaagagtaaatcaaaatataattgttttttttttggctcaaaaataattgtgtatatttatttagaaaatatatttttttattactaagtattaacaatggagaagagaaataagtatattaaaattgaataaaataaaacaaacaaaattaaaaaaaaaaaaaaagtaaaaataggcaaatgaaaatacatacaagtcacacaatattaagaaaatattaaggggtatcttaaggtgtcaagcattataaaacgtgatatggttattggtgcagtttaatatcgagtcctacacattttaatttaacaaataatataaaaaaattgctaattacttataaaatcacatcatgtgatattaaataccttaaagtgtcaaataacaatactctaatattaaaacactaacatttaagggctggtttgcttcagtaacaaaatagacatttctttttataaaaaaacggaaaa

SEQ ID NO: 241243 - DNA, 705 bp, Cannabis indica
ttaatctatgtcatttggttatgttgatttacgtgaccattgatggatttagctacgctaaatgttacaaaaaccgcttcgatcctatgttagtataatcaatggacgagattattttgaaatacctataattatgatagcaaaagttaagcgcttataaagttatacattatcagaaaatatatgtaagatcattactcgaaatcaccacaaagatcatctttacaaaatggattaagatcatcactacctatggattaaggtacgattccgctatttggcttcttctctttgaatcaacaaaaatattctttagatctatgtttttcatacttataataaatgtaatatatttgtttatagaattaaatcataatattacatatttaatgagtgataaaaaaattctaacaaatactactcaaactacacatttagttacacttagctccacaaatccaattttcggtagtaaaattctttgagcctcacttatgttttgcttattacacccacgtctgaaagtctaccacaatagactgtccacgtagtaaatttttagtggttcacgtaatattaattattaaaaatttaaaaattagaaaaaagtataattttcttttatttttttctctattaaaactctaatcctctccaccctaattcccatcttccttcttccccattattatcgccaccacgatc

SEQ ID NO: 241244 - DNA, 927 bp, Cannabis indica
cgtggagccctttgttttcggtattttgggagttaccaaagacaaatgtgtgtatattccaatatcatgcgagaccctttagtttattacaccccctttgtagaaaccccttaacccatgacacacgaccctctcgttcaaaccctcaagacccacgaccctcgctcaaaccctctttccgatcgctatagctacccctgacgaggatgacgacgaaggcaaactgaagagaaaaatagtctatgtcttcggtttttataaaataatcgaagacgtagcccccatttacgtcttcggtattttaaaacatatgtcatcgcctcaaatgacttcagtagtgaatttttaataaaaaccgaagataaactggcttaaaaactaaagaaaaatgccctttttctagttgtgatgttagattatatatattggaaataaaagccattcctatgtttttcaatatgtaatttgcaaacctttctttggccacatgatcaaattctagagagagagagaaaattagaacattgaagaagatagatgatcatgatgttaactggtgagatttgggtctctaaaatgttataataatgtgcattgggagattctaatagattttagtattattatctctcaaagtggttcaataaaatctataataatattatctctcaaagtggttcactaatctattttcgtagtattattagcaatatatatcatgatcataaataacatccattaattatcataattaataacatgttcttaaaaatattaaaataaatatatatgataattcataagacatgatctatatattattagctatattaaaattgatatatataataaatataactaattattacataataaatgaacatattaataaatacaattaggtgacaagggagtaaccagcaccaa

SEQ ID NO: 241245 - DNA, 1687 bp, Cannabis indica
tttttttttttattttaaaattttgattctcaattaaaaaattgaaaaaataaaacatttctataaaacatatttttgaaaaatattttcacttttccaatttcaaaaataaaaaactaattaaaaatgtgtcaccacacgccacctatatataaacatataaaagttttttaatagaatttaaatttatcatttctctttaaactctagcttcaataatagtaaaatgggtcaaagtaagtcaacacgaataccatattattttttacgggtcaggttagggttgagaaaattaaatacaactcaaaaaacgactcgacacaactcactcacataaaatataatacgaacacgaataaaataacatattttgccgcccctaatatattgtagagaaattctataatgcacccctttaaaaaggatacatcgatacatttctatctgttttaatattcgaaataattttttagtcaactttttttctcatggtcatgtaaattaagttatttaagacatcctgcaaaatttaaaaaaattcagaaaagtttaacacgccgataatccgttcaagcagtgtattgcacgcgtgattattttattttatacgcgtgtaaaatagattgtttgaacattattttatatattgtaaattattttgaattttttaaaattttataggatatcttaaattagtataagatatatgaatatgaaaaaaaattaaactaaaatttttttttaaatgctaaaataaataaatagtgtatcaatatatctatttcaaaaggtgagatatagaatcagtgtatactaattaataaaatagatataataaactattttctgaaaaaaataatataataactaattaatgaaaataacatgggttatatagagtagtcgactgttatatattttacaagttttacgaccgaccttatcaagattctagcgcgttatcaatatcaattatgatttttgttttattagatgccaatattaataagattattgttacttatttcttttttttttttgtaaatagaatattattgctactatttcaactactacatactatcgatctttattttgcaagaacaaaatttagtctggtgcgcaaacgttaaaaacatattttaatttcaacaataacattccagtttggtagataacatatagaatattttactttttcattagttagtgcttgctaacaaccattagatacttcaatctccattgaataattaagaaacattttcttaagaaaaacaaaatatctgcactaaataattgacatttttttaaaattaacatcaggggtaagatccaaagacttgtcaatggagactatggtattaaataatttttctaactatatataaagtttggagttcgggctctacaatatttttccacatgaattaaatgtaaaaatattaagtcatatataagataatggactatttcactcattatcaattaattttaccaattaattttgagataaaatcacatgttacttgtcataatatcagagttatattcttagttagccacacgagatcgaaatagtacaaagacatgcacttacttgtgataaggtgattcttgatgaaaaaaaaataaccatagtcgatcttaaaaaaatattaaacaatattgtcccacataaattaaa

SEQ ID NO: 241246 - DNA, 901 bp, Cannabis indica
tcaacctcgtggtcgacaaccttttgccttagtgcgactaactctgtatagttatcttcatcgtaaccttcatattcttcttggctagaatattccggatcattagtatccccttctccttcatcgttcaccctagatgtcacctcttcttcttctggatccttggggtcatctgggtgttgtgggcgcgaggtgtttctagtttttatcattattttactaggctacttatgacttcctacaactctcaatgaaagtaccaaaatattgaccgaagttttcggcaactagtaactagaacagtgtgaagtacttaatgaatgttagaagagatgatttttttgtgtggttggggtattaatgagccttagtccatgagtcactatattatatgagagtatttattatagagaattttccaaccctctcccatttctgtttatcattggggtatttataggcttatgatggtggtaaaaaggccactattgtcgtgtttgtttacaccatgcttgacacaaatttccaaccttggcttacgacataattgcctactttatgatgggttttaagttgtctataggagtttagtgtgatgtgatttatcctttatttgtgacttgatggctcattcatgcagtcgtcgattaatgtacgagggttcgtgaaattaggggataatgggcttaaacccttaaacatgtttgttagagtaaggtgtttgtcgttctttcccatgccgcatttaatgcatgtacaatgtcataatccttgagtgacatgtcatcttttgtttgtactcatgttccaccctctacatgtggttcaatgtattatttatgttctttgagttgttcgtggaagctaacttttagttctggtggatacttacatcttggga

SEQ ID NO: 241247 - DNA, 770 bp, Cannabis indica
taatatatacatatatttatttttttatgaaaataaaataaaaatcatattgtaaaaattagtaactttgtaatgtatagtgcggtgcggtttgaactgtaattattaaattcataactgcaaattacaccatgcagtttgacaaaaatacaaaccacaaccgcaccagaaaggatttcaaactgtattttttaggcagtgtggtatggtgcgggtggtttatgcgatatgagcggtttaatgaacacccctaaaattaatcattgcgtacactaagtatatgaccattatatcattctaaggttttcttggggcctagtcttagatgggacaatctttgaaaatattgtttggtgtctctaagacatatccctagaaggactttgtcaattgctagtaactaatcataaacctgatcatttcaacaatatgcaactctagaattctgatgaagtaagttcaattacaattcgaagttcatttaaatgaggaagtaagttatcattctagcttggactgtcactaagatattattacagcactaagttcaacttgtaaaatacttgatatcgatttcaaaattatattcttaagtttctgttcaatcaatatttagtagcagtttaagaaggagattcaatgccttgaggatagtcatcattcattggatagaatcagggccgtcttacacattttggaggccctgttccaatcttaaattttaggcccttaataaaaaaaaattattttattataataattgttattta

SEQ ID NO: 241248 - DNA, 742 bp, Cannabis indica
ctactgctcaattcattcatgataatctctaaaaaattacaaaatcctcttatatacttaatggaaaaacttaacaaatttctaacaaaaaattcagcatacacgcactaacatccaagcttcattaagaaacccctcaatgaacgtggcttggctcgctctctggtgctaggagcattccgttctcatgttctgttgttgggagtagaggcttctatgagtttggatgagccacaatcccaatcttccactctcttttgtatttctttgggatctaactgaactggccttggtaagttagcttcactcattactcccatcacctaaactaaccttgtcctcaaggttatgcagcttgtacatgtccaccaacgaatcaaaatgttctcgtgtagcgttttttgggttgttcaataaccactgtaccaaaacttacttggtgactgtgtcatgggacttttgaagccgagtagcaagaacagatattggtaacatgagtggtttgttggttacactcaactcagggaggggatagcagcttgccggtggttatccttggtatggtttgagcaaggaaacatgaaaagtgttgtacccggtaaaaatatacatatactttaaattttatttattgtacaatttgtttgagaataattattttatttatttctactggtagtgcatagagataatttcttagagtaatattgacaaatttttaaatatagttgaaattgtatta

SEQ ID NO: 241249 - DNA, 625 bp, Cannabis indica
ctatcactggtgtgagagagccaccagcaattctaacagtttggaaatgagcagatggtttgaaggtggtgaagactcagaaatcacccgtcatgtggtcaaaagcccctgaatcaactatccaagtaccgttgttggaagcagcagtaaacgtgtgagatgtagaaccttgatgacacacaatattgtcatttgcctcggttaagggtgattttgggtgctgcatagactgtcgaagaggattcattgcattgaaacaaaaaaaaaaatgaatctagagaaaaaaaaaacttagccaaagaaacaatctgttctagtgaagaactcgacaaagaaccctagatgaagagtcacagccgaagtagggagtgccagggaggaagacgtcaaagaaatgattgtcggagatggctcacgtgcctacacgcgcgtggcgcgtgtggctcaagcgccactgttctggatcccaaactttggggttttgccgatcggggctgtggaaagctttttggataggaggtgagattagaagaggactataaaccagatttttaagattggcctcaaagaactaaaccctaatttttttaaagaggggcagaaagaaaaaaaaacgattttttta

SEQ ID NO: 241250 - DNA, 1426 bp, Cannabis indica
aagttttcttcatatcctcatcatttgcctcacatcattcctcaaagcccacatttacttgtgaggccacttcttcgccttctatgttttgagcatcctgaggaggacgaggctaacgtgtgttgttttgagtttccaccattgttattctgattctttgactgttgtctccttagcgacgcttccgacagctctcaatgaaagcatgaaaatattgaccgaggttttcgacaaccaattaaatgatataatgacgagagctttggaataattaatacaggtggttttaacgtggttcaggcattaatgagccgtagtccatgagtctttgttattaatgagagttcttatacagagaatgttcttggtgaattctctctctctcttctttactcttttcgatccatcccctttttcattttgttcaggggtatttatagagttttgtaaggatcactaaaaaatatgtcgtaggtatcatagggattaggtgagagtactctttatccttccttgattgatgggattcttcataacggagccgtcactagactctttgattatcgtgtaatcaccgtaaacgaggcttacgccatctgtcatatccttttatgggtcttctaatatgtttctcccatgccacattaaatgtgaaatgactgtttgaacaggttctccttctcccggagatgctttgttgtatctctagctcccggagagtagaggcatgatttatgctcctctccgggggctcactgcctgaagtgcacttgcttctctatatataacttagctaatttcgcgggtgaggtgtccttgaaatccacatgccacacgcaaccgctgccacgtatttttggaaaaatttgaggcaacaactgtatttagaaaaatatatcataaatgtttaagtcactcatattttttaaatgtaaattaatatatacattttgattagttaaataaagaataaagttacaaataacttttaaatcattacaaataagacattttttgggaccaattagttataatttcgataagataccaattggttacttttgataaaatcgtcaattttaaataaaaaaatgatgatcagacaaaaaaatcatataatcagatatgtctatactcatatatgtcaaagaaacttattagtttattttggcatgttatttactttggcatatagaaacaaattttcattctatttacatttttcttatagtctaccattgtatatgctaacaaatctattagtttattttggtatgttgaaataaattttcattcttcttttcgcattttagaacaacaatttatttcatttcatatagtctaccatttcatacgtcaataaacctactagtttctatttattggaacaacattttatttttttcaatacagagtaaactataat

SEQ ID NO: 241251 - DNA, 1138 bp, Cannabis indica
ataactttttctaaaaattgggtattagcagttataggtagttataggttttagctgtaacttcttcataaattcttcaatatgctatttttgaactgtttttcaaatatttttttatcatagtttttccaactgtgccaaacgagcttttagtctcttcttttttggtaagatatattagttaggagtaatggtatctatacatataatatacacacaaatgtaacacatatttatgtgacaaattacttttaataagtgggacccatattaaataaaaataattggttgaagtgacatgtcacatatgtgtgacatttgtgtataatttatgtgtggacatatatcataactcattagttggatatgcattattaaagaaatttacagtataagttcattttattgctaataagtatataagtttaaaaataacagtaaaaacaatcaaattatgtatttccgttagtcccgttagtacccacttaacacctcctttaatggataaaaaaaaattccacgtgttgattcataattggtcctattcataatcttaattaaaattatttaaataaatttaaaataagaaactaatatattaaagattattttcttctttttcttctttccctgtgatggacttctctgcttgtattttgtttttttgttttggttttttttttttttttgttttttttgttttttttgttttttttttttttatttgtaattggtgttctctgttctctactccaattggcacatatgattttcgatctgcccaaactcgcgctcgatctccacacctcctgacctaggcttgcccaactttgccccatcctcctggtcgtgcaatcttgcttagcacccaatctttatcgtcgcagaaatcagcagctgggaagattacccttatcgaagatataagcttagtggaattgacgattagggttgtaaaggcaactattaaaagattgatgagatatcaatggagatttgatactgggtaatatataaacattaattgggaagagttaagtggaaaacttagagcatgtttggaattgttttctgttttttgttttaaaaaattgtttttagaaatgagaacaaaaaatagtttttgaagtttttgaaa

SEQ ID NO: 241252 - DNA, 967 bp, Cannabis indica
gtaggcagtttacattgagaaaaaagtaaagtctatagataaacattaaacaactcaaaattagtgaaatcatttcaatctaatattctcaagtctgtcaaattaaaataagcaattagttcatgttattgctaactgacaagataagataaaagattaaattattactagaatatatcaaactatattttatcttaagaaccatttcatggaaccacattgtaatgaaaacagataaatctagtattatcatcaatcttttaagatttacaattaaaattatataagaaacagaggattataaacaataatctaagcagaaattaaaagtgagcaatgtagaagaaagtaaaaacatttctctaaaaattgaattgagttcatattattgcttcccatatctaataatacaaactagtgaacaacaaacaaacataataaaatttgctaaatacctgttggagcttggaggagtacccgaattgctgaaatagaagcaaatatagaatccttgctaatgattctacaagaaaatcaaaagtacccaaaattaactcagtcccaagtcttgaaaattgaacaggcagatcaatactaatacttgctcaaaaaaactacagaaataaacacagtatcaaacaaaacaattagctctacttacttaaatattgattcaagcttaaaaataaaaataccaggtggagataaatgagagagaggtcgaagctgcgtggtgcccactgcggagagaagaggagctgtgtggtgcggagtggagagaaggaagaggagttggtggtctggcgaagtggcgaagtggctgggttgagtcattgatggcctgaggctgggcggtggcgaaggaatggggggggggggggacatgagcggagaaggaaggatggggggggggggggacgcgagcggagtaggagggggggggaggattggcggtctgtgaagtttg

SEQ ID NO: 241253 - DNA, 644 bp, Cannabis indica
ctttgttgttgtttttgttttttctgggtgagataatttttcaaattttgaactcgtatttcatttttgatgatacatattataggtagactcattgtgataatcttcctctaaactccaagttagatttggaattcgacagatcatacgtagtctctatgttctaagttatcgacatttttactagagtataattaagtgtatttttattagcttgtaagtgccaatttccacctcgttgaagtacaagaaattaagattttatctttccaaaaatttcattcatgtatataatataccttatatagtatagcatatattataccttatgtagtatagcaggttgatctcttaaattaacagtaatcaagtgaatttttaaggttgattaaatatgtctgcctatcttatcacaaattaaattgtttaatttaataggcatgattgaggatattaattctatgtacttttgttttcaacttcagtttagtaaattatgatacatgtatatgcttcaattttgaataatcaaatatttaagtgcaatcaaactgcaggttatgttggttttggtattggctggaagctctccctggtgagttatttagagagaacaacgacacttaaggatctaattcagaagg

SEQ ID NO: 241254 - DNA, 1417 bp, Cannabis indica
ttttctttttataaaacacgaggtaatcgattcttctctcccatgcactaaaattcctctcttagtcctctgctttagtagctcgttcttggtatgtttcaactcaattttaagatttgaagtggtattagtagcttgactatatttttatttttatttaaaagaagttgcataacacaagttgcacatattatatattcgagatgatattgatcttaaaactgaatcattggttatctaattttcttttttagtaaacaatataatttcaaaatgaaaaattatgagtatttattgtttattataggaaaggctaaacgaagtatttaatgagaaaagttatcatacataaatatttatattaaatgagaaaaggaagcatttaagtctagcatggagattatgaaattgcttcagatatatagaatatttcagtacttgttttacgacttaatttcatatcacaagatctacaattatgctcttggtttgcaactgcggttccgtgcattaataattgaagataagaaggtattatgccaattttttaatcactttatattcaacttataaagaaattgtgaagtttttattgaacgtttttgtaaaactatctggtatttcaaaagcagatttagaaggagtatcttgaatctctgagagagattaccaatattgtgggttcaaaataaaaaattgtcactgctaaaggaaagaagccttacgaggagaagtactaagctaagatagctatggagttgcttgaacggtgcctttagttcaaaccgaaagttgaaaaggttgagaaggaaaacaaaaagactaagaaaatcccctctctatctctctatataaatatatatatatatatatatgtgtatgatcatggaacattagtgttttagtttaattgacattttacagaaacaaaaggatctattgaagtcgaataatgattcttcaatatttttaaaattcttatgcttacctctttgtgtttcaattatttgcaatcttttatttcttttaatctcaataaatacttaatattgagattaatattttgattgtttagaaactctaaaaattggtggattatgataaatgattcagtttaatgtttcaagatttgagtcttttgagagaaatatttatgtaggtaatctatgtgtgttttataggaatggttctggaacattgacattccaatatggctattgggttttaatgaataaaaaaacaattgtgatcattattgtagtcattgactcattgtaaaagaatacaacagttgtatttatgttttatatatctgtataaattcaatttgatgatttttgttgctaaatgtagaacaactttgtgaaagtgtttattctgtttgttaaagatcaagtagcttcgtatcttcatttta

SEQ ID NO: 241255 - DNA, 965 bp, Cannabis indica
tatcttgagaatgatgtcaagtttagaaaatggtctagagcatattttggtggtaaccgatatgaagtcatgaccactaacataattgagtcagtgaataatttgatgtaaaagttcagagagtatctaattattgttatgattgattttatctttagcacgatgggaaaatggttccttgaatgtcaacgggaagcatgtgtagttacaactccattaacatcaaatagggaagaaatattacgtaaaagatagaatgaagtctgttcattgataacccttcagttaaatgagaatgagtacaatgtgatgtgtggagaaatcattgtcatagtgaatttaaggtcaaagagttgcacgtgcaaagtttttgatattgagaaacttccatgtatccatgcaatagcagcaacaggaaaggcacaatcccgaaatactgggaaactcatatattctatgtgttcacactgctacacatcaaaatattagttgttagcaactatttatcatgtacctctaaactcacaatagaccgacattcctaaagatattcttgcaatataagtgatagcacctcctgaagacaagaataaaggaagaccaagaactaatcgcatagctttcaaaggtgaatttcctaagaaataatataattgtggagcatgtggaaaatcaggacataattcataaacatgtccacaagtatcatcagatggtagaagcacaattcatgtgtgatttattattatttagttctctaaattatatattgaatatttcctgtgtttgatatatggaaacttttattcatatctatttgtaaaattatgttaattaacatatttattatggatcttgtgcaaccttgtgtgatcatgagcgactaagtatagttcaaagtatatcctgatatgtgtctatgcgatcctgtgtgactatgtgcgaccatagtatatttaaaaatt

SEQ ID NO: 241256 - DNA, 1084 bp, Cannabis indica
acaaagatgaaagattcacatttctttgtcatttgacaataccatagtcttcacagttgctcattaatgaaccgaaatgccaatcatagacaagcatccagtcgcattattggttctcatgtacaaggtcactttaagaatagtaaggacccacttaacccaagaagcctcgcaggattcatgtgtgaggaaataaaagttcaagtcagttattggaaagcgtgaaaaagaaaatagtgggatcaaaatttacatagaggaacaactaaagaaaattatgcattgctccctttgtattgtcacatgttgaagtaggaaaatctaggtacagttacccacattgaacttgatttagaaaataaattcaaagtacttttttcatggttttaggtgtggccataaaaggattcacttccatgagaaagtaattggtatagatgcagcttggatcaatacgacgcataaagatgtgttattagtagccactacacaaaatagtgaatatcatactcaccccattgcatgggatttggttgacagtgagaataacacttcatggacatggttcttagagaagttgaaggacttgatacctgatagtttagacttatgttttgtttctaatagacatcaaagtattaaacatgcagttcgttgtgtttatgttatggcttctcatggggcatgttattggcatgtgaaatacaatataaaacattatttcaaaagtgttgtcgagactaaattgtgtaagaaagttgcaatagcataccgtattgaagagtttaataaacacttcaatcagctttgcaaaacatatccacttgtcgctaagtatcttaagaatgatgtcaagtttagaaagtggtctagagcatattttggtggtaaccaatatgaagtcatggccactaacataattgagtcagtgaataatttgatgtaaatggccagagagtatctaattattgttatgattgatttatctttagcatgatgggaaaatggttccttgaatgtcaacgtgaagcatgtgtagttacaactccgttaacatcaaagaggaagaaatattacgtaaaag

SEQ ID NO: 241257 - DNA, 671 bp, Cannabis indica
tatacataattttattttttataatgtatatgatgctatttgttatcccaatttttatcctcatgacgtggcatgcttacgtggacagaacttgtgccacgtgggagtacagttcacccaaaaggaaggccgagtcaacatccgagtcaacgaaaaccccaacactcaaacggggatcaagtgacagtccagctcgctctcagaagctggccagccacccctggtcggccaagccatggaatagcatcatggccggccagcttggccacatcacaaggccaaggattgctcagtgggtcccacaggaccacctacacgtgcatagcaggaatgggctacgaattgggccccaaaagcccaatagacaggctgagaagtatctagaatctaggggcattttggccttatgtaaatatctagctaactatcctcttttcaagggttttaagttgtgaacctagggtttaggcctcctatataaaggtcttaacctctagctgaaaacctaagttctctaagttgcctaagcctcctctaagttagaaatctcatattctctaagtgttagactctctctctctctcttcctcactctctcacacgccccaaagcataggttgtacaacactctaggttgtccaacacttaagtctgccagacattgatccata

SEQ ID NO: 241258 - DNA, 1189 bp, Cannabis indica
cctgcatgcacgtactattcacacatccgaaggatgcatgacaggtgtgcactacgagttgtttaccataaaagtttttgatctctcaactactaaatgcaggatgaaagagatgctcctacattctcaagatttgtccatgtatcccaagtgtaccctagtaatcctgaaggagactgcaagcttccaccactcaagagtcccaaaagcttgggaataaatattatccacgtttcaggatgaagcacacgtgacaaaaggtagaaggcaatggcctaagtaactaccaattaagtccccttaattggagaaagtcgcggaaagactaaacaaattttggagaggtctaaatccaagaaaggcccaaaaatttaccacaagggaaattaccgtttgggacctggaagccctgtcatccattcaggacccgaagtagaccaaattaactaagcttatagggagatacatggcattcataagaagggtataaggaggatgtcaattgcacaaggaaaatcagaagcttatcatgaagcgatagtcgtatgactcttgtgatggttatacttttctgaaacatatgatcagatcttgtcccctgtgtcagaccatggtagttcacgtaccacctatgaatacgccttttagtctgatgactcctcagagggttttgtctactaggtgcaactttcgcccgatacacgtcctgtaccaaccgtggtcccagctatacagacccttcacctctaaagaaagagccttcttaggggcccaataatgtgtattcttatgtatcttaccccaatagtgtgtgagatttttgcaaaaaaccctaagtgagttatgggtatgcctatactcgtactttagtctatataaactcctttatttattcacaaaatggggataaaaaattacttagtcgaagctctgctgaaatactctctaagctttcattttcttcaagaggaactaagagaaccagagtaagggtttcattgtaaacaacacctgtaatatatttttacacctacaaggccaatatactgactcgtggactagggataattatgcccaaaccatgtaaaatccttcgtctcatttatttaaccgtaatttaattgctaaagctttcatttgattagtttttgaaaatctcagtaaatatttatagtgttgagaacacgat

SEQ ID NO: 241259 - DNA, 873 bp, Cannabis indica
ccaagttatcttgcttctctgaacaaggaaactctgatgcatagctacttgttgttgaaacatagcagcatcaattttttcctataactaagccaaatcatctattggagctgcttgagcattggttaaagcactctggtaatcagctttagcttggtgatagttttgttccacatctccaatttccttcttattgaagcttttgaggacatgattaagcctcaataacttcctaagcacacactgaagcccagaacctgccataggtttattccaattagtagtcaccacctcctgaaatttactgtgagaagtccagagattataaaatcgaaatggctcgatccctaaacttccatgttgctgggttttaaccacgcaataacagtgatcagaggaagtttcccattgaaaaatagccaaagagttgggagtagaatctatccaatcctcattgatgaaagcatggtcaatcttcgaataaactctatccttcccatcttgcttattggaccaagtaaacttcgatccagaacatttaagagcttctaatttggactgagcaatccacgttgtagcatccaccaattcattaggagtaactactctatagccggttctatcaccataataaaaaattgcattgaaatctccaactatcagccaaggagccccctgacagttgatagtagaaagctccttccataaatcaactctctcttctatggtattaagaccatacacaaaagtaacaaacacttcaagttgagaaccaacaaacttaactagacattgaattagttgcttgtgatccttcatcactttcacttgaataaaagacttaagccacaaaactaaaattcttctttcaca

SEQ ID NO: 241260 - DNA, 1840 bp, Cannabis indica
aaattattaattatttttttcatagaatagtcattttcaccaaaatagtacaaaagtcatttcattataatgacatttcaatatttaaatatgcaacaaaacaaagaaatagaatgaaaattgtttcctttctatttcattccattttattacctcctagcaaatgtcacttaagtgcaaatttcatgttttggatccaatctaattcgcacaataactcaaatctaatctaatttgcaacagtgcggattagattggttattttttaatactaaattatttattatttatgaaataatttttttcaaataactagtaataaaaaaattaattattgttattttatgtctctaataataaattaaaataaataaaataataaatagtaaattcaaacaatataaaattttagtataattttttttcatgaccgtgtacgttacatttgattcttataattttttttagatattctaaataatttacaatataaaaggtaatgttcatacaatttatttcacacacgtataaaataaaagagttacgcgtgcaacagactgtttgaactctattttcagtgtgttaaatttttttaaatttctcaaaatcttacaaaatatcttaactagctacaacttacataactataaaagaaaaatttaaatttaaaattttcttagataccaaaacagataatagtggtgcattgatacaccttcctataaggagtatactatagacttttccatcctatttaggttagaaaaatcaataaaactaggatacaaaaattatataatctagaacacatacatacttaattgatccaaattaattactacaatttgacagtgcaatacaatcaactaaatctttttttctagatcactaaatcaaaatcagttttatatatctgattatcaaaagatatacaactgtgatgacacaatatgtatttagagaagggatttcgctacataattatagttggactgagcctgctcatcaaaattttcagttaattaaaaaaattcatatttctgcttcactttacacatagatgttatgcttcaactagactttacacatatagatgctaagcccattaactattaactattaacacactaaaaaattatctaatcaactcatattttattaaaactaataaaaattaggagttttttcatttttacacttcaaaacaatttttttttgtatttttacaaaattctacatagaaattcctattgcaactagcgctgcaacctaaattgcaataaaaaattgtacataaaccctattacaactagcgctgcaaccaatttagaaacacaaaccgtaaatttgaaaaaaaaaagttaaaaaatagtatatggggtaattctcctctaaaaattaatgtaagttggaataaaaattctaataatttattttaaattaaatttgtttgaaagaaaattatcatctgtaaaatacatattgtggttgtattttggatgtatacatatatttgctcctgttttgggtaacccctctttcccccttttcttttcttcacgtctttcaaaaatgattgaaaataacattttataaaaactccatagtttgggcaaagttttcttgcaagttttccattcaaggttggccatttcattggtttagttcatcctgaatagcgataattgaattgactaattttatttatttatttatagggtaaataccattttagaccctctgttttacaaaagttactaattggactttgtgttttgttaaatgacaaaatgaaccctgtattttttaaaatagtacaaataggaccctgaattgattt

SEQ ID NO: 241261 - DNA, 1099 bp, Cannabis indica
atatcttctttgtctcacatttcaatttgttgtgaatcaaggtggaaaccccttgggtgaccctaattgtcatgtttatcttttagttcattgtaaacaagggaaaggccccacaaggatatttacaccccctttattataaagcaagatgaaagaaaaatgatatcttggatttatgttattgtgttcataagaacactttaaagtggatgttcagtcttccccatttctaagagaaagaataatatttgagactgaaacttaagtgttcaatatcgtaagaatcgctacatttttgttaggttgagaaaagaggagaaaaagaagggaaaatggtataactatgagagggatgcctctctaaaaggaatacctattttctcacattcaaaatgcactttaagtgccacaaatgcaatacaagaggtcaagagttgcttaagggctacaagctccctccatagcatcacaaaacttgagaaagggtaaagcgcaatccaagaggctaaaaaaatcccttagccttcaattagaaacttgaaaaaggttgagtgcggcccaagaggctatacagctcccttaacatccaataagtaatcagcaagaggttgagactacacaaagggtctatactcccttaataatgaggttacaccttataagaggttgagaaagcccaagtggcaaaaaattccctcatgcaaaagatctcaaggcacaagcacctaaagagacaaccatagaaccaagcgaaagggaaagtgcttattgaacttagtttacaagaacacttaaaagagttcttatagattgggggcaagtgttcaccctagaaatcgagagggttgactatcgagattagtcaataattagtctcgagaagcgagagacatcgactttaagagtcaactgaggaatgattgagtcaacgcatatggctcgggacctattaatctcaaaaattagcactgctaactttcaagattagttaaccaataattgagaagattaacgagaacaagctaagagagtcacttcgaaggggatcccaagcatggccgccatgcaagccactcggaatgcatgctcaaaagtcact

SEQ ID NO: 241262 - DNA, 1314 bp, Cannabis indica
ctagtttgatcacatgggtaagtttagaaccttctttcctagtgggaaatattttagagaaagtaaaatatcagagttaagcagggatatggaatttgaccaattttcccctagttttgagaaatacctaagttatgacctaaagggcattttagtcatttaaagtggtggtttggtggctgtcttggtgggtgacacatggccattttcatttagcaaaggattaattaggaaatcctttttcatttacaagaaaataaaggaaattaaagaaaaaaccaaaataaaactctctctctctttctctctttcggctggggcaaaaaccacggggaattcatcttcaagctagtgttttatgagtattaatcaaggtttttgtgatactaaagcaaaggtaaaaccctagaacccatgaatatgtactttgaacctttttctttagtttgagtatgtgattttgtgaattgatggttgttagggttagaaatgtttagggttagaattttaaggttcatttgagttggtttaagcttcttgaagctagttttagtgtatgtggttggatttatggaaattggagttttgaactcaaagctttggtctttaatggcaagttgagcttcattgggtttttctgtgattttttggttggaatatgttgtgtgaacattgttcaggtactctggaaagtttggtggcaatcggacaagttttgagcaaattggtgagtttttggggagactggtataaaaaccagtttaacggttttaccagtacctgtaaaaccagtaaaccagttttggcagggttccccgaaaaatcaaatttctcaattctcgtccatttcagtgctgtagttgggtgtttccttgtttcctgagttagtgtgattcatagagagtataacagaacctaaagttgtaggtttagatttcccggattaaggttttcgagcatgtgatttacccagttctaatatgtgattagggtatccatccagcacgtgactttccgttcaagtcggccagcacacttgaatctggaaagaaggtaagaactgtgtataatgtataatatgaacacttaagtgtatgtatatgtatagtgtacatgcatgcttatatggtgtgattcatacactaccaacacttgtacggttgcagtatagagtgcattgctaaagtgtatgatatctgaaagtacatcgtggtgttaccagcacttgtacggaaaggtacaaggtgtttgtggtacaacagttaacaatactcaaggtgcggtccataccctacctacactagtacgaaggta

SEQ ID NO: 241263 - DNA, 577 bp, Cannabis indica
aactttattttgacaaaaaatcaattcagggtcctatttgtactattttagaaaatacagggtccattttgtcatttaacaaaacacaaggtccaattggtaacttttgtaaaatagggagtccaaaatggtatttacccgatttttttcccactaaattatgtttttaaatttttaaaaccgttcaaaattctttcgaaagtaattttattctgcaattggagcttatcaatagaaatgaattcatttagataggtggcttcgagtaagaagttcccatcaaagtttgttatgattatttaagtactatagttgaatgtaatgatttttttactgaattcagtttattttaattaacaagtgattgatgtagatagaagttcgaaagcataattactatttagtacatttcaaaatttgaaaatactatttttttttagtgtagcgtaatggtttttacatattagcttaatagcttaaaggtcttaggttcgaagccatgacctctctctttttcccatccctctctctctctttgaaaacactatttagtaaaaggataattatataaagtatt

SEQ ID NO: 241264 - DNA, 1316 bp, Cannabis indica
ccggactcttctcttcctccagcccctacccaaatgatgaccccggggaggtcgtcttctagtgcccccttaggcacaatcgtcttaatcgacgaggaaggggaggacgaggaggaggagggcgagattgtggctccccttgaccgcaagcacaagggtaaaatggtcgaggctgagtcttccaagagaccaaggaggaaggacaccccagctttagctcagactcaggcattcctctcgaggcagatgagtacaccgtgccccccaatattattctcactctggttcccgcagatgaggagaggcaacaactttgcattgccaaacataattacgccatggacgagtacagccggggaaatgctgaggtggaagccctgaagaaggtcttgcgggaagctcaacaagattcattacgcgaggaggccttcaaaaatgcctgggacttgaatatggaccccctgacggattggtttaaccggttcgtcagtcttgctcttactaccttcacttctgagctgactagccagtttgtctcccatctgacccaactcctgcccaagagatacgcggcttgtgcttccacgaactctatttacttggttcaggatatcagtgcatctatggctggtgtaagttcttgtgattcattcctctcttgttgcttgtattttgtcttaaggcatttgatctcattcttgtttctttttttagatcactgtagagaccggccgcctctcaaagaccctgattgaccatgggtacgtcaagtctgaatttaggggcatggacgaggccataaagagtctgcgagacttggcggctgagcggagagcattccgggaggaaatccagcatagggaagctcaggcggaggagaggcaccaggaggagttgaaagtttagggcgaggctgcggccaaggccaagcgcgagctgagggaagccaaggaggccgtggaggagctaaccgccaggctgaaatccatggaggagctgcaccaagcggacttgtagtcaacagccaatttgaccgtggaggtgaaggagctgatggacttcaaagatcaagccttgaagaagggtaaaagagatgagctcctcgcccctgttgcctacaagcactgcaccaagcgcttcgacgatgacgtcttcatggcctggcaaacaaacgctcagaacatcaagctcgatttttatcctaaacctgaggaagtccttgctcgcttctgggagaagaagaagagactcgatgccttgctcgaggagcgaagggggccttgtcttccaccccgcattgactaagccaacaagtt

SEQ ID NO: 241265 - DNA, 1295 bp, Cannabis indica
gctcgtcaaatctaagaaggttgaggggcatatagaagacctagatgaatgcttcaaaaatcttcagaagatacaacatgaaactcaatcccttaaagtgttccttcaaggtcatcttaggtatgtatcttggatttattgttaatgcccgatgaatataatctaatttagagaaaattcaagcccttctagatatgaagtcaccaatataggtgaaagaagtgcaaagcctaacggtttgaatagccacactaagcagatttgtctcaaatcaacgaacacgtgtgttcctttcttcaacatcctctgaggtaacaagattttgagtggacaaaagaatgtgagaatgcttttcaagaactaaaaaaacaacttgcagaacctcccatgctctcaaaacctctagacggagaagagttaggaatctactttgcagtcaccgagcacactgtaagtgtcgtactgataagagaagacaacaacgttcaacatctagattactatatcaggctaagactagttgaggttgagagtcgataccccatgattgaaaaattgacttattgtttgatcttaaccacaagaaatttaaagccttatttccaaggtctgggtttacaccgactaacctttacaccaagttttgctaaactaaatgcttttggtccgctgctccatacaacactgtacaaggaaagattttatttgatgagtaaatttgagtgagaattaatttctatgagaaataaattcttaagggcaaaatactaatttgtgaaattattgttttgaataattatgataattatgaattatataatgaaatagtatttaactaatagttttattagataaaactatatcaattagttaaatataatattattcataaataatattaaagagaaaatatattattttagagaaaataatatttatttaattcttgtgaaataagagattaatgagaattaatcaattattatttattgacaaatacataataaattttatttgtggtaaaattaaaaaattaaattttggaccttaaaatatgactcacacgtttaggccacacatgtggggtaacttataaaggcccatgttaattttatttgattaaaataatttaaattaaattaattaattatcttttaattattggattaaatgtattatttgataatttatttaattaaaaaattataacaaaataaagtaatttaactgatttttattgattataacatatttatatttgaatttaaattataaatttaaatcaaattagatat

SEQ ID NO: 241266 - DNA, 614 bp, Cannabis indica
gattttaaggcagccatttgtattttcttccttaggaaagattttggcctaaaagttttgaatgagataagctttctgccatctactccatatgtgtatttatataaaaatcattaggtggtgaagacgtgaagcatcttcttatatggaatgcatagtaaacaacacatatattcagatactgatggacatagagtagcgatgtctatgccatgctccctgcccacccatttctctaactcatttcttaattatatattagaaaatctgttttcaggattacttatttgatacttaatttattacttgcaaaacatacgagtgagtttgatacatttttcaatagtttcgtatgtgccatttacactaaaaaaaagtaatgtgccatttatatttttatcatattatatgctccattcattgtatgattatattttgaaaattttaattaaaccctgctcatgcacacgtttatatagagaacctattatatattgatgaggcactagtaaaatgagataagtggaagatcattaatatctttaggccattatctgaaatggatactttttgttccttcctgtttaaagcgtgtgtgatctcagcttctatat

SEQ ID NO: 241267 - DNA, 842 bp, Cannabis indica
tattctggaccttatggtattggacttatttctctaaataaaaattagaactttttaattagtaagtaattaaaaatcattccttttaaactcataataatttcatgtatcaggagaggatgttgtgttcattgctaatgattggcacactgctcttcttccatgttaccttaaatctgtataccaacctaagggaatttacaaaaatgccaaggtaattagtgattaattattcatcttttaattcatcattaattaaaataaattgattaattctttctttattataatattataggttacattctgcatccataatatagcctaccaaggaagatttggctttacagatttctcacttctcaatttacctgatcacttcaagagttctttcgacttcgttgacgggtacgtacatactttcttaagagtcatatcgttgttggtgcaattaaaaattgagtcttacatgttttaatttaatgagaaatgctaaaaaaacaccacactgaaggtgttatatcggtattggtgcaattgagtattaagtcgtacctaattcaatttaagagtaaatagtgatataagtacctaaagttttaagtttgtaagtgacataaacttaatatttatttttagcgacataagtacacaatatatgtaaaacagtaatttttctctaattttgttaatacaaactctgttttgaatttattaaaggaacacttagaagtatctgatactacatgtttctgtctagacctaatgatctagaatctggaccttatatgtagctcgtttaaaaaaataacagaatttattttacaaacattgaatactta

SEQ ID NO: 241268 - DNA, 1422 bp, Cannabis indica
ctcccatttagctcaacagttagggtatctgcattattatttgggtaaatagcggcataagtacccaaagttttatgtttgtaagcgacataaatccaatgtttatttttatgggcacaagtacctaatgtttgtaaaagtaatttttttctaattttgtcagtacatactctgttattgttttaaacatggtacatataaggcctaaattcttgatcattgggtctaaatagaaatacgtagtatcagtcacttctaaataaacttttaataaattcaaattaaacagagtctgtactgacgaaactgggagaaaattacagttttacaaatattgggtacttatgtcgctaaaaataaatattaagtttatgccgcttaccggcccaaattaaaaaagtgagattattgggatttgaactctcaacctcttagttgagaaactaattaaattgtcactaggctacaacacatatttagtattaaaagtattattatttattttattactaattatattttttttttcaaaatggggcctgagcggtggggggcctaaggcggccgtctccctcgtcttagctcagggctggccctgccgcttccaaacataaaactttaggtagttatgccgctatttatttttattattttaatatattttttacttttttttcttactgtctctatctagttacatatttctcgtatatataaataaatattatattaataaaaatattaaaaataatatttaaataatataaaaaaataccactataataatatacatatataaatgtgtgatgtaaaataataaaaaagaattgttaaaaaattagaataaaaaacataacaagggctctaaacaacgttacttactatcagaggaaaagaaattaaaaattgtgcagccttgactattagaatttgactactctgtcacaacgtacggccgtgaagttcgaagaaatgaatttcaacgtcttagaaatttctactaaaaagtataactgaaatttatatgtattcatctactaaaataatgatttttttaataaaatttgttattttattcaaaaatatatatataatttttataatgtgcggtacggtgcggtttgaactgcatattaaaaattaattgattaacacttctaaaaaaatatacacgctaatgaaataattaaatatttactaatataatttattggatttaacaaatatttaatattaaaatattcttattatattaataaattaatagaataataaagaatataatatttgatgtaattttttgatgttgtggttggaattgaaaaaaaatttagtgttgaaataataattttttagtgttgatttaacagcaaatttgggtttttctattggagatgcccttaatgttttttttttaaacaa

SEQ ID NO: 241269 - DNA, 867 bp, Cannabis indica
aacaaaaaaaaatattttttagttaagttgccaaacatgcacatagattttagtgcaactataatcgagacaattaaaatattattggttttttttttcaaaaacaatttaattagttttaaattgtatagtcatagttagggatgcacacggagcgagaaattggcagggagtgctctccccatcccatccccgttaataatttaaatccccatccccgtttattccccatcggggatggggcgggaaattccctaatggggccagggacagaacggggaatcctctaataaaaaaataaagtttatgagaaaaatttaaatatataaaaatattaaactataaaaaaattaaaatattacacattaattgttattcaataactaattattatttaaaatacaacttaaaattcataaaaaaatactaatatactaaaaaatacaaacataaattaaaaaaatataaaatattattagaaatataaaataaaatactaaacggatcgatctccgtcgggacggggagtgtgatccccgtccccgtcctgtttaacattcggggataaaaaataattattctcatccccgctttgttccccacctagacaggaaatccccgccccattagggcgggtccccacagggcccatctccattggaaaaatgtgcatctctagtggtagtaggtcctttcccaattttcaaaaaaaaaattcaaataattgacagtgaccaaatcaaagttcaaacaatttattataggtgagcttatttttatttttatctttaacactcaaaattattaagaatatctaaaaactttaaagaaggtgtaatatatatgtttgcaaaaaaaaaaaaaaaa

SEQ ID NO: 241270 - DNA, 738 bp, Cannabis indica
atagcagctgctgtttctaggtacattatgctactcttgatttctggagaaaccgaatgcattatccaggacatgaccatctggttgcaacgggtccaagaactgagaagagtatcatcggagttgggttgaggaagacttccatcaagaaacggagttttatttctggcgccaatggagatcatgaaatctcttttccatggttggaaattacgatcggtaagaaccggagtagcaagagcaaggcctggatgatctgacgtgcttaagtagtagggacttctaatgtcttcataagcaggacgatcttggacagcaggtcttgaattgggtaatggtggtgaagcacgattaccagcagaggtttgcgatggtggctgggcaaccggattagtagcatcgatcacagggacgtcgtcggtgatggtagctgaagaggttgctctggttcgcaccaatgctgatttggttgattgaatttcttagaagattaggtcagaatgttgcatctgataccatattagaagaagaaaatagagaaaagaaaagctcaatctttattgaatgtttttatgaattggaaattacagagtggagagagaggcatatatatatatattctcaactaattgaacaaccgactaacagatataactgaacctaactaactaattaactaactaattctaacatccttccatggcagagagcgtcgatgatgccacagttgaacacttc

SEQ ID NO: 241271 - DNA, 742 bp, Cannabis indica
aagagacgtctcgaaagccaaagttgacatggcgatcttctgacaccgaatcccacaatgtcaggattttttcccatgcgtcagtccataagagtgcgcacacaatcaaagggaacatacgctttgtctaacgaccactactctgacagctacaacacacagagttggcaaacgcatgccacctgttgacatcaaagtggtcccccatcgtacagaagatcacagtcccatgggctgggcctcagcttgtgggctcaaagtcagtgtattatatgtatttatcccagtgggtcatgtttacacgcaaaccctagcgggtctcgggtatacccatacctagatcctagcctataaatactacattataccttcatacaaaaggttggaaatttattactagtaaaaatcttgggttcttaagtttgtcaagaaaattggtgtaatacttcaatgctacttagcctaatacaattaactcatagattagggttcattaatatctcaaccacataaaaaaaatttctctattttgtttatttaattcattttctcagcttatatttttttatattaagtttttaaaaattttgataaataactataaataaaaaggtttaaagacctcttaaattattaacttatatagtgaaacctctatctaagaatattctatttaaagaatagcgtatctctagtttgttataaaaaaaaatcaagttctaatttgagctagttataaata

SEQ ID NO: 241272 - DNA, 1097 bp, Cannabis indica
tatattataatttataaaaataatttaattaatgatacaatttaattaattacatatttatcaattataaatttatatattttaattttaattataaaattattaataaaccaatataacaaaatatcataattatacaaaattaaaaaccaattcatcacaaatctatacagaattgataataacaaatctatacacaatttattaataataacccagctgtccaaaatctcatcatattccaaagatcatctattgaacactcagagccttcaaatattctgttattatttctttcaagccacaatttatacataaagcctttaaaagcaagacaatatagttgaaaaaatggttaaattcggcaaattttattggaaaatgcagcaaatttatagctgcattgattgatattgaacaatagaccaaaaacatgggactctcataaagcctgtcaaaatcacacattcattgaaaataaaaagagagaaggcattcttataaactctaaagtctgatatcaaatcaacaaacaaaatgggtaaacattactaaaaaaattgacacaaacaacatacaatttaaatcaaaactaaaatttctaaatctatgtaaaagaaactacaaatgcactgtcaaatatcaaaccccaaaaagcttaaaccggagctacaaaagggatggccgctgttcttcgaggcctgcgaatggccgccggtgataactctagccgtacgccgagacctctgctcttctcgtcgctcgagattttgggcgttgcgagcactgtgatgtggtccatttgaaccatcgtcgttcacctagcaacgccaccgatcaacaaaagagggaacggaggatgagaaagacgttaagggcatcatgattgttgatggtcggagcatggctggaagagggaaagggatcggagagtagcgccgcaccaaacaggggagagagagatagagatcggttagagtgagaaattttagggtttctattctaacatatcccatttataccactttttagtttttttttaatttcttttactaaataaatttagagagaaaaatgggataataggcggtgtaaat

SEQ ID NO: 241273 - DNA, 1577 bp, Cannabis indica
ttttatataaatatatatataaagtactataataaatgtctgaggctggtgaagtcttagtggtgggtgaagactatgttactgacggatacactgaggctgttcctaagagaagacaaggtgtcgtaggagctcagtgggtttctcctccatctatagtaacccaagtcatgatgaagaatttggagaagcacgactacttggggaatgtcgaatgcttctttccctctccaaatcactgggcacctagttcaaggcagtggtactgggcctagttgcccactcataccaagcagggtgcaatgttgcctttgcttccgtacttcaaaaagattacagactactaccacctctgcccgacccagtttactccgaacgacgtcaaatatctatcttccctgtttatcctttacgccccgcaaggatggggcgagccatctcctcacgacaccaactagctttttgacctaaaatcaactcctaagcaaagcaggtcagggtatttctacttctctcaactggatgagaaatggctaacgggcactatggacaccgatgtcagcaaaataggacattttgtggatgagtactacttttttcagagcatggatactgtccacactcggttccaacagattccctcgtattcctgccctcctttcacattgagactcagggagagggcacaaaaaattcatcaactgctagatgctgctcggaacatcaccctactggccactgaggccaactatgttaagcacaaactcttcccaaaggactttgtgccaaggcctaagaaggagaagaagaaaaaggctaagccacgcaaggctggtgtgaccgagcaggagaaggagctcattcaacttaagtgtgaggctaagttgaagggagacaacagtgccaagcagtatgcttaagaatattcagagcagaagaggccaagaaagaagtagaagaaggctctcccaaacgaccaagtaccggtagaacatgttatcaggattaggaaacctaatatgcctgctcagccatccgccctggtggagggtaaaggaaaagtcgtcctggtggagcaggaggaagactcttaagacgatgatgcctcgtatgtgcttgtttgggaatatgctcctgcctgcgtgcagggtatttttaacttgcacgtacttctttcatgatatgcttttcatcatatttgcttctaactgtgtcattttgtttgtgcagaaatgtctaagaatgtgcttcaagacttgaagaagagggtggggtacagctcgagccagactcctccgcccaaaagatctaaaggcggtgagacttcgtccaaagagaagaggacagtcaaagagtgttgggttttatgccctgaataaacctctatttcaatgtaatctctatcaattaaatatcaataaagaaacagaagtattttcatcacttattgtgtcatttatttcatgttatcatttatttgtttatttgatttaaaaattcatccaaatccttatcacatttatgttcttgtttattgtgtcgtcagacggtgaaagtaatcaagattatgtgattaa

SEQ ID NO: 241274 - DNA, 1317 bp, Cannabis indica
aaatttttgaaaaattcgaaataatttacaatataaaaaacaatgttcaaacagtccattttacacgtgtataaaataaaatagtcacgcgtgcaacacactatttgaaaatagttttcggtatgttaaacttttccaaatttcttaaaattttgcaggatgtcttaaataagtataacgtacatgaccatgagaaaaaatttgaataaaaaattatttcggatgctaaaacaaataggggtatatcaatatctcttttaagggggtgcattgtagaattttcctaaaataataccctaaacttaatttttgtaattttataatataattaatttaaagctaatttttaatacgaacccataaaatatatataactatttttatcataacacctattattaaattttatacattatttaccaaaactgatatttaccaaattataaatcaagttattatcattttgcatagagacatataagtcaagacacttaaaaaagtcaacaatatttttaaatgataataatcaaaattgagtatgactatttgtgttgtttttcttcttttgttcaatttgggcttagcccattattcgtttcttgtctttttacttaagagaatcatgcatatcaaggcttgatatttattttaggctaattaggatttttgcccctgaactttgacatataccaaatcatgcccactgaacttttaaggtcgttaaaaataccccataaattattgagattgttggatttaaggacttttgtctaatttcatttaattttactgcttcagcgattgtttatatactaaatcatgctccccagactttgatacctaccaaatcatgcccctcgaattttgacatgtactaaatcatggcccctggactttcatccatgttagacttttttactaaaattggaagaaaaaaaatccttaaatccaacaatctaaatagttcagggggcattttcaacgatcttaaaagttcagggggcatgattttgtacatgtcaaagttcagggggcaaaaatcgtaattagcctttattttactctcaacataatatccgagccatatttttgatgggctttcgatccacacctatcaattagttagtcaataacaagcgagcaaaatagtaccccaaccacgaacaagaataagcgagcaaacaaaactcttaactgcgaacaaatataagtgagcaaatgacactacttatggaaagataattcaagattagtgaggaaaaataggcatcatcttgaggaggaatattagataattttaggaaaacttacaaaaat

SEQ ID NO: 241275 - DNA, 700 bp, Cannabis indica
taattgtaaacgtttaagttcatctcttttatcacaacaagaacatgaacacatagtagttcgtcttgttggaatctattgcaactatatattttatctttcagattcatcatccatgaccttatttaatgtactacttcaaacatattgtcacatattgtcgtttataagtttcacctgcacatttgatcacaataatcaatatattaaatattgacaaacccaaatgctaatgacaaggcaactctattgcaactaaaagtttaatgaatttttacattctctgttaatgattcctgacaatttgaaaattcaatcatagtaagtcaactatgaaaaatctgaatggacactgtaatgcaacaatcatatgtgttgttaggcatatatatacacaaccttaaaacgatttataaccctcacaattatgtaatagaaataaacttgccacaatagagtttgccatatatgagttatgtaatataaaaaatatattatttaattaaaaaaattaaacatatatgtattgcacttaatatcacctaattaaacctaattaaaatgaaactaattatacatacattgcacgtaacatcaacctagtatataaaaatatatataaatattcttgcaagcattttataaaaaaaataaaaaaaaaccaattttttgagggataattacataaagcaccattttt

SEQ ID NO: 241276 - DNA, 1001 bp, Cannabis indica
ttctgaaaaagatctgggcataaaggggcggggttttggttgtccttcttgaaaatctctataaaccggttgaggaagcattgggcaatttggtcttggtcacggatccaatcgccatccggagtagctttgatacattggacataattccttctacgccgcactatagtcgaagccataaagaacttagagcacatgtccccctcctttagccattggactctagatttttgtttccaatggatttcttcccgaagaagagattccgacaggagttgtttagctttattaatttcctccatattgattgggttcttcatttctgcctcttggagttgagatttcgccttatcaatttgctgagacaagtgcttgaactgcgatttgttccatctctgaagcttgctacccatggctttccacttcatgtggaagttattcataggattgtcatgcatcctaaatttccaagcttcctttactcccaaaagcatcgaggatcacgcgcccacatattttcatatttaaataggcgtttagtgcatctagcccctcccatagtatccaataacaacggtctgtggtccgattcagaggccccaaggtggtttatgactgcttgcgggaatatgattctccactccgttgatgcaagccctcgatcaagtctagctcttttcatacttcctcctcttctcgggttattgcctcctttcacccaagtgaaaaccgggccttggaatcccaagtcaatcagactaactctatcaaccatgcgtctgaaatcaaatgaatatcttgaaatattgccatggtagtgaaaacattcattgtccctcaaggttccattcatgtctcctaagaggagcaccgggtgtgttgtgttgagcgtatagtctcccatcttttgctaaaataactccttctccacactattgggaggtccataggtgcccattaagatccaaggaattcccagagggtccgataaaatctcacca

SEQ ID NO: 241277 - DNA, 504 bp, Cannabis indica
ctagctaagttgtaagctagatctgccattttcaatcttggtgaactgagaaagttgttaagacttagagagagtgagtgaataattaagataagagtagttggcctcattatgatccttctcatatattcaacaactcttataatataattaatggacccaacattaattgggcaacacactgtattaggggcatgtacgtaactaatgttatctttttgttttctgaacgtattttttttctatacattaataaaaaatcaaaaagaaagaaaaggagagtctcccttgatatatatatatatatagaagaataaacttaataaacatcacatcatagataatagagaaagaaatatttaggtttgtgaagcttaaataactcattagacactccaatagaaatggaagatttaaaattttgtactaaatttgtcacaaaaataaatttgtgctatatttaatccactatttacaattacgtttcaatgcgcatgatgtaaa

SEQ ID NO: 241278 - DNA, 889 bp, Cannabis indica
tatttatgcataagtcaattactttgtatttttgagatctatttaatgaattttatttgaaggcgtggccccaagtaacaatctggaaggattgttgaaactacatacaaaaaatttgtgtgtatttacttttctgcactgttcatttttttagtttattctaaagttacagagttgcctcctatagctacagaaaaactgtttcagtacctgttgacttcacttctagccaacgatagtgagtcaagataaaatgattaggtaaaataaataacataaagcaaaaataataaggaaaaaataatactaaattttctagaggttcgaccccgtgagaatggtaatagcctactctcctttaagttgtattgattcgagagtacgaatgaagtgttctttctctccaaagctcttacaattaatctctgattaattctctctcgtagatcgcttttctctcttgagtgttcttctaaactcaatttcttgtcccctcaatagtgagattatgccactatttataggagcttattacatgaagagtggtttcccttaatcaataataattaaaataggaaactacattaattctataattacaatgcaaagaatgggaaactaaggcgtatggcctttattctttgacctaatcccacaaatataggaattatcttcgtgtcttagaaacgacgagacttatctctgaaattgccaactcacatattctgtttggtgcatgtggattgatcacgagattgtacttttgtcggatatctcttgattactctactcaaacatcttgctatatgctgacgatagacatttatatcaacctttgtgtgctactaggagtactccttccgcccaggtaggaaaatgtaagacatgt

SEQ ID NO: 241279 - DNA, 964 bp, Cannabis indica
atctatccttggcaaaggatattgttcattattttcaacttgttcaattcacgataattaatgcacgtacgtaacgacccatccttcttcttgacaaacagaactggtgcacccaaatgagaggtactcggcctcgtgaatcgtagatcaagtaggttctgtaattggactttcaattctttcaattctatcggtgccattctatatggagccttagaaactggctcagccccaggtactaatttaatttgaaagtcaatctctctttttggtggtaatcccgataactcttcttggaatacatctagaaattcacatactactcgaaccttttttggtcccttaggtgtatcttttgtggtatccaacacactagccaggtatcccacacatccttctcgtaataatttcgtggtcctaagtgccgatatcaaaggaatctgagatccctgcacctttcccataaaaacaaatggaattctcaccctctggttcaaaagtccctatttttcttttacaatctatagtagcattgtacttagtcaaccaatccactcccgggattgcataaaaatcttctaagtctatttcaatcagatccactgacaattctctcccttctactaacactgggagagaccttacccacctcctggagattaccacttctctagtaggtatcaaggtaccaaatccactacacatgatatcacatggcctactcaatttctcaatgattctactaaaaatatatgaatgtgtggcacaagaatcaatcaaaatagtaaacataataccatcaacagatatctcacctataacagtcgaagggccagcttcaacatctgcttgggtcaaagcaaacaccctagcaggaaccataggactttctctcttaccctcgggcttttgtagttgcgggaaattgttcttgaaatgacctgctactccacattgttagcaa

SEQ ID NO: 241280 - DNA, 909 bp, Cannabis indica
tttatgttattttttagttatttgtaagtagtttccattattttttttgtttaacagttattttttttattcatgtatatttttatagtatatatttgaagtttattctgataatttttagttgttgtgtgttgctttgtagatgtagatacatatatttagtttatttttggatatgtttattttaaaatacatcgataagattttttttgttttttttaattgacacgatgtacagtagtagataatgacatgttaattatatattacacattatattatatacctcattttaaaatcataagattttattatttctattatcaatgtaactatttatttaacttttaaaaaataaattatcattttaattaccactaattaaaaaaaaaagttgaaagaataaagttgtaacaacaaattccatgaaaaataatgtaatagtacgaaaagataaatcaagttgtcaaaactaagtaaaaaaaaattcgtaatacaaaaacttaaagaggagttgatattatttttttattgcaattaggtcaatattttgttatttttctgttgatttgtagttatctttttgttgtttcatagttgttttcatttgttttttaagttgttctagggttgtttttgagtagttatttttttattttattgaaactcaatatttttgtaattttgaaactttaacacagtatttttgtaaacttgatactataaaaatgtcaaaatctccatgtcttagtatttgtaaaattttccctattttttagtatttttgtaagtttcctttaaaattaatgtgttttaagtttttatttttattaaacatttaaaaaaatatggggatttaatttaggcattacatgtgtgtacattgtcacaactaccagaagtaacaga

SEQ ID NO: 241281 - DNA, 920 bp, Cannabis indica
aagaatttgggagaaaacttggactgaaaatattttgacttggttttgagaattaaaatggctaaaaaggattactaagggttcctagtcctatttataagcaatctaaaaacagaattagtcatttcaaattttgaattttgggttcttcccaaaagtagacgttaagcactcattgcaaggagtacaaccgtcaagtgtgctcaagtatcgaatcgtcattcaaggtgtagccgtcaataagcattaaatggtcagatatcgaagagaccccttgtcagagtcacatcggaaaaagacacacgtcacccatctggacaagactccaagctgagtgaagtccacgtgcgaccaagaaggtctcgtgcagactttgggggaaatgttatcctattttttacaccttgacgtggcaataagaatggatgacacgtgtcccacatttttaataccttggcagaggaaagtattcctagcagcccattaatggtcatttaacatctgtaacactaggatagccaaacaggatggtcgagaagatgtccgaccaagatgcagacatgcttatgccgagtgaagcgtgtaaaatggcaattctagagatcaatcttgtcgtttccaagacacgaagacaatccctataattgtgggattgagtcagagaatagaggcaacacactttagtttcctattctttacatctaagaggggaaataactcagagatcaattataagagctttcgagaggaagaacactttattccttctcttaagtcaatacaaatacaatgggagtagactattaccattctcacggggctgaatctctttaaaatatgatgttcactttactatttttgctttcttttatttatcttatttaatcgctttatttatgactcactgtcgttggctagaa

SEQ ID NO: 241282 - DNA, 1135 bp, Cannabis indica
tttttaaaactttttttaattaattttatatgtatttttcacgtgatattgaacatattttatatagtttagtacaaaaaaatagttattattatatttttaatttatacattaagtatttgtataattatattcttcttttttttgagaaaaaagacgataattgttagtaggttttttttaactgttgacaatattttgctacgatttaaaagtataaaaataattgtatatgtaatttaagtaacctacaatttttaactactataatttaacgtacaaacaacgtgaaatcaacatatataaaaagtaacgaaattaaacaacgtgtttaaaacttgaaaacaactgtaaaacaacaaacaatgttattactaaatataaataatttttattcatatttacaatctctttctatcaatgcccccacttgattaaaaatacacatgatgtatattctattatttattttctatgtctgaatatgtaagagataaaataaatttttattttaacatgtaaaactctatttgctttaattgttgaacaaccactgtaatgtataaaaaatccataacaaactttacaacaatatgaaaataacttgattttattttcaatgagaaataagatgtcgcaaaaataacacaaaaaaacttcacagaaggttttcttttagttgtttacttgttgatgtatggtttgatttagctgtcaaagtatcaatattaactaaaataatatcttttgaaattgatcatctccttaaaggagataaaagttgtttcaaattgttgtttctgtgttgttgtcaggttgttgtacatctgagtgtactgagtgattgctattttctttcattatcatattattgcacacttttatttgggtagctgccaaaaaatattgtgatttagtgttgctgaatgtgtacacacataagggctcactacctaaggtgtggcaagaattgtaggcttagttagattaattacctcaaacctaatctcaaacgtggaaacttcatagaagaagaagacgagctcatcatcaatcttgtacaatttttgctttacaattgtacccttctcattgacgattttttttcacacctgaaattgtaccttggttgaga

SEQ ID NO: 241283 - DNA, 917 bp, Cannabis indica
gggcgtgtgggtcatgatcaccggtcgtgtgcgaagagtcctgaacaaatagacttaggggatggaaagaaaactgctgcgtatggggcgtggttaaaattcgaagagaacccttccaggggtaaagaaaggaactctaaccggaatgactatggaagcagattggaacaaaacaagaactcgaaccaagcaatcgacagtctgaaagcagaggaaagaatgaaggtgaattcgttggaccatttgatcttgaattctggtaatagtcgaggaaagatgcctgaacgattgcctagaattaacaatcggaattccaccattaaccaggttcctactcctaactctttgttgtatactgggaatagggatctgaacatcaaaggcaaagataaactaatggaaacacaaacaccgggtgatggaggagtggtgaataaaaaaagatcgggtaattgggattccttaattcaggaagatgatttgagtatgcaaccaggaaagaggcttcatatggatgactctaatttaatgatggggccgaaacaaggaatacacatggaagaaggggactggattgatattcccattaattttgccaaagacattggggaaggatcgtcaggacctaaagggggaaggaaacaggaaaagggtgacagagaagaactgtatgagtaccagtaagaacacacctcgacaaacgatcaataaggcagatgagaaacaagaaaaaggatgagaggagggagaagcttttactaggggacatttctttcatttcggatttgacctcaggagtgaatttgaaagcggcgaacccagaggagcagggtcgccgagcgccatgaatatactagtttggtaagtgttctaggggcgttgggtaaccccgtaccggacgattgtaagaacggctc

SEQ ID NO: 241284 - DNA, 936 bp, Cannabis indica
acattcataatcacaaataccaaagtattaaatcgatatggtccataagtgtagtagtgtggtgaggaattaagtttaacatgtgattaatttaaaataacataatatcattatcaattctcaattttgctgataccgtgatgtttaataaataataaataagttagtatcactaaacatgcttaaaaaattaagccaacttaaaaaatcaagccaacaaaatatcattgctattaagcaattaaacttgaaagacaatgatcacaacacgatataaactacatgcttttaattcagtcatttcgagaatataacaaaacataattgaaagcataaacatccaattataaaattttttggcccaccaagtagttcataacataaccaagaaaattacatataaatgttattctattaatagagctataaacacccactaatccaaaggaataaaaaattataaaatatccatatcaacaatatgtgtttattcaacaacatgacacttaatcctttggttagaggatttgttaacatcggcttggtcttgcaatattctatcacaatatctcatttcttgacaaagtttctaacaatatgatactttatttctatgtgtttagaagcactactaatctcattattctttaaaaaaaatatcagtattattatcacaatagattagtataggagaataaatagaatcaactagccgtatctttaaaatcaaattctttaaccataaaggttgcaaagatgccacataatatatgacaaactcaacatacatagtagatgatgtgatcaaagtcaatttaacactttttaaagaaatagttacaatagccaaagtcatgaaaatatatccagaagttgactttttaataatagaaaactcgaagattatcgacatacttatacacaagcataaaactc

SEQ ID NO: 241285 - DNA, 769 bp, Cannabis indica
tcatatttaggttgttaaacaacatacttgtgagtagatctaagatcctggtaaactaaattccaactaaaataccatcattcccagcagccctccttttcttttcattcatcttcttcttgtttgtggaaataataagaactagtactactagctcatcaccatcttcaaaactccctccaggaccatggaaacttcccattgtggaaaacattcacaacctcatgtttggctcttcattaatccatcatacaccaatagatttagccaagaaatatggaccattgatgcacttgaaaattagtgaagttccaaccatagtaatctcatcaccagaatttgccaaacaagtgatgagagtccatgatgttaattttgcatcaagaccctcaattcttttttcgaaaatcatgttatatgatggtgttggtcttgcttttgctccatatggtgagcattggagacaggtaagaaagattttcatgcaagagcttttgaatacaacaagagttcaatctttcaaatacattagagaagaggaaatgcttaacttcataaactcgatttcatcaaatgttgacaatgctattaatctcagtgaaaggctcaacatgttgatgtataacgtcgcgtgcggcctgtggtaggacaaggattcacaacaaagagtttctgcctgtgttgaaggaagctattgaggtatcattagggtttgaacttgctgatttgtttccttcttttaagttattttatcagatgagtcgttcta

SEQ ID NO: 241286 - DNA, 808 bp, Cannabis indica
atattgtcactaaataattcttcaatcgacaagtactcttcaaagagggactgaatgataatgcgggcatggctttctctgccaccctcgtatgacttcacaaggctcaacaaaggttcgataagcctttgttgggctcctctttctttatcggaacaggaagataggtgagcctacagaaaaaaatgtgttcctttattgttataaattaagagggaaatcaaatgaaaaagaattcacttacttcaagaatattccacagtagtttagcagggaaatcgacattctgagtactaggaattgcatcgaactctttatatttcgattctaactgttgaaaaaacataacataggataaaatatgagcatcaagcacgagacaggacaactcttacactcttcgagacagtatcaatcttctaatgaaccgaagttctattttcttatacgctctttgcaaattactaataaagtcgttacactattttcgtagtgtaacacatatgtaagtgcagagggcataaaaagctctatttacctcgtttttaagatctttgggaagacgggttgcaagaacagccatgcactcttgccattgaagataagggagttcgggactatcaaggcaatggagcaagttttgcactacctgaggaaacatgttagaaatattttcagtaaaagtttaatcaaagattcttttcatggcagaaacagaattagatactcacttcattaatgttgtgttcataaccggcgagaatcattcgtgctgcattaattcctgcagcacatttctgatgaactt

SEQ ID NO: 241287 - DNA, 1129 bp, Cannabis indica
taagtaatgagaataaatctatttctttattgataattgaatagaaaagattaattgaaataaaattttatttagtgcacaaagcccaacaggtggtaaccaaacccgaaggggagagagaaatctaagttcagatcttgatcatgctctgtgatagaaaggaattaagggctacagatttgaatggaaggagtcattatattctgctgcaaccaatgtaaggttttcttaaactcttatgtgttgtatttcattgttttagagatattcaaatataggatgttaattcaacatacttgttagtaaattgagatcctagtaaaatattcccaacatttggcctcggagccacggtaatgatttgctttcatgtaatattgattcaaaacaatgaatattgtttattatgttgatttggatgtgttcatgttcatttatgtgttaattgatgaatgtatgtgatttacgaagttttttcatgaaaataatttatttggattcctttataaaaattaagcaattttggtttttacggaacttgatctcgataaaaattgagagagatatgaaggtttgaaaattcgtgtgcatatggtcgagggatgccccaatcacacgcacagcactcggacaaggtgaccaagtgccctatctgaagcgtgccttggatgcttgtctaaagggcatcactctgtctgaagcccgcgcatgcatcctgctgcacgcatacgaggtatgcagcaccattctttgattttttttggatttttttccactttttttggatttttccaattttcgaaccctaatttcaatataaaatataattttaaaatatttaaacttaaatatcaatttacaaattaattatattaaattttttaatagattatcatttattttgatattttgaggtttaaatttaaaaattgattattttattttttatttatagtcagattttaaaaatttgttaatttctttaatatttatatattatttcattataaggttatatattttaatattggggatattttaagttaattcagagccttatcttttaatttgaaatattctattaaaattatcttataagataaattaaataattaataaatttgaaatt

SEQ ID NO: 241288 - DNA, 731 bp, Cannabis indica
atttaatacaaatacaaggggaggtggctattaccatcctacgaggctgaatctctttaaaatctggtgttctttttactttactatttttgctttttattatttatcttatttagtcgctttattttgactcactatcgttggctagaagcgaggtcaacaatgtgtatatgatgaatcttgtgtatatagatattaatatatttgtatgttatatatatattagatatgtagcatatatatttatttgtgaaactaatgtttagtttgtgtatgttatatatcatatcacagtaacatacatataacattaaaattacggtataagtccccaaaaatttaatttgatgcaataagtttctaacttcaaaaaatagtggttatagtacgccaaatcctccatttctactttttcttctagtttcttttctgccaataacttctcatctccaagaaccttggagactttttggtgcactaggattcctttcggactttctctccatagcataaagtccatagttccatcgaacttctccaattcgattctctctattgaattcaagtttcttcaagaattgtagcagaaaaaattaaattttgtgttcttgatcgattaccaagctttgatttgtaggaaaattacgactaatagtgcagaattaaatcaatgaaactttaacattcaaacaattagcaaaaacatgattaacaaatcaagagcaataatt

SEQ ID NO: 241289 - DNA, 824 bp, Cannabis indica
aatagtcattctactaaaatggtatcattctattaaaatgacattcgaatactttaatatgctaccaaacaaaggaatatgaagattgttttcttaccattccattctattgcattacctttaaccaaataccatcttatattctgtttcatccatctctcaaaagacacaacaatagaaattgttgcaatagattcatccaatctcgtagcttaagcactcaactattgtgtaaggtacgtaactgcactattaacaaagaacttgttattcctaaccactaataacaatatgatggtgagtcatcgaagaacaaagaagaaccaacaacaaagtaaacaaaataaaaccatgtcacacaaacaagactaaaacatatcagggatacttggtgtcgatcactttgaaaggacctctaaagccttgacgcaatctgagagaggagaaaactgctctcgatctaactcgtactctgttggcttagtgatactcttaaccaaagcagtaagagtgtcaaattcgacactacacacatcatgtgtggtgatgtgtgaatcacctggccgcttcctgttgatgttgttatcaatatcaagtctcttttgtattccaagtcgatcaaaggaattgattgacccgggactcgcctacatgaagccggaatcgctagtaatcgcccgtcagccatacggcggtgaattcgttcccgggccttgtacacaccgcccgtcacactatgggagctggccatgcccgaagtcgttaccttaaccgcaaggagggggatgccgaaggcagggctagtgactggagtgaagtcgtaa

SEQ ID NO: 241290 - DNA, 670 bp, Cannabis indica
ttcaagagaactcaatatccccatccaagaaccacgaattgaaggcaaaatacatggattatgtggaaattcagaagaggaatgatgaaggtaacagggggaaacgcagaattgtagaagattatggagatgtaggatatgggaaactgaagaaattgaccacaactgtacccaaagacacccaagatcaagaactctacaacgttcctgtgtcatatgatcaagaagcaaagattatggaagaggcaataccatttgtagtagggagctgttcgaagaatgtggccaaagaaaatagaaggaaagtagcagtgaaaaaagactccagggcaaggaaagggaagttggaaaataaagggacaaacatttctcctatgggggatttgaatgtcactccgattacaagaaaggcgaaccctgatactcagggtcgcctacagccatgaatctcctcatttggaacgcccaagggttggggaacccttggacggagcgttctctagcttccctagtgactaatttcagccctcaaatgattttcattgctgaatccaagattggtaaagtgcgtgcggagtcgttgcgagttaagttgggttttgttggttgtttcgtggttgaagctcggggaaaaagtggggggcttattcttttgtggtccatggatgtg

SEQ ID NO: 241291 - DNA, 948 bp, Cannabis indica
tgaatatttactaataaatactctaaattttatttcccacccgataaataaattaatatataatttagtctttttcttttttttttttatgttttaatagttttacttatagaattataatattcagtattatatttacattttattattattttaacttatttattattgataaatttatattttattattattattattaatgaattataagatattttaatatatcatgctgtgttttttgggcttgtcgcgtgttgtgctttttaggctagtctattcgtgcttacgtgtcgtgctttttgtacttctcgtgccgtgtcgtgcttaaggacatatttttcatgtcgtgtcgtgccaatttgtagcattgtgccgtgtcgtgcccaaactcgtattttttcgtgcctagttgtacttgtgtcgaatttgtgtcgtgtcaaaaaacctgatccatatttagctcactaaaaacattaattagaaaagaaatattaaaatatattttcttaaaaaattgttttgagtatatatagttgttttatgattcaagtttattttggtaaatcatacataatggttatgcttttagcaatagaaattctacagataagataattattacattatcatagaaatttacatatttttattattcacttgatttgatactgatctacctttttttttgtagatatattggtgaaacagaaacacattaggaatttttttcctaatattaaaattttattgtttagctttctaagagtatctctttattatgtaagtcgcaacattaatgttgcggcccatgaattagtttaacatgcccttagaataaacaataaatttttttagatggcaagaatctcttcacttttgcctttcgacatctttctctaacctaaaacgattacctttatcgaaaaaaaaggaaagaaagaataa

SEQ ID NO: 241292 - DNA, 2343 bp, Cannabis indica
tcattctgttcataacagcaaaatctatctaaagagagttgagagagcgagtaagcccgattacccacatcaatcggtttcttttgcagatcatgcttatgtgggactaaagctcaagaatcaatggctggaggtatttcgatccttattcatagtgtatatatgtttgatttaattccacattttatacataaacatatatatatttcagtttatacatataaatgtctaacattcaaggctttcagattgcgctaagctcaatgttggtcttcatttgtgctacttaaattaacctgagttaattattagttgcactaaactaattttaagtctaataaagcagtggcttacttttagttccctagagctctggttttaggcaatattttctactcttatacttgttgttaatttagttatattttatagaagaggtacaacgttataatgatataatatatgctacctccaagcgattaagagtttaaactgttgatcacttgttacaagaaaaaaattgaaaagctaagtatgaaatgaaaaattcttctttattcaaatgattcctgccctgaggcgtacatgggaattgaaaaaataaaaagcaaaaaaagtaataggaagctagccacccccagtctactgatagtatcaacgtaggtagttagtgttccatgctctcagaatttttgttccatctagccttctcaagtgatgggtgctatcaccaattttatcttgaactttatatgggccttctcagtttggtcctaagatccccactcctagctcttaagaggctagaaataccattctcaaaattagatcactaatttcaaatcttctacttttgactttaaaattaaaatttttggcgatccacgcatatcctcgtaattaatgttccccagagtcgaggtgtagaccaatgatgaagatgctatttttcaatttttgtgccaagaagtgaacaatcgtaaaaaatatagccatttctggaaaacaactccttgatggtcacaccctttcatcctcacgcaattgacatgtggacatattatcattataaatgaaagccaccttccgcggttgagtaacatttaacatatcatgattttatttcttagcctccatatgtccatattgaaagagtgatgcaagttgccaccatacacaatattatagaagcttggggggtaaatgttatgcacattctggtattggacacatgaaatctaggtcagcatctaaggcccatcaatgggaccctcaacgaaggtaaagtgggccaagtccacttggataagtccttctaggaatgtatcccagttccgcattgcaaagccttctgccttcagcgagccgtacctggaagcatgtctggtaccacgagatcggagggacaagacatcgtgttctcaaaagacccttccagttttcttttttattcttgtgtccaaataaggaaattgcagcttccaggtcgtaacatagtatcatattaggattaatgggaaaatttcccatagtgaatattatgcaattaagtcatagattaattgtccacaattagtgcacacggtgttgaccaaatcaatcctaatctgatctgcctagtcaacagatcttcttcttcatgggctagactttatgagacaacctaagtgtattatttactgtaaactccccaatagaaggaaagtggaaagttaatgtaattctcaagctactataaataccacttgaatcctatggattaagagttgaactctttttcaaactttgctaatgtaaatttgagaacatatattttctgtattctcgaaagctttttcaagctaaaggaactactgaataatactgactcatggactaatactaattaacgctccaaccacgtaaaaatctcggtaaacaccttttgtactaaaatttggagaaaatctcaactttgtcaagttcaaataagatatacccaaaaagcttcactcttctccagcttttgcaatgaccaatcccacaccatcacaaccctaatttctaatatggcgttgattgatctactcccatgccaaattaaaaggaatttgatatattgatgagctattttgatagagtttaaagagggcatcaactgaaactataaagtttcaacaaagagttttgtgaaactggtgaaattggaaaaaccttcatattatacgagtttagtaagttcacacaacatggccaaggtggttgttggacttctttttatgggtaaaacatatttttattttgtaaaatatggtcacataggataattttttagtgacttgtcattgccacgtgggcaaaatt

SEQ ID NO: 241293 - DNA, 874 bp, Cannabis indica
aatatatttttaaataaatatattaaatatataaaattataaatgtattttaaaaatatataaatataattggtgaccattggatgataattgaatcggtttggtcggttatccattagatcaaatgtctcatccaacaactgatccgatttgattggatttttaaaatttacatctgatccgatccaattatgattggatatccgattctattggatggattggttgggattagattggtcggttgtaattggattggatgattttttgcacattcctaattaaaatggaaaggaattggacagaagtccttgcgtccaacaatctcagaaattttaacggtttgaaaagtttggagggagaaaacctaattggcaattttttttaaaataaaatcagctaaaatattatcctgtagtccaattgggacatctctcgttggagacacgattataattagaattagaaaaacgagccaaataaccagccacctaattctcagatcgtttaacaaaaaaaactaaagctaaaattagattaaaaagattgcaacatcacagttaactttaagaatacctatattcagttttatctatcgctcagaaaacacaatagtagaaattgttccaccaaattcattcaacctcataacttgaacactcaactattatgcaatgtacgtcactacactattaacaaacccttcagtcacagagaacttgttattctcaactactatttgatgatgaaccatcgaaaaacgaagaaaaaccaacaacaaaataacaaaacaaaaccatatcacacaaacaagactaaaacactcaaaactatatcacaaaaacaagactaaaatcgaatcacaatagcaaaa

SEQ ID NO: 241294 - DNA, 679 bp, Cannabis indica
gtatttttattttattgtattacgatcaatatttgtaaatttttatatatatgtgtggttatcacaaatttttacatatataaaaatattgtttaatttttatatcattcataaaaataattaaacaaaaatttcattcataattaataaattattttttttaatatataattttaaaaaattattaaaactactcatagcacggatttatttcctgacctatctacatatttatataaatgaaagtataaaataaattaagtgatattttatataatttttctttctaattttacttatttgtgaggctttttcattttataaaaaaaatttgatgtgttaaatatttaagaaatgattctatattgtttaggaaccattttgtaagtcctatatagtataaataagtctattaatcaacactttggttggcaaaattttgtttgtatcgtatataatggctgaataaaatatttttattattcaatataatcttgcgtaattagttataacatattatttattgttttatcaaaattttaatattaaaaatatttattataaaataataacaagtaaaaaaaattactattcaccatatgattatttgacaccttaattaagtaaaaaaaaaaactacacacaataaaaaataaaaattatatgtgagttcttaaga

SEQ ID NO: 241295 - DNA, 1539 bp, Cannabis indica
gagactttgtggagtctaattaataaatattatgtatgataattttatttgataattaattttaattatcaataaatagtattggcatttatgggattagaattgcaaaaagtggtatttgtgaaaaatagataaatggttgagaaaaatagcaaaaatttaactagtgttgggcccacataggggtcgaccactatagtcctatttttgctattattttataattttttaattccaaataattcaatcctaaccctaagtgaattagtataaaaagaaaagaatggtctcattatcaaattaatgactcttgacctagttttcttcttgtcagacaactagagagtttgaaacttcttcttcttcttttctctcttctaattcaaatcctatagtatcaccattaaatttcaagctttagtgattgagtgcatgcccagccatagcaagttagtcctcaatcataatgtgtaagactatgaagaatccaagcaactaaagagtgtcgggctcggatcttgattatactctacgatagaaaggaacaagggtttgagatctaagctgaaggagtcatttaattctgctgcaaccaatgtaaggtttctcatactttatatgtgtttatttttatcgttttaaaagttcatatttagaatgttaaaaacatacttgttagtaaattgaggtcctggtaaagtatattccaccaactggcctcagagccatggtaattgatttactttcaaggaattatggatttaaacgatgtatgtgtgatttggatgtgattcatgttgatatatgtgtttattgttgattgattgatgtttgcaaaatttttaattaaaataatttgaatttcgttctagaattattttcttgcatagtatggaaaaaaattaaacaactcgcttttttacagaacttaatttaattttatttgaattagttatgattttttaaaaaattgaaaaaaaaatcaggaaagggatgcccacgtgcgcgcgcaaacacgagtgatcactcggtgtgcaggcacattaggacatgatttgtccgaagaaccttagcgggcccctatctgaacagccatgtgtgcgcagaaatcctgtaatgcaggatgcgtgtgcgtgaaacctcggttatgcatccctcctgcggatggttgtacaatttttttttcattttttcatgctttttcatggaattaatttcaatttttttgtgtaattttgtatttatatttttatttttgaaacatcaaatctaattatcaaattaaaattaattaattttagatagtagattttgaacctgaaaatagataaaatctaattttttacttaattggttaccttattttttaaaatttgattattttatcttatttttaaatataagttcaaatattttatattttatattattttaattaattttataaaatgatcttatttaatattttaaaagaagatatattttaatctaaaaattttaaaaatctaaccagattttttgtcaactttcaaatttttg

SEQ ID NO: 241296 - DNA, 1458 bp, Cannabis indica
tccatataattaaatcttaaaccctagttgaaataatataaaagcaacatgatgctctcattctcatacagctcactttcaaccaaactaaacctagttttcattctctgacaactagtagatgagagactcctttctatagtgatttcgcaccttattcattgttcttcaccaattcgagaaaagtgatagaggaccatgcccacacataacaagtcaagtactcaatcatagtgcggaagacggtggttaaccaaacccgaaagggagaaggagatccaagctcagatcttgttattactctgcgacagattggaataagggttagagatctgagcgaaatgagtcattattattttgctgccatcaatgtaaggttttctaaactcttatgtgtttaatttcattattttcagaactcatatttagggtgttaatgaaacatgcatgtaagtaaatctagatcctggtaaaataaatccaacaagggatgctgagtgtcatgattacataacgctaatcccgtttaatcgggttcaataagccaagtgattaaaacaaaataacttaattaaataaaataacttgtaataataaaatttatctttaacttaaattcaaaataatataaatgcatatctgggatcccgtaaaatcttttgcaaaatataagtcatttacatacaagccaacctaagcggaaaaataggatttttatacaatctccctgttggacccaaccctcgtggtctagcttggttgcaatatgtacaattcatttttaaagctctcaaactcatggctgtgctagcacttctttacccttgcctacacaatagagcacccgtgagccaagacccaataagaaagcataatcaatcaaatataatatataacatacatatcacacataatagtcactgcataaataatcgtgccaccacactaagataacatgctactatgcttataatgatgccaccgcatcttaagtctatattatatagacactacatgttacacttacacgcctatttattacataaggccttatcagggttcctctcagtttttgtcaccaagtttaaaatagttatgccttgtcgcataaatcttgacatatactcaattaattcatttaatgtatgcatagacataggaaccttagggtaacaacccttactcacgtttctatcaaactgttcatataatatataaatgcgccactgcgctatactctatgtgcaaggatttctttcttacttaaaatctaatgtaagaggaaaattttcaatccataggtaatctcaagtaagtgtcggtgttcctagtcacaaatcttgggtttatacacaataagattaatcccaaaattacatttaataatattcacatatacgaccccaactatggaccaagaaatagagctcaaaataagcttttcaatgataaaagaac

SEQ ID NO: 241297 - DNA, 1108 bp, Cannabis indica
tattatattaaaatataacattcatcttgattgaaaatacacacttttaaaaaaaatttgcttaggtacattaggtaaaatatctttcgatttgaattttatcttattgtaattaccacaaagtttgatgaaatttttagttatcgtagcattgaaccactattcctttagtacaaactggtgataacacacaccattgctaatgctcacttaagacaacatttctcgctcttgcaccgttaatggccatgtggcaaattgggaataactcccaattcttattataggagggaccacctctagcccatataggtagaattttagtatcgcaccagtctttagacacttcttaagcttaagttctattaaaaaacttttcaattttaacctttagttttcaccgcatgtacttatctatagatgagacaattgagtagtacattcactctattgacttgttgttacatattgaatttaagattagatttttactagtgttaagataggttatgttgtcggaggaatttagacaacactaaataatataaaaataataaatatttaatagaaaaataatgagtactcaacttagaacaacgagtattcgaacgagactacccgacaatagaacaaaaatggaaaaatataatgaacataaagatatatagtggtttagtcagatcacggtctgcttagtctattattgcaaaagatttttctctagtttattcatgttggatcactcctttatatacaaagcaagtgtccttttagttacacagagttgatcgattgtagagtcgttttacaattaatatcaacattaaattagggtaaaagaataaatgaaaaaaagtttaagtccgttttaataagtatagtaacgtatgcaacctttagggtgcgagtttcctgttcatattctcgtacaagctcgcaggctttgggtacgttctgtctttctaaggaggactaatgagcctcgtactaaggcgtctgcgttctgattgatttgcatatatagacaccttatatgcgtcgacaacatggggcatgcaagtgttgggttttgtgtactaaataaaaatcatttcaatataatcagatt

SEQ ID NO: 241298 - DNA, 759 bp, Cannabis indica
ttttcttgttactaatgaacttgaaatggggtagtgatcttgattgtaagtgcaaagaatggaacgacaaaaaaatggactgctgcaatatggtgtgagcagattggtatgttgaagcagtaagtcccagtacagcattgaatcagcaacacttcagcattttgaagcagggatggctaaaaatgaaattgctgaagcaatgttgtagtgatgctgcaactactgggttctaaaaatactggagttggaactatcatttcattgattgaggggtaatatatatataaatatatgcagatataatatcttatacacataaaaaaaacaaacaatacaatagactatagttatattaattaatatgttttttcatttttttatctgtctttcttttaattttagtattaataaatatagttatatacatcaagaaaaaaaaacaaaaaaaaaaacaaagacccacagatcaacaccatcgtccccaaccttgtgcctctgattagccctagccgcatctccatcttcaccaacccagccatcacgaatcaaatttttcccaaaccacctgccttcgaccatcaccatccgcacaccagcaactatttcccccactccaaactcgccaaagctccatttccatctgcataaaacgcgcactgagaccagttcgtccgtacccgcagaactaatcgcctcgaccacttgcacccaacccacgccacgcaaccaaaccagctaaccatctccattctacctacg

SEQ ID NO: 241299 - DNA, 905 bp, Cannabis indica
agatcagattgctcatctccatagggctgctaaagtcaactctgcaccagatatgaactctcacactcctgttgcattcactactaaaatctcaccatggatcattgactccggtgcatctgatcacatgactagttgatcttggcattttattacttacaacccttgtccaagtaagagtaaaataaaaattgttgatggctctctatcaactgtggcaggtaaaggttcagtttatctatcttcttcccttgctctcaaaaatgtcctccatgtgccaagtctatcttgtaatctcctcacaattagcaaacttacctttgattgttgtattgcaaaattctcaccattatgttgtgatttcaaagaaatgtcctcagggaagaccattggaagtgcaagagaatgtagcgagttttactactttgatgttgatccgtcatctactcaaggtaataaaagtctgcatattgattgtattgcttctaatattgatattatgagatggcattaccaattaggacatcctagttttccgtattgaaaatctattccaaaacaaacacttgaacatgttgtttaaatgttaagtgtgccaatttgcaaaacatactcgaagtgtttttcgtttttgctcatataaagcatctcatcctttcactctcattgaaagtgatatgtgggggtcatcccgcattacaaatatccctaacactcgttggttcatatcatttatagatgatcatactcaactagcttgggtttatcttctgaaaaagaaatctgatgtctaccactttcaaaaaatttcattccataattactaatcaatttcatgccaatctccaagttcttcacactaacaatggtacagaatatttcaattcaatcttaggtgattatct

SEQ ID NO: 241300 - DNA, 1246 bp, Cannabis indica
gtgtaaaaaaatcagagacaaaaatagtaattattatttattttttgaattggcaagagaattggttgaagaataagaataagaggaactattttgtaattattttatatatcttcgcaaaatatgatttgtttcacaacgaaagaaaaagaggattttacacttttatttagttttttaaaattttattacaaaattatgatacttttagatttgaccactttttatagtatattctagtttttaaattattttatggtattttctataccatatatgtgtaaacttaatttttaaaagggtaaatactattttagactctgtattttgtaaaagttatcaattagacgctctgttttattaaatgacaatatagatcttatatttttcgaaatggtaaaaataggaccctaagttcaattttcaataattttatttttaatataaccaactttaagacaatttttaatacgaacagatacagaaaatgtaactaattttgtcataacatatctatatcagattattattaagttttattttgacaaaaaatcaatttagggtcctatttgtacaattttagaaaatatatgatccattttatcatttaacaaaacagagggtctaattggtaacttttgcaaaacacagggtccaaaataatatttactcatgtttaaattccatatttgatgtttagtataaattatttcaaaaaaaataaaaaaaatttgaagttatttctccttctccatccaagtaccctacctgcctcacccctcaacagcccacctaccgaccaccgttctccagcaaccggtgacccacagctcaaatgaaccctggatatgagatctctaccaccaaaatcccaaaggattgaacagattctgccacaattggagtctagaaaccaatttcttaaattaaaataccagtttcataataaacaaatcttatatgagttttggtattcgaaactggtttcttaattcattgccttaacaaaattatttttaacaggtttttttatcgagaaactaattttttcatcaagaaacttatttcttaatcagaaaattagttttaattatatagaagtaaaatttatatacgagtttttaagttttttatagtattctttcttatgataattttatacaataaaatttacatgtcatatatatcaaaactttatttttccaatttttgtaaatattcctaagtaatatgtatgtgttgctgt

SEQ ID NO: 241301 - DNA, 961 bp, Cannabis indica
tatatatatgttgtaatagtggaatgcaagtaaaaaacatgagagttagttacaaagtggttaaatactttgtaactaacttaagtgttctgcctaggtatattagaggccgaaggccacctaggaaattatttttactgtcttgtaactctctttgtaataaactggttttacagtgtacaaggaatgaagggagtttatttcaacacctaattaagtttactattgggtattacacattacaaagcccataccgaataagatgtttattgggctcatttatttggatcacttatttagtccaatttaaaatattagctcaaatgaattgtcttaatttgtaagcccacatattgaattattaaaaaaaataatctaactatctcccacttgcgctacacattaatatcaatgaaaattgttatcgtgatttttgcccacctaacgtgacattgcttatgtggacaaaatcagggccacgtggcagtacagctcaccgacaagaaagccaagttagtacctcagcaaacggggaccccgacactcaaacaggacatcaagtgacagactagctttctcacagaagctggtcgcaagcctctggactacactaaggccggccagcctactccctgcgggtgtctgactggccaagttagagctttgcaagattttctatacactcctacacgtggactgctaattgggcttggaattggtccctataagcccaatacaatagctggataatatctatgttcaaggatattttggtcttttgtaataaactaatttaatatatataaatatctagggtttcaagttggaaattagggtttaggcttcctatataaatgcctaaactctaacctagaaaaactaaattattaagcctcattttagcctccaaatgctaaagctctaaacccaagtctgacaactctctccctcactctctctc

SEQ ID NO: 241302 - DNA, 1344 bp, Cannabis indica
tgaggcccaaatccactagccatggccggccacctttgtagggtttatcatttaatatttccattattttaatgccaaataattcaaacctaaccctatgtggcatgctataaatagatagtgatggcttcaggaaaaagtgacttttgcatcttgtttccttcagagaaaaacctgagcctttcactctaacctagccgccactctcctttcttcttcttcattgaatatttcgaacccacttagtgatagagtagtgcccacacacagcaagtagtacctcaatcatagtgaggaagatcgtgaagaaagacattcaacaagaaggacattcgggctcagatcttgataatactctgcgacagaaaggatacaagggttagagatctgagtggaaggagacatattattccgctgcacccaatgtaaggtttctcataatttatatgtgtttatttataatcattttagaagttcatatttagggtgttaatcaacatacttgtgagtagatctaagatccttgtaaaataatttccaacacagagggctacatcattggaagttagtacattgtggaagccagaaggggtgtgatgcaagtgtgaatcagttggatggttgagtggttagtgcatgcatgtagaaatcaacaggggtgctatttgagatagttgactcgagagtcacatcctgcgggatgcacttttagatggcatggtgtgcatgaagagttggggcggtcaggcattcgcgtgggggcatgttgtcgaggacgccaacagatgaagtgggggagagaccttcacggttcactcaacagactagttattcaatacaagcgtcgagatgagtatcatggagactgattgttgttcaggatgtaaagtcaagaagactcaggacacaggcagagccagttatctacggtgaaagtctgcaggacttaggtactaagataacaccatggcaatgttggcctaaggtgaaagtcagcaggatgaagggactaaggcaacattgaaatgtcgatgggtgaagagtcagaatgaccgaggcattagctcagcatcttcatcaaagtgacatgtggaatggaggaaccgtatgcgattaggcggttagcttgcgagctatatcttgaggggtattcctctaagagagaagtttttcccaagttgaagtgggggagtccactaattcatgtgtttgaagaatcagggtacttgtttagttttggtgtgtgaatctagaggaaaacactacaatagatgggttgttcagtgcgaagactgttgggttttatgccctaaataaaactcattccatataatcagatttact

SEQ ID NO: 241303 - DNA, 1421 bp, Cannabis indica
agagctgaaaaaccttttttgccccgcgtcttgtgtttgaggcagtgaaccagctcaaaagctaccaagatgttatctgtaataagtctattaggcaagaaagcactttgtgtctccgagattacatgtggaaggactgctttaaaccgaatcaccaaagacttggagataagcttgtagacaacattacacaaactgatgggcctgaaatctttcattgattttggttttttagtcttcggaatgagagtaatcagtgttttgttgagagcttcaggacttcccccttcattcaggacataaagaaccgcacgagtaactaagtcaccaacaatatgccaattatgttggtaaaaaagagccgacatcccatcaatgcctggactaccatcaccattcatagtttttagagcttccaaaacatcggcagcagtaaactcacgaccaaggaattcattatgttgatctgtaaccgtaggtggaataacatttagaacatgttgcagtgcccaatggtcttcagtttgagcttgaaaaagattttcaaaataagcagcaaccaaaccagaaatttcattctttgacgtgtggacagtgccctcttcatctgttaaaaacttgatcttattgttggaaaatcttgcagaagctttcgcatgaaaaaacttcgtgttttgatctccagattacaaccaatcaatccttgcacgctgtttccaatattgttcttctgaagcaagcaaatcatccaaaattgcttctgcctgctgtacttgctggtagtgagaagtcgagtgtattgatgtgttagagagagctgtgacagtagcttgagctgaggttatttgttgcttaaaatttccatacttagccctgtgccacgatcgcaggtctgatgcacactgagataagtttccatttagaacctcaattggattagctgtagaggaattccagcaatgagagataatgtgagaacattcagcatctttaatccacatcttttcaaaacgaaatcgcgaacgatatttgaactctgaaatggtagattgcaagttaatagtactcaggattgcacgatgatctgatccgtagtagccaaggtgtgtcacatgtggtgtggcaaaacgatcattccaaaccatattaataaagacccagtctagacgttcctgtagagcttgaggatctcgtctgtttttgcaccaggtgaagtctggacaagcaaaaggaatttcaaggagagcgcaaaggtctaaagaagtacggaatgccatcatatgattgtcagatcttaaaggaccagagtttttgtgcgaatgtgaaaaaatttcattcaaatctcccactagtagccacggatccaaaggagaaacatcagcaagtctctctaaaagtgtccaagtgtgttttttattgat

SEQ ID NO: 241304 - DNA, 890 bp, Cannabis indica
agtggggttttgaagctattttccagtctcattaacgagttttatattgggttacacgggggtggaaacaagttctgcaccaaggcaaccagtgtcttttagtagttgtatggtaaacgatctttgtgatactgagatgcccttgacgcagggggatatttcaaggccaagaaaaaaatgaaggttaccaagatctttaagtttaaactaagcgtcaagagttgtaatgaagtcttgaagagctaaagtattgttggtggcaactattatgtaatgttctggaaaatattataatatttaattggacatattttattaaacatgtgattatacttatatagggaaaagattataatcttacttaagctaattgtgttattattagtaaaaatttaataaatggttaaataaagcgaaaattataaattacggaaattctatggaactatgtgggtatagtaaatactatttttgaaataaaatattttcgggttcggcgaccttggaaactcgatggagtggtcagaaatgtcacggcaattaagttgtattgtattagaattatattggactgtttagaattttaagttttcgatttgacgggattggctagaaaatgaccaaaatacccctaggttattttacaagtttaagtgttaagggagggggtagaataatctttttacaagtttaagcttttgtcctttagtgcttttactaggatgagattttatttagtaataggtttatattaagcttatatatgtttttgataaatcaagataagcctaaaaaaaaaattaagaaaagtcaaacaacttcttctccttctttctccttgttcgaaccctaaggaccagtagactgaaaggatttctttgctacttcag

SEQ ID NO: 241305 - DNA, 891 bp, Cannabis indica
caactccctcctcctcggcttcaaacgaagaattaggacggacctcacgcaccctgatcctccacctcttagactttaatgtccccttcattatttccctcctcagcagaagttcgggcctattcagtgctcggcatcgtggcaagctgagcacgtgaggatcagttaatgtagttctgcgcactatctgtttagtgcggaccatcattctatccctggacgacgtttgattggtgtgcctagcaacggtcacggcaaaggtggctataggtataccagcagcagcaagacttggtcggcccatgggtatagtgtcaactatatctggccgcacgatgtatgtctagctagatggcaagtatcgtctccaccccttcttgagctcccaaatgaaacatccgtagccctctcctacgatctggtcgggatataagtggtgttccgcctcaggttctgaagaaggtgtgtgctcgctgcttatccccagtcctcaaaactccagttagaaagaccgtcacttaaggaggacggattggcacaaagatgaggttgatcctcgtacagaagttggagaaggtcctagtcgatatgatgttctcctccccaaaactcaccagggttcatctataaaaggtaggacacaagatgagtatttggtcggcatatagaacaaaaacaagtaaagtataccgaccaggtccgatcgaaggattaaaaagagggattttgcatgatattagatttataaccctgaatttcaagacttcagattaagggttaattttcactaaaccccgaatgggcaagtgaaaccgaatatcgtgaaatcaacattagagtgcaagtacagtcaagtgatatggttaaccacaatcaaaatctcatattcct

SEQ ID NO: 241306 - DNA, 764 bp, Cannabis indica
gtcaaaaaaccaactgacctcatccggagaaggcacatcccacttttggacagcgtagaggatgaacaaggcagacaaatacttaatgcccttgggagtaaactgggtcggacaaaggcagaagaaatctgccaccttcctgaagtacgggtgcaaaggcagcattgccccatgtttagactgggcacccgagcaagcacgcatccccttctttgggtttgaggctcggtgatttgaggcagggacataacactctaggtcacccagacagctagacttgtccggatcccttaggcgtgcctcagtgatcttagatggagggctcacccatctggcacataaggcaccttgcctgttgtgaggaactacagcagtaagctcctcagtgacgtagtccactccttcaactaggacatcgccgtctgcatctaatggctccccagcctcgttgtatcccccaaaatttggaggtgcagcctcctcctcttcctccccctcggaagggctgccaggacggacatcgtcatgttcctcaatctcctgaacttcagcatccccttcatgttcccccttctcctagacgggcggatcctattcggcgctaggtaacgtggcaagctgggccacatgaggatcggatgcgttgaccttacgcatcgtctgctttgttcgagccatcatcctgtggctggacacaaagacagaattggaaaatccatcacttaaagaggacggactagcacaaagaagagggtgatcttcgt

SEQ ID NO: 241307 - DNA, 1147 bp, Cannabis indica
tcatcttgtgtagaaagatagattgagatggaatacagctaaaagaaaaatagagattttcttagtaaaaattcttaatatgtaatgaaaatagtgtaatgcttatgtcaaaatgtgtattttattttcaacacttcaaacctgaagcaataaaattaatagagacctttgataacataaaaatacatattgttagtacacttaccatatagtaaaggaggaagatctcctatactaatgctaatagtgttaaactcaatcaattcaatcaggtccttcccattgtactcttcaatatcggttatgttcttataataccaaggcagagcctgtaaattaaatgaactcaagcaagaaaatcgaaagcaagacacataattactttattactcatattattatcttagaagttggaatgtagatgattattcattgaaattcaaggtaaatacaaatgaaaattattgtaataagatttaacaatgatacttactctatcatagtcagcgctctttgccaacaatgagattttaggcaaaagatcaagcgaagcatatgtgtccaactcagaaagtgacttgacaataagatcctacaccattaagaaaatcaaaactttaaacttgatttactcgcatatatcagacttgaactaagctttaactattttgtaacgcaaaatcatattggcctacatccccttaactttgaaagggggttgcgttactaaaaacacaactccatatgatgtgaacaaacacattcatgactcagtcacctaaggaatatcacatgccattcctgaaatcaaataaccataaagctcaattgtcaaactttcaaagaataaataaaaaaccttgaacaacaaagacgctattagaataactcaccattgtttaattagggcttttgatttgagaaaataaaaagactacctaatcgaatggaaggaaaagaaggtaagttggagccataggttcttgctcttgcggtgagtgacaacgatagtatttcccaaaagtacaacatcgaagtctgaggcaaaaatgtcgttgatgaccttggagtcgtcaactacgaccaacctcttcatcttcttgccaatgaagttttcctctacaaccctccaaactgcctccacctc

SEQ ID NO: 241308 - DNA, 1329 bp, Cannabis indica
ccttcgcctcgcaccttcacctttggttgtgatggaagcagtaactctgttgcgctattcgtccactagaatcttttcgcggcgacagtctccttgcttgcttgaagttcccacctgctcacgccctctcctcctacttgaggctggacaacgttctcattttcttctcttacttgagagtcgtgaccattagtgccttcttgcctcgaagcgaccaacttgttgtcgtcaaggaaaatctccacgtcctataggcggtgagagcgtctaggcattttgtgtcgatggtgtgtaaagaaacaacttggcttaagcttgtcgttcccacaaacggcgccaaactgttgacggtgagaactcgtctaccaagtggtgaccgaaaaaccaacttgagctttaggttcaaaaatgagatgaagaggaagacgaaatatgaactcaaattgctcttttgaaatagagagaataatggagaaatttctattgctctcaatatgattttacaagtatgatcttccaacctccctcacatctgagatggggggtatttataggctctaatggcctagtgtacaaagtggtctcatggggacaaaatattgctttcccgctgcatgctacaggtgttagaggcagtctggcaccgcgtacccttgtttagtatcaggtggtccctagctgtaggtaacaagagggtggttgcaatgtctggtcctcgggtacacaagcgtgttccctgattgcatgcgggatggtccttgagtacatgttgtaggagagtggttgcaatgtacccttggttgggtccttaggccttgcaagtccgttatcgccactacttgtacctccttgctctcagtctttcaaaaagtgtggtggtacgctcttcccttacacgccttgtcctttgattcctcacccaatatcattcttgtcgatatgcattcacctctcaccttacactcacaacccctgaagcacattcatgcaacacacacaacggctcgcatgtgaggccccccatgggctcgcatgcgaggccccaacacctaacacccaaacacacacaacacaatacacacacacgtctcgcatgagagcccccaacacctaacacccacatgcacacaacacaatgcacacacacacggctcgcatgcgagccctcactcgcacacagatgcactccttagaccatcatggctcacgtgcgagcccccatgggcacgcgcacaaggccttgtctcgcacccctacaatcgtgcacccacatgcgtgtactcactcgcatccatgcaagcctctgatgggctctcatgcgagccctta

SEQ ID NO: 241309 - DNA, 804 bp, Cannabis indica
aatttaaaatttaaagtcaaagacttaaatttataccaaatatttcttgagttttattctagcttggaccaccacacaatgaaatacttcatagcagtcgtacaccacacaatgggaaagtttcctaccaactaacagtcagatcgtcatgttgtagtgcctgcttttgcagtgtgttgagtatgaaacacaaggtgggaagagggaatgcccttacacacatgtaagcctataaatacctttatttttttttgtacaaagggtgaacaattttttactagccgaacctctacaaaaattcctacaagctttcttcttcatcaagagaaataaaaggagtgcaaagataaggttaatactgtaaacacttgtattattcaaacactcgcctgtaagaccaatacagctgaattgtggactagggattattaacgcccaaaccacgtaaaaatcacttgtttattatttaatatttattcttttcttaagctctatttttttagtttccaaaaatctcggtaaacaaaaataatcatgcttatatacttcaaaatatttagtcccacgattcacagtgcactggatttacactgatgtgataatcaacaataaactttacttacacatagatttgtcgaatatcttttccaatacattggcaaagtatacttatatgagatgtattggttatacactggtctggaccgaaattgacagtggaaatgatatcataaacttactatcttatcttttctaagtgaatgtcacttagttgacctttatcctaaggtggttaatttctag

SEQ ID NO: 241310 - DNA, 1009 bp, Cannabis indica
taaaacacagggtccaaaatagtattcacccttaaataaatacagtgacaacagaacccaagaatctcccaccaaaaatatatatattattcttgtattttattgtataagatggagactcaacaattagtatataggaagaatataaagccttggtcttgctgtatttatatctctctccacgtgatcccaactattatatggtgggcatatttgaatatatacatacaattgaatcaacaaacactatatatgtatatacacacataatatacatacatgttttttaaaattgtcttctctttcagtgggaccatatatctacatatttaatccatataaaatatttcatttaacttatttaaaagaaaacataaataagaggagaggagaggagagacagatctcataattattagtttaattatataaattagtgttgagaacttgagcatgaacctttttcagtgcttcaaatcacgttagagtcttttagtgttaataataacaaatctaatgtgaaaaagtgtacaatatcaaatatttgtttcttacaatcttctcatgatttatgcatcacatttattcacatataacaaatgattaattactgtatatctatagattgggggcttatatatataattatataattataatttccaataccataaaccagtggttgaaatagaaacatcactatagtttatttggtttggtataggccaacaaatgattgatgtcagatcaatactacaaaattatatgtgaatggatatgcttttattttttaatttttctaaaccaattttgtaatgtaatatcctttgttttgtattgcttattatatatttagttgtatagaagtagtagtagtactactactagttttggtcttccattgtgatacttgttttcttagcaaataaaaactttgctattatgttataggggatgcatgtgtattggaggtcctgggttcgagtcccaggttatgctgatgtaatat

SEQ ID NO: 241311 - DNA, 1302 bp, Cannabis indica
cccaaaatttaattttgccttaagcacccatatataccttaggaccggccctattagtagttaaatatgtaacaaaatagttaaatatgtaacaacttcaaacttatatagtataacatataagctaccttgttcttaacattcgttcatctttggaatagaacaaattcaaccgatcgattgactgagtaaatgtaggttatataattcagtgaagaaggaaaatccggcaatatatatgtctgtatatacatgatcaccatacactgctatgacgtttactaagctgatctccaataattgcttcaaatttccagtgccactatacaggacattttctaattatgtatgttctattcttcaaaatctttacagttacagatattttttattaatattgtgaagggagactattatattgagggaatatttttatatatgtataaatatattgtatcgctagtgaggtcaaattagggcattaatgtgatcatgttggtgtatttagtgcatgcacgcgagctagcgcatttagtgatagatatcacccaatgttgccgtaatttttgctagacacaacttattttattttaggtaaatagtgacataagtatcttaagttttgagtatgtaaaaactatatatgtaataattttttatagcaaaagtacttaatatttataaaactataatttttctctaattttatctatacttgctctgttattgtcttaaatagggcacatagtttgtctagattctagtatattgggtttgaacggaaacatgtaatatcaattactttaatattttttttaataaatttaaaacagagtctgtattaatgaaattggagaaaaattatagttttacaaacattgaatacttatgagctaaaaaaagtaattaaatttatacagctagcaaactcaaaattttagatacttgtaccgctatttacgtatttttttttattttatctttgtgtggagtgtaaattatatcttctttcttataattcactttaaatataccgaacaaaatatttttctactttttttcatttggcggtgttcattatagttataatagtattactataaattttttaaaaacatttaataatttacagtgtcaaaaaataatttaaagtttttcaatcacatatggttaagttgagtaccaagaactccgatatcaatagaagaactttagtgtcagtaaagtactacgtggttaagtataccagtacaaaaaaaaaatacaagaattctctagcatgtgtttgtagacatagatatg

SEQ ID NO: 241312 - DNA, 938 bp, Cannabis indica
tatgcctaatccatgcatctcacaaactaaggccttacatccaagcacatcccataaatgtgtcaaccgatcaaccactaagacaaattttgtcaaaactaaattcttctggaaggttgataaaatagtctattgaactggggaagtttgacataacctatcaaccaagaatatcattcaagggccaggctttggcatattccctaatagaaggaatagttcaagatgaaaatccacttgtctagcgagatgcagagacttggaagttatacgtggatggagcatctaatgaaaatgggtcgggtgcaggggttatactgatctagctacataacttaaagtttcactacgccctatgattccaattttacacctcaaacaatgaggccgagtatgaagctttgatagctgggttgaaatagctgaagttttaaatgtcaagaatcttacgtgttatagtgagtcacaattaattgtgaatcaagttctaggcgaatacctagcgaagggtttaaaaatggaaaaatatttggagaaggttcggaagaacttggaaaagcttcattactttaaaattgagcaaatcgcgagagcacgtaactcgaatgtaaatgccttggtgaaactagcctcgcaaaatgaacttgataacttaaatttggtactggtggaagtgttaagcgaggcaagtgttggattatattttaccaggatctagatttactaccatgtatgttatttaacatcctaaatacgaatttctaaaaaatttaaacacatataaagtttgagaaaccttacagtggttgcagcagaattaaatgactccttccgctcagatctctaacccttgtatcctttctgtagcagagtatcaccaagatctgagcccgattctccttctctaaaattcggattcttcacagtcttacacacta

SEQ ID NO: 241313 - DNA, 769 bp, Cannabis indica
aaatctgatgccttttgtattgtatttggctcctttttatagtgcaacatttctcctcaaatctgatatttgcgtagtgtgagtagaggagaaatgacataaaatacggatgaaatggtgttatggggcgtcaggtggagtggtcaaatttggagacatgcggtcaagtggcacacaaatagaacttctgtcagatggagtgggaatcgtgcgtcagttagctgctgaggaagtggcttcattgatcaagtgctagaaaatggtgatggtgggacaagcttctacgtgggctttagtaatttagttgcataattgaagacttggcccttttgctttgacaaagcccatttaattacaaatttagttgtccaaaagaatccacactaaaaatgatcaacataatcgtagataattaattgatataggtaaattcatttggaataaagcttgtaaaaaaattgtttggcttgagacaccattttcatttataccaatttaatcaaatttgaaaaatgacacaaaattaaaccaaatgaaatattttcaaataaaataattttataattaaaaccatgaaaatattcaattgaaattaattttagctacactattaaggctcaaaatatacaaatttaggccttaatcacaacccccaactagcttattggtagtctctagcaattcaagcgaaagaataataatgtcaacataatatatttcaagtcaaaaaaatctaaaaatgacagaaatattcaagcaaaatgttagt

SEQ ID NO: 241314 - DNA, 782 bp, Cannabis indica
tttattagagatgtgattcaatcaaaaatagtctttgtaaggaagattgacactcatgagaaccctgctgatgctttcacaaagagcttgactagagacaagtttagactttgtcttgacttgctcaacatcaactcaaactagcgtctctcattgagattcacattcattggatattagattcagttctattggttacttttatggcttggattactatgttgttaaagtgtcctaaaccaggcggaaattgtgaggtttagaacacttaaacaaccaatttaactgccttgacagttggtagttatttcggttaagtagttactaacctactgctatatatagatagacattcaacaacagaaaagagagagaaatcaagttggagtgaggataatacaaaaagataaaagagagctattgtgagatgaattctcttcagttttgagggtgttattaggctgttctagttcaagtttttcaacagcttttgagctcttttcttgtaactggtgtgcatcaccattagagtactttgtgtccttgattctctatttgtgtaagttttaatctttgccatttatcaataaagatatcacaactaatagagttgtttctacccggggattaggtccaagttttatccaaaacttgtgactgaacctcgttattttcttgctgtcttttttattttttttttttttttttgattgattttctggtttaatgttctaagcctatttcttcttgcattgtgttcttgttggtgcttgagtgcacaa

SEQ ID NO: 241315 - DNA, 1333 bp, Cannabis indica
agattcatggaggttgttgggtcgacttaatgatctatttgatcttccatggatttgtgatggtgattttaatgagattctttcgatgaatgagaagaagggtggcgctaatcgtagcatgtcggctatgaatgactttcaacaagctctagataaatgttctttggttgatttggggtttgaaggacagtgttttacgtggcttaaaaagagacaaggtggtgcacatatgcaagaaagacttgatcgctatgtttgtaaccaatgatggcatgatttgtttcctttagttaaggtcattaatggggatttccttcattcggatcatagacctattgtggctactcttgagaatattattcggcttcgtttgaatgacaagaagagaagctttcagtttgaaactcattggttgaaagatgatgaattccaagaaattgttcttaggacgtggttgtctcgggatcttcctttggttaatcaagatagcctgattgatatctttggaaagtgtgctgatcagttgggtgcgtggaataagagtaagtttagttcgattcctagattggttagagaaacccagaaacaattggatgacctccttagtgtgtctgcaccgttggttacaatggatgaggtgaagcggttagagttaaatgatttgttatcccgtgaggagtgctattggaaactgagatcacgagcgaattggcttgcacttggggataggaatactaaatactttcacaaaaaggctacgggtaggaagaagaagaatgcaatcgttgagattatgactgaagatggtggcaagttgagtacggaagaggatattgttggggaaattgaactatattttggcaccattttctcatccgcttctcctaatttacaacaggtggaacatggtattagtagtattgaggctaggatttctccggctgagagtgacatgcttgttgctccattaactgctcatgatgtttggggtgcggttaattccattagggccacgaaggctctgggactagatgggtttcatgctatgttcttccataagtactgggctattattggtcctcgtattactgctgtttgtcatgcaattttaaatggagaccaattagttaggaagttcaataagtcaaatgttgtgatgatcctgaaagtcactaaaccaacgattgttaaagagtatcaagctattagtctttgtagtgttatgtataagattgtggctaaagctgcagctttaagattgaaaggaactttgtccccattgagttcattatttcagagtgcttttgtgccgggtagagctattcatgataat

SEQ ID NO: 241316 - DNA, 921 bp, Cannabis indica
agaattttgttaaatatattatatcatattatattatacgataatttattagctttcaaaaataacaaaaaaaagtatataaaataattagtatataaaagtgatagtttgttatattgcatatcaacttattatatttgaaaataatttttaaggttacctaaatgtatttaattataactattataatataattttaaaataactaattaattactaaggtatatacaaataagttttggaggtaaccaaaatatatctcaaattatatgataagataatgaaattttttatgtagttaaaacgcaagaaaatgaaaaaaaaaaatggaaaacgtcacaaaacgttaaagttaattaacgtgacacattaaataaaaataataatattattattataaattagatgtaatatatatatattattgtaaactttcctattatttaaggttaatttttttttttaattatgatggaatttataaatattaaatatattttggttgatttgttaaatagggtattaatttaggggaattacctcatatactatttttttaacgtttttttttttttttctaaatttacggtttgagtttctaaagtggttgcaacgctagttgcaataagggtttctatatataatccgtaaaaatgcaaaaaaaaaaaaaaaaaattaagaagtgtaaaaataaaaaagacccattaatttatttaagtttgtagtgttcctaaaaattgtagtatttggtgtggtatgtccataattgagacgtttaaaatattttttccttttgtcttttttgattgtattgtctttaaattttttgaatcaaattagggttcaaataatttattacatgtaggcaccatatattataagtgcatttggtaatatttttttaattagttttttattttt

SEQ ID NO: 241317 - DNA, 853 bp, Cannabis indica
aaggtttaatgttcggatcaaaatgaggatcaaacctcctaggacagaatcgatctccatgaccaatgaacccacatatgaagcagaaagtgggtacatattcatacttaaaggtggtccatatccatgttccatcttgtttgatcaatttcatacgacgcttcaaaggcttgttaatgtcgattgtcacccgaacacggaggtaatcacgccaaatgccaatgaagttcttcgggtctgacttgataaatgttcccacatagtttccagcgtgtttgacgacccattccgacatgaaaccatactttaaatcatgtaactgaacccacatatcgagttcatgcaacggaaccactctaggatcctcccctcttttcaatcgataaaacacaagcggcattcgattaaacgtccatggacttccatcaataaccgtttgaatatcaatttcatggtaaaattgaaaaagatacctattagtatctaattccttcacatatactcccttccccggctgccaaagcgaggccaaagtatgccgcatagcatcgaaatcaaaagttctatttgtgagaaatttacccactaagcaccatcgatcatcaaacgcttgagcctccccctcctgatcatcagtaatcaggactccttcttcttctccctcaatatccaagtgtgcatattgatccatccagccaccatcttgagaactactcgaagccatagcacgaaaaaacaaagaacaaaagactttcaaaacatgtcactagacaagacttttttagaagtagatataatacctcatgacttagttgttgatgaatagctatttgttgattttgttatattattt

SEQ ID NO: 241318 - DNA, 1498 bp, Cannabis indica
acaaattaattattaaaaaaaataactaaatagaagaatggcacgtgaaaaattaaaaatgtattcaaacacggcttttgagttccactaacactaataacacatatttgtattattagatgtctaggccaggattagatgtttagggaggccaatatactcttcgagatcttaaattatttagtccccatataaaataggattgatattattttggactctgtattttataaaagttacagattaaattctctatcttgtaaaatgacaaattagaccatatattttctaaaatagtacaaaatactagtaccctgagctcaatttgcaataacttttttaatataactaactgggagataatttctagaacgaactgatgcagaaaatgtacacaattttatcataacaactttcgctcgagttattatttacttttattttgacaaaaaatcagtatagggtactattttgtaccattttgaaaaatacagagtttaatttattatttaacaaaacagatggtttaatcggtaacttttgaaaaacagaagattcaaaatagtatttaccctataaaatattacatttttcacgcaactatcgaataagtaaaaattattatcatcaataaaatttaagattcaataatatataatgttataataataaaattttaaatttttgagaaaaaataatcttacatcagttgaatacgatatcattaaaatatattgaatagtaaattaaaataacgatatgattttttatatattgtatatcaaaattataaacttaagaaattaatggatcgcattagaaaatcattgagttcaaattaaattttaaaatcgcctaatattaataataagctacaaaattttaaaattttaacatttcttgagtacaacaaataaattttttggtgtagaattaaaagtttttatcaaataaaatttattaatagaaatgcaagaaaaaaaaaatatattgtacactagactctttatattagtttttcacatttgttttattaggtgtacttttgtttttcattcagaaattgatggacacatactattatattatacagtaattatacatatatattattgatttggaaagaaaaattttgaaaagtcaacacaaacaaaatattaaaatacattagttagatagatatatgaaaagatgtggggggcatggccctgtggagctcaatataactccgcccttgacgatagatagatagacatttgtttggagtgttgtgattaatggggcaatcgatttaaacaaataattcacattatatatatatatatatatatattataaacaaatgtaaatgtgaatatcactttgaatatatagatttgtcaataattcacatttgtttataatatatatgtattataaacaaatgtacatgtgaatatcattttgaatagatttgtcaataattcatatttgtttataatatatatatttaatttgt

SEQ ID NO: 241319 - DNA, 1818 bp, Cannabis indica
cttcctatctccattgtgaaatttattaaagccttgtcgctccttgtacttcttgcaaaatctttgcaagtgtccaggccttccacaaaattaacatttccttgtgtccttctctctggacttagatcttgattgagattgatggtgtttactctttgaactcactttcttgggtgatcttcctcttgttaaatacactttttctttcttggattccctatccaattgtaactcaaaatctttcgacttcagtggggaaagaacatcttctaatgcaataacatccatgccatacttgatggctgccttgacttcttgatatgctattggaagcaatctcagcaaaataatggcctggatttcttcatcaattttgtgatttatattttccaatcctacaataatctcattaaatctttcaaagttatcatctaaagaaagagaagaaatcattctaaaatcgtataaactttatagcaaattaatcttgctagcaattgatagttttaagtataattcttccaatttattccaaactccttttgtcttcttctctatgatgagtttccttcgaacattgtttgatagatacatgatgattatgttatctctctcatttctgcttttttctttggtttctttttttccaataacttctcgtctccgagaaccttggaaacattatggtgcacaaggattcctttcagactttctctccatagagcaaaaagtccccagttctttcaaatttctccaattcaaatctcgccattgttggcgttcaaagtttcttcaagattgcactggaaagaatcttaattctgcgttcttgatcgattacttagctctgatttgtgagaaattatgactaaatgagcaaaatcaaataaataaaactccaaataattaaataattagcaatgacaagattatcaaatcgagaacaataatcgtatgaaaaacagaggctgaacacacgagtttgaaaactctattaagatgagattgagattttgagagagaaaagattgagtggtagaaagagagatgcagagaaaagagagagagattgagtttgggtttgtaagaagaatcttctgtagatgaagaagattcttgggtgtaagtgtgagagttgaaacacttagtgaggactcgacagtgaatcttggctcgactgtactgtacatattcttgctcaatcaataaaggaagattgcggtggtgttctaaaactagagtagagccatagatcacatcttggtgttgatttttttattttcaacatttactgttttctagtttttgatactctgtttgcccctatttttcatacgattgttgttctcaatttaaaatcttgtcattactaattgtttgattgtttaaagttttattgatttgattttgtacatttaatcattattttgcttagaggtaacatgaatacgttgatgtagagttccctttaggtacctcaatatacgcattgtcgcactctgcttaccaaaattttgataataatgacgtggcaaaaataatgacatgtggcacgaggataccgaaactgaattgataaagaatgtgtaaagtcatgactgttggtcatgatcgttactcatgaccggttatcatgaccgttggaagagaagtctgacggtcatctttccccctaacttgagcgaggtgactacccccagaaggacggtggactagcaccctcataaacgggataaacgatgaccacacacatacaagattcaaactagtctaggggatatatactacttccccgacctgaaatgcaatgatctacat

SEQ ID NO: 241320 - DNA, 609 bp, Cannabis indica
atggagtgcgccaagtccacggacaagccacgaacagccggagtctaccaattgaaggaggaggacagtgtgaaagttcaatttgaagctttgaaaaaacaatttgaggctttcaaaactcgagaaagtaaagcacttcaattggatgcaaaagtgaaaaagcaagaaccatgcttcatttgtggagggacatattatcaaccacaagagtgccctactcttagtatgttaaggggaggagatgaggaacaatgtaatgccttaggggattacaagaagccttataatgcctactccaacacatacaatcctggttgccgtaactatcccaatttcaattggaaggatacaagtcaaaatcaagcatctaggagccaatggatgcctgataacaaaagaattctattgagaattccatgaaaattctcgtagaatccaaactagagttcagggcctatttcactcaggtgatagaggaattgaaggacatgaagattcaaataacaaagttaaatgattcttcagtcattcaagagcgtggtaagcttcccgctcagcctctaatcactctaaaagggcaacataggtcatattccatctaagcaccac

SEQ ID NO: 241321 - DNA, 707 bp, Cannabis indica
tgctcttttcttgccattttatagacaaaagttgttaatttcttagtaacaacttcaaaatacacacataagcataaaacactaaaaatttcacaaattaaaagacaaaataagtgaaatgaaacacaaattacataaaaaaaaacaagcttaaaatgatatcaaataactctttactcaagagttatcaattaacctcgcaggactctatgtatagcctaacatttggacaacaagctacctgtgaattgggcccttaatgacccaacaaacttatggaaaatatctagttttgaggggcagtttagtctttcgtatttaataaatttagtatgtaaatatcttaaggtttcattggaaattaggattttagacttcctatataagggccttaactctaacctagaaaacctaaattagtaagcctaatccgtagcctccaaatttctctatatcaagaaccctagtctctctctatctctgctatacgcccctaagggctctctctctctctcttcctctctcacattcctctaaggctatttctctctctcatcagagatctgccaactttatccatgtttagtatccttatagagagttatatcaaatcctacctatagtgatctgaatattattatctctaggtatcgatataaccaaaagggtagtaggttattaccagctaactaagggggccgaacctc

SEQ ID NO: 241322 - DNA, 2603 bp, Cannabis indica
aaatttaaaaataaaagtattagtaaacatttcctaaatatcctttatttatttttttacttttcaaattctattagatataatattattttattttatttatttaaatttttgtgagtaatttacttttcttatctaaaatataagaaaaattgtggcataaatattcaatttatttaatttattgctaataaatattcaaatgtaataaaagcgacatacatacctaattatgcaaaataaacaattggtaacttctttcaaaaaaaaaaacatggaaactattctattaattattcattagaatgacacatgtcaatcaacaattactctccaagttccaactaatacattttatcaatataaattttaaaaagataaaatactaattaatttatttcaaatttttatcaaagataaaagattgcaaaaatttgcttgtcactttaaaacatgtttctatctcttttgttaagcgttcaacaaacttagtagctcattcctttgcgaaagcttctagtttatatcctgaatgtaatttcaatttgggggatgtcccaactgatttgcttccttgtttcgtagcagagcttgaagtttaatataatttgattactttcttcaaaaaaaaaaaaaaaaaacttgttgtatcattgttgtagttgggactacgttaattcaaaattgttattattaccgtatcttgtcattatattcaaagtcattattgtcatcgtcgtatctccctccaccttttatcaatgggttacatgggtcgtatttgaattttattttttaaaacaatatttttctaatactttcaaattcaattttttttactatacacatatatcttaattttttttaaaaaaaaagaagaaaatatctagaaagaaaattaagattttctctctctctctgcgttcctcgcagttctcttggaactggtgcaatggcgaaaacgaggtccaagatggtgggaaagtcgaaaatctccaatagaaaacctaaaaagaaagggccgaattcatctgctgatattctgaagaccaaatcaatggaagaaattcttggagttgaaccagtggagttttcggatgaggaaaatgatcaaacaggggggaatctggtgcagccgttatctccagattcatcattgcgattgattaaaagacaagatgagattgctgctgattttggttatttcctggctgcaaacagggaatgccagaattcaatctcgaagggagttcgtactactcctccgattctgagagctgaaccagtaatgagaagtttagaaaaggagtttgttcagtcgaagaaggagaagaaggtgaagattactatggatgatattgaagaggaggtgatgtattggcaatcagctatagtgtgctatgtccttggggctaatccaccattgtcggttctggaaggcttcgcacgaaggatttggggggacaaggtggacaagataggtatgatttcatatggtatttttctaattcgttttaccagtattaaagatagggatgagattctagctggtggatatatcttctttaacaaaaggcctgtcattatgaaggcttgggatcctaatgttaatcttaagaaagaagatattagaacaatacccatttggattcaattggaggatttggagctcaagtattgggggaagaaatcattgtttaagatagtaggtcaattaggaaagccaataatggtggatgaggttacaagggaaagggataagcttctttttccccgaattctcatagaagtgtcactagaccaagagtaccctgggttgatctactttgaaaatgaatatggggaagatatatctgtgatggttaaatatgaatggaagcccattatttgcaaacattgcaaaggaatggggcattccacagaggagtgtagaaggagggaaacaaagaaacaggaatgggttgttaagggcaaacaaaagcaaggaaatgatgatatgaagaatgtagttgatgaagagggctatagacaggttgtgaatggttggaagcctaaagagagagtaattcctgctgatccatcatcctcaaatccttttggtgtattgcagaatgatatagtccaaaacctccaggaatttgaagttcatgaatatgaagaaaggctagaagaggttatcacgggaggagggggagaacctcctctttgcaatggataaaattctaagttggaacgtccggggaatcaacaatcaacacaagcaacacgaagttaagcaatttattgcaaaaaataatgttggtttggttggtctcctcgagacaagagtgaaggctccaagccttggagctttatatgttcgaatgttttctaattggtgttttacggcgaataatgcgtggcataagggtgggcgtatagcagtggcttggaacccgtgagttttatggtggatattttgagggttctagtcaattaatacatttgaatgttactactatggacaaaagaaacaagtttcttgtcacttttgtttatggttttaataaagaggaagagagaagaagtctttggaatgagctagatgagctgaaaacaaatga

SEQ ID NO: 241323 - DNA, 1465 bp, Cannabis indica
ttttctcttatgaattttttcccccctttttcagtctaacttgccttctatttataattacatatgtggtagttaattacattgttgactgatattttacaacaagtatcccctaaaatcatgggatttaatcacattccacataaaataagtgcggttaatatatgaaaaatcacacaattgtgattggtccgcttttactgggtcaatataaacatgtattaagaacgttgcaaatcgtatcattttggatcaactcgctgggaatatagcaacaacaaccttggtagcaagctagagctttcgccacatctttccgaggttgataatgtgaacctcgtcatttatgctattgaagatataacgatctatctaacaattgcagttcttggcgacaaggtgaacttcagcagccaacatcatttgaatgtcagcttgtatttgagacaactgacttgaaagagttgtgaatctcactaaaagatgtctagagctgattagtgaagataccacgagcgtgccttcctatagcgagatggatgcctagctattaattgtatgggtttacctgactattacacttagtttgtataccgtgtatcatacgctaagtgtcttatcagtcattatatcttgtattctaatgcgtagcgagattgatgccttgccttgtacatctgaagttgtatggtttttcgttaatgcatgaggcaatagtttgtgtatctttatctcgcctaagactattcagtcaaatgagttgtaaatatactcaatcaattttgcttttaacgagttattccatttcaaatataattattattacatgcgttgactcgtattcttcccagtttgacacgtgttctcttctgatgtgctagtcaaattttgggtataatagtatttataccgagcttggagagagagaaaaagagagagggagatggacgggaggtggtcgtggtccgacgtatgagagagaggtgagagggagactgatgagaggtccgacatatgcgacagagaggagggggagcccgacgggaggaggagtgggtggtgatcaatgatggagcgagagacgagaagaaaaggagatcgaaagagggaggaagacggcgagagaggagggcgatggtgcggaggtgtgggtggggttttggagaattaagatttttcgtttagggtgtgggaaatggagaagaaataggtgggcatgtgggaaatagaaaacaagtatgtgggcacgtggaaaatgtggcgagaagtaggtaacaattttttattggacccttatacccaacggtttaaaactgttgcctatagtataggcgacggttttaaaacgtcaagtataagggcccaataaatttacgaattccaattaaaatttttgcctatcctttaatgactattataaaccgtcgaaaatactaatttttctcgtacgattttaaacagttac

SEQ ID NO: 241324 - DNA, 708 bp, Cannabis indica
ctcggtaatattattaatctagtaaaaacataagttagggttattaccctaagattttatatgattttgttaatattgagtacacgcatgtatgttaagagttatgtgtacaagacataactgggttagacctggtatatatcaccaggataaacaacataaagaatgtaatgtatggattacgtatatatatgaataggcttatgcgagcaaggcataataaagttaggctcggtaacaaaaaccaaggtaaaccctactaaggacttattgtatatagacatgtgagagcaacacgtaggtctatgccacgtagacatagataggcatgtgagtgtaacatgcaggtctatagcaaatagacaaatagtgtagtggcactattattgatgtgttatacatattgagattaagggttacgttcaaggcataatcaagttggactcagtaactaaaaccgagattaactattctaaggtcttattgtatttagacatgtgagagcaacacgtggatctacaccacgtagacataaatacacgtgtgagcgcaacacgtaggtctacgccacgtatacatatataggcatgtgagcgcaacatgcaggtttgtgtcacatgaaaaaatatgaatggcattactgtttatatagtaagataaacatgttattgatattttatactgtcttactaggcttgtctcacaggt

SEQ ID NO: 241325 - DNA, 816 bp, Cannabis indica
ccttggattggccaagacctagttagccataccgcgaaagaaggtatgttcaaggccagccagccatggtaagataactggccatggccagccagccctaccctaggcagttgttcatggttggccagccttatgctgggcaatatttggtcgcccgttctcccctgattggctagtgtaatctgtgtattgacagggggtagatcataccaattgctagagtttggttgatctaactgtctaaagttattgtattcacttttcgagttgttgttatattaggtgtatctacccattcacggacctagccgtttaaagattgacctttggaagacttgctcccgaatgttctggggaggaagttcaccttgttggccgaccagaggtgtaccactaaggggctagccagccaaaggttggccaagtaggggtgttgttgtgctagaattctctgaccagtcccccaagccgctggttaccagagtttggttactcctgccaccggatctgtgtggcatgacttattcatcttccggcagggagaggtcagtcttggttcctgcaaaatttggttagactgtttgtctgtagactctactcgatctatcgattagtctcccttaaagaggatctctgatcacattcttattttgttttgttttagtaaattataataaggtatctaattagtagtcaatcttctcataaataatattcctaaattctcaattatgtagttgttgttagtcttaaatactccaatttcctaataatagtttttttttttggtaagttcctaataatagtttagtttat

SEQ ID NO: 241326 - DNA, 986 bp, Cannabis indica
tcaatgaataacaattatttaataaaaggttaaattcctctcatttgagccttgtgcgagaggtaaggggtcattagtagtgggttgacatactagacccaaccctccctctcatgaataatttcaattatgaaggcctatttgccttatttaaatgattgtattaagcttattatactagtttaatctaattaaaattgaattagcaacataattaattttgaaataaataaattaatttttcattgaaatattctaaattaatttagaaaaacacacttactttaaagaaaagattctaaatagttattgcaagtaacaaatttatattttctaatatttaattatgtagaaatatatatttaagttgaaaattaatttgttaattaattttagaccatcttaaattaggatatttttcgtagaacttaaattagaattaataattaagttaattttatacaagatacttaattatttctttttattttaataattttaattgaataagaaaattatatttaagttagagattttttattttcagattaacttaaattagaataattttcagagtatattttattttattttataatcatttcccacataaaattttaaaatgcatttattttaaatgtagatattttgaaatttttaattttgaaaacttgattaaagttgaaaattaatttgttaattaattttagatcaactcaaatcaagtaattttcgttaatgattatttaaattaatagactaaaatatattatattttaattaaaaaattaattaattaatttatgaattatctagatagatattttttaggtagacttttggtattgttctagagatatttaattaaatcaaaaattaatatttaagttgatttattctagacacttaaatatttgatatttttcttaagatatttaatcaaatagaaaaattatatttgtggtaaaaattatttatttaatttt

SEQ ID NO: 241327 - DNA, 1383 bp, Cannabis indica
tgggattcatagtcaacgtgaggggcattaaagcaaaccctgagaaaataatggctttgatagatatgccatcaccaaccaagcctaaggaagtccaagctttaacaggaagaatgaatgcacttaacagattcatttcgaagtcaactgataagtccttgccatttttcaatatattgcgaggtaacaagaaatttgaatggacagaggaatgcgaggaggcctttcaaaacattaaaaggcatttggcggggcctctagttttggcaaaaccagtaatctgtttactatgtcagtaaaaggcatttggcgactcctctatctaacagtctcaaaagacgcgattggtgcagcaatagtgcaagaagagggaaagcgacaacaacctatttactatgtcagtaaaaggttactgggggcaaaatcgaggtatccccctcttgaaaaacttgccttatgcctaatcctcccatcttgcaaattacagccttacttccaggcacacccaataaaagtgagaactgattaaccgttgagacaagtttaatcaaaaccagacgcttctggaagattgataaaatggtcaattgaactggggcagtttgacataacttattaccctctaacatccatcaacggccaagctttggcaaatttattaatgaaaggaataactccagaagaaaattcacttgttcagccgcggacacttagaagttattcgtggatggtgcatccaatgagcagggctcgggtgcaggggtaatattaatcttgccagaaggctttaagtttcattatgctttgagattccaatttgacgcatcaaacaacgaggctaagtaccaagccttgatcgctggtttgagaatagtcgaaacgttgaaggtcaagaatctcacatgtcatagtgattcgtaactgattgtaaatcaggttcttgaggaatactaggctaagggcctgaaaatgggtaagtatctagacaaggttcgaaagaacttggaaagattcgattattttaaaatcgagcaaatcccaagagaacagaactctaatactgatgccttagcaaaactggcctcgcagaattacttggatgaaataaacttggttccagtagagatgttaaatgagccaagtataagttaaaaggaagacgccgagatgatagatagctcacctacatggatgactcctatagtcaactatctactcgtcgagcaacttccaactgacaaaaatgaggcgcaaaaactcttttattctgtacctcgctacacaatagtcaaaggcaaactataaagaagaggctattcaatgcctctactgcgatgtgtttttcctgcagaagcaagcaaaatcattagggaaattcatgaa

SEQ ID NO: 241328 - DNA, 852 bp, Cannabis indica
aaataatttccaacagtatctccctcctacagcagatacaacaacaactaaaccagaaattctctctcgaaaccttaggaaatctcaagtacttccttggttttgagatagctcgagcaaaggacgctttagttctcacacaacgaaaatacacttcgaccctccttgaagacaatggtctctctggaagcaaaccaacaaagactcctatggacccgaaagtcaagcttgatgatgaagccagtactcttctcaccaacccctctcaatatcgtcaacttgttggaaagtttctatatcttacgctctctcgacccgacatcacatatgctgtgaacactttaagccaattcatgacaactccgagaaccacacacatgcaagctactactcatcttttgagatacttaaaaggaaatcctgggcagggcctaatacactcaaccaactcttcattacaccccaggggcttctctgactccgattgggctgcctgcccaactacaagacgttccactacaggtttttgtatttttcttggggattgcctcatttcctggcgcaccaaaaagcaaccaactatctcccgcagttcagcagaagcagagtaccgtgctctcgctgctaccagcagtgaaattacatggttacaataccttctccaagactttcagattcaacaagattaacccgcattcatatattgcgataaccaatcggccatacacattgcaaacaatccgacttttcacgaaagaacaaaacacatattgttggattgtcatttcattcgtgacaaaatcaaggaatccaaaatcagactaatcctagttaataccacacaacaactag

SEQ ID NO: 241329 - DNA, 1124 bp, Cannabis indica
acatgccattaaagaccaaagcaaagctcaaagttgcataaagtcatcacaacccaaccaaaccagttgcttggagctaaaattaactcaaatcaaacttagatttcgaaccttaacacccaccaataccaaaaatcacatacacaaagtaatttcaaagttttaaaaacacaagtgtatggtaggattaccttagctggaatctcacttgaattccttgctgaaaacaacaaagatcaacagcaatctcccttgttctagctggtttcgaagagagagggaaggaaagagagagcttgttcttgaatttttggctttttcttatttttctacaaatgaaatgagattgactaattaatctcttgctgaatatattagttgctaggtgtcatataattgggcagccacctaactctcccctttagcaaatgactaaaatgcttttagcttaaaactagggtattttcaagattaggaataaaatggtcaaattccataaccctgcttcaccccggtattttattttcttcaatatatatcccactaagaaataaggttctaaacttacccatgtgatcaaactagctatccttcgcataatccattgtcgctgagcaaaaattacaaaaataatatatttcacatataagtcagataatagccctagagtttaataaaattttcgaaattgagaagttataactctaatgcccatttctaacaatgggggccgcaagtaattaaattcataaataattataaaaataatagaaattagtgctaattgcctttactaaaccaatttaataaagcggtcattacaattatccccccatttaaaggatttcgtcctcaaaatctaacctgaatagctctggatgttaagtcctcatatcagactccaactcccaggtggcttcctccaccttgctatttctttagaccactttcaccaaagaaatggtcttgtttcgaagaactttctcctttctatctagattctgaataggctgctcttcataggatgagtctaacagcagttcaaggggttcataactcaagatgtgagtcgggtctgaaacatatttcctcaacattgaaatatggaatacatcatggacaac

SEQ ID NO: 241330 - DNA, 1423 bp, Cannabis indica
ttatgggctggtgattaattggaatgagtttctaatgtaacatttttcttttcctttttatgttgaactttggctatttgcagtatatattatttataagcagttctctgtaatgctaaatgcctataaaactatagaattatgtattatctcttagattctgctgtttcttctatttaataatatgatactagctcttaagtaaagtagggtgctttttagggagcatttgtttttttaagatccaagcctctgaatctaattgtacatttgaataataagatattacatttgaatttgaatacaacattatttagaatgttttttttccacatctgaattatttaatatttttaattatataatattaacaagtttatttaattgtatttaatttaaaaagtattataaaaataattcataaaaaatacacaaataatatattaattataaaaaaattcaagtagtaattgttttctctgcattagttctagtgcaacattattcttcaaattattcacgatttgagcattctgaggaactaggtccatttgtttccatctgtctaataaataaataatattttttaatgttgtatatatgagagtactcttaaaatattcagaatttaactttatttttggcattgctaacgattcagatttttttaaaaaatttataagtgattttaaataactataatgtatacgatcatgaaaaaaattaaattaaaaatttcttttgaatgccgaaacagataaagggttttctgaaacattccttcagaagagtatactatagacttatccaaacaaatatacacataatattatatttatatatacataatatcaaatcatagcagaatcatttttaaattatatatatgacaaagacatgagataaaactatgtttttaaacaaaaacaaaaatgaatatacattaacatttgatgtttgagttgattgaagttgcatagagacagcaaaaaagttatagttgagaaaaaataaataaaaaagagcttgatatatatgtcttaaaaagattcagagtctaatttacctcttctttagtaagaggtattaagggggaataagtggttagaaaaaaaaaacaaatgatcttaatgatgataaatctggtccaatcagattcaccccttcattaagtgcaaacaaatgcatccttagtttaaatatttgattatggacagagaggatttgagttttgaacgtgtgtattattacttctttttgcttttctaccatgtgaagaatggccatgcttacactcttgttttgtataataactgaagagagtttgatctttttgttctaaccttgtttttttcaaacgttaatgtatttttcacttgtaaattgatgttaagttgaacaagaacaagctgcaattcacttg

SEQ ID NO: 241331 - DNA, 1248 bp, Cannabis indica
tgattgaaactttcgattgatgctctaccgcgcaaccatgcaacaatcaccctgcaaccatcgtctgattgtgtaagtgatgatagtgtaagtggtattttggtaattaaaatcccataaaaggtacatatattgtctttaccttaaggaggtattttgtaaataaaatttcaatttatattttctatgtaataattcctttatattttctcttatttaattaaggagaaaaatatatttaagttgaaaattaatttgttaattaattttagaccaacttaaataaggatatttttcttagaacttaaatagaattaataattgagtttattttattcaaaatacttaattattatttctacttctagatatatttaattaattataaaatatatttaagttgaaaattaaattaattaattttggaacaacttagattagaatatttttttagttattaaattagaattgataattaagttgattttattctagatacttaattaagtacgtactggccaccacaagctcctccgaattgggagcagaggtttgcggagatgcaagatcggatccgccaataagatgaagaaattttgagattaaggcagcagggtcttcctgccgtgcctccacagcaagctcaggccgttgtagctccagcggtgccaacagaataacctactgctcgtaattgtatggagccgttatatgaaagatttcgtaagcaagcacctccagtgtttctaggaggtccagatgtgatgaaggctgagtagtggctcacagtgattgagcgaattttgaatttatgggtgttgttggtaatgaccgggtgacctgcgccgcatttcagttccaggaagacgccctagtgtggtgggaatcggtgtccctcacccgggatgtcactgttatgacctgggaagaattccgagagttattcaaccccaagtatcacaatgaagctgtccgcagtgctaagcgaaaagaattcactgagttagtacaaaccgaggggatgtcagttactgaatatatcacaaagttcgaccgtttggctaagctcgtcgtgggtatcgtgccaacatattttagtaagaaagaaaagtacctggccagtttgaatgtggagattagacatgatttggtgattactaccaacgaagcaacgtcatatgcagaaatggttgagaaagccctgcgagtcgagggtgtagtaaaatccttcaggagctccgagtgact

SEQ ID NO: 241332 - DNA, 750 bp, Cannabis indica
actatttgtcttataaaacaagcgaaacttgatactttataaagcatccttaaccctcattatcagcgagtttctaatgtcactatcattgctttattaagcaactaataagtaagaaacctaacaacggttttaaatgagagtaataactctttcttaataacggtaattaccgtatcttatttttgacatgttaagcgatacaattgactttttttacctcaagtccaaagtcaagtgtgcgagccgacctgagtggaataatgctcgacgatcttgggccctatgtcatgacaatggaaatttggtaaataatctaatcaatctcgaaccaagacctaaactcagaattggatgaacccctatcactaaatcaaaaaaatctagctgcatgaaacaccccaaaacggtccatagttttctgaaaatggtccactgtttctctggattctgccctataaaaacagtaagctatttttcctacaaaacgacccaaacttgggtttttcacatcaaacccctccaaaacttctccaaacctattgaaactttctagaacattttatcaacataaaattaacatgaccaaacattcaaaacacaaaaatacactaaaattgtaaactcaccattgttgagtgagtttttagtccttgaactcaactcacccaactcaaagcatagcagccctagaaacatgaaattaacacttaaataaccttgaagtaaacttaaaatcatgctctaaac

SEQ ID NO: 241333 - DNA, 987 bp, Cannabis indica
agtgaaatcaggcacgatttctctgattggttacaagtagctaatcgaactactcaggatgtcaactctgggaagaagatttctcccccgattctgcgttctggtattcttcaaaatctaaatactagttttgataactctgttcagcaacctgaggtaagatctgcaactttaaaagttaaaataaattttgctgatatagaggatgaggtgaattattggcagccgtctctggtttgttatgtaattggggctaatcccccaatttctattcttgagggctttgctaagaggctatggaaggatatggtagtgaaggtgggactgcttgctaaaggaatattcataatccggtttcagaacttggaacaacgagatagggtgctgcaacaaggttatgtgttctttgataggaaacctatggttctgaaaccatggaaccctattgatgactttacaaaggaagaagtgacttcagttccaacctgggtgcaattgaaaggcttaactatcaaatattggggagagacatctcttttcaaaatagtggcacaaattggggagcctttgcaggtggatggaataacaaagaatagagatcgattgcaatatccgagggtactaattcaggttagtttggcacaaacttttcctagtaccatatctttcattgatgaacatgatcatgaggtggaattagaagttaaatatgaatggattactctagtttgttataattgctctgggattgggcatagcaccgatgcttgtaggaaggaggagagtaagaatgaccaagggaaacaagtttgggttccaaagaaacaacaagctactcaacaggttgagaaagatgcagagggatttcaaaaggttatgaaaggcaaaaaagtgagtatgaagagcacaagtgagcaggaaccagggagaactgaagtttgcaacagatttcagcagttggacagtgagaatgagcaaggagaagtt

SEQ ID NO: 241334 - DNA, 648 bp, Cannabis indica
agatccacggggttttttatggggtggagattgtgatttcgtggtcatatccagccaccgtggcgggattcgaccgtttgcctagtcattcacctgaaccgagagagagaaacaaaaagaaagagaaacgtgtcagagagaaagtgtgagctagggacaaggatcatgattttttatgatcatatttgatcatcgtggccgagattcaatcgtataactggtcgtccgctgaccttccgcctggaccgagagagagggggaggcaactgggatagatgagatgagctagggatttttgagttataaatatttgtatttgtaattttattatttatcttttttaaaaaaatatttttatattttaaaatgatttggaccacttatatactgtcattatacacttgtgtatacatcagtagtacacgttggactaccattttaacggaagtataaatagcataacaaaagtgaggggtcaagtgtcacaacatattagttcaaatgattttgccggcaatatcctttttcatttttagggaacaactaaattaggatgcaactttaattctgaaccgccaatttcatattccgttgatagatcacaatctcaaaatttatataacacttttttaaccatgaaagaaagat

SEQ ID NO: 241335 - DNA, 544 bp, Cannabis indica
tgttcaaaataaactttacaactatgtcccacatcgactacaaaataagcctaagttttcctgagaccaaactctccaggtcgcaccatcttgacatgtacaatcatccttgagctccaggctcattgctgctcagccttagcttttcctttacctacacatgcaagcaataactgtgagtcaataagctcagtaagaaaagtatataacatacaatatattacttacttgtatttaggcgcccatacacctatccacaaggcttaatagatgattaagaacgttcttaacgaatgtacgacctctgtaccacatgcactacataccgttattttactagtatttgtaggatttgaattgtacttcgagtgtaacgccttgatgcatatgctctacagtgatttttcaaatgacatactaccttgttaatcaagggttttcttcaaaaattgtgtcaaatcaaaactttgaataaaattaataaactatgctcattatatggcattaaaataataaaaaaatcaacttaaaatagctacaaagg

SEQ ID NO: 241336 - DNA, 1649 bp, Cannabis indica
ttttttttcatatttttttcaataatattaaatacttaaataaaaaaataatcacaattttaaacaatgataactttttaggttcatttttttaagtaatattataaatcttaaataaaaaatcttctatttaaattaatttaatacatcatcattatcatttataataatgatattatcttacaatttaaattaattttgttttcattatcatttattaatactcttcattctctttatttggtatcattattttttatatatataaatttatcaattgttatatttttattttcaagatagagacgattacaagtgagatatggtgatgacaatgactttaaatatagtgacgagtgagatacgatgatgacaataattttaaaattgatgagtttcctatagatttatcaatcattattttttttcccaattctatttttatatatgtaaatttaatcacactaaaataatatttatctaattactaaaactctatcatgtcccgatttcaatttaatttatgccaaagatatattttgaagacggactttatagaaatatatgtttacaataaattaattaataattataatttattgagtttaaaataattagaaaaatcaactctaaaatattaatttaattttcttgtattattaagagttaaaaaataaaatttgaaataggtactcactatttaaaaaattatacaaaaatgttaaaatttaaaatttgatatagttttataacttaattatcattaaatagaatacaaccgcacgcgaagcgcggtttgtttcctaatttaaaaatagaattgaaaactttcaatcgttaactctctgttagttagttttatttaaaaaaaaacaattaaaaaaaagttaaaccaataaaaatagaatagatatataaaaataaaggaaaatataagagcgttgatgtggcatattctccttccatgtctctatttttttctattttgtaatgttttctaattttttttctattgaataataagaaaaaaagtaatgtaacatccccatttttaattttttataatctattggtatttttttaaaactattagtattcttatttatatactagtatattgttacgtgcaatgcacgtatgctatgttttatattaagtattatattatgagttcggaaggaaataaatgaatcaaaaataaataatatttaatttaaagagatttgaataataaatttaaattaaatttttatgtccagtaaaaacatattggaaacaataaggttataatatatgttgcatttgttccagttcttaaaataataacagcaagaacatttgacctgaaaaaacaaatattacaaaattaagaataagcaaatattatttaattttttgggtttaatcgtaaatattatttaattttttgggtttaattattgggtttatttttttacattttgaatttagccgtgtaaaaaaatttcaaaaatagtaggatttgttagagagatatgtgggtaagatatttttttaatttaaaaaaaaaattgtttaattttttcggtttaattattgggtttatttatttgttaacgtttaacgttaacagtctgttaagttaatcgtgtaaggctaaacaaccaaag

SEQ ID NO: 241337 - DNA, 1471 bp, Cannabis indica
aatttatcattttacaaaataaacattcaaatccgtaacttctataaaacagtttctctaaaatagtatttggaattctacaatgtatccccttaaaagggatacactgatacactttctatttgtttcggcatctaaaagaagttgttagtctaatttttttaatatatttgtgtacgttatagttatttaggatatcctacaaagttttaagaaattcgaaataatttataatgtagaaaagtgttcaaacagtatattatacacgcgtatataataaaatagtcacgcattcaatatactatttgaaccctgtttcagtatattaaatttttcaaacttttacaaaatgtcttaaataactataacgtacatgatcatgagaaaagatttaattaaaaaattacttaaaaactaaaccaaataaaaaaaaaaaaatatatatattctgtaaaagggtgcatataaaattattgacttttattagataagtcaaagaaaaagtgtccaatcatctaaattgcttgtgaaatggacatttgtcaatagtttttcggttttttaaaagggtttttttaatattatacctaaaaataattttatttataaaaatacttttaagagaattatttccacaaataccgattgtcacgtcagcatacataccgaaattaaaaataattaccgaaaaatagaaaaaattggaaaattttcattttttgagagttttgaaaaagcaaccatttagttacttttgatgtaaataagatatcaattgattactattctattaaaaatattattttaaaattttacacatatatataaataataaaataattactttaatatgtgagaaacatatatttttttgtctctgaaaaaggatgactaatattaaaagtaactttttttgtttcttatttatatttttaagctatactatgttattttattgtttaagatattttgaggttactttttttttttaatgtaaatgtttcagatactattcaatttatttataagttattttataaacttatttatttataaattattttataaactaatttaagtttgaaaatagattatttattagctaattaattctaaaagaaactaaaatgttacttttatttttgttatttttttcggtaatggcaaaaaatatacacttcttacatatataaatgattatcttaaagagtaggttataattgtgtaatttttaatatcaaataattattggtctagttggaaaaatattttaaacttttgaaagaaataaaagtaaagagagaaagaagtgtgtaaatgtaaaatgaaaggaaagaaaaaaaaattaaatactgactagaatttagataatttgacacaattttctaaatgtaattatttcatttttaaaaaataaataaataaataaaatgaaaaagatatttagataccatttctttttttttttttt

SEQ ID NO: 241338 - DNA, 1253 bp, Cannabis indica
agtgggaggattttaaaattccagtctattattatttggataacactagtgatagcctaatatgatatgttcaagataggaactttaaaataaaacaaagaaaagttaatctaaccatttacatggatagtaataacttatcagaagaataaggataagataagaatttttacaatggctattggaatgactcaagcgaaattcctagtccttataaaatattttatggtatctatagtgattacttaatcttaagcaagtattttatagtcatgttaatactagaatactatgttgatgtcttagtctagaaggaacttaatgttttagactaagataaaatatcacaacaagaggtctctaagtaccaatagtaagaggttaaatgtacacttgtgtatgaatttaaccagacttctactgttgagtgggagccatctaagatataatcaaacaaggaacattgggagacaatcaacaaagaatctctgaaagtgacctttatgttagatgataggggtgtatattagaatccttatatctacactaactcagaacttaatatcagagatggaggttactccgaggtggaagaattattttagaagagtgtaaaaatgcatctataataatttagttccaccagtaaaactatgtaacttagtttctttgaaaagcattggatagaattagagatttgtcttctgttcattcagatacacttaataagcagtatagaattcaatattcctagaggagtaatacgtatagaaaagtagggctaagcattgatcggtttggtcagttttttccctcataaaactttaactttcggtttttcggtctggattggttcaatccaaaatcgacacatcaatttaaaaaccatcctgaaactgaccaaattgaaccgcggttcagtcggttcaaactgccaaaactgaattttgttttgctataaaatatagtccaatttattatataaacccattattcttaaatctaaagctacaatcatatagacactttctttaaaaaaatgctacaaccatacaaattatttgttcaaagaccaattataaacacatgattctacatattataagtgcaaccatataaattaaaatatgtagttaaaaatctaaagtctaaaacacaaatcaaatataagtccacattaaatacattattccacaaccaaaaaaaaaatgaaatacattaaagcaattgtagaaaatagagtccaatccaac

SEQ ID NO: 241339 - DNA, 626 bp, Cannabis indica
atactcacaataagtgtgcaaggaattcctataaagtccaaattatcatatgacctgccttgaaaaggactcagcaaagcttatgaagaaaaaagaagataagagttaataaggaactatcaagctacactaaaataatttctacttgaaaattataagattggaactaatatttaaagtgtattaatctaaaagatatctacaaatataaattggcatagtacttacgtggttaccgaaaagattaataaaaataatagtaatattcttaactgaaagcgcatcattattaagtaaatatgtttcaagagcaattaactaaagataaaatttcattgtaaacaacattctttgtacaaccatcatgaattgtattatcagaaattggtttcacaagaattttgatagcatcacttgtttttctctaaataaagcaacatataattgtccgtgtgaaaaatactggttcataaagatatagtccgacaaactgtaaagtttgtccttgagatttatttattgtcattgcaaaacatggtcggatcggaaattgaattcttttaaatggaaatgaacctttgtcattttctagtggcacaaaaagaattctgggtaagaaaactttt

SEQ ID NO: 241340 - DNA, 1869 bp, Cannabis indica
aataaatctatgtaatatgttaaaatagaatagtaaaaattataaataataattattaaataatattttcttaatacattcaatttttattttttaaaaataagacaataaaattaaccatctcgatattttaagatagatgacggtcgataagagttggatatttttacgcgatcgcactgatcttgcttactggagaggtatcttagccttctctgaaatggctgaacaacacaagggctctgacggtaaaatcagatgtccttgtgtgaaatgcgtaaacaacaaacgacacactctagtggatgtgcatggacacatattgcgttgggggttttcaaactagttatgagcagtggattttccatggagaagaggaagctaatgtagctgatgtggtagtcgatgagaatgatatagatgagatgcgtgatgtcatcaatgatgcctttactccggcatgtgatgataatacacctagcgttgacggaaatcgtatgggcgagtattacgatgagttgtttaaagatattgaagcagagttgtatccaggttgcaattggatatcgtctctcaacttcttagctaagttgatgcatttgaaaattgttggtggaatatcgaacaacatttttgatcaactattgagtttgttgaaatttgcatttccgaaagggaatacgattcctgaaacccactatgaagctaaaaaaaagctcagcaaattgggtttaggatatcaatccatccatgtgtgttatcatgattgctgtttgttttacaaagagcatgctttaaaaaatttatgtccggtttgtggaactagcagatggactaatcccaattctcaaggacaaaaagtcccatgtaaggtgatgcgttattttccattgactcctcgcttaaaaagaatgtacagctcaaggcatacagcgaaagagatgatatggcatcatactgggcgatcgaaagaagttggggttatgcgtcaccctgtggatgggtctgcatggaaagagtttgacgctagatatcctgattttgcgagagaccctagaaatgttcgtttaggattggctgctgatggatttaatccatttggaaatttgagtcaatcatacagcatgtggcctgttgtgctcgcaaactacaatcttcccccatggctttgtatgaaagataataatttcatattgagtagtcttattccggggtcaagatcaccaggtaaggacatcgatgtatttcttaggccattggtagacgagttgaaagagttgtggagtaatggggttcaaacaagagatggcaatacgaatactatgttcaacatgagagcggcccttttgtggacagtgaacgatttccctgctcgtagtagtttgtctggatggagtggtcaggggtataaagcttgtcctacgtgcaatgaagatacatcttccatccgtgttattgggaagacatcttatgttggtcatagacgatttttaccccataatcatgagatgaggcgggacttggactttgatggtaaagttgaggaaagacgtgccccgagaaagtttacgtgcaagcacattttttttttgtagtattactatcaaattgacgagaatcctaatgctgaaaattttttgagctgtcttgacaccgagtgcgctaatagatacagaacaaagaaaaggccacacgttcaattcaaacgtttttattcaaaacctgaggattgcgaggaagcgctaaaaacaccatccaattgatatgactgcgggaacaatcggaaaaaaataagtgtgaattttttacttagcccagcttttcttgcccgatcagaacaaacaagataaatcgaggaatatgaaacta

SEQ ID NO: 241341 - DNA, 1254 bp, Cannabis indica
taatttatttggctgagatgtatcaaatttaaacagccatttttttcttttttttttcttctgcaggacacttggcgtggcttgaatggaggaggggctgacggaaagcttgcgtggcgcgagctggttggaggggaggctgacgagctgggcccgcgtgaaatgctggagcagcaagtgtggcaggcgccactttcttctggtcgggagtgaggagcacgcgcgcatgggagcccttcgatcagtcaacgaacggtgtggatgggctgttgactttgaccgagagtgggcttcataaaggctgatctgatttccttttctaaaattatgcttttaacccatttctttaagtttttcttcattttaatcccaatctttttctaccaaatacacctaaaaatacataaaattaattagaaaactaaaataaaattaaaaataaatactacataacatattataataaaataattataaaaacacacaaaaacatataaaattacaataaagctaataaattcaaaaataattaaaaacttactaaattaattaaaaacttaagaactaaaccaatttttagttaaaaaaaatgtgaaaaataactctaatttctagagttatcatttaggacattccttattcaagtctaaaaagtcgatacaagtcctccaagtgtcgtttggtgttgggacaagaactagatttgaaatccacaagggataaaaggactcgcgtataaagtcattggtcaacaatttgtcaacctcttctttaagtgccccttgtctctcggagtctaatggtcgtcgtttttgtcttttcactgggtagctagggtcaatatttaaatgatgacaaattactttagagtctatccatatcatatctgagtggctctaggcaaattgatcttggtttgcttcaaaaaattgattaattgctattttagtttttcgtccaaattcttcccattgtatctacattttgtgagattatttggatctaaaataacctcttccagctcttcaataggtttgagctgattattttcgtcttggattcatgcatctagatcttcatcttccttctcgccttcttttgttatgactaccatcaattaatgtttggctcttctattttaaagttctgtgcaataacatattatatattttaaatttgtggtgtggatctaattaattagttttaaaaattataattattttgtttttctcataaatgaatacatcatataaa

SEQ ID NO: 241342 - DNA, 936 bp, Cannabis indica
ccccaaattgtccaaagccttttattaagggaggttaatcaacccaactttaaagaattttaggaaaatgttgctgactgttgtattcggtttagtgcagaggagttctatttgatctctagtttggaacgctttggtgattgtaataaaatgttatttagccaaggatcaaaacatttggtcagatatatactttcttggaactaaaaccattgaccataagtctattgaagatgtgtttttgggaactaggtggggcaataatgattctcttggtttgaagttgactgttctgtatttcatacattgttttcttttaagtaacaaacctaagaaggaagtccataagttagaattagatattattgatagtggtcggtgggatgaatattgttggggtaaggagtcatttgagttgacaatagattcattcaagggcaaaattgatcatgggatcaagatgaaaaatcagaaggagaaaaatagaggtgagtcttatgatggctggtgttatcccaatttttgcccacctaacgtggcatgtctacgtggccaatatcattgccaagtgggaatacagctcatcaacaagaaggccaagccatctacttagcacttcccaacgaaggttccgagtactcaagcgggactagaaagtgacgaaccagctaccttaagagggctagctggccctatggctagcataggccgaccatcttctggacatcatatggccgaccagcatgcactttgtaggtgcatggctagccagcctttagcctgataggattttgaagtgcaaccttcatccgtggacagcaagccagatcatgaactgggccttaacaacccacgaaaatagaagaaaaatatcagcaacttccttatttttgagaggcaatttagtcaattgtttttttattaatttattatgta

SEQ ID NO: 241343 - DNA, 1167 bp, Cannabis indica
aaataaaagtaataaagaaaacatatatttattattaaagaaactacaaattaattaaattttagataaatattttcataaatttaatttgatatattttctgttaaaataaattttttatatttaattttatctttatttggagttgaaaatagtatttgtggcactattggaaaagaaataaaaagtgatacatatatggcccaaccttatgaagaaatggcattagtaaaaagcccaaaatccaaggaaaagaggcccaaaattggcccaagaagacgcaaaatcgtctcggccgacatcaggtgccaagtggcacctccggattcgcccctactccactctctctccgtgcctgccagcgagccccacgtaaacaggcacattaggtgccttttgtccctcgcccaacccacacgcacgtgaggagcacagcgccgtgtggtccaggcgtgccacgcacgtgccaaaagcacgactctgtcgtttggctccggtccgcaacaacctaaaaagtccaattttcacaccattttcagccaatccgtgtgtgacacgtggacgaggttgcccaagtcatccaattagagaacaacatggcattctcgttttaactatagggtaactgtatttttacccaaatgcaatttgtaataagtttaattgcacattagtccttatagcttcctataaatagaagcttaggatttatgaatttactacaatttcagacagaaaatctaaagaaaatacttgaagctctcggtgttagtttaccgcttttttagttaattttctcatggatttctaagttctcttattattaaggcagacgatgaaacttagtgtatttaattaagtatttatttttattttgattctcagtacaatatgtgcttatgagttttacttcataaaataatttttttcatctttaatatcatgtatttttaatagtcaaaattattaatgtttggttttacattttattaaaaacactacaagaaaaggcatttttaccggcgcagttcgtcaaatgcgccagtaaaggttgtcgagatacaacaaaatctgaaatttcacttacatttaggcttcacttttgtcggcgcattattgcgccgatattaaaacgttttgccggcgcaataatgaatatgcgccggt

SEQ ID NO: 241344 - DNA, 1248 bp, Cannabis indica
ttgagaaatattccatatatatatattttaattgagaaatataattttcaaaataaaatgcttaataagttaagccatatatattattagaatttgtatacctttgattcactaattattgtgccacttaattgaatttgaaagacttattaatcatgatgatacatacacaaagagtagtaaataccagtactcatagagatgaaggaatgaggtgagtagttttgatgagtggggctttgggtttcaacaaggaatccaactcagtgataaatatgtccatggcctgggtaggcaagagaagagggaccacaatcccttgctcacccctcgccatgttcttaaaaggaatgaggacactggccacccctggaatagctccagcagcaccattggcagtcccaccaaacacagccttcccccaccctacgtccacatccccaaaccctgcatgtgtcaagtctgacacaaggtacgatctcaccacactaaagtgaggtcttcccttgctcaccatcagatccgccacagacctcatatactcctctgtcaccgaatccttcgccctcttcacaagctccaatgcatacccaattggattctcgcaaagcttccccgcagttgtcaccgccacagggaacacgatcccgttaccgtagtacccctgaggcagaggagggttaaactttgaccgcccgttcactatgcagattatgcgcacctcttcttctgcctccatcttcaaagctactgtgcggcatttccacaagcacgcagacaacagctcgaaggtggaaatcttatggaactgaggaggaactaacttcctcaaggccgccaactctgtgggtccgaaaaaaaaagaacggtgagacatgtcatccaagggtatgatggtacccttggtgtcaggtacttggtcatactcgcggtgttcgcaagtgacacgaggtgggttcctggcattcaggagctccctctgccacaccggcggaatagaaggggagtcagcgccccgcgctatctcccctaacgcggtcatgaattgaaccaaacctgcagcgtcgctcatggtgtggttcaaacggagagcgaatatgaagccgccacaagcaaggcgagtgacttggataagaatcaagggagagttaaggacaccagcggagccaggaacatcgaaaataagatcttccaagcaaggaaagggggttgaagagcatccccaaagtccttcaaggtgacatctgc

SEQ ID NO: 241345 - DNA, 664 bp, Cannabis indica
atgagaagttgaaaagtttcaatcatatacatgagtgtaatgtcttacttagtggaacgccacgtatcgtgattacattacgttaacctcattaatcgggacaaataagccaagtgattaaaataaaataatcttaattaattaaaacaacttgtagtaataataaaatttagctttaacttaaaaccaaaataatatcaatacatatttgggatcgtgtgaaatcttttacaaaatattacaagtcatttacatatacactgacctaagcaaaaaaaaatagagttcttatgcaattcccttgttagacccaaccctcgtggcctagcttggccggaacatgtacaattcatcttcaaaatcctcaaactcatagttgactcgacactgctttacctttgcctacacaatagagcacccgtgagccaagacccagtaagaaagcatgatcaatcaaatataacatatagcatacatatcacacacaatatgccactgtataaataactgtgtcattgcactaatatagcacgcaactgcacttataatgatgtcactctatcttaagtctatattatatagaaattacgtgttatgctcacacgcatattattacataaggccttcttaagggttctcttatttttggtcaccgagctaacct

SEQ ID NO: 241346 - DNA, 869 bp, Cannabis indica
tataatttctcaatttcggagatttataaaactctaggggtattatttcttatatgtgaaatatgcaatttttgtaattcttgctcggtgacaacggaaaatgcgatggatgtctagtttgatcacatggataagtttagaaccttatttcttagtgggaaatatttttgagaaaataaaatatcgaggttgaacgaggttatggaatttgaccattttagccctagttttgagaaatacctaagttatagcttggagggcattttagtcatttattattaaggtgattaggtggttacccaattagaagacacctagcaactaatgttttcagcaagagattgattaatcaatcttttttcatttgaagcaaattaaggaattaaagaaaaaaccaaaaatatagaaagctctctttccttccctctttctttttgaacctggcaagaacaagagggtttgctgctgaactttggtaattttagcaagggattcaagagaaatcaagacaaggtaagccttagcttctttctcccttagttcttgaagttttatttggtttaaatgtgtgattttgctatatgggggctattaggattaggtatgtttagggtttgagttcattttagttgaatttagttcctagcagctggttttgatgtttggattaggttttgtgcaagtttgatctttgagttcaaagctttgatctctaatggcatgttgagtttcaatgagtttttctgtgaaatactagttggacttttttgtttatgcattgtatatgtgttatggaaggtttggttgcatttggtggaggattgagcaagaaatggaaaattggggtgaactggtgcaaaccggctagc

SEQ ID NO: 241347 - DNA, 640 bp, Cannabis indica
ttttttttttaaaaaatatttgtagaaaaaattcaagaaaagttaaattgatataatatataaaaaaaatgattacattttttagtatataataataaaaaatccttttatatatatatatttatttaattttaatttaaactgtttttttttttgggccaaggtgtggatccaccacccttaggcgggcctagcgtgagttgaaagcatgtattgtagttgttagttgttacaaatttaaagcaatagcccttcatggcctaccctatcccctcttgtttaataaatacattttgaaacaaccatggacagacacaggtcttagacaaaccgtacccttctaattttcataccatcacttatatctatccactcatcccttcttatccttaatatataatcacacgttttttattcttaggtaggttacaacttccaatttaaatactacactattagaggtgaccacacatattcatattcatagtcatatcatattgagacttatatattacatacaaatatatgtttgatttaaaatacaaatatcatctgattataaacagattaacacgacacaactcgtataatataaatatattttatttaaatatgtcaacttattaatatattaataata

SEQ ID NO: 241348 - DNA, 1814 bp, Cannabis indica
atgatcatatgatcttatcacatcgataaaaaactaagcaataaaaatcgaacaatagcttaaaattgttaaaaaatatataatttaaatattttcttgaaaaataatttaatatatatttattttctagataaataaataaataaaatcatatatatcaaaatgaattattatcaataaaaatatacttttatcttataaacaaatataaaaaagaaactaaataaaatacaacatatattttttaaaaaattaaatatataaaaatatttttgataattaagttataaatcaattatatactatatttccaatagagacgactttgtttcaaatatgttaacaccttttattgtttatttttaaaatacatttaaaagattttaaaagtaattttgaaaaaaattaaaacctaactcttgatacactttgaaatgaagaattaaaaaattcattcattaatgacttttggtacatctaaatgatgtcatttgaaaatgttcgaaaaggttgaggattcaatttatatatatttatttttaaaatcttagggtgcttttttttttttgaatgaaaatcatcaatttattaaccaataacttcaactaccaaaaaaggtagcaaatcaattgggacagaccccatattgaaattgcaatcatgatagaataacgaagctctagcaaagctatgagccaccttattagctgatcgcctaataaaaaagatagaaacacttttaagttcttttaataaaaccttacaatctttaaccacttgaccaaacatgaaaatcatttcaattgaactacgcaaggcttgtataaaaactaagcagtcggtctcaagaatagcttggcaaggttgatttcttttaatccaactcaaagcttcctttacacccattgcttccactaattctggtgtggccgagccattaaaaagcttggttactccttcaatgagaactccttgagcattacgaatcacaaagccaattccaaattgagttgtgttggaaaataaagcagcatcgacattaaccttaatactatcttcatgtggtggctgccactgctcagctccgtcacctagaataagaccaggactcgggaaaataacattagaactgtgagcagttagccattgattaaggtaagattgagccgaaaatactatactcttcacacttgatgttttgttgttccaaaccttgtcattccgtgcgttccaaattgaccaacaaagagcaaccatgagttttttctgatctgcatcacacaccagaaacttcgaagcataccagtcgaaaaaattgttctgttgtggtgctgctgtgccgattcccactctgttccaacaaagtgcagcagctggacagccaacaagagcatggaaaatcgattcttcctggctgtcagggcagacagaagacacctccacacgcttagttctcaactgaatcatggttggaagacagccttgacaagctctccaagccaagtttttcatttttagaggtaattttaaagcccagaatttcttccagaattgttcaacagcagcagatgcttgatcttcttccccattaatttcttggacaattttatatgcactccttactgtataaagtccagaaatttcacctttccatgttatgttgtctcgatcctggcctcgcagcaaggggatgtcgagtatcagatcttgatccctctgaataaatagatcagcaacaatctcttcatcccagcctacaccatcagtggaaaataaattgcacactttagcacctataagagtaggatgtgaag

SEQ ID NO: 241349 - DNA, 619 bp, Cannabis indica
aggactcaggttgctaatggagccactactcttcctacctctggttatggtaggggtggtagttactcaaccaccaaccaaaaatgaaaggaaccatttgcacccggtcgctcaagtcaacaagaggttccgagggaaccagcgtcgaggcaacagtcatggtggttctaaaacccaatacacttacccaaaatgtcccagttgtaaggagcatcatctaggtgagtgtagagggcgaggatgtgtccagtgtgggttgtcaggatactataagagagactggctgcagctcaagaaagatgatcaaaaggtagtagcaaaactcgctccagcaagggtgtttgctctaactcaagatgatggggaagctagcctctcagctattacagatcagctctcggtcaacaactcttacttctctgtattgtttgactttgggactactcattcttatgcggtagccaaaatttttgataaattgggtagcccacacgatagttatgataaaggttttggaaccctactacctgtcggagaattagttatgtaacgccctaatctatagggacgccacgtgtgtgattttataaactagtttaatactaatagaataattaat

SEQ ID NO: 241350 - DNA, 1018 bp, Cannabis indica
aggaagagtttaagagcatgtttgaaaaaaaaaacttataacattgcggtaagaacttcacatatggaagattttgtgaagttgacctaagggaagaagacagtggtcgagtatacatcggaatttgattctctatccaagttcgctggtgatctggtaccaatggatttaacttagaaacaaaaatatgtaaggggactaaatgccactatcaatcgagacttaaagataaccatcgatcacgacacaatatacaagaatgtggtcgagttatccttgattgtagaataggcagagcaacatgtaattaaagagcaagcttctaaggaagccaccacggcattgaaccctagtgtgggttgtagtgtcagtaaggagaatgacattggcaacccagatcacaaatggaaagctgaatattctggaacacctagatgtaatagaaagttttggagaaacaaaggtggtcgtcaaggtcatgggtctacattcagatcttacctagagtgtcacaaatgcaagaagccccatcatggtgagttatgggctaatacttgtttctagcatggtatggtgggccactttatctgagattgtccacttgctaataaagaagaactaaaaagaacaacaaccaaaatctagggcgtctgttcatgatgactgaggttgatgcttaagctagtccgtcagtggtggcaggtcagttctccataaacggtcattcttattttatattgtttgatttgggggctactaattcttatgaatagggtagagtaattgaaagtttccagaaaccatgtgatgtgtatgctttgaggtttggtaccctattaccctcgagagacctaattatatctactcagtggattaggttattgtctttttgcattgatggttatgaatcaactgccaacctaattgagctgcaattgtctaattttgatataatcatgggaatggatttctcgtctaagtacagggcaacaaatgactacaagcagaacatggtggt

SEQ ID NO: 241351 - DNA, 1214 bp, Cannabis indica
caaatacacaatacactctttaatactcctccaactcgatctctcgtattattacacttttcagtacaaagatgaatagtggttatatataggcttctacatatagtactcgaactaacactagaaaacatgtacaaaaaactaactttaagatgcaactactaatttcctagacatgtcagcaaaaaacatgtggccaaatctgtctgagtagttgaatgatattattttaacagaatatttatttattttatttcaatagtaatactaattattaattacatatatgaattctactataaattaaggttccaaaagggttagtagatgatcaaactggagaagcacataacaaaggaaatatttacatttcgaagacaagtcctcctatggtgttcaaatcatatttggatcaattccaaattgatttcacaaatttcttaagatatcgttcagaggaaatggtgagtggtggtatcatgatattaacattcattggcagtattgaaagtgattctcttaacaatatttatgaaatactgggaaggacactgaatgacatggtcaaagaggtaatatatgtattcttagatttatttatttaattcaaattaatattttattaaaaaaattaaaaatatataggaaaaattgttaatagtaacttgttacattttaggaaaatcggttactttatactgtttttcatatatattttgttttaataaaatcggtatctttattaactaatcaaatcgttaataacaataggatgtgcttcagaggaataattctccaactgaagcacacgacctggagagaaacaagagtctctggctaagcagtgagccagcttgtttgcagatcgtttgacaaaacactaatcaacattgtctaaagataaaaacaacgcacgaacatcatgcactaaaacactaatcactttgaatagcttgtatgcatgcaagctgtctgattccaaaatcacttgtccccaattgtgtcgatcaatccaacttaaagcttctttgatgccaaccatctctgcaacttcaggttgaactctcctcaaatgaccccgattgaaagcctccacgacattgccatggcagtcgcgagccacacgagcccacccaaacctgccttcatgctcaaataaggcgccatcaacattaaccttgatatttcctgaagaaggtgcactccaatgctca

SEQ ID NO: 241352 - DNA, 2398 bp, Cannabis indica
tgatgtaaactttggatctctgtataaaacaatagattcaggggctccatggagacgaactatctcctttacatatagttcaacgtacaaatccactgtgtaggtaatctttactggccgaaaatgagctgactttgtgaatcggtccactatgacccacactgaatcaaacattcccatagttctaggcaaactaaccacaaaatccattgcaatgtattcccacttctactaaggaagtgctaatggttgcagtaaccctgtccgtctttgatgttcagctttgatttgttggtaagttaaacacttggacacgtactctaccacatctcttttcataccataccaccaaaagtagggggtacatcttggtggttcccgaatgcaatgaataaggtgtggtgtgggctttatcaagaatttccttcttaagttcaccaatattaggaacacagacccaagcattatacaatatcatttcattattccagattgaaaagtccttaggccgaccagccatcacctcatctccaatcttgattaactcaggatcttctaactgtgccctattgattctttcaaggaaatgaaattgaagtgtcaagttgtgcaactttccaattacaaactcgattccagcattaaccatcattgactctaattgaggagctatcattacggtggtgaaaacctactcgagacctcttctactcaatgcatctgccacaacattgactttcccgggtgatactgaatttcacagtcataatcgttatccaattccagccaacatctctgcctcatatttaaatatttcaagatgaaaaagtacttgagactcttatgatcagtataaatctcgcttttttaaccataaagggaatgtcgccatatttttagagtaaaatacagcaacaagctctaaatcacacattgggtagcgctgctcataatctttcagttgacgagaggcataggctataactttgtcagcctgcatcaaaacacatcccagaccctgtctggatgcatcacagtaaagaacaaacttttctcaacataatggtagagctaacactcctactgttatcaatcgttgtttcaactcctggaaacttgcttcacatttctctgaccatataaatcattgatttttgttagtcaaatcggttagtggcatagagatcttagagaatccttcgacaaaacattgataataccttcctaaacagagaaaacttcgaacctctgtcacagattttggccttgaccaattcttcactgattaaatctttcctgggtcaaccataattccatcctttttgacaatatgccccagaaaagatacctcggacaacaagaattcacactatttgaactttgcatacaacttatgatccctgagtcactgtaataccatttgaagatgatgctcatgctcctcttctaactgagagtatacgaggatgtcattgataagcactatgatgcagttatcgaggaaatccttgaatactctattcataagatccataaaggccgctggagcatttgtcaatctgaatgacattaccagaaactcatagtgcccgtatctagttcgaaatgcagtcttacatacatcttcttctcaaatttttgagctgatgataaccggatcccaggtcaatctttgaaaacacagtctttccctaaagctgatcgaacaaataatcaattttgggcaacggatacttgttcttaatcgtcaacttattcacttgctgataatcaatacacattctgagggaaccatccttctttttcacaaatttaaacgtagcttcccagggcgatacacttggttgaataaaccctaaataaagcatcccttgaagctgtaattttagctccttgagttatactggagccattctatatggttctttcaactccaggtgccaagtcaatcacaaaatctatttctcgttgtggcggtaatcctagtaactccttcagaaatatgtcgagaaattctttaacaattctgactacttcaggcccaaatgttttaggtctactggtgtcaatcacaaccgctaaaaatcctacccattcactgtgtagtaaatatctagcccttaaaactgaaataatcgggatccgagacctctaaatcgatccaacataaacaaatggatcttcatcctccggctgaaaagttacaattttttccttgcaatcaatgttgcttgaatacttggacagaaaatccatcccaagtttaatgtcaaattttgttaattccagctctactaggtcagcactcaactctctatcttcgatcctaactggcaataaggttccaactccccgctaggcaatagggttccaaaccctctttcaataaaatcacatg

SEQ ID NO: 241353 - DNA, 1156 bp, Cannabis indica
aaaatagcaaatataatatttcccataaaattctaacatgagtcggtcaaaggaccgatacctgagtcctcttgagtcataaccgccacttgggcaggaaccatacactcttctcctttaacatcagtctttcttaattgcgggcatgttctttttagatgacccactattccacaataaaaacaagatttgtcactacattggtcgatatggcgtcttttacatcttggacactcaagatatggtcatcatttctcgttctcaccttgactgctatcctgatcaccctggatccttttgttcagtcccataattggtggtttatttagtttttacttccaaatttgctcgtaagttagttccatatgtttcaccacatctagtggcacaacaggatgtgtcagtggtacaagaatagacacaagacatgtatattgttctcttagatctcggatctattccccttgttgtctaatcatatcatgcatagtggaatttacatgttcccagtgttgcagcaatagaggattctcttccttgccatttttcccgagccccaatagctcactaatcagacaattgaattgcccttactgcataacttatcacacatttagtccgcatcttctaaccatttagaactcagacagatatcaatatcaatatgcgtataccatacacatattcgtatcataataatcactatgctacttttcccagcatgctttataataggctaggtaggcaatctaatagcaaataatataaacacttactataccatgagtcgacctattttcccagcaaatgtacatattcgactagtcttcaagacctttaaaatgatggctgctctgataccaagttgaaatgccattcctatagggataccacgtgcatggttttataaactagtttagtactaataaaataattaattattaaaatctgtgataatattaaaaacttcactaaaataaagcaactaaaaacaaacattataacgacactaaaactgtgtttcggggatccctattgtaaaagttttacaaaaggataaagacggcaacaagccaaaatactaaatcaaaattcatcacagatacaatccaaaaacaactcctgaaaactcaacacacaggccagtagggtcaat

SEQ ID NO: 241354 - DNA, 1056 bp, Cannabis indica
tcacccggactcggtttcagcaggttctgacttatcaccgtcctcccctcacccttgctcttagggatagagctcaaaaacttgctcagttgccggaggaagacacgaatatcatccagttgcctctaatgataatctggtgaagcatgggctttaccctgaggacttttctcctaagtccgtggcggggaagaagaggaagtccggtgctggtcggcctgaatgaactcatccggagaatgagttgattcaattgaagcgggaggctaagttgaagggtggtgccagggccaagcattatgctcaagagcctttggatcctgatgatgaggctgaggctgaggatgaggctgagcaggtgaccccattgaagaggaagaagaaactcccggccacgcccaggccttgaacatgcaattcgcataagggagcccacttatgtctgaaataaaatcgatgtcaggtgatgatggacttctgaatctctgtgcaggcagacaccttgcattttaatcttttttgagcttcttgactttcatgccttgtgttttctaatggttgttttctaaccacactatttttgttctgtgcagacatgtctcagcagacgctcgatgctctaaggaagagaatgggcagaagctctagagcctcacctccggccaagaagtctaagggcggtgaggggtcctcggagaagagaccttctggggaggtcattgacctttccaaggagctaactgctacaaactcttctaccccaaaatcttccaagtcctaggagtctagaccaccaacggctgggtctgaactggtcaggaatactcctgagtgggtgcaggcacctactcctcctttgcccgtgctgctagaggcgaaaaagggcaaggagatgctggcccactatatgaaccggctggttcccgaggtcaatgagcagttggctggtgctgatagtgactcatctctggatgtgttggtgggcagagtcctgaaggagctcaccatggtaagtcttttttgatacttccctttaactttccacacttagctcca

SEQ ID NO: 241355 - DNA, 1107 bp, Cannabis indica
aaaatttaatgatatggaccaattaggaattgtcaggtaacaatttacttaatatttatagtttcagaacataacttaagtatttatttgtattaggctaaagtgatgagaggtttgaatttatggtaaagtgatgagataaatcttttttttatctaatttatgagataaatcttaattaaataattaagtgacaaagaaaggtacttttttttccattagggtaaagtgatgagaggtttgaatttatggtaaacttttcttggtttttgtcggcttgttaattctaatgaaaaagacatatatttttttttgttggatttaaaattttttatttaattttaccatcaataatttaatactttttaaaaataataatttaatatacatttattttaatttttaagaataatttaatatttattgcaaatatatcaaatgataattaaaggaggtatgagaatttagtatttattttttaaattacttttaaaaaatttatttaatttttataataatataaaaaattaaaattatgtggacaaatcaaaacataatacatataaatgataaagaccacactaaaatatgaatttagagaattttatcattaaaaaatcaatttataaaattaagtgttacaaattatataccttaagtaattttgccgctcatatttttttatttttattattagttaataataaaggttagttctttaacaaaaataatcctaattgaactttaactagtggtggagtggagattttgcttaatacattttttttattcattaattaaaaatatattcatattatatttttttaaatttacatatttttgtgagtgagttgttcaatatagtcctactctctacttaaattcagcacataatttacattaatttaagcggaatagtagatgcatcatttataaagattataaaaataaaaattaaaattaaaataaataaaataaaataaaataagtatacatcacaattacatgctttgctggtgttgtgtcgggtaaattctttttgattattaaatataaagacaacaatgatggccatatttatttattatacacaataagccaaaatag

SEQ ID NO: 241356 - DNA, 710 bp, Cannabis indica
aaaattattttggaaaaaaagttagaaattaaagtaaaaaaatgttatgtttacttaaacaaatctatattttcttcagaaaaataaaatagagtcaagtttgttcccgtaaaatttagattttataaaaattgaatttttaatatctaatgaattttttaaatcgcttaattagtttaattttttttaattttcttagttattcaaaatgatttttttaaaatctaaaataattttttatgatttactaaaaaaatattgaatctttctcatttttattttgagggggtacagtttgataattgtcaaagtttaggggacaaaattgctaatttacaaaggcacgccagcatttaaatggaatagtgggacgaaaaatgttgtggtgtaattcatagaaaaccaatattgtttcaactggctagaagtggcagttaagttggttagccttgttgtttttggttagaggcttggttttgtgagctgttatctaacctatataaacaccaaattgtaatcaatgaaaagtgacagaaaagaaagaaactgagggagaaggtgagaatcagagagaattgtattaagagagagagagagctaaaggctgtagctcttgaaggttatgaaccatggtattcatggtattctaaccagtcgatcatggaggtttaagagtagatttctctttgtttgctactctgattgaagat

SEQ ID NO: 241357 - DNA, 949 bp, Cannabis indica
attttttaaaaatgcatatttttttattttttttaatgttaaattatacacgtgatatagtaattgggtaagtagtcatgtcatcattttgtttgccacgtgtaaaaaaaacttgacaaaatgattaatttataatattgtgaatagttcatggactacttataacgaacccaaactcatacccgaacccgagacccaaacctttgttgttgaagatggaaaaatattaaaaatttattaacttttatactttttgtgtaaaaatataattattttttaaaaatatatatattataaaagtttaaaaaaagtaattaaaacatataaattgttttccccatgtttttttttaacatttttctaaaaaaaattccataatcatattataaaaatgaaaattccccggatttgtatcctattaatttatgggccttcagcccaacaatagaaaaaaatgaaacccgtctgttgggtcagaaacgggctgcttgttttgtggcccattgagcccaacccgggccatatattactttcattctctctctctcgtaacaccctaaccctaaccctaaaactgcaccagaccttcttcctcttctatttactgaactcaggcaaaaccaggcaaggctgcttccctttctctaaggtattctatgctatgctatcttcaactctaatctctactcatttcattttttgttttctcttcaactctaatttgggaaaatctcaagcaacaagtttcgatccagttagttccattctcgtttgattttcttggtttattattatgttttttctgaaagaaatttctgtttgttcaatttttggtgtttatgtgatctcaatgagtttgttttttgatattgtaaatatataataattttatcaagattactaagtaaggtattgtttgtttattgtatacaagtcatgaacaagtttg

SEQ ID NO: 241358 - DNA, 792 bp, Cannabis indica
gtttcatattgtattaaattaattaactacaatgtttggggcaatgtttgccacataagtttgtataaattattacaacacttaattttaataaagcccgtagtgttttataaaatacataaaacaaatggatgtaaaaaggttgtttttatcgtaatattcatgaacttagattttattacaataaaaattagagttgggatcaaggtcggtgtttgagttaaaactagagttgggtctgaggtctacatagggtcaggcttgggattaggtctagattccgactcggcgccaagggctaggatacgggatcaaggccaggggtctagggtccaaggttaggtcctaggtcaaggttctaggttaaggttggggcttgggttaggtgtctaagtgagggttcgaggctagttctggggtccacggtccagggttcgaggccaagatcaacggggtctagggtcaagagccatgtctagggttacgaccatgaccatttgcggagctagggactagagttaagtttgaggttgagtcccaagtttaagggtttatgtttgggtttggggttatagttgaggtttagggtcaagtagtggatttggggaccaagtcaggatttggtgttggaattggggttcaaggtcggggcagaggtcagcaagttttggggtcatgggcgatgtctttagtccctaacaggaccatggtcgggctaggggctggagtcgggttatgggttaagtcctaggtttagggtccgagtttcggattacagttagagtcaaggtt

SEQ ID NO: 241359 - DNA, 1215 bp, Cannabis indica
tacttgtgagtagatctaagatcttggtaaaattaattccaacaggtctatcctcggtcttgaagaacctagctagatagtttgttgatagaccttccccaatcggccgactagtcttccttggagtggatctctaatgagatcagtgcctctttcaacagttctttcaatgaactgccttattaggttgttggcttctcagttgcggcgatcaagctgtgcctagtgaaattaaaggatgtactttttaggcacacaccatcttaagaattcacttctccactgagaaaatacactgcaatcagcagcgcgtggttcttcagtttggccgcgttggcagacggcctccctaaatctggctaactcgagatcttctaccaagtctacaaggggctcgctaattcctggtcccgtttctccatcatagaattggggacgaggtctaggtgttgggcttgggggttattccccatgggtccttccttcaatggcaggtgccactggagggtcctcccttaggggaaaaggccgattgttcagatccatggggatgtttgtatcaccctagcctgctatagtggccaaatttgtggtgtttcttgagatggcataattgatcacatctgcagtgttcatggcaattctagtcgtggctgtaacatggacatctggatctacaatcaaaggatcttaagggagacccgatgatgtagagaatgtagccagagttctcctcgtgttaactatgccatttgatcatatatgatattaattcgctctcaatgagagcaccaaactgttgaccttagatttggccaactaactacggagtcgtattcaatgttgatgcttgccacgtgttacatagtaagaacaataaggtaaaagaacacatgattttatagaggttcagccccattagttagcgagtaataacctactcccattttagttgtattgatcctaagagataatactactaagatcactgggatctgaagtagctctcttaaggctataatgtaggaattagagacggaaaatcttaagttatgagaagagtaatggtaggcgcgtgagaaagagagagagttcaaacttagagcttagggttttcaacttaggacatcaggcttttgacttagggtcttagggtttagttaaggctctttatataggagatcttcaacgctttaattaggtaaaataagaaga

SEQ ID NO: 241360 - DNA, 881 bp, Cannabis indica
aaaatagaaataggtcaaacacaatacgatctagtatctacttaatatgaatttgacacaatttttaaataaaataaaataaaacattatgaataatgatatacaactatgtaaaaatatatgtttagtgatttagttaaaaaaaattaaatttatttttttaaaaaaattgagaatttttaaaaatctaatttttaatatagccataaaaaaattatatatatagatgtatttaagttttctaataaactgaattaatcattttttatataatttcaggttcaatattagcaaaacgggttaaagtgaatcaacacaaacacgataagattttttacaagtcaggtcagggttgagaagattagaagcgagttgaaaacgggtcgacacgcctgacacaaaatatataaaagcgagtaaaataaaatataatacgaacactacacgatgacacgttttgccactcctaccagcatgctcatacctagatatatatatatatatattctagtggcgaagcacgttgttgtgcccatatttcaatcaataaatatgatcgcaacatgtgtataggaactcaaaaataagtaggctcgcatgttaagataatcaatgtattattttaatgcatctcggataatactcatattactcaaaaattaagccttgccttagaccaaaaggataagccaaatttactaatcataaagtagtaggcaagcgagatgaaatacctacattatagcctcctcgaaaaacactgtacatacaaaatatggcttccgaagacttgtattaataaatatgagtttagcgagaagatgaaagctaagatggttgcaagatcgaatgctttcatcatgagaagcacaagaaataca

SEQ ID NO: 241361 - DNA, 1629 bp, Cannabis indica
tacatcttcatccaaatgatactttttctctgtcatttatttatttgattttcaaccgttctgctttccttggcaataggaagggtctcaatactcagcaaataaattgtacttgtaatacttagaaaggtctttggtttgattcttcatgggatcctacctagtaatttggtagagtttcttggtagggaataagtatagaagttaagaaagtccatctaactgtcctgtgtatgttatagattaagcaagttcttcagatgagagctacagtagtggtgtcctatattttgttctcttgcagtttatttcagtgttacttactttacatatgagatgtctgttcataaccttttctatataggatttagaatagttatgtacgggtgttaggttaggtaggtggctgactagttgtttgtttgattatggatcataatcatacagtttcataatctgttgtggaaacatttctgcacgaggaggatcacaatcctttttctcacatatagaatgtgattgaatttatgggcactttttcacttatcattttggaattcttgtaaaagatggaattggactacctctttgagtcttgggtttatttttccccacagttttttttttctgttttcccatttctcctttaggctcaaatgcccattctgttactttattgtgagagttgattttatttgtgatgactaggtattggtttcttaacttgtactaaggaattccttatacacatatctttctcattaattttgtaactaacaataatttttggtggggatttttgtccttacaagtaatatggatctcagtatagttttgaacttgatcttcttatgactgactgaacctctgtttattcatcatccggtagtcttatatttgtgattagggagattttaactgacatcaatcatttaacttttcgcttaactgagatgtcagttcatcagctaaataataatactaaaaaagaaaaaagtttgtcctagagggaactctctccttggtcgtgttctaatcagaggtggtggtagcataaaggatccaactcgggtaataataagattttctagaatcataaaaatgttagttatttattctgtggttcatttctaacaggaagaaatgataaaccagcatctgaatgagcctctacatattctttctagttcaggcagttgaaatcattaattgatgctcgtatctactcaggccaatgctaattcctccatcatgtctttacaccttcctaccattttgatctcaggacgaatcccaccatttctacaagaaacaacagctgccacagctagcaatgctaaacggtactcttcgcgaggagggttctccaatgtctggctcggtctctccattccagaacaacagcctcggcatgaaaagggcgaaaaccagggggtaagggctcttgttgtagagcttgtgtgtgaaaatttcagcgagtaaaaacaaacagcagtttcccgtgccacgggcatcgctgcatcatcatcagaaaccgtcggggggtgcaccagcactggcacactaaccaatgtgccagttgttctaacttgtttctatatatggtgtgtgttgtttattctagttggg

SEQ ID NO: 241362 - DNA, 959 bp, Cannabis indica
aaataataatttatacaaaattactattttatcttcaagaattatttctcttaaaaattaattctttctcaatttatcttacaaattatatcttcccttattacatcgttgtgtagatgtgatatggggactatggacctatattttaaagttatattaaacacttaattactattgagtctcatcaataaaataatctcatttattaattttattattactctactataaatatagaattgcactctttgacagtatagaattatatttacaaaattattactagtagtccattgatataatcattacaagtagttttttttcttctaattattagttcataattagagtttgtcaaaattaccctttcactcctctaattatctcttgaattctttatgtattattaattcaatgtgaacaattaatctataatttattataaatttagatccaattgttagcacttttaaaattaacactataagggaactaatattcgattattaggaaagcttagactctattgttgtatatcatgttcccatgcactcatgttattagattcccaaaacagaagttgtaagaatcatattctatgagaaactttaaagagtgaatcaaaaaacctaatgaacacaaactggagttaatgaatactcaggattcagacagatctaccaatgataatcattgtgatatgaataactcttttatggtaaatgacatgttaatgaaagatgttattacatatcggtccaatcacgtataatcaaattatacacaacacatttactacatgtctatccacatatgtgattcgaatcaaaatcacgcacactagagtatagtgtatagtaaaccgtacttagtagttccatattaaagatcccttactttaatacattaccgactagttttattcatattgtataatcttaattctcttgtacgacctt

SEQ ID NO: 241363 - DNA, 1008 bp, Cannabis indica
ggtatttacagtaaaaagaaaaaaaaaggaaagacagtataaatgtaacatctgccatgtggcagtaaaattgaaaagtattaacctaaattcaatatttttgtaaaatgcccatagtatttgggacaaattcttatctatcctgcgaaattgtactatatttgtatatttttgccaataatttgttatttatcactacttaattgaaactaattaaaattcactcaaaaaaaaatatattatctttattgtcaacatataattaaaacattagcctataattttaattattgaaatataaaatagattaaaccaaaatatttaataaaaagaacaaataaaataatataatcataattgaaaatttattattttttatcttaacaattagttttattataattatatttttaagtaaaatgaagttacttttataatattaatactatttttttaatatgttttatatagttattattttctaatttatttatcatatcaaatatattggactttcctaattactaaaaaaaaaattatgtgaaactgttattaacgatttagttgttttgtcataaataattaaaaaaaattaagtgtgtatttaactgtttgaatattatttttgaaaatgtaaattattaagaaaattattaaatgtctactatatttacaaaatatatgaaatttaaaaattatgtcgttgtaattatggacaatcacaatttttttttgaaatagccacaaaattattatcaaatacacattttcataatcacttaattgttatagttgtattaaaattatagcatatatattgatgtgaactttaaaaacaacaaaaaaaaaaataatattaataataaatgtgatttggataatatagaataaccaaatgctttacctaatgtgttaaatacatatggtgagagtaaaaggagtttttggtaatttaattggttaaggaccaaagatattgtcacttttttttttggtgaaaaggaggtg

SEQ ID NO: 241364 - DNA, 1141 bp, Cannabis indica
cttcatattatacgagtttagtaagttcacacaacatggccaaggtggttgttggacttctttttatgggtaaaatatatttttttcttcaacaagttattgactattgatgtgtgtgtggtgcaatatacattgaactcatattataaacatataactttaaaatattgactctgccattgacaagcatataaataaacactatcactttttttatgaaaatacatatctatcaaatgcaaatacaactgtctaataaaattaaattatatatttacggtcagtattatatttaagcggttttttcatttttatacttcaaaacagttttttttttgcatttttacgaaattctacatagaaactcctattgcaactagcgctgcaatctaaattacaacaaaaaatcgtataaaaactcctattgcaattagcgctgcaactactttagaaaccaaaaccgtaaatttgaaaagaaaattaagaaaatagtatatggggtaattcccctatacttaattttaaataaaaaaaagtacattaaattattatttatctaacaaagaaaagtgtactatccagttacaaaaattaattttaccaaattattttattgttgctacagtatcaattccttagtcccatttgagggatcttaaatctgtaactaaattgaggttttacataacattcatttatataatattatattttgcaagtatgagttatgttttttaaaaaatatttgtagtcctaaacataagctagcaatacttttgcacttctaagcttgaatcccctttctgtttctcacacaataatctctctgccactcaatttgctaactctgagtgaatcaaggatttgccactgaattgttcatcttccaccaaagttctattgattaatctatctctttgatagaatatttggtggattagatgttttgattttgcttttccctctcccattggagattgaacataaggagggagtagctcttaaggtatccaaccaattttccttcctctgtctaagatggaacctaagtaaagtggggagtggctttcagattgtgcaactcaaaaaaatttctttaagtcacaacaaaatttgtgactaaaagtgaaaaaagttgtga

SEQ ID NO: 241365 - DNA, 687 bp, Cannabis indica
tttgttgttaatattaggtgtatttattttagtttaataaaaattatacaaaagtataattaattataagacgttaaagcatagtactgcaatgctcttctataaaattgatgtagaattttatactattttacttgaagtatatattatatagtgtgcactaaattttacaccattagtagtatttgattttaaatctatattaaattagtgcataattttttgttttcattttcacgatttttttaatttattttaaaatataattagttaattttttttgttgaaaatatgtgtaattatatcataaattaattattgttagttattgtttactaaaatttttaaaaatcgaattaaaataagattgagctaaagaaaataaaaataaaagattaataatgtaagatttttaggtgaatgaggcattaataaatcttagttcacaagtcaatattattaagctctttggctatggagtattcattattttttttacaaatgaaattgctaactctttgcatgaagagatgaagccatatttataggcctttcgactaacgagtcgagcagacccgatccattagggttttattcatgatccaaaccttgtgatgtagtaaatacaattaaatgttggctattgggtcgggtaaattagatttgggttgtgagtaatttttgtcc

SEQ ID NO: 241366 - DNA, 1146 bp, Cannabis indica
taatttattttattttttaaaattattttctaaattttaaatatttttttacaaaagtttacaatatttaaacaattaatattatgtggactactaaaatgtgtcatatgtatatttgtgtacacgtgggtagtccaatgtgacacttaactgagatttttagatagaagtataaagagcaaaacgaaacctgagttcattaggttttaccctcaaaatttcagtttttatagttaagtattaaaaaatataaagtttaaataattttaccgccaatattcttattttttttttatcaaatttcccttttttaagctgccaactcacagaaaaagtttggcagggttagatctttcttatatgtattttttgagatatttgtagcttccttagtatgttagttcaatccagtaagccctcaaaatatttagattttaccagactaaataataggactaccaaatgtaccaccataaatgtgtagaaattttattagtatataaactatctgaactttgaatctgttttggtttttactatttcattcactttggtatgttaagtgacaaggtaaactgctactacagtttttattagtccacataatattaattatttaaatattataaatataataaaaaaaataaaaaataattatataaatttagtattatctatttgttaaattttttattaaattattttataatatttgcactaataacaatacatttatgtatttaaagatctctattctatatttatataaatttgatttcaaatatatataataaaaaaattatacaatatataggaaatttttttgtttttaatttatagaaaaattataaatttatatgatggtgtacattatgattatatattcatactatgaatcttgtttgttttcgaaaaattctaaataatttacattgtcaataaataagattcaaacatttagttatctacctatttattttacccacgtgcaacatactttgtacattttgaattttatttttgatatcacaaattgtattcataatttttcaaaaaggaacaagatgtctattacaactacaatatataacatcatataaaataaattgggataaaattttaaaaaatagaaaatgcacttatgat

SEQ ID NO: 241367 - DNA, 1478 bp, Cannabis indica
aattctggagattttattaaactctaagagtattatttatgctaaatatgaattatgcaatttttatgatttttgctcggcgacgatgaaaaatgcaatggttggtcgttagagtcacatgggtaaatttagaacctattcttagttggacaaatatttgagatattatgaataccgggtttaagcgaagttatggttttgaccattttaccccaggcttataattgcttaacttagaggtcaaagggcattttacgaatttcatttattgatttaggtggctggttgtgggaatgacaactggtccttatcgtcattttcaggctaagttaatgttgataaattgatttaatcaaataggcaaaaaaagacaaaaaatagctaaaacaccattttctcttcccctctctttcaaaccaagaagaactctagaagcttggtgctgaattctgcaaatttaacatggttttagtaggattcgaggtagctcaagccataggtaaacccaagagttctcatttttttatgttgtttaagctttaattttggtttgatatagtaattttgagagttagtggctcttagagttagatgtgtttgtgattcagtttctgggttcattttaagttaaaattgatttcttgtagctggttgggatggtttgtgaggaggatgaacaagtttgagtttgaaaactcaagcctcattcatatatggcacttttggattttgagtatttttcttgctgttattggttggaaaatgttgtttaaggtatgtacaggttttcgagaaggcttgacttagtttggacacaaattgggccagttttggacttgtttgggttacctggtgcaaactggttaaccggttcaacaggtcgtgtagaactggttaaccagatcagtggcagggttcccaaaaaatccaatttttcgattcgtgttattttcagagccttagtttgttatttcctcaataatgaggttatggccaagttaactatcaatagtgaaactcgtgttgtgtgtttaggttcccaaattaggttttggcgtgttatttacccatttgcgtaaatgtgacatagggcatccatccaacacatgattttctgttcaagtcggtcagcgcacttgaatttggaaacgaggtaagactagcatagaacgtattttatatgagtatgtgtatgtgtggtatatgcatgttatttgtgattcttacacgaccaacactagtacgatagtggtactgagtgcgttggcacaatgtacaatgtttgaagtatagtacggtgttaccaacactagtacggataggtacggagtgtatatggtataacacttaggggtactcgaggtacggggaaaatcctaccaacactcgtatagtaacagtacgtagtgcatatgttatagtggtcataccttagtaaagaacgttcttacttatctgataagccttgtggataggtg

SEQ ID NO: 241368 - DNA, 375 bp, Cannabis indica
gagaaaatgtgctccaagtgagtgagttccccgttatatcagtgtaaagtcgcttgaggtgggaaaggcaagcatccatgttggtgttacctcgaccctctaagaactcaatctcgtccttgagcctagccaaacgttcttgaaactcacaaatctcttccaagcattttagatgctcggacgttaattggtgatatgacgcccgagggtcggtgacatccctgttcaagtcagatgagagaacaataaaaggatttaagaacaaaatgtgatctatagttctccataaataagtgaagaaggaaaagacactcaagtggggaattaaagactagcaagactggaacaaaagttattataagataaagtagcacc

SEQ ID NO: 241369 - DNA, 816 bp, Cannabis indica
acaaaagtggttacagaacgcatttttattttttaaaaacaaaattttacttttattttgtgattaaaaaattaaaaaacaaaagtgttactaaacggcaccataattaatttcttttgaatgtgttattcaataaacaaaattatttttataaataaatatttaatttaagcgttatttataaataaaaaaaaatatataatagtattcaaaatttgttattaattataaatttaatttaattaccataatatttttaatttataataccacaatactttaattttataatattttttcttatttttgaaatattatatttatttctttcaaaataataataataataaacatacatcaaatccaaaataattacaaaaatattgtgtcacatcagcataaatatacatgattccaaactttattacaccaaaatatataaaaaataaataaaaaaaaaaaaaaagtttcaattcccaaatttttttttcttggtatttcacaataaacctcttagttaccaatgatactaataatatactaataactttacacctttatatataaaaaaaaataatctaaattaatacattgaatacttttatatatatataatcctatatagcaaaatgtatacaaatttttttacaaaaactacatccaacttttcatcttatcttcacagacaataaactataaatagcatcaataaactaacattaataatatataatcacagttaataaatcactattactataatcaattcattagtatagtacaatttgtatgataatcctaatcttgctacatgtt

SEQ ID NO: 241370 - DNA, 1408 bp, Cannabis indica
atactaattagttcgattggatgctggatgtattggatttttagacaccacatccaccatccgatccgatccaattggatatttaaaaataacatccaatccgatccgatcacaattggatatccaatgtttggcggtcggttgtaattggatcggtcggttctcattggatttgatcgatttatgcacacccctactaataagaatgctcaattaattaattaattaatattgttcactcaaaaaacaaatataaaaagtccaattaagtacgatcttattcttacagcaggctgcaatggaatacaactcaaattcaaattaatgtttggattttgagcagtcaagaattaattacttaaaacatatatatttatagaatatggtccaaaaggttattaatgcttcaccaaattaacaaaattatgtaacatctctttctctatttatattcaatcttcttttctcacttaatcctggtagatacgtaataactttctgtctaaaaaaaataaaattgttcccaatccaaattaatatatttatattaattatttataaatataaatatacaaggcttatttcatgtatgttgattgaaactttaaatttttactaaaaaaaaatacagggtaattatatgctacacctcctaaaaaattatttcgatacatttttatttatttcggcattcagaattttttttaatctaatttaatgttatgactgtgtacgttttgatctatttttttaattcagtcatctttttattatgtaagcctagtacaacccctttataatatggaatgctaagcttaccctgtccataagaacgaattattcgtgctggaccaagcccgtatagtgcttaaataggctagcttgtttttgtaaaatggattgacctatatttataatacagaccataaaacgggccgcctcatatttatattagaagaatttacactatgtatttcttttaatttgatgcttttaatttatactattttttcaaaatgtattatgtttacctcttttttcaatcattcccccaattttacccgtaccacttcacaatagttttcattcttctctaatcaaaacttttgtcccaactttcccacaaacctacacatcaatctataaaaaacacaaatctattatatttgaaattatgtcttaattatgtgagtgtgtaaggataatttgggtacaatactcataaaaagatatattatttgaattaaattttgtttgagagtaaatttagttaatgtataaaaaaagagtattctccaacttctccctatttattatatgagccataaaatgagcctctcccatatttatgaaaaattggtatttgttttgggagttttttacaaaattattaaatttttggtcaaaa

SEQ ID NO: 241371 - DNA, 1119 bp, Cannabis indica
agggacgaggagactccacaccacaactacaatggcttcgcggcctggagttagactcatctaatgtctggggccatgctccccctcaaagactattttactgacttctttgttttcgtcgggctctcaccctatcaactgactccacaatcctaccgtctgttatcaggcttatttttttatgtagccaggagctgggctccgcctagccttgccgaaattttatacttttacaaactactcttagtccccaaaaagggggactagtttaaggattgtttttacaaactgcaggcccattcggccaatgagactccggtaccctttaatttttagaaaatgtaaaggagtatcgccacaagtttttcttttcttctgtattcaaggccttcgagtgtctgaatctgctaacggactgggttaggatccccccatgcatcgtactgcccccacccaacttttccttaaccaggcaaaagttttttctagttacaagaaggaagacttgaatgtgggggacctagtatcaacagtcaacttcaagagggccaagctgatcctaaagagccaatctgttgatgatttcaacttatccaaggttctttgcccaaatattcggaatcttggaagtgagaaggcgctcagggcggacatcattttatatgcaaaagataaatacaacaagtatagatacaagagggagcaggagctggtgtatgctcacctgtaggctgcctctgggagggtctcccgagaggaggtaaggaaggagaagacttcagtctggcccaaatttctgttctcagttcccaactctggagcccctggtgcaagcacctctggagcctttaagtctcctttgaattttcacttcgttccttctgtccaagactatgctaacttaaggccagtggaatttgataaaagattatatagcttttggatgccccattcccggtgcggtgataacgctaagggtttttatttctccagtttaagtcatttcttgggtcggtctcggatgggctgtagtcctcctataccaatcattttggatcattcctcctacatgactttgagttggtttcttccttctgatagctttttaggagatgacga

SEQ ID NO: 241372 - DNA, 831 bp, Cannabis indica
aaaaattaaaatatttggaaacagtgtcgaaaaataatcgagaacccgcaaaaaaacaatcaataattgttgaaaataataatcagtcatcgagaaacagtcaagaacatgtaggaagtttgaaaatattactatacacacgatcaaaaatccattgaaaaacagtcaagaacacaaagataacatgtcaagaatagttagaaatgcaaaatcattcgctatttttgccaaataatcgagaacctatcaaaaagccttcgagaaaggtcttccccgaccttggtatattcgagccgagaacctttcgagaacacatcgataacccattaagaaaggtcttccatgaccttgggacatccgtgtcgagaacctatcggaaccagtcgagaaagatcatccctaaccttgagacaatggtgtcgagaacccatcgagaacctatcgagtatccatcaagaaaaatacaaacacacagaatactccaaacaacaagatctcgcaatttcagcgaaatttatatcaagataaaaaaaataacaaccacatagatctaatgaaaatatactatacatggggtaaggaagtttacaaaacactttcaaacaaaatgttttacaaaacacttacccattaatccacaaagagagggaggttgggcgaacatctttcatggcaagggacggtggttgggatgatgagagaaggctgggtggacgtcctccatgatgtttggccgagtatcctagcgatagtttgggatgttgtaagttttttttgtttgcaaagtggagagagagagagagaggagagagagagagagagagagagaga

SEQ ID NO: 241373 - DNA, 1074 bp, Cannabis indica
atgtgggtatcgtacatgttttgagtcttcttcataaaagacaatgggtagttcatctgattttgctttcttcaaaggttctggggtgaatgttgatgcctcattttttacctcattaatgtacctcttttatgcactattgctgtttcctatgaggtgaggctctccagaaataactaagatatcctctccctctaaagggggaggttgtatccttgggttattcaggttattgggctagttatgttaatttccttgtgtcctcacatactgctttaaatattcttgcgagattaggctctcaatttcatcttttaactgacgacactcttcggttgtatgcctaatgtcttcgtggaaacaataatacttaatgggatctcgcttatttctcgcatgtctcattgggtctggtctgcaaaaagcgacccaatttttattgacgaggtaaatattctcgcgagtttcatttaatttagtatatgctgaataaatatgaacatacttctcatgtttcttttgtttctttttatccttggatgagtctcttgactcatccttcctcttggtattcgaaccatttggattttctaccttggtagtcacggtgcttgttgttgctgtgctagtgctgggtttacctcccaagcttgactttaatagcttgatttcattccgtgccttttctttttgcacaaaaatttatgttctttcattgaatttattgatatttcttacaggacgcccttgcaaatcatcccataactctctccctgcagttgataagtcagttgtaattgcagcctaaaggctgttaattgaataatgtcattcacatttctgactttggctgcagccgtactaaagcaacttaaatatgctttaagggattctcctgattgttgtttgatattagtcaatgaagatgcttctggttgacaatctctcgcatcttgaaactgctttttgaaatcttttgacaattgcttcctgtatagaattgttgtttctctgcaatctccaacaataattttaagttaatattttttgttcatcttttattattattattat

SEQ ID NO: 241374 - DNA, 1012 bp, Cannabis indica
tgcaaccactgtaaggttcctgaaactttatatgtgtttatttcatatcattttagaagttcatgtttaggatgttaaaaacatacttgttagtaaatctagatcctggtaaaataattccaacacacctttctcggcatacataaatgccttgcccttttctaagttcaaaatgctggtatggaagatgtatactgagcgagaagacccactggctcacatcaaaacttcgagatgtaactcgatctctagaaggttactggtgatgtgtggtgctgcatatttctagccacactgtcagagacgactcaacaatggtactttaaactcaccctatgaaggtttaactcttaggctgagttctcacgagaattttacacacaattgttgtcctcgagacttgtaccatcgtagctggaaggccttgtcaaagttaaataataacaaggggaacctttgaaggattacatccagaggtttattgccaaggctaccaaagtcaaaggccttacagaagaaggtcgatatacaaccatagtgggggcacactctcgttgagtgacttctggaaagatatccatagaatctctacgaacaacatgaaggagttccttgataaagctgacaactttatcaaacttgaaaaggccatatgacaggcccaggcggggcatgtcaacagcaggcagtcatgaggcatttagcagcctcatgacccaccaggcgcacaggcagacaccattgactctgcccaaacttctagttacaaaaatactggaaacaagtgcaacaccaacaactctgggaggaagagtggcaagaagggaaagtttaacacgtttcccacgccacagaagaataaggaggagaagtacacctgcttcactctcctaatagagaagcctgaggccatcttcatggacattcaaggaactgtctgttgggttttgtgccctaaataaaactcatttcaatataatcagatttacttataacattttatgttgcatgg

SEQ ID NO: 241375 - DNA, 687 bp, Cannabis indica
atttgactcagtcaaaaatagtttcttttccaagcaattattgttttagttacaaagtagcacagaagaaatttcaatcgtaagaaaatgtgaggttggaattacacatttgattatgatcatcatatctataagagataatccatatataaagagaggtgacaccattttacacacacaaaggcttaattctattctgaacaatcaaattaaaagtaagcaaatcaaattacagaaataatagaattaattttaagtgtttttttggtaactgacttgttgcattcttcaactccaattatttccacaaggaaacatagaaataccaactctagctgattgattctgtatcatccaagtttgtatgtagtccaatctgagaacacttccaagcttaagacagaatccgatagatttgaaatgcaaacagctactcaattatggtaatagcttgtgtttacatgtctcacaaggtgttgcaaggactacaaaatgttggggctaacttgattttcccatgaaattctcactgtcctgcacaatgtaacagagaatgaaaaattggttcatagatttcccaacatgaaacatttccagaagttgctcccgcaaatactaagtgacatcgttggtttgaaacacaaaggcctcaagtctgatttggaaagtttgataagttttctaacc

SEQ ID NO: 241376 - DNA, 574 bp, Cannabis indica
ctctctctctctctctcttcaaaccacaacaattgaaaagtccacaaaccccatcgtaggcgtgactccagcgacccatctccagccaccgtccagggtcacgcgccagaccattcgaacccccaggtgctggcgacctcaacccccaagcggcgccgctcctttcgccgttgttagctcgaaataattgcaaggaaaagttttgtggttcaatctttgaacggatttttcgaccacctttggtgtccgtttgacaagttgtgtgcaccacttgactcagctcgtcgaggagaacaacctacactaaaccatttctcccaactcactacttttttcgatagatttttgtagctccaccccttttcggtgatattctggcgatatcgtgtactgttttgacaaatggttgtcatgggtgtgatctactcgtttgaggtagtcattttgatatatgctatccttattttcggcgacgtttctgatacaccaatttttaccgccaccgatagttaaagtgcaacgcttaggtgaggcttcaaaactttaaactttaaatatagttatattatatgtc

SEQ ID NO: 241377 - DNA, 1566 bp, Cannabis indica
tataattagtcacaacttatataattataaattttattgtgacttaaaataaatttttttgtattgttgcaataactatactatgtaattaacaacaaatgcacattataaaatatttatgtataacgttttaagtaaatttttgtaaccgttttggaaaattgtaacaggaacaaaaatagtatttcgatttgcaagaaatggagaagagggacacaagaatctatacataatagaaaatgcagaatgtggtgaatttggaggaggaacaacaagaagactaacaagagggaattggactgacacacattgcagttggtcaccaaatgatgattggatagtgttctcttcatctagacacaaatcacctgatgcaccaaaaactgacaatggtcttgacccaggattttttaatgtgtatctagtaagtgcaaataattcttggatattggcaagagtatttggaagtgggtataatcttcaaggccatgtaaatcatccatttttcagtcctgatggtacgagcattgttgtaacttctgatcttgctggtgtgtctgttgatccagtctctatgcctattcttccccacctctattagaccttatggagacatattcaccgtagatattgttaacctaaatgacattaccaaaaataacaaatgtgaagaacttgaaacgtattacacatagtaggtatgagaatactagtgctagttggacaaagttctcaactaaagacccacatcagcttggaatagttaattagaatctaacaaagatcatcactatttgctcaaatgtccttatgcttatcctaaaacaggttgatagtgctttagtacttaaatattgatcatatttatagtacttactttcatctgtatttaacttattattttagtggcgaaagtacaaaaattattacaatatgataaaatttaagtaccaaaattatttttgattttgcaacaaaaatacaaaattattatgtttgtaaaacttaagtatcaaaattatttttttagtgcttaagtttgtcaatgtaataatttaaatatttttgtttgccaataaaatagtttagatatttaaatattacaaacataatattttaaatactttgaaaaactataaatataataatttgaatactcttattgcaaatatccctatttttattactaagcctttcttaatttagtctttttattatcttaactaggggaactaagccgcgcgaaccgcggtgttggcaaattttataacttttttaatttgatttacatttttgtactaattaaaaaaatctatataaataaatataaacttaaaatattgaaaaatgatataaatattagattaatgtaaattatgaattataataatattattaaaatattaaattgaatcaactaataaaatgtaataaaatgctttgtgggtgaaagaagtattcggacaacaattctttattatgttcattttctttaaaatttcatagaacatcctaaaaaaacttttgtaaattatttttagcaatttaattttcttatccctattt

SEQ ID NO: 241378 - DNA, 1114 bp, Cannabis indica
atttttttaataaatattatgaaaaatttataactttatgtactttgtagtacttaattatattatatgtgcataaaaaattaatttataatttattatacattttattaattatgagaaatatattcttgattttatatataaattatatatgattaaaataaataataaagagatcaatatataataataataaattcttttactcaagtaaaatattgaaagtgatcaattcaactatcattactttaattttgaaaaataaatatcctacaaatgttagtgaatatcgtcctatatcttgttgtaatgttatttacaaaattgcgactaaacttatctattcttggcttagacttgtgttgaatgatttgatttctcaaaatcaaaacgcttttatccaaggtagatacattacttatgatataatggtgtgccaagaccttgtcagattttatgaagaaagaattcgaggcctatttgtatgattaagttggatgtgaagaaagcttatgataccatacaatgaggattcattgaagaaatattgcaagctttcaattttcctcatagttttatagatttgatcatgatttgtatccgaacttctcaattcaggttataattaatgggcaaatgcaaagtttttttttggagctaaaaggggtcttcgtcaaggtgacctgatgtctctattgctttttgaattaggaatggagtacctatctcagatcgtgatgaaggttgggaggatggatggtttcaagtaccatgagagatgttgtgaccttcagttgaatcatttatgctttgctgatgatgtgttgcttttctacaatggtgattttatgtctatctattttatgctccaatgattaaaacttttctcttctactttgagtttacaacctagtgagtccaagtaagcaatttattgtagtggaatggaagaagttgaagtccaaagagttctagatgctttagggtttacaaggagtcgcatgccttttaagtacctgggtattcttatttgtgcgaagagactgtcaactgctgaatgctcatgtatattggaaaaaaaagtggctcgcataagagtttggagctcaaggaa

SEQ ID NO: 241379 - DNA, 1575 bp, Cannabis indica
cgcagacgacagttacttgtactaaaaggccacggctacagaggcaatccatgttcagaatctccttcatagtttcgagttggcatctggtcaacaagttaatctggcgaaatcttcgattttcttcagtgctaacacggagcctatggttaaacaacaactttgttctctgcttcaaatgcaagaggctactgaaggtagcttttacttggggcttcctagtactatgagtcggaacaagtctgttgtgttgggatatctaagagatagagttcataagagacttcaaagttatgaaggcaaattcctttctcgagctgggaaggaagtcctaattaaatctgtggtccaagctttgccaagctacgcgatgagtgtttttctccttcccttggatattagtaatgatattgagcgtgctatgactaaattctggtggcgctcctcgaagagtgatggtaaaggcattcattggatgtcttgggacaaactttgcaagcataaaaggggaggaggcatggggtttagagaccttcgtgattttaatctcgctcttcttggaaagcagggctggcggttgcttactagaccgtcttccttggtttcaaggatctttaaagcgagatattttgcgggtggtaattttctcaatgcacaactggggtcaaatccaagtttcatttggcggagtatagtggaagcccaagatcttgttcgtgcgggagtccgctggtgcgttggtaatggccattcaatctcagttttgaaggacccgtggctgccaaatgagaccaatccgtgggtgatttcaactcatcctgggcttgctgatgccactgtggcaaatctgttttcattggatggtttaagttgggatttggagatcgttgctgacctgtttgagcccagagatcagtcccttatctgcggtattcccttgcctgatactgctgctcaagaccatctgttttggtcctttgaaaactcgggtgagtattcagtaaaatctgcttataacttccttcaaaaacagaaaaataattggtttcatgatgcaattactgccttctggtctaaaatatggaaactaaaactcccttcaaaggtgagtaatctgctatggagggcttgttcacaatgcttgcccactttggttcaacttaaaaccaagagagtggatgttaacttactctgccccgtttgcaaggaagaagatgaaagtattctgcactgtttggtgacttgccgtgttgtcaaactggtttggaaccgagttggtattggtacaatagtgcctcctggatcaagctttttggactggtgctggggtgttttccagcaatctaccttggatgaaatgtgcttaatggcgactgtttgttgggctgtttggggagcccgtaacgacctcgtttggattggtaaaactgtttgtcccgacaacattgttgagtttgcaaaaaagtatcttgataaatggaaaaatgctcgtcaatcggatttcgatacatctcattctgcttttcaagtaggagatggtaatgagcgttggtgtcctccgcctaatgataacat

SEQ ID NO: 241380 - DNA, 950 bp, Cannabis indica
aaatatttttactttttcaattttaaaaacaaaaaactaattacaaaagtgttaccaaacgccactaaagtattttgttgacaaaaatttggttgttacaatatgagcactttagacctctttatatagtgtaagatatcaccatttaaaattttaactcataacctcctttagaggttatggactcaacaaatgagtataaaactcattctctatataacttttatagcttttaagaattttaaattcagatgtgtaatacttttttacacatttaatattggtgataatgttggaacttattttactacgatctagatatactaacatatatgttagattatataattttataatctaatatcctaaatatgagtatcataaaataatgaaataaacatataacagttatagaaaaccttacattgatggtagcagaataatatgactatttccattcagatatctaacccttaatcttttctattgcagagtatgatcaagttctgaacatggtttctccctcagttgactacacaatcttgcacactatcttgagtattgccatgaattgtgtgggccattactcattcactattgggttcgaaattttcaagaagaagaggaatataattcgaatatgataagagagttctatatattttctatttgtttgacaaagagaataaacaatgttatgaaaataaaagccagcatattctatttatatggtagcttttagggttaggttttgaattaaaatagaataaaaaagataaaaaatggatttatttaaaccattttggccaaattttatagggccaagatacaaaatggccctaaatctaacaattaagttaataaatgtccattttttaaaaaaattaataaaatatccattctgttaaaagtttgataatgaaattacaattataaccttgaataattaa

SEQ ID NO: 241381 - DNA, 1289 bp, Cannabis indica
atgaatgtgagacatcttcgtttgtaatgacttagccttgcagaatttatggtatataaactggatagaattatcaaaaagacaatttgttgtagcaaaattctcagtaacagcagaagaatactttctttttttcctaaggtaatagaaaatagtattcatgtgctgaaacaacacaataaaaaaacacagtaagaacgtgaaaacacattccaatatcctaataacaaaagcaaaactaaaaaataatgataaaataactattataaactacaaaaattagaaatgaatttaaacatattaccgagtcattgataaacatgtcatagcaagataaatgataaaactaagttttatcttcaacatagtttacacctaatttgaaccctggggaaaacttcttcgcacaatcctcataaacgttaaaggccctataataaaaaaaaaaaaataaaaaaaaaaaacaaaacaaacaaacaaacaaacaaacaatcctttgctaatccattcatcaaacttagcctcaatttcaagagaaatgaaatcagaaaaagaatcatcaagagcataatggcccttgacatacgtaacaatcttaaaattcctcttatatcctacagattgagaacctgaggacattacctccattagactgctcttcaaatcagccgacccaaaatcaacaaaaggagatttcaatgtcggggcaccctttctcttgtcctaaagagaagtacaagcgacagtgccatcctcttcttcattagaaatattggcatctcatttttgaactacctcagcaggaatggaatctggaacctgatgaaaagaaaaataacaagaaacaaataaaagtttcaaaaccgaatcaaaactctataacaactgtaaaacaactactatgaaaacacaatctaaaaaatataaataaatataaaaagcaacttacattgatttttgaaacaacctccaaactagccaaacaacttggccatcatcaatctcaagctggcttaagcccttgaaaaaaaaacaaactaccctttacatcaacttattttccctttgacattatcaacatccttggacttatcatcttcactacttgcaacaacatcaccttgaacctccccaacagcagaagcatcaacaccaaccttatcatcacagtgattatcatcagcagaaccatcacaacgatcttcacccgactcatcaccattagcagactcagttttaatatgctctgaatctggtaagcctttgtcatcatcaccatcatcaatatc

SEQ ID NO: 241382 - DNA, 932 bp, Cannabis indica
aagcttgtctacaaatggagcaaatggaatcagtaatgatatttctgcgaataagtgaagtagctacaggtaaagcatcatgaatgacacgccaggcaaaaattttgactttttgtggaatttgtagagaattttaatcacttttattaacgttatagaaattactattattgtgtttaatcacatatggtattattattaatttaaaattaaaattccaaaaagtcataaaaaacatatgtaagatacttatgtgggacccaccgaattaaacttggagacaaagacgtggtataattgtttgtggttcgttggggcaattcccacgtcacacgcttgttttccttgattggttttgtcaattaacacccgcacgtgcactttaactattccttaattcttttttttttttctttttaattcttatattaatataaaattatttgtcaaaatatatttataaccgtaataatagtaaagaatattagttcttttccagaaaaatagtaaggaatattaacggttacctaaattttttagtttgtaactcttatagtgtaattaaatttgtatataagtaaagataattatgtaatttgatatgtttgtcttactatttaattattataattgtgtaattaaaagtaattgagaagtttaaattacacttttcaatttttttgactctatgaaaattaagcaaaattatactgtgtaattattaaaaaatattatttttttttgtgtaattactaactattttgccacacaaaatattaataatttatatgtaattattattttttatccaaacacactttatattttaaaatataataattttttttcaacataaataccaatattttttgaattataattttctttaagtttcatcaatatagagttttgttagtgtgttaaacaagaca

SEQ ID NO: 241383 - DNA, 1102 bp, Cannabis indica
aaaaaaacaatttactaataattgtcaaaaaaaaaaagttaggttaataagaaaagtattataaatatcttttttgagagattttggtgtaaaattttcataaaaaaataaaaagactttgtgatagactttgtttgtttggtgattctatttatggtaaaaaaaaggtgttctctgtatgattaacgattggagtttggaaggaacacaattttataataaactctcgttgtgagacacaagtttcagcgagaagataaattatcttagtgcaagcggtaaggtacatctattaatgtaattgtgcattataatttatctttattattttttttattattaaaaattttatttagagtttttctttatttgaattttgcgacatggctattatagaattggttatgtagtaagtgcaaattgcttattattattttctattatttttttttatttttattttgtataataaagcaatttggttgatttttgtaataatattgaaatgtcgcatttgtaagtttgtcttcaaaatttaaattaatttttatttagctctaataaagtagttgcatacctcatttatatggttcatttagcatatatttttgttattggtaaaatgatgtgttttttagaaatcatcaaagaaaccgggatggaatggaatattcttgaaattatttatcattttgtataggattgaaggaattttattcatttatttatttgagattttgtgtttactagaagttgtaattttatttggtctaatgtttgcaatttttatatttagggtttgtctttaaataattatatttattgttttcttatattattttgtaagaaatttatgtgtgttttatccttggtttttagtttgtacttttttcttggatggacatcaaattttacgagctcgtagaagaaatttttgatgtgggcaatactgtggaagaaatgaaagggcatttatccttttctgatgggaagttggataatttggataatgcagaaggtagttgttgaccgagatttttcggcaactaataaaatattataaaaataccgaagctgtaagaaagtgagagaaggattttta

SEQ ID NO: 241384 - DNA, 1063 bp, Cannabis indica
tttagccaaaggaatagaagatacaatgggaggttcaggccaagtagcatctcgcaagaaacggcgtttgccttctgtaatttcttgcaagaaccgtctgtggcgactagaaatatcatcttggtgggatttcactaggtgttccctaattttcgcatccgttatctccaatatggatttgggttttggaattttgagtttgtatggaatggcaaattcagtaggatactcaatttctaaatcttttgaatcagattgggacattgctacaaggagaaagcaatcccgattcctggaaggaatttatcaaaccagaagttggtaaattagagaatctcgaaaacctacgttctgtctaaaccctaacatttacccagttacaattcgaccctaaaaattgctaaaaccaaatgagataacaaagatgctgactaagaaattagtaattaaatccagaaatacaacataacaaggacgtaagaaaataaggagaaaattcacttactgtttgaggttggtttttgggacgatgagcgtctttgcaatctacgaaacaacggacggaacgaagatcccttcgaatgcttgtagtcgaaaatcaaatcggatgaaactcgtaggaaaaatgttaatgacaatgatggcatgcaaggtttcgggcaaatctgagaatggttttttctgcagaaaagcttgaaaaattcttagagtttctaaattggtgaaggttatgcaaaggtggttcctttctctattttatactcttgggttaatctccgttagatcagggagataattgatcctacgggtagaatttgaaaaagaagtggaaaggatggtcattaaatgctgatgtacctcaaaaccacaaaactgccaaaaccagaggatatgcattttttcaaaagggattgtgacaaatataccctctgcaattatttaaaaagcactttttattaaaaagatctttttaaagggcaattgttatacccgaaattcagctggctcttcgaaataggacacatgtcaaaatgggagagtacaaatcaacaaatataatgat

SEQ ID NO: 241385 - DNA, 1185 bp, Cannabis indica
ctatgaacaagaggtaaacaacaccctgctggaagagttccttgactaaatataagaaagaagagaccaagtcaaccttaaattgcattcataccaatagaaggttgccatgtactttaacaaacaagttaaggaaaaaaattctttgttggagacttagcgctctaaagagtgttcctgaataccaaagattctacagcaggagtgtttgggccaaactgggaaagcccataccatgttacagagatgacaagcaaaggtgcatacaagctgggcaggtacaataagaacatggtgttagttctcctacaaagatattggaaatgggaacatcttagaaagtattagcaatgacaaacttgtaagaacactgctcttcaattatatttttgtacaactcacttataagagctagtttagaaagagctaagtatccctcactcttcaatgatggcccctacctggcatgtcaggtaggggtagccatagaatgagttctacaagcaagcattttattttgtaagcttttataataaaaaaaaatgtacattggacaacaacaaaaataaatatttaagatcaattaatgaataaaaatggcgtttctgttaaatattgtgtcaaacaacttgctaacaaggtaagttcttaaaattagtctttaatttttgttctatatgcgtacaaatgggtctttccaaaaaaatacacagacaaaggtctatagtacttagtgtattgcaagtgaccaagagaccttaagtctgcttgatcactttgggggcacccacaccgtacacgcactgaatacacatagctatacttgagcaaaatttaaagcttttataagtaagaaattaaaaggtaagtaagtacaaatgacatacttcagattagacatgaaaatgtaagtatagacacttatgtttaataaaagaagataaagtagggattaaagatctcctagcttgtcatctatccaaagtaaaaggccttaaggccaaatacaaacattgttcgaaagtaaaggacctacaagccatgcaagacaaataatagtgcacaaataaaaaggattaaaaaactaatagttctaaacatcataggtaacagcaggagtagcgaatttaggctggctggaacctaggcatcaacatcagcttggacgagtgaagcctctgaaaa

SEQ ID NO: 241386 - DNA, 960 bp, Cannabis indica
  modified_base (929)..(929): a, c, t, g, unknown or other
tcaagagtttgacaaggtcgagccatctgaacatcaggagcctgagagcccaatgtggatttctcccttgtccgagcttactaaaaggcaccttcagaacttggacaaagacgatcttcttagggacgtgcatgtctttctcccttatgagggacaacttgctaacaacccaggcgaaggtatgtgtgcgtggtatggcccacatgcaaaacatggtgcccttctaccacttcacccgtactttttgaaattggcaaactattataaaatctctccaatacaattaacaccaaaggggatcaagtacttggctgacacattcatcttatagcgcagcaagggtagggggaatcttttgtgcacgacattaactagttttttgaattaaagtctcctccgcacagtgaccgctcagggtacttctacttctcacagtatgaatactcatgactaattagcgctaatgagaaatgtgtcacgaagattggtggttttcaacaagactactatatggtcacaaagttttcgaccaacttcactactttccaacgagcaaagatgtatatctagcctgctttcacgctgggtcttagggatagggcccaagtcattttagtcttgtctacgtttactcagcacattgtcttactaaaaagtgccaagaatctgactaagtatatgctttatccaaaacctgagcgtttgttccctgagaagccttctgattcgaccaacccatttgctacaaagaagaagaagaagactaaggccaatagggtcagattttttcctactgaggaacccatccgcatcaaggaccctgaagaggtacctactcatagagtcgtgtagcctgtcgagaggaaggggaaagccattgttaaggaatcttctaatgatgatgctccttcaatccttgtccgggaggntgctgttggaaatattttaccaggatctaga

SEQ ID NO: 241387 - DNA, 1114 bp, Cannabis indica
ttttttttcaaaaaaaaaagaaatttgaatctaccctaaattaaatctcaatttcaccgaatctcattttcttcttcttattttcttgagaaaatccaaacagcctccactctggtgccgacctcgatcaaacttcaaacgatcgccctcactagctcgccctagccaccgaccgccacatgaaacacatctccaatcgcctgtcgtcgcgcatagcccgtctccaaccacctgctgcttatcttcatctttttagttctatttgtaagttcttcttcctcttcttaatttttggtaacgaatatttagttttggctgctattttaacatttttgtatagattaagaatgatttcaatctctgctcagtatatttaaattttgttgggagtttgaaattgtagtttattatatataaatatgtttaagaaatacatctaccatgtgtttgatagaataccttaatgagttgactcttcactagcctcaagaaaatcccttcatccctaaatctccaaaagtgaaaacgctattgactgagtctattgacacgaggaatgttaaacaccataaatctaaaagaaaacaaaaaatgattaagatgatgatgaagatttcttttttctatatgaagtactttgatttattgttatgatattgtctttatgctgtttttgtttcagaattttgtttttttaaggttttttttttttttttttttttttttttttttttttaaactctaagagggtttttgctagcttttgctcactgttcatgtttggacagaatgattaattcttgttttcagatattgtgttaaggggtatagttattaattctttagttcatagtctgataagatatttgaaatttctgaaccattgattaagtgaaagcttgagtttttttcactctcttgatgttttctgcattaatgcttctagctgttgtagcgttgtgtagcagagcgataaccattctctcgttattttctttttctgtttcatatatacacatttatatttttggtcacttgtcaaagattacgacacttctctttacacactttgaaatgatattatcattcattattctatcagtatgctttgtga

SEQ ID NO: 241388 - DNA, 1036 bp, Cannabis indica
aggatacaacttacaaaaagattcgatgataccctgattcgcatcaagaggtaaatatatatttttatcttttagtttatatttaatatatgttcatatagagatcctagggtatggtacgataataatcgttataaatgtttccgccgcatatctaatttagtactacaaaattaataaatagtactacagttgattccattatatatatattaaatattgtgtgagttttatgaatatatatatgagatatttatgtaaatggatagttatgatattgtgaatgtatgtgagtcgttgaatcgttaattatatggtaatattggtgtaagaattgttagggtttatgtcctgaaaagcctgtaaagacattttttgattattaaataaagagttgaatatttgatatatgtatgaatattaagttattaatatttattattgaataatttatattaaatattggaaaatttcgtattcatatatgaggttgtggcttgtagctgtatagagaactaagaccacttaactatgaataaaacagtcagcaacatattaaaattatagaatctttaatcaatagttgctagtacagttcactgatgcctgttctatggtgcaagtaatcttggtttggattattgatgtagtgagacatctaagtgaaggtgttacatataataaagattatatatgacatggaatgatttgaatgaagctgcctttattaacatgtcatttatcataatgacctaattcatatcataatgatgatcaatagtagatcgtcataaatcttgagttatcatgaactcctattcatgttattagtttctttgattgaatcgttaaagtttctcagagaaaatgattcttacaacttctatttttggaatctaattatatggatggatggaaacaatgtgtacaattatggaattgactttcctaacagatcgaatgttggctccctttaagtgttaattccaaaactggaattgtaacaccctaactaacataggcgtattacgtgatt

SEQ ID NO: 241389 - DNA, 919 bp, Cannabis indica
taaatgttaaatttagtgttaaatcaatacaaaaatgataaaattttagtactaatttttttctattccaatcataatactaaaaattacactaaaattatattctttattattatattattttattaaattataaataaatacaaataataaatacaaaatgtttaagtataaatattaaaaactaatacaaaaatatttggtgtaatctatactctatatctatactctagactctagagtgtcacactaataatagtgagacactataaataatgtaataaataggatactgtaattgaaatgaatttagtgtaaaatctccttaaatttgatattttagttttctattagagttgtcatttaaaggtaaggtttggtgtttcaatacaaaatgatgagaagaaagtgttaggagggatttaagcaagatctcatgctaaattttcttctcaaattgttgaaccacaagccataataagaggccttctctagtattgagccattcattttcctctaacacatgtggaaattgattctcttgttgtggttaatagtattagagatgacatagaatatttatcttcttttgaagatgtgcttcaacaaattacatgtttgttatttttgttccctttagagcactcacaacaagtgagttataatagctaaaagttaaaaaaaatagctaagatcttaaaattaagctccaacaaatgctttaaactcttagctattataactcattccaaactccaagaaattttctctacatttagctcatgaatattgaagaggtaaaacatattttatactttttctttctctctttcattaaattaataatttttattatttttttactcattttcatattttttatttgaattaataaaatatatctaaaaatataatattt

SEQ ID NO: 241390 - DNA, 648 bp, Cannabis indica
aagacaatattttcaattgcataatatcatagtccataaggattagtattatagctagtactgcagcaaaatataaagtatggatcaagcttaggaatatttcttaagctcaatttaaggcaatattgagaagaaaagaaatgtgcagtgtatttaataatatgaaaaaggtgatagaatctctagctttatgtgaccgaaagagatgatcaagatatatgtgaagggagtgattattacggcttaattaattattattatgccttgccgtaataacatacattaatataccgtctcaccatctatatataataaacagaaatgctaaaggacaccagtgtgtttagcactcttctatgtgtcaatatcgctattggtctaattaagtatcgggtcccatataatttaatataatagtttttagggagtatcactagccaatcacaacgtgacatgtcgagaaagtgctaggcactactggtgtctaatagcaatgctctataataaaatagaaaattactaaaaggaactatgcgtctagtacttttctcggtgtcatattgttattgctgtaattacttataaaatattaataatcaatcgtagagcgctacttatataagatattgaatattattagtgcacaat

SEQ ID NO: 241391 - DNA, 841 bp, Cannabis indica
cataattaagccctaattatcagctagttcaaaattaaagctaagtggtctttacaaatggttgactaaagcttctacgatagagcttgtcggcataaatgacatactgagcggcttgacatcgcagttttttggcttaagttttatcttaaggaagtgttccagttttcaagtagtcaactatcggggtcatccacgtgacctttttggctgtatcaacttccatcatctcatatcgattgattgttggatgagttaatacatctacaggaattacgtcgagtaattctacttctcttgtcgaggccaattgggccagagcagctgcatgagaattataagcacgaggttttctacatacaacaatctttttaaacttttgtaataactcacacgtataagaaagatatttggctaagcgacctcctcttgctaggtactctctattgacttggcaaaccacgatctgcgagttactaaatgcttgaagatactcaactttcatctcaagagtgagttttaatcctacgattagagccttatatttggcttcgttgttagatgcaggaaactcaaatataaaggcagcgtgtaccttgaatttgttaggacttatgaggattattccaccccctgatccttcactgttggaggccccatcaacatacaaagtccacccctccctcgttggtatgtcggaatcaactcgcacttatgtgattatagtcacttcgtcatttgaaaactcgagtatgaaatctgcaagggcctgtcccttgattgctgatcttggtttgtacctgatctcgaactggctcagctctactgaccatttgagtaa

SEQ ID NO: 241392 - DNA, 2112 bp, Cannabis indica
aagactgtgaagaatccaaacaactgaacgagtttcaggctcaaatcttggtgatactctacgacagaaaggatacaagggttagagatctaagcggaaggagtcatttaattatgctgcaaccaatgtaaggtttctcataccttttatgtgtttattttcattgttttagaaattcatatttaggatgttaaaaatatacttgttagtaaatctagatcttggtaaaagatattccaacacgtctccaccatcttgcctttgcgtttacggtcaaggggagggacgatttctctttcttcttcttcttcttcttcttcttcctcatcaatcaagacaacttggttctcgagaagttcagtagaagatcttcctagagtcaccaccacatcgcgtggctcgggcaggccagcttcaggactgtgtgtacaggcaagggcatccaggaagtcatccattggcttcgctgttcaaagataaacaaaggagttagaacattgccaaaaaaccatgcatgcaagagtaacataatgaaactaatcctaccatggtgatttaattctaccctagcaaatgtatatattaaaaaactggtgtcgtcgtcccctagaaagctatccgaggggaggaaccaacttgaagtcaggtatgaagaatggtccaagaggattggtacaggaggaccagaacccattcgggaccaacccaagaaatgactaaggttggaaaaataaaaactgttggcattataaccccatcgtgaatggggcatccgaaacctatgcaaccgactgtcaaattccactagccttaggccaacataatcttgaacagaaaggacatgatgaataatcaatggagacttacaagttccagaagtgctgacatcaggagccccagagttggggaccgggaaaggaaacttagggcaagtaaggacttgttccttccctgcctcctcccggaggatcctcccgaggtagcctgagcattaatataggccatctcctgttccttcttgaatttatactttttgtatttgtcttctgcagaagagatgatgtcctctcagagcgccttttcagttttggggtttcggatatgagggcaaagaaccttggacaagttgaagtcgtgcaccgactagctttccgaaatcaacttggccctcatgcagttggtggttgtgaccagatcccccatgttcaaactcatccttattataacaagcaaaaacttttgcatggttaagaaagagttaagtgggggcgttacgatgcatgggcagcaccctggcccattcagtgagcgactccagacatttaacagctttgaaactggaggagaagaaaaatcggtgacgatactcctttacattctttagaagttaaaaggcaccggaccatcgttggtagggtgggcctggagtttgtaaaaaccattcttaagtttgtcccctttttcgggacggacaggagttcataaaaatataaaatctcagccggactgggcggggcccagttcctagcaacataaaaaaatgtacaagcctaaaagcaggcgataggcttgaggaatgagttgataaggcgcaaggccaatgaaaactagaaagtctataaaataatcttgaagtggtagcatggctccggacatcaagtgggtttgactccatgctccgaaactgccgtagttatggttgggcatttctttgtctctcggaaggcgatgaaaaaccccgacagtagaaggcttaatcccagcaatagtgacgatcttctccagttggtgggcacatgtcagggtcgagtgcagcccatctgcctcccagccattggaccggcaggtgaacttctcataggccaccgggcctttcatcactatgaagaatcaaaggggctagtgacggctccattatgaagaatcacatcaatcaaggaaggataaagattactctcacctaatccctatgatacctacgacataggtcatgtatgccctattttatatctcttgggaacttgtgcacatacattgctggcactcaaagacaagtgatccctttttagctatccttaccaaactctataaatacccctaaacaaaatggga

SEQ ID NO: 241393 - DNA, 1140 bp, Cannabis indica
ttaattctcagattatttgacaaaaaaactaaaataaaatcaaataaaaaagtttgcagcatcacaattaattttaagaatacttatactttgattcatccaacggtcagaagacacagcaataaaaactgttgcagcaggttcattcaacctcatagctatgtaaagtacataactgcactactaacaactcgttcagtcgcaaagaacttgttattcccaaccattaataacgagttgatggtgagtcatcgaagaataaagaaaaaccaacaatgaaacaaaataaaataaaatcatgtcacacatagagactaaaacactgaaaattatgtcacggaaataaaatgaaaagactcaaaagtacatcatagagacaagactaaaacattcaaaatcatattacagagactgtaataaaaatcgaattaaagctgcacctaaactcaagaaaagccgactgaagacaaaaaaaaaagacttgatatagctatagatttaattttaattaatattaaaaaggattaatggtgccattattatttagtgttttaagatattttttatgttttttacaagaagatattttttgggctattgattaaagaaattataagaatgtacattcaaacaaaaaaattaaattttttacaatattatataagaagaaatcttattgtagcttgctttcaaaaaaaaaaaaaagaagaaattttattgtagcttattgattttttttagtctagcgctcaaaataccaccttacttgaacagtatctgctctaataatggctcgtacctctgtaatacattaaaaaaaaaaaaaaaaaaaggtaacttgccctcataatgtagaaataagtgccacgtgtagttcactgaaaagcgcatgcagcttttagtgaccaaattaatctcaaacttggcacagccacactaacccctaacattataacacgtgttaccaaaatattttaaatttaatagatttatatgctaattatctaatatttaatcaggaaaatccaattggagttttaacgtacatacaccctgtcacaataaaatattcatatatttattggagtcatcatctaactttttttttttttaaaaaaaaaaaagaagaaagaacatggt

SEQ ID NO: 241394 - DNA, 1047 bp, Cannabis indica
tgctatatctctgttgctgatggctctaactggcacttctatggattttatggagctcctaatgtttcacaaagaaatttcacttgggaacttctgaaaaaattaaaagacacggctccacttttgccttggcttgtaatgggggatttcaatgaaattatttctcatgatgataaacttggaggtgctattcgtaatgaatcccagatagatgcttttcgtgaaacagttgatcattgtaatttgacagaattggattttgaaggggagagattcacttggcataacaataattctagaggtgctaatgttaaagagcgacttgattatggcttcatcaatgacaaatggactgatttaatgactttgcctgtgcttaaacatctggatttttatgcttcagatcatcgtgtcttgctggcggacatttctcaatccaacatacagcaagtcagaccttttaaatcccgctttagattcgagaaaatttggctgaaagaggatgattgcttagagattattagcaaatactggaataatcctacagtaagtgatccgactgctctaactttggataacatctcttcatgcgcctttcacttgcaatcctggcatagacacaaatttggagatttacctaagaagatcaagctttctcacgaaaaagttgaagcacttcagaactctaaccatactgatcatgatcatttttcacaacttcttgaaagcgagaaaattttagatgatctcttggctcaagaagaggactactggcaccaacgttcgcgttcctcatggttaaaatcgggagattctaacacaaagtatttccatcaaaaagcaagctcacggaaaactgccaacaagattaccaaactgacggattctaatggcattgtgcactctactcaacatggcatttctaataccatacaagaatatttctgcaacattttctccactgaaggagttcatgcggctgctatacaaactgttcttgcaacagttccttgcctagtcactattgaaatgcaggaagcactttcg

SEQ ID NO: 241395 - DNA, 1703 bp, Cannabis indica
ttcgggtttgggtcctgggtcccggtccaggttcgggttcgggtttgggtccgggtccgagtccgggtttgggtctcggtccgggtcccggaaccgggttgaatgggttgaatcattgtcagaggatgaatcgtcttcctaggcgaaccggagagatgacgaggaggagagacggtgagtgggggaaccgatgatgtggccggagtcgaatggatctccgtttgggccaacagtagctgacagtggtgatccgcttgggccaacaacgggggattaggtgtcgagtagctgagaggccattcatggacgccaaccttcagttcatcgaggttaaaatttgagtgatttagaaaaacaaaattaagactcagaggagagaaagaatgaggtgcaaagagagggtgagagagaaagagatgtggttaagtttcttactttgctatatatattattttattattattaaattatttatttaataaaaaaatctgatacatttaatcagaaaataaataaagaaaatatgatatcctacatttaatatatatatataaaaaaaataaatattatttattgtattagtgtatattgggtaataataaaatttctcaatatgtatctgattatttttttaaaagaaaaataaataagagggtatatggtgacacgacacgtgtgtgagtaaatcatttaccatcacgttatgcgcgtcactaaagccacgtgaatcacgtggctttaatgacgcagataacatgttggtaaagggttttgctcacacgcgtgtcatgtctctataggccgtagtttttttattttcataaaattataaattttgggttttagcatttaatgacactccatatttttagtaacccacatttcgggtgataaacactgaatatttagagtcatttagtgtgggtcactaaaaactactcctaactttttagtgacccacactttttatgcgtgtcactatacagtgtcactaaaagcctaatttgtagtagtggataagggcaaaggttgaaattttttaccatattacatatgtaatcttgcaagtgagttgcttgttgattgttaccaaattgtggagggtgaagaattagtattgatgtacctagggctaaagtttggggaattatttggggtaacaaaagcagatatagtagatgggtaactagttgatgatgggagaaaaatcaaaaattttgccattctatttttgttggtaaggggaaatatatttttataaatttaccgttatatctttttaagtcaatatcattggttgatcttaggtctatagatcttaatcctgatatggttaggttcgactcagttgtattatttatgttctttaatttgttagttaaagtcgaccaattagatcttctcgtgacattcagattaaggagatggtagttcaattgagtgggagtgttaatcatagatatggaatctatagtctctataagtatttagaagtgaaactataatttccttcgagcttggcttgatagagataaatgattgagatcttatttcagtaattatattagtttactgaaatatcattcagaggtagctaaatattttaaggataaaatacattgaagggtagaacggtaaaattgtctcttttcgatgtagatcatatatagaggatctttgactattaggattgtaacaatgga

SEQ ID NO: 241396 - DNA, 851 bp, Cannabis indica
taaggccttgcaaactggacaatgatgtcctacatgctcccaagatattgcacttagttattataataaggattatacgctaagtgtttcaacaactaattcgcctcgtcaatgcttccctacatgtagcgaggtaaatgtctcgctatgcattgtccgtagttccctcgggattacgccttccgaggaaggatgatttctcgtcaatacacgaattgatagtttgtgtatccttgtctcgcctgagaatatatcgtcagtgagttatgaatatactctattaattctatatttaatgagttattccattttgcatttaatgatataatcgttattgtatctattgattcatattccacgagattgacacgtgtcactttctaaagtacagtcaaattttgggtataacaattgccccttaaaaaaattctttttaataaaaagtactttttaaatgattataaagggtattttggtcttaacctaatttgaaaaattgcaggcttttaaatttggcgattcatgctttcgaggtacatcattagcattaatgagccatctttttcaattctttcttgttcctgtccgttggatcttttgttcttttaatctaacggagatcaatctcaaagtataaaactgcacaggaacaatttttttctgccatttttgccttttcaaaaaatttcaagctttttctacgaaaaaaccattctaatttctcgaagccttgcatgccctcattgtcattaacatatttcttgcgcgtatactcggatatactgttcaacctcaggagtctacagacgtcatcacactattcatttcgtcctcggttgtagagcttttca

SEQ ID NO: 241397 - DNA, 723 bp, Cannabis indica
taaataaataaataaaatgaatatatagagagagagaagggtttgttaaagagataattgggttttaggcatttgaggttttagtcatcaaagtctccaaacaggaaaccttcggtaagttcttcaactttcgattacatccatttctcctcttttaattccaaaatccgacaccaagtttcattttttttttgtttgtatctctgttaaccccaaaaggggtttttcatgccaaaaaagggtatttttttttctttccttacattgtaattatgtttgtgtgtgttattgattcgaagatacgattttttcggttcgtgctgctaagatatgatttttgttttgaataaataaatgccagtataatcctaaattctgtgatcttacatgttttctcattttttggaaaaaaggaaagaaagctctgatttttacttggcttgatggaatagctcagtgtaatgaactgaatgagtgatgtgtaattcgttgactttactatataggcttctcaatagtaaataccatctttcatgggtaggtttgaatttttgtgacattagacagatagaagattttggggattttggttttgtagtatgaagttataaatagggctaaatttattttcaatttggaggctcaagcttatggattttgtggcttatgttctggatgcaaaattttttatatggttcagagtccaaggtgtttctaagctaa

SEQ ID NO: 241398 - DNA, 983 bp, Cannabis indica
ttaaatgatccagctcatcaccacaaacaataatctacgccatcttaaaaaacacgcttttagtacggataatccggaagctttataaacacacaagccttccaaatacgtacaaaacttccttcttggacggtccttcaagactgacagtaagctgtttgggagtgtaccttcggattaataacaagctatcatggagagatattttatacgcgatacaagcttatctggaagtaccttttggattctacaagaccttccgtatagggctttctggatccacactaagcttccggtatctgctctctggattaacatcttccatccagacaaaacttgtaaccattgcaaccaacaaatctctaccttggtttcaagttgaagtcgcttgataaatcattgttttaaattttgttgtcttctcagtccctccgggctcagcttcctccaatcagcttcaggcaatgctcaaacttactacttgtcactaccttggttatcatatcagaaggattgtcttcagttggaagcttggtaatcttcaaggaaagtggcgtttatggaaacgagcactttaccatcattgtgactataaaatagtccacccctagtcttctcagaatttttaagtataactagccaaagttattactctttggctagtaacaacttactacaacccgctaattcaaaattgctgaaaatcaatatccgacaaattatttttaaaaattaaacttgtcgacaaagtctttgtaatcgtagatccttcacaaaccaacctaccagataaaaataaataaaactctattaccacacaatataattaaaaaataaataatgtgaaagagcgatagtaaaataatctatattaaatatataaacttgaaatacttctctcaaaactgaaaagtcattgaagtagaaatagaagtgaaaaatcatttctcttgcccattgaaaattaccctaaacaaataggg

SEQ ID NO: 241399 - DNA, 418 bp, Cannabis indica
acggtgggacggctcagtattacttcgtttttgttttttttttttttttttttttcatttcacttaatcttttaagaaattaaaaaaacgtgaaaaatttaagaaaattttaatataatatctcttaaaaaccaaatacatataatactgcgttttccttttaaaaaaaagtagtatttgttttacataattacttgtaatttatagtactactattactataaaaccgtaattaatttagaaaaattgtctaaaataatttatttttaatctaattttcaaaaatgatttggtcaagttttaataacgtttttatttatttgagtatatttcaatactttcaagctattctctttctctcatttttctttttctctttcttatttctctctcttctttcaaactttaaaaataattt

SEQ ID NO: 241400 - DNA, 1451 bp, Cannabis indica
atctataacttctatctagacgttgaagtgaagtaatgatttgctttgagcttggcttagtagagataaatggttgagtactcatttcagaaattatattagtttactgaaatatcatttataggcagctaagtattttaaggataaaatacattgaagggtgtaacgttaaatttgtccctacttaatgtagctcatctatggaggatctttgattattaggattataacaatggataatttcgtagtgtatctatatcatggaacatgtagagcgctctatatattaagagtgtaattccaaatctattgtggtgctaggaggaattaatatgttagagaatttactttgtaaattctagcgctacttattggaagcttgattatatatgcccatggtttttcacactagttgagacaatactgcttgtaagactcatttaattgattttaattaatcaattataattctaaaattagattatgtcttatttatgaatttcactaagcaatgacttaattgttaagaaaagagattttagagttattcgttaattaagagactttttggagtctaattaataaataatataaatgataattttatttgataattaattataattattaaataaataattttgtcatttacaagattaaaattagaaaatatggtatttgtgaaataatagataaatggttgaaaaatggcaaaagtataattagtggggcccatatatatggtcgaccactcaatcctaatttttgctattattttatttattttaattccatataattcaatcctaaccctacgtgaaatagtataaaaagaataggatggtctcattatccaataacttgatataacctggtttgtatttagtcagacaactagtgttttgagacctccataataataaagccccatgtttccccagcattcttcaaaccaaaaggcatgactttataacaataaagctccatgttggttataaaatttgtatgctcttgatcagcgacatacattttaatttggttatatccagaatatgcgtctatgaatgtcattagctcgtgtccagcagttgcatccaccaactgctcgatcctttgtagtggaaaccaatcctatggacatgttttgtttaaatctgagaagtcaatagttctcccacttttgtttggttttgggacaaggagatgattagatatccacgagggatagaatacctcgcgtataaagtcgttagtcaacaacttatccacttcctacttgagtgccccttgtatttcagaatccaagagtcgtcttttttgtctcttggttgggtaatttgagtcgatatttaagtggtggcaaataactttagggtcaatccctatcatatctgaattgctccaggcgaactgatcctagtttgcctttagaaaactaatagttgctattt

SEQ ID NO: 241401 - DNA, 1636 bp, Cannabis indica
ggcataaaacccaacaattcaacgagcagatgtcgagcctgaactgggccaaccacaagctccttcagctggaacatctgtccaaaacccccagtaccttagtagttcaaattcgggcagtaaaagatctaacaacaacatcagacaaggcaatggaaaaaagggaaagttcgcaggcaaagccgaatggacccctagagagaatccttccaagttcactgctttctttgtcctgaatgacgacttggagaccatttaaatggctactcagtcagtggttctgtacaagaaacctacttctatgaaaaaggacataagtaagcgggacatgtctaaattttgccattttcatggagattatggccatgacaccaacgaatgcaataatttgaagcgggaaattgaatttctgataagaaaaataacccgcatgtgcacaaatatgtcaaggccgaccaaaatcaaaagaccccccaggcagacattaaccaagatttgttaccgcatccactagtagacgggcatttgcaagtcatcattgggggcccacatatagctggagattcgggcaaagctcgggaaaggtatgcctgaaccttacaacacgagcaaaaagaagtggtcctagccgtagaagaaaggaagccaaaaataccacgagtaggggaacccgctataacattcaatgaagaagatgatgtcaaggttcgcttcccgcacaatgatccattagtcgtggaagtacagatagctaacaaaacagtggcccaaactatgatagacaatggagccagcaaatatcctattcaaaatgccatatgaaaaaatggggctccaactcaaagatctgatcccctgcctccagcccgtatatggtttctccggccagagtgttgcacctttagggctaaatcgcctacccctcaatgttgggcaagctccgaagagcataaactgtgatggcacaattttggtattggatgttccatcagcctttaacgtcatgttgggctcactagccttatatgacttaaaggttgttacatcaatattccatttgtgcgtcaagttcccgacaaagaatgaggtaggatgcctgagagggaatcaacaagttgtacaggaatgttacaactttgccctaatcaaggccaaaaaggaagaatcctccggtcagagttcgaacaaggggaagagaattgccaaatagggaactgcccaaggtagggacgaagatgtggatcctcgacttggggaaccaaatacaaatgttgggctggtggaagaatttgaagaaattgaaattgacccaagtgccccgactagaaaactcaaaactggataagatttgttgcttgaagtaaaatcagctctgataaaaatttctaagagcaaacctacacatttttgcctggtcacatgaggacacggtcggaatcgatccttctataatttcacatgccctgaacatcgatacaaacttttagccagttcaataaaaaataagattgttagacaaagaacgagccctagcactaaaagaagaggtagaaaagctgtgcagcaacagtttcataattgaggctttcaacctggcctaggtagctagccccatactagtccccaagccgaacaa

SEQ ID NO: 241402 - DNA, 1029 bp, Cannabis indica
ccaagaccaggaccccaaacccaactttacctagaccaggaccaagacctggaccccaaaccttagcttaacctagactagtaccccaaaccccagcctggacccaaaaaccagacctggaccttggcctaggtccgggttcgaggtttgggtctgggtccgggttccgagtttgggtacgggtctaggtccgggtctgtgttcgggctggggttcgggtttgggtctgggtctggagttggatgggtttatgtcatagtatggtgtagaatattatttttttagtaaaacaaaatctaaaataattttaaaaacttaagtcaaacactattgaatttttaaaatgataaaacttgttttttgtttttacttttaaaaacacaattatgaaaaataaaaaagctgaaaacacagcctctcagtattttaatggattatacataaaagttcttttgtatatatttcatctgtatttatttgtactaaccaaatgtacggattttgatcaaatattggtcactttctgtacactatccagcatatatacgtacgtatgtgattttattaacgctaatacttgatgaaagagtaagtaataagaatataagatctgagttgataagtcacttataataagttttcaggtaaaaaaaaaggtctgtaaattgggatggaacttatttactgggttgtgtagccatatgccgccaggtcccagtgacagggatcgatcgacaaagatattatcatcatttgcataatctcataaagtcttaatacatatcctcttaatataaactataagtagaaatgactgctgtgatatgaaattataatgataattaatacatgaaaaattattagtttaactaagtatggagtctcatataattaaatgcagccaatcgcaaaatgatacttcgcaatgctcttaatatatagtgagcaattaatcaagtgatcgattggactggctgggaaatttaaacaatatacaagcccaagtagacaaagacaaggtgcatgatg

SEQ ID NO: 241403 - DNA, 1383 bp, Cannabis indica
tacggagattaagcgatttgttaaaccacacacttttcgattccaaaaatcttgctagccaaaattagtgaccatttttacatgaccacttttctacttaagtatacttaagctttaaatcacataagattaattttcacacttactctatttcttacaaattttaataccaagcatattaaaattatgcactaactttagacactaaacatgtctaagtcttactcaaattttaggcaccaagcatgcctaaattcacatggcatccattcttttactaaattgacttgataaatattggatgtcacccccacacttccacacatttaatagatatgactctattttatttccttcttgaaataattttctttacactatcattgacaccaaccatgtcaaaatttataacctttgtactcataatcaatcaaacaaattttgattaactttttgagtcttacccccacatttttactattactatcatatacactaaatatgatatgttatacatatattattattatacaacaataatgtctataacttttattcaaaaaattgtaactcccacaactttatgctaataatgtatgttactatcatctcatatataacatacataatattaatatttatcacaactatatatgttacatatctcacatacatgtaacatatacacttcaatatacatatcaatatattataatctatatcatctccacatgatatatatttattgtatgcatcttatgatatatatattttcataaataaatattctcatcacaaatatatatcatgtattacatgctatacattatatatctcacatatatattaacatgcaatacactcaaactaatagaattatttgtaaatttgttgtacacaaaattctcattctcaaaatgatataccaaacacatagagtaaagtgaaatgaactttatttatttatagcttcacaatcattatttaaatatgtcaatacatagacaatcatctcacaacacaatataagcatgattatgccataatcacttcctcatcatctacggtattaatctcattttcattggatccttacgatgcctacaatctcttgcatagttcccagattttccacacacaaaataatggtctctcacttctttgaattggctattgtcttttctttgacccaaatatttttcaccacttttattattgttgttgcctttgtgatgcttgtttgagaccgcattggccttagaaacctcatctttaggttctttcacatttcccttatctctcaatctcgattcctcttcgattcagatatatttttggatctcttccaatgaataatcctcatttttatggaggattcttttc

SEQ ID NO: 241404 - DNA, 881 bp, Cannabis indica
gacaagatcattctctccaaagagaaataagccaatgtccacttggaagtaagatcatctgtattcaaacatatggatgtacattcaggggtgaatatgagttatcattaaattcttaaacgatcactcaatattataccttagaataaaaaaaaaattgaaatgtttgacaaatttcatgaatttctagcaatgttgaaaaacgtgaaagtaagtggttaaagatcctgcgatctaataggggtggagaaatatctggttatgtagttcaaagatcattaagttgaacttcgaattgtatccaaacttaactctccagaaattcagattgcatattgatgaacatgaaaggtctatgattagttactagcagcgacctgagtctctctaaggaaatgctaagtctagaatcagggatgtcctgatcatgaacttaaaaaaagctagaactgttaactaaggtttgcaaatttgatagctattctaaagtgattaggggtggaccatcctatgatcattaagataagaaagtgtttgtttcaataaatactacctttctaagaatgtgactaaatttgaaaacaaagtagcaaagtagaggagatatttttcttgatttaattccaaaagtgttctatcaccttattccatctaagatctcactgtctctattgtattgatacaaccgatgaggtcaataccactaatatttctagacagaaagttactgtaccttgtcgtagtgagagggtttcaaggaactcaccctgttatgacttgaaaaatacttgtgattaaaaaccattattagtttaaacaagtaatggatagtcagaataagaaactaagaagcaaagccaagagaactatggttaaaacca

SEQ ID NO: 241405 - DNA, 1791 bp, Cannabis indica
taatcgtagaagaatggaaggttatcaaccattcttatcacaaaagaaggaacgacagtcttctcctccttaccagtgagaacgcccataacaaacaaggccatccccaacttgtagacatcatcagcttctgtgcaactctcaaaaactctgcgcagttggccgaagctgatcgaaggactaccgttgaaatattccatgatcaaccggtcagaacttcctttttctttgatgtcttccttagtagggtcgggcaacaagtttaacccggtgaccaagccgaactccaccctgccaaatctacatctcttccttcccacatagaaatgcacctcgtccggcttgtcagattttattttgtgaagcatcaactgatgaaaaaatgctcctgaaaattggatgagctctctctcgaaaaactgtttgaaaggggattccctcaccctgtcccataggttgaattcttcaaatttagccttaatctttagatagtagtaactacccccgcgccatgtgacacggcttgtgtaatggtccgacactagaattattagatgtgcagttccctgaaaaaaaaaagtaattaataattaataataaaaccataaccaataattaataaatcaataaaaaataaaacaataattaataattaataaaacaataataaaatattacttaataattaataaaacaataaaaattaatacaataattaataattaataaaaaaacaataattaataaaacagtaaaaaataataacataactaataattaataaaaaaaaacaataattaataaaacaataaagaataatacaataactaattaataaaaaaacaacaattaataaaacaataaaaattaataataaaaaaattatttgtaaacaaattattaataattaatataaaacaattattaataaaataattattagtaaaacaattattaataattaatataaaacaattattaataaaaaaaatagaacaataattagtaattataactaaaacaataaaaaaacaatacttaataaaacaataactaataattaatataaaacaattattaataaaaaaaatagaacaataattaataattaataaaaaattaaaacaataattaataactaatactaaaacaataaaaaataattaataaaaaaaacaataactaataattaataaaacgataattaataattaataattactaaaacaacataactaataattaataaaacaataaaaattaaaacaataattaataattaatactaaaacaataattaataattaataataaataaaaaattattacttaataaaacaataattaattaaaaaatacttaataagtcattaaaaataaattaatacctaaaacaatcactaaataatataataataaattaaagacctaaaacaatcactaaataataaaattaataaaaccaaaaaaaataaaaataaaaaataaaacaacgggtccgatggctaccaatcggacccatagccatcagacccaaacaaacccaacaaaaatggcacaatcggacccgttgcaatcggaccatcgggcttgttaatgggaccatcggacctcaacaaagtccgaccatcggaccccaaacaaccccatcggacccttacaaatcggaccctaagatgaccatcggacccaaacacccccatcagaccatctccttcctcatagccgaaccccaatccccattccacaaaaaaattttcttaaatctaactaatagatctaacaaatttt

SEQ ID NO: 241406 - DNA, 733 bp, Cannabis indica
cattgtgatatttggggatcttaccatatcccagctcattctggacacaattttttttttttactttagttgatgatcattcaagattcaattggatctatttgttaaaacaaaaatctgatgctcttaatgtcatttcacaatttctatcttatgttaaaaataaatttacttctttcatcaaaaggtttagatctgatattactcctgagatggcttttaaagatttgtttcataaggacggtatcttgcatgttattaatgacggtaagcgtttccttgctcttttgaaaaatattttcattatttttgttaaacaatcaactaatatggtggctcatacctttgttagagcttttatattatatccgaatggccttttcaatttagagtttgttccaactgatttgctaccttgtttggtagcagaagttaatgattaagaaagttgaattttccattcaaaaaatatagtaaattaaactattaaaaattataataaatttatggggttttttcatttttacacttctaaaactttagttttttttttttttttattttattttttttttttacgaaattacccatattgcaactagcgctgcaacttaaattacaacaaaaaatcggatagaaatacctattgcaactagcgctgcaatcactttagaaactcaaaaccgtaaatttaaaaaaaaaaacagtatatacagcaattcccctaaattta

SEQ ID NO: 241407 - DNA, 739 bp, Cannabis indica
aagactttaaattccatcacatgtgtgctggaattaaattgaatcatctttcgttttgcagatgatgtgtttctcttctgcaatggagatctcaaaagtgttcaatacatgctacatggcctcaatctattctcaataactttaggcctacaaccaaatccctccaaatcagctatctacaacagtaacatgtccagaacagagccgaaccagattgtaaaagcatatggcttcaatacttgcctttcacctatctaggaatccccatctactctaaaagaatttcagggaaggaatgtgccatcctagtggataaaatgacatcaagaataaaggtatggagcttcagaaacttatcatttgtagggagagcaatacttgttaattctgtgcttttgaccatacactcatattggagtcagatcattattctaccaaagaaattgatccatggaatagaggctatatgcaggaaatatctttggaaaggtcatgccatgtaccaagggccaggacctgtgtcctgggagtctctttgccattcaaaattggtaaagggcattggctttaaagaggtttcagcttggaagaaagctgcaatggggaagtatgtgtgggctttggctaataaggaggacagattgtggttgagatggataaatagtgtgtatttacacaatgaggactggtggagctatgcggttccaactcaagctagctggtattggacctgcacagt

SEQ ID NO: 241408 - DNA, 698 bp, Cannabis indica
cctctccaatgcatttcaccaaaaacttacaagtaatatcagttctcctttatcctagctaggttaagctcctcctcactcggtgaagacgatgatcgatgacacatttgtgaagaatttaaagcacactgccattttaatcgaatccatcaatatatcctatatcgtgattttaccaaaaatattcacttctttcatttgaaattgtaaaaatttgtttatagttaactttgagacctaaaaaaaactttgaacactacatatttctatttgggcaataatccctcatcttatagactctaccaaaagtactaaatacaagataaaatactttccatctttatatatatagtaagtctacaatgcattttcttaaagaaatattttagtagattttctatttttttcgacatatgaaggagctttttaattatttttttttttatgattacatacgttatagttatttaaactaattgtaaatttttaaatattttcgaatagtttacaatgtcgaaataagatttacatattttgttgcacacgcaattattttttttctaatatatgtgataagtaactgtttaaatttaatttttggcactgcaaactattagaattttttttaaatatttacaaatattcttaaataaatataacgcatgcgattataacaaaaaaattaaactaattttttt

SEQ ID NO: 241409 - DNA, 650 bp, Cannabis indica
atacatatatagatttctacatttataatacaccgcccctaattccaaactcggattttaaaaaaaaaatttactaataattgtcaaaaaaaaaagttagcttaataagaagaagtattataaatattctttttgagagaatttggagtaaaaattttcataaaaaaaaaataaaagatttagtgatagactttgtttgtttggtgattccattgatggttaaaaataaaaaagtgttctctgtgtgattaacgattggagtttggaaggaacacaattttataataaattctccttgtcagacacaagtttcagcgagaagataaattatctcagtgcaagcggtaaggtatatctattaatgtaattgtgtcgtttatttgattgtgaggagacaaaaagctcgtgtgtggaagaaaatatgtctaaatccactaatttatttgattactctcatgttgacgctaaagttattgataatagtatgaagcgtccaaggacacggtcgtatttgattgctaacaacatataccttactgttggaagttacagtggtcgcgactatcataggtctggttgcggccataacttttgactcgggactcagtttgggacattcttttataccgttggaaagctcttttcgagct

SEQ ID NO: 241410 - DNA, 1292 bp, Cannabis indica
caccctccaggtttttttggaagactcggcctccaccatcttgcccttgcgcttccagtctagcgtggcaacgatctcaccttcctcctcctccttgacctccccgtcttcatcgatcaagacgattgggcctaaggggtcactggaagaagacctccccggggtcaccgtctgggcgggtgctggaggtagagcagagttcgggctgtatgtttgggcaagagtcgccaaaagatcctccatttgctgggctgcttcaaaaagtcaaataaactaagggtcagaagggccataagaaagtacgcacatgaaaacaaagcggtaaaactagtcctaccctgactatctaactcagccctagcaaagtcttgcactacaatactggcttcatcatccctaagaaagctgtccaaggggagaaaccagctggaagacacataagctgagcgatccaggggaatgagtgcaggaggtccagaacccatccgggaccggcctaaaaaatgacctatgttggaaaaacaaaaggctttggcatgatcaccccaccaggtagggggcatcctaaatctaagaagacgctcgtcaaatcctataggcctacaccgggaatactcttgggcagaaggaacatgatgaaccgttaagggagacttaccggatccggatgtgctggcgttaggagccccactattgggaactgggactagcaacttaggccgagaaggcatccgttctttgtccgcctccagtcgaagggtcctcccgacaacggcctgagccttaatataggccaactcatgttccctcataaagaagtacttttggtactagtcctttgctgaggcaatgatgtccgccctgagtgccttttcagcgtctggggtgcgaatatttgggcagagaaccttggagagattaaagtcgtccactgattgactcccgaagattagcttggccttctggcagttctccgttgtgaccaagtcccccacgttaaggcctttcttgtcataagtggagaaaaccctggcacgctggaggaacagctgggtaggggcagtgcggagatgaggagggatcctgacccactccgtgaggagctccgggcgatccacgtcttggaagccggaagagaagaaaaagcggtagcgatattccttaacattctttcgaaaattaaaagggactgggccctcgttagaaggatgggcccggagagtgaaaaaaaccgtccttaaacttgtccccctttttggggacagacacaagttcataaaaatataaaattt

SEQ ID NO: 241411 - DNA, 656 bp, Cannabis indica
ttcctggactggtgcattcaatctttcgtcgctgctgatacagagaagaggaaactgctgccggttctctgctgggcgatttggagtgcaagaaacgagtttgtatggcaacaaaaaactgctactggtgctgctattttgaacacagcaacgggattcctagagcaatggagtaaagctcagaattctcttattgagacgtcttggtcaggttattcgactagtgacggagctgagcaatgggctgttccgagtgaaaatacaatcaaggtaaacgttgatgctgcgttgtttaatagtagtaacaattttggctgtggacttgttgctagagatcaccacggcatgctagtccaaggaaaaacactcttgttcacaggctcggcatccccggagcttgctgaatcaattgggatacgggaagcactaagttggataaagagtcaagggtggcaatatgctacggtggaaaccgattgtcttaccgcagttcaagcacttagaagttcaatggacatgatttccccttttggacaagttattttggagagtaaaaagttgttatctgatttgaaaactgtttctgttttatttgttaagcgatcagctaatatggtagctcataactgtgcaagagcttctatattatatcctgg

SEQ ID NO: 241412 - DNA, 681 bp, Cannabis indica
ttttagtttatttttttctttttatataatctgataagataactattttatgatatttttttaattaattttattagtataaactagagggtatactatgatgtacatggtactcgtttcgtataagggttgtattgtattaaataacaaataacactatgttttattaaaataatatattgtattaattattacgatcaataattttaatacaatgtaagttgtattatttaatacataacaaattgtatgtattagcttatattataatatttacaaaagatatagagtaacccaaatcgccaacccagatccagggacccggatcaagggacttggactcaaacctgtatccgggatttgaaccacggatcttgaaccccaaaccaaaccttgaactcagactctagaccctaactcaaactcggacccagaccccagatccaaatctagtctcagacccagacagggactggaatccaaacttgaactcgaacttagatctggattcagaatcggtgttgaagtcaaatttattgaaaatatatgataaatttacacaatttatcaatacaaattaatattattatattacacaatactatataatataacacaatagaataggcacttatatcaaacaagtccataaagcatatatatgtatattcaccaccatag

SEQ ID NO: 241413 - DNA, 1443 bp, Cannabis indica
atattgcaattgagtaattagagaggttgctgatggatcaaactagtttgttaataaatatataatttaaataaattaaattaaattaaataagctgaaaaaaaatccttaggtctttgccgtcgtttcctaaggctgtatatggcgtcggttatttgctaggaaccaacaccatatacacccctatggcatcagttcctagcaaataaccgacatcatatgtaccctaatggtgtcgattatttaatttagactctacagcgtcacttggatcagcctcggtagtaaattttatcaaaaccgacgctaaaaggtcttaaaaacctctaaatgatgattttgaagtagtgccaaaatattgtaattaaattgctctcccaatcgacttattttgtccatgtttaaaaaatagtcctttacaaacatcatttttaatacttttggcaacaaaagaaactagaggcatcttgaggttccaaagagcctcatttatagccttctaaataggataaatactagcacttagtgtataattattatataaagtcttacttttaatcataataaaatttgtgactaaaagttaaaaaaaaaattgtgactaattataaattattattcctataatgtgattaaaaggtccgtggctaaatgtatatttagtcacaaaaattataatttattatgactatatatattttgtcacaatacttgttgccactaaaactatattagtgacaatttgtatctaaatactatattttagtaacaaatagttttttattgtgtctaaaaattacattttgtcacaacaaaatttatgttgtgattaaaaaatatcttaaaagtaattattttttataatgaatgttacacactcggacgggttcgagaatgcctacatcatctaatccaattaacaagcccacataattcataattatgagtggcatgtactcatacaatcaaacacttcagacaaatagtgctaacactcaaaaaattaatgttcatgtgactcattattattctcacagattaagcagctagattcagtaatcattccaaattttattgttatttcgatttttacctaccagacgtggcatgcttacatagcagatatcagcgccacgtgacagtatagcttaccgacaaggacgtcaagtaagcaccctagccaacggggatcccgacactcaaacgggatgacgggcaacagaccaaccacctcaagggggctggccagccctatggccgctagcttctggacatcgcaaggctggctagcctacatcctgcaggtgcatggccaacaaggattggatctggtaagacctcgatgcacacctttacacgtcgactgcaagctaaagtgcgaattaggccctaacaacccaataaagtagatagaaaatacctatttttaagggacattttagt

SEQ ID NO: 241414 - DNA, 840 bp, Cannabis indica
cagaggccaggtaggatgaaaacgacatagctgcttccctcagcatatttgatttcctcaatcttatatatctgtgtaacttctttaattataccattggctgattcaaggttactgagaatctcttaattacttaacctctatcagatggctaaaaagtgtgatttagtattgatcatcttttttgttataatgtaatttttaatttaatttcttatggtactcattgtagagatatcccaagcatacaaatattgacctcctttgtctctttgttgtattggtttttattttatcttgttggtgggaggagctttttgtgtagcataagttcttggtaaaggttctattttgttactttgcattagcttttctctgcaacactccaaaactctttaaatttacttgaaattagttgcagttggagtatagctaaaatgaaacaactgtaatgtttcttattactattgctagttacatcatctcttgtactggccataagtttttttactgcttgccaattttttagaatgccttgtagtaattatggctcaaaagtagggcggggaaagtagtcaatttcgattttgctgcaagaaataagttcatagcaaatgtgtattatggatcaatttatcatcagaagatggactacattattgttgacttgcatattgatggataggaatgattaggatgtatattgtcacctttgaaataatcattagaatatgtctttaaaccaattataagttttgaccctttttgctccttattttgtcagggtattgtaatcacggatccaaaaagttggtatcgcttgtgcagtcttgtcctttt

SEQ ID NO: 241415 - DNA, 738 bp, Cannabis indica
tttgagttgggttttagtttgaccgtattggttttttttttcctttccttgacttggagttggagatatatatgggcttgtcacattttgattgagacgtaggattttttgggttttttgagatttgtgatgaaactggcttagttttttctctttaatgttatggttttgtaaaagaatcaagagatgaattttagtttgggatctccatttttgagcttcaattctcgtttgaacagttttaagattgcttaaagaaaatttagtgcagagataagttgtttaaaagcttatagtgagctggaaaacacaatgtagcagttgattttattaacatggcagatgcctgagatattattgactgtgaaacttggtttgagcttacatgttgaaaatgttcacttcttttgttaaaaattgactgtatcagttggtgcattgctgaccaataacaagatatatattgatgttgtgttttaaatttttagagccttttatgaatctgaaaacatggctatagttgaacttgaattcaatatttcgttgaatgaaatactacatcattgtaatttagcagttaaatattcgcaaatgcaattcattacaatatgatttgtgtttccttatgttgtgccatacccaaataatctcgttgaattgtttggtttcctgtttctgcttgaaatatgcatatatgaaagtatatgaagctagcaataactttaaaatgggaactgt

SEQ ID NO: 241416 - DNA, 1336 bp, Cannabis indica
actgtatgcaatttgcttgaaaaaagtttggcacattacctttaaggcttaagctagtgccttttacttgaaaaaaaaaattagtggccaaggttttgtgccttgactaacgacatgattgtattcaaatttcgtatagagaattctctgatcaaaatttattttaattattatttgatattaataataattaatacttattgcatttaagttttacatttaattttatacgataaagagtgcgtaaattatattttaactcatgacacctatttagataagaataaatgacattttagattggatcgagatcttaaatttagaaatttatggtcaaataaaataaattaattaataaaaattataaaaatacatttattatatattaatttattttttaaaaaaattatataatataattaagttataaaattttttcgtattgcataatagtatattataataaaaataaataaatatattatatcattaaatagatatattagtatttgatatattgtataactaaaaattaatataccgtagtaaacattaggtttatatcgcttacaaacataaaactttgggtacttagaccgctatttaccctatcatttttatcatgcatgtttagttttttttattatatataaaagtaatatataattttgtaaatatgatgtaattattttatgtttgtatataattttgttaatatgacatatacattgagttatctatttttcaaaatatagtactaaatagtaccttgaattgatctattaaaataaaatttaataataatccgatttagaggtattataacggttatgtttactgtatttgttcgtgttaagaattatctttaagttggttatatttaaaaaaaaaaaaatcaaaactttagcttaaaattctatttatacaattttaaaaaatataaaatttattttataatttaataatagagaatctaatcaataatttttgtaaaataaatagttcaaaataatattattacccttcatcacttcatctatcttatcaatacaaagtaattcttgatgctatttttttttttggcttacaaagaaacttcattaactcaataatcaaatgagaggaattatgtcaaaaaaaacaaaaatgagaagagttcatccaataagattaacactagtattcaataacatcattgaaaataaggtaataccattttagatcatgtgttttgtaaaagttataaattagaccctcagttttgttaattgacaaaatagactatgtatttttcaaaatagtacaaataggaccataaactaattttttgtcaaaa

SEQ ID NO: 241417 - DNA, 714 bp, Cannabis indica
ttgcccaacagtgaggggtaggcgaattttccgtaaaggtgcaacactctggctggagaaaccgtatacgggcttaagatagggggttaaatctttgatttggagccccattttttcatatggtgtttttaacaagatatttgcagaggctccattatctattgtagttcaggccacagttttattggctatctgtacttccacgaccaacagatcattgtgcgggaagttaaccttgatagcatcatctccattaaatgttatagtgggttcccctacccgtggtatttttggttttctttcttcgacgaccaggaccacttatttttgctcgtgttgtaaggtttggggatacctttcccgggctttgcctaaatctccagttatgtgtggacccccaatgatgacttgtaaatgcccatctactggtggtggcagtaaatcttggttattgtctgcacggcggccttctgatttggactggccttgacatacttttgcatgtgcgagttattcttcatcattaggaattgaatttcctgcttcaagttgttgcattcgttggtgtcatgaccataatatccatgaaaacgacaaaacttggacatttccctcttacttatgtcctttttcatgggagcaagttgatggaaatattttaccaggatctaaattttctaacaagtatgtttcactaacatcctaatatgaatt

SEQ ID NO: 241418 - DNA, 1191 bp, Cannabis indica
ccagaatttggattgtgggcattcattcccagggaggctatctttggaggaccaggaggggacccttctctacccttctcgggatgaaatcaagagtactctatttgccatgagtaaccataaggccccggggctggatggaatgtcagtgcttttcttcaaacattactgggagtctgtgggtgatgatttctgtgaagctgtctctgatttcttcagaaagggatatatgcataaaggaataaattttatgaatgtagttcttatcccaaagacctagaacccaaaaagacctaatcatttccgaccaatatccctgtgcaatgtcctttataaggttatttctaaaatagttgcaaatagactcaaacctatcctcccttttgtaatttgtcctactcaatctgctttcgttccaggaaggaatatttaagataataatgtgatagtccaagagataattcattctttcaatcggaagaaaggcaaatagggatattttgcaattaagattgatttggttaaagcatacgataggcttagttggagattcattgatcatgcccttgagtgttttgggttccctcagaagttgcgcaattgggttacatagtgcatctccaccactactctaaatatttgcctgaatggggggcaggtggggaagattatgccctcgtgtggcctgcgccagggcgatcccctatccccatatctattcatctgtgctgcggaaatcttatcaagactattggaaaaggctcttgggagaaggaatattcagggaattaaactaagtagaggtggtctggttctatcacatttgttctttgttgatgaccttatcctggtcggtagggccaatttaaatgaagctaagtggttttgggagtgcctgtagaggttttgctcttggtctggacataaagttaataagcttaaaacgtcaatctttttcagtaaaaatactcctaatggtatgagaagaggtatcaaggaagcgctgggtatcgattgtccagagggggttataaaatacatgggattgcctctattcagatctagacagaaggatgctgatttcaactttatcctggaccacatcacctctaaattacagggttggaaggctaagacttcatctaaggctggccgagctaccctcatcaagtctgtgggtctggcgatgcc

SEQ ID NO: 241419 - DNA, 687 bp, Cannabis indica
ctcacttgtatttgatacatgaatggtcgaaatacaacttggccaatgaaactcatccccttatgtggtggccgaccattgccactaattgtcccaaaagtgtggcagtagtcgaccaagtggtttccacatcacttagtggcttctttaacttggttttgacatattattggtgaggaaatatttttggcaagaaatctcattccccttcttcatggtcgaccactgccactcattgtgccacaaagatggcaatggtcgactaggcttgttccttggtaggaaattgtttctttcacttattttgaactcattggtgttgagggaatacattcttggtgctttgtaagtggtgaccactgccatctccttgtagcagtgctctcccaaaattagagagcactgccatttccatatgacagtgggcacataggctttattccatggggttttatgctattttgactttatttacaaatctaagccattttatgcttaaatgagtaagttatttttggtttccttagcggattgaggtctcttgggtgacaatactcgcgctgacccatgaactctagtttgggcacacttgggtatgagtcccgacattaaatggttggttaatgttctcgagtcctctaaaagtgccatggggccctcaagaaagatgtcttaactcatttgaca

SEQ ID NO: 241420 - DNA, 1026 bp, Cannabis indica
taattagatatttaataaaatatgtctatttaaatattatttattttctgggatattacaatgtgagtatcaaggagattctagtgcacactaccaacgagtgtgactacttgaatgatgaaattgaataattagtcagagatagacacctaggctaatggatttgaatttttgtcatttatcctagacaagtaatcattcacgggcaactgatcgttctgataaagcagggaactataaatcctcctttctacaaatttaaaatattatattttacctcaaatcacttcatatttattgtaaggacacatgtaattttatttcatatgttaattttaccacctttctacatatttaaaataacaatttaatttacaaatttcaaaattttattttaattataatagaaatattaaaatattatattttacatcaaatcacttcatttgtaaattaaaatttacaaaataaaggtcaaactcgcatgaagcacaactttgttacctagttgatttgtaagagaagaatagatagtagtggtccttgaatttctaaattccaaaatattagcaatcttttaatataactaaatacaatgttagtacaaaaaattgaaaaatcatatattttctttacttttttctttcttatcttattaaattgttgtgttttaatttttcttctttcagtatatacgtttatcaattaataaaaataataataagtttgttataataataataataacaataataattgctacaaaacatctctcctatacacgttactcaattcataatgataataatagtatataataatgatcacaaatgttacaatacctctataataaaaggtaaataaatgagaaattaataaaattaaaataaataagaaactatataaagtttttttttttgaagaataagaaactatataaagttaacctcacctaaaactaattaaatgtgatgaattgaataaaaataatttttttttttttttagtttaagtaaagtaaataac

SEQ ID NO: 241421 - DNA, 1289 bp, Cannabis indica
ccaaatagcataattctctcttgagaatgttgttctataaattgcttcttggcttgactccagtctgtttgtctttggagagtctcacaaccttggtcgcttcagcgttgaagtgttgaatgtagctttttaggctttttgtccctccttgatttatgttggccaaacttttcctaaggatgatgtagtctcacgaggcgtggtgttgggccaagaattcattagtgaattatgtccacgcggcaatagatttgagagccaacctcttataccacttatacgtcgcgcatctgagggtcatggcaaagtattgacacctttccttgatcgccaccctcttaaatttcatgatctcattaaaggtatctaagaggtattttggatcagtaattccctcatagggcagtatgttctactccttgaaatttgtaggtagcggctcatattggatttccctcgagaaaggtgatttatcatcaaattcatccttatcccaattacattccttggatatggcggacgctatccttcgtcaaaggtcttccatctctctatcaagttcttgtcacttcttgttcaactttttttgaaggtctggtgatgtgtgctttggcctttcttcatagcaaggattaatcggcgacagtgctcgcctttcagcaatggtccttcgattgagtttctcccttagattgccaaggattgcctttgacacaattttgtttggtcgcgacaaaggttctgggtctttgtgagatcaagattttggcagtgaagattctgacgtgttacacgtggagtattttgtcattccttttcctttaactcactcccaccttttgcttttaggcttctatctctccacgcctaactaggggtgttttagagcgaccttttcgagtatttttttacatgtttacaacagtttcctctaattgtaagttgttcatcctcagctcgttcatctcctcgtgatgaacatgagttcgtgagcttgaagtcactgagtcaacccatttctcctttctgggtcaatggtgtgaggttctgggatctctcgatgccaatgtcgtggggtgtcttattagcgatggtactctatgccttgactcaccttcaccctcaagtgtgacggaagcggtcactccatcttgttgtatgtccactaggacctttttaggatggttgtcctcttctctcacttgagtccttccaccattagaaacttcttctcctgtgacaggtgtgggggattacgccttgaggtgataagctgatcagtgttgtct

SEQ ID NO: 241422 - DNA, 1275 bp, Cannabis indica
ttcaaatttgtgatttcattattcgttattagatcaaaatttgatggtttaatatttttaaaattatatttatagttaaatttgtttagtaacaattgtcgtcatttcttcccaaaatacgtggacctggataaggctgacatgtggatctgtgagaatcaacacatgaaaaatcgactaagtcctaggcgaaagggaagtatctcaggaaggtgtctcccagaagagagcacaagaagtactactctccgggaggccggaggtatgctaagacagtttcgagaggtgtagagatctcttgaagagtcacctcgcatttaataccgcatggggaagacgtattaaaatcttcataaatgacatgacagatggcgtaacccccattttcagctattacactataatcaataaggctagtgatggctactttatgtggaatcacataaatcgagaggggataaaagattatatccacctaactcttaagatacctacgatataggtcatgtatttcctattttgtatttgttgggcatatgtgcccctatgaagctaacacagaaagacaagtgatccattcttagggatcaccccagaaaaatactataaataccccacaaacagattgagaaatggtcgaacattctgggtttaaaagaataaaagagagaaaataagagagaaattcaccaagaacattttctgtaataaatactctctttaataacaaagacttgtggactaaggctcattaatgcccaaccacgtaaaaatcccactcattaaacttcttacggctcttcttttatattatttaactggttgctaaaaacctcggtcaacagtaatcattcataggtaatacccattaaaaattgttccatatatataaatatatatatatatattggagagtgagagtcaatgctacaacaatgaaagaataagaacttaagcaaccaaattttttaatattttaatagagaattccttagttctctttattagatgtttgccaattctaactaaaattgtggtcataaatataagggataattacataagacatcattttatgtaaaaaaaattacatttttacgtttaaatatatttatatatatattttatatatttttacagtttttcatagaaacaacatgaaaatatcaagaaaactacataaaagtaacataaaaagaacatctaaataacataaaaacaacaacaaaaaataatatacatataacaaaatatcaacaacaaattaacatgagt

SEQ ID NO: 241423 - DNA, 651 bp, Cannabis indica
atttattggtaactggtttcttgttatgtaaaatttaatgtttttaatgtatctttatgaaaaaatctatgaaattacgaaaaaatatttaaaataatgattatttaaacagatgataattcaaaagtttaaaaatgttgtaggaagtatcttattaaaaaagttatagtctgttcaaatttattcaatgctgagaaactagtttttataaaactctcaatcactatttatttattttgtagctgatcaatccttcttcttcgacttcttgtttttgttattctgttttggaggtttgtaaagttgtagattattgcatgttctccggttgtgcctaacttttccgcaccttgtgcatttcaagataacttttggttttccttttgatcttattcttttttttctaggcctcccagatggttttcttgattttggtggccacactatctgttccaggctctcaagtatagtccattctctttcatttggtagaggatgtacagttctttcatatgttgccttcattgttgttgttttgtagttctcgacaacatagtcataagctcttaatcccctttttgcaaatacagctattgcatgtgagcatggtatctaatctagttggaaccttttgcagctacatgttctttc

SEQ ID NO: 241424 - DNA, 1096 bp, Cannabis indica
cacaatcacaagatccaaacttaatgaaatcctgaaacagggtttcggctgagaagactagtgattttatagtggatagtaatgggatgttatgatttatgaaatgtgtctgtgttcctatggatgaagatattaagagataaattgtgaatgagtctcatgactcctatatgttcatccagggacaacaatagatgtatccagatcttaaggtcatgttctggtgccctggaatgaagaatgatatagcagagtacatgtttaacatgttagcaagtgaaagctaatcaaaggcttgcagctttgctgcaaccactgaaccttcctgaatggatgggaagacattgccatggactttgtagcaggattgcgtaggactacgggacaatatgactctgtgtgggtcatagttgacaggtttacaaagtcagtgcactttttacctgtttggacaaatttctccattgattagtatgcagaactgcatgttagagaaatagttcgtcttcacagtgtgtaaaagtccattatttttgatagggattcgaagttcatatcacgattctaggagagcttacatcgagccatgggtactcaactaaaattcagcacaacatttcatcctcagatagatggacagtctgaaaggaccattcagatcttagaagacatgctatgggcatgtgtgttaaactttgaaggatcgtgggtaaagtaccttgccctaatcaagttctcgtacaacaacaactattaggcaacaatcgttgtccttatgaactactttatggaagaagatgtggattacctattcactgggatgaagtaggtgagagaaagattctttgatcccaaagctgttcataggacaagtgaggcatttgatatgataagagcgtgaatgttcgccgctcataatagaaaaaagactgatgctgatccaaagcagcgggatattgatatccagatcggagatatggtgtctcttcaaatatatcctatgaaaggtattaaacgcttggtaagaaagtaaagcttagcccaagatgttgggttttgtgccctaaataaaaccctttacaatctgattagttat

SEQ ID NO: 241425 - DNA, 715 bp, Cannabis indica
tacgcaaatgcggatggccacctccgatttatatggaaattgacctacagatggttacacttttttctgacacagaatcagatcttgtcccccgtgtgccaggccatggtagtgcacgtacgtacctctggacacaccttttttcctaatagctcgcctagagagtaatttataaaggagaaacctttgggcaacacgtgtccatgatcaagatgatactggtcaccatccctgcacactacacgattaagaaggttcttcaaggctagacggtcagatttgaagttgtattttcctgcccttgcaatggactgtagtacaaaactctaggtgggtaaagggaatgcccttacccacacgtaaacctataaatacccccatttttatgaacaaaggatgaacaaaatttgtactagccaaacctctatagaaattcgtacaagctttcttctcaagagaaacaaaaggagtgcagagccagggtctatactatcaacacatattgtataatcaaaatacttacctaaagggccaatataactaacaagtggactaaggattgttaacgtccgaaccacgtaaaaatcgcctatccactattaatttatttatttatttctgaagctctattcatctagtttctgaaaatcttggtaaataaatacacattatattttttgcttaaatgttatttgaaattattatataaattgga

SEQ ID NO: 241426 - DNA, 998 bp, Cannabis indica
gctgctggtgcaatgttgcaggggctgacgtgccttggtagtgtagtgagccttattcaattgacacagcatgtcgtgggtgatttgctggtgcatcacatgtcgtgatggttgctgttggtgcaatgttacaggggcttacgtgcattgctggtgtgacaaatgaggatatttatccaaataacttatagcttgttttgcaagagcagaggcaacacgttttgttccaccatgaagccctttatttctatcattccaagtgctccacataaggcaaattcggagttcaacatcaaccttatccatagttgttgcgagatgaattaaaaaatcttcgtcgaacataccatgagcacaataaaaatcaatggaaaagtgcatttgcttccaaactgatttggcatgcttacatgtgaataatgcatgaccaattgactcccaagcgctattacaccttgggcaagttgccaaatcaataacttttcttttatgcaaggtagtggctacgggcaatgcttgttgaatgaccctccaagcaaatattttaaccttttggtggtaactgtaaagcccaaaaaaacttccaccaacttttgtagttgtcagatgttgattcatcgttaacttctgagatagaatttgctaggtagaatccagacttaactgagtagatcctagtagtgttatgatgccatttaagtcgatcttgagattggtaaaagcttaatggaattgggagaatcctatctatgtcaatttgagcaaaatgctcttgtagaagaggtaaattccattccatagtattgcatatgaaggtagaaactaggaggtttgatttcatactacaaactacacttgatctggatatcaaggtgttgagattatttgaaatgtactttttgtcttatattagtgcaagtggaagtttgttaggtttagtgccctaaataaaacccacttcaatataatcagatttactaattaatataagatcataa

SEQ ID NO: 241427 - DNA, 1085 bp, Cannabis indica
gtcaacttgtgaaattcgacatgacaccctactatctgaactcctgatgaagacttcattgatcatttgggatgaagcacccatggcaaataagtactgctttgaagctttagataagtccttaagagatattctaagaacaaggtatgagaatagcactaccaaaccttttggaggacttacaatagtatgcggaggagattttcggcaaatatttccagttgtgccaaagggtacaagagcagatattgctgacgcatctcttaattcttcctacctatggccattttttaaaatatatgagttgaatcaaaatatgaggctctataatggaagtgtcgatgaatatgaggttgctaaaatagcctatttcgaaaaatggttgttgcagattggggatggttcattatatgatgacattgataaagaacttattaaaaatccatttaaaatttataaaacccatctaatgatcccatgaattctattctcgaagctatctacccttcactattgcataattatagtgactcaacctatttgaaagaaagagcaatactaaatccaaaaaatgaagtggtccatgagttgaatgagatgattatgaatatgataccagaagaagggaggatttatttaagctcaaacagtatatgcaaagcaagcataaacacaaatgaagaggatcttttgtatccaattgagttattgcatagtttgaaatttaatggcatcccaaatcatgacataaacctaaatgaaggtgctccaggaatgctcctcaaaaatctaaatcaaatagaaggtttatgcaatggcacaatactgattgtcactcgccttggtaaatggtcaattagaggtgatatcatctgaggaacaaacattggtcaaaatgtaacagctccaagaataatcatgtcctcgaatgaatcgaagtggccattcaagcttaatagaagacaacttccgttagcaccatgctttgccatgactatcaataaaagtcaaggacaatcgctaaaacaagtcagattatatctcatggccaattatacgttgcagtgtctcgagtcactacaaga

SEQ ID NO: 241428 - DNA, 893 bp, Cannabis indica
ttaaccctgactccctgctacattctctgcttaaggctcgatattttaagcattctgatcttctccatgcccctaaaggtcataacccttctttcacctggagaagccttctctggggtactcaacttctcaatcagggccttgtttggaaaatctgctctggaaatgatattcctatctctgccccaaactggatccccaacatctcccacccaactatcctacatcccattgatccctccttctccactgtctcctattttattaatcctgatcgcacctgggatattgataagctttaccattattttccttcctatcaagctaaggctatccttaatattcctttggatattggaccatctgattctctcatctggggattacatcactctggcctttttactgttaactcagcataccatttagcccagtccaaggccctcaatccctccccttccacttccaatcctaacccttataaggattggtggaaaactctttggaccttgaaaatccctcccaaaattaagcatttcacttggaaggcattcaaccatcttctcccgtgttctctaaacctgtttcttaaacatgccatcccttctcccacttgctcttattgtgggggtgatgcagaatcggtttctcatgctctccttcactgtaccagagttaaaccaatttggcatcataccatttttaaacagttttttgttgaccattataggctggacattaaagatttctatctgcttagcctttctttaattcccaaagaccacctccccttctttcttggtctcatctggcaaacttggaacattagaaacgcccatctctttcaaaaacattcccctccggttaatgctcagatacagttgcaagttttt

SEQ ID NO: 241429 - DNA, 1071 bp, Cannabis indica
atgaggaaactaaccatcgtttttgaaaagagcccatgacctcccagaagaactcaacccgacgttggtcctagtacgcaaacaacgcgctcgaggagaactcatcgtggaaatggtcagaatcccaggacgagggatgaagagctcaaccgttgaggtgcccaatctgtcggagaaagaacttatgaaatggaaagtcgccgcctgagatgcgatctagaagaggagcaacatcgaaacactgagttagaatgagaggcagccttagccagggcggcgcaggggacgaacgctcaaattcaacctgaacctagagtgagaagaccacgaggaagaactcgtggctcacgaaccaggagacatgaaaagactcgggaataacaacccagggaaaatgagacaccccttgagaatcaggatgaacgagaaatccctcatcaaaatgaggaggatcttggaacttagccgggagaacagagatcacttgctaggaatcaccaacattcttcccaaacccataaagcaaggactcgtacgtaccttgatgggggaaatacgacaaaccgctctcggaaggaaggaacagagcgtgaagaagcaagtgtgactttaaggcgattcagaacccatagccgatcaactcgaagaggagagagtactcaacgagctaatgatcgagaaagtatgggaacaagtgaatctgcgagccacttaaagacaaagtctatgagtaggatgcggtctatgagtaagaagagatttgcttgcaattactcccaaccagatctgtgagagcacttgaatcggaagaaacctgaccttcgccaatagcttggtccaaagcaagaggatccaatctaattgtagataaatgagctagaggaaaagttcaggagatatcaagtgggggaattacagaaatcatctagatacgactctaacgaggagcttgagctgtatcacccagatattatgaataccccttttccatcgggattcaaaaacccacatgtctcgtcttatgatggaaccaaaaatctggtctagaatttgaataactttaacatgata

SEQ ID NO: 241430 - DNA, 574 bp, Cannabis indica
tgccagaggtcttgattattatattggggtcatttgatgaggctgttttcaaaggaggtgcacatgttggttcaattgctattggaggacgttatgacaacttaataggcatgttaggtacaaaggaagttccagcagttggtgtaagtcttgaaatcgagccagtatttaataatatggagcaaattaacaaggatcagaatcatcagacaactagagctacaaagacagaagtgcaggtgagcatactaggagacgatctaatccaagctgcagaactggcgagcaagctatgggatacaaaaataaaagcggaatacttggtggctaaaagactagataagcactttcgtcatgcggaagagtctaagatcccatggatgttgatggtgggagaacgtcaagtgaaggagggaacagtgagattgaaagacgtcgaatccaaagctaaagatgttatccaaagagagagtgttgtcgaggaactcagaagacgattgagcccttgattagatgattacaagttacacatttaactgatgtgcatttttatacagtgagtgtattcattcta

SEQ ID NO: 241431 - DNA, 1176 bp, Cannabis indica
gagtgcatccggacctattgtgattggtctgggcaatgtatcaatgtgagaaaatctgcctatgttttttctaagaatatggatgattcaaggaaggctgagattgttagtttgttgggcttccgcggtatgaatagagatgataaattcttgggaaaccccattctatggtcgaatagcaaggtgaaggattttaagtttattaaagagcggttatgtgccagaattgaaggttggcgctgcaaactcctatcccaagcgggtcgatctacccttattcgttcggtggcagcaagtacccctgtgtattctatgtcaactttccttctcccgaaagtgttgtgccatgagatggatcaagccatcaggaagttctggtggataggcaatgccgagaaggatcgctaccttgctctcacaaattggaataccatgtgctcccctttggaggatgggggtctaaattttaaaaaatttgaagacatgaacttggcgcttgtagccaaacttggttggaaattggctaaaggggagaattcgctatggacaagggtcttttgtgctaagtattgggaaggggggattaagtctttttggaaccatgactctcctaaatccctatcctttggagcccgtagtatcctagcttctcgagatctcattcgtaaagaatcttgtttccttattgccaatgggagagccactaacttacggcatgccccgtggatcccgtggttggattgggaccaatttagagctgccttcaatcctatgatcactccgatttccactcatgtctcctctcttttgaatgaagagagggagtgggattaccttcaagcggccacttggatggtcccaagtgttgcaagctccctccatttgatctccttgctccccatccaccatgaggataggctgatttggaaggatgcaactaatggggaattctctccccgggtggcatataaatcaatcatcaaggggagattaggtgagaaagatctgttctggggaagaatttggaaacttaagatatcggaaaggatgaaactcttcctttggaaacttggaagagatatcttgccgtttggtgaaagactccaacgtatttttggcaatgatgtggtgtgtgctgtttgtgaagaacattaagactcgactgtccatctgttt

SEQ ID NO: 241432 - DNA, 554 bp, Cannabis indica
tgttattataaaacattctgcctggtcacagctcccaaatatgcattcctttgcttataatatgcctcaagaaaggaccactcgaaggcaagatgtccctggagtagtacctaaccagtcggctttgtcatcaccaagcaatagtcaggtaagtcactcttctcaatctcattcgaacaatgatcatgaccattttgatatcatgtctgaaactaacacagcagataaacaacttgattctacacccgtggctgactcacctgctgcaaccgaaaccccagcagacagttcgaatgttcaactagcaccacaaccttcacatcccatgataactcgatccaagagtggaatcttcaagcccaaagtctacttcagtaagacaaaatggaatcctgaaaaggaggaaccgaggagtgtagctgaggcacttagtcaccctggttggaatggagctatgagcaatgaagttggtgctctcaaagcaaagaaacatacactttggtaccttattctgatgcttacaatgtgattgggtgtaagtgggtttataaaat

SEQ ID NO: 241433 - DNA, 1231 bp, Cannabis indica
tgagcactacaagcagccaccttactttgaatatcacgctaaatacagccctcccaactatccttaaccagctgaatacacatgggttcccgcaaccaagcattcttgaatttgaaccttcccattgtagaatttgatagctcagtagtcaaatccataaaaatcggacaatggtccgatgttgagacttcaagattataaagtttggcaacagagaacatatcaagccaagcttggttaaccaagcccctgtcaagtcgcacttcgatccagttatctgttcctctacccctctcccaagtgaagggatagccacataagtccatgtcttgcagtccactatctgtaagggcctgttgaaacccctgaatcagaaaatcagggtagcaattgccgccttatttatcttcatgagaactcacattgttgaggtcccccattacacaccaaggaagattggaactagtagaaagtgaacgaagtaagtcccaagtagcctttcttttgctgggatttggctcaccatagaggtcagtgaacctccatttactttgtcccactacattaacttccatatcaatataattgtcagcaaaccgaataagagaagcttcttcttcatgtctccataagagagctatacctccacttctgcccttcacatcaacagcaaacattacatcaaatcccagagaaattcgaaccttttccacttggtcttgtctacaaagtgtttcacaaagaaatacaaagttgggcttcttttggaccacaatatccttaaggaattgaacattccatgggttcccaagcccatggcaattccatgataaaagactcataatggtaggtgggcctggaaaccagagcccaccaaatccacattttttgaatccatttgaacttgggccttattcttcccttccaaattgtcttcagaattaacaccactgcccatctcagttctacgcctttttgagtcaattaccatcaagcagtgttcctcaacattaatgtcattatgttccccacaatcagtgtcagtcagccctcctattatttcaattgttgattcacctttctgtctattagctgcctctttattgcttgattcgtgtcccacaattttctccttcatcacagctgcttgattaggatgaggatacaacattaattgtctcaccggagctggtctggagacatgatcagaattcggctggtctgcatccgt

SEQ ID NO: 241434 - DNA, 923 bp, Cannabis indica
atttctaattttgatattctattcatccctattttttttcttattttgttaatcgtgaattgttaatcttgtcattactaattgtgattgtttaaaagttagctgatttaattctacatctttagttgtaattttcgcacaaattagagcttggtaatcgatcaagaacacagaatcaagattatttctgctacaattcttgaagaaactttaactgtcatcaatgatgagattcgaattggaaaactttgatggaacatgagactttgcgctatagagagaaagtttgaaaggaatactagtgcaccaaaaggtatccaaggttcttggaaatgagagttattagcaaaaaagaaatcataagaaaaagcataaatggaggagatggcgtactacacgatcatcatgtatctatcaaacactgttcaaagaaaactcatcgcagagaagacagcgaaaggagtttggaacaaattggaagaactatacttaaaaccatcaatagctagcaagatcaatttgctaaaaaggttatacgattttataatgatttcttccctttctttagatgataatatagatagatttaatgagattgttgtaggtttggctaacataaatcacaagattgatgaagaaagtcaggccatcattttattgagaccactcccaatcgcatatcaagaagttaaggcagccatcaagtatagcagagatgtaattgcattggaagatgttcttgtcgtacttaagttgaaagatttcgaattgcaattggaaaaaaaaatccaagaaagaagaagtgtacttggcaagaggaagatctcccaagaaaggaagttcgaagggtaaacaccatcattctcaatcaaaatcaaagtccagaaataaggaaactccaaagtgttacttctatggaaggt

SEQ ID NO: 241435 - DNA, 1271 bp, Cannabis indica
gagagaggttggcacaaaggtctccttgtgcaggcttgggtctggggatggttggattctttactaaaatccgaaaccacggcacctttcctcctggatttatcgtcagcattaagaggacctcaaagatttcctgcaaaatctatgtccatccctgtggagatagaaataaaagattaatggagcaacaaaaaataataatatgtatgatccagttcaaaccaccattcacaaggcataatacttaccctcaagaatcacttgtgaggatcgcccataaacaatctacggggttcccttgttttggattgattggaagctccttagccttggaatccttcatttccaattccaattgagggttgaagtccttgggaacgtatacaaaagaaaagtggttggtgcattctggtgttatgagtttggagggataaatttctgaactcagatgggacatgttagcaagagaatgacaatccaatctaaagatggattttaccaaaaaaccagaagtgtgtggaataaggcaagcttaagccactattttatacacaaagtccagtgacaagaacgccaaaggttgggaaatctaacagttgggagtggggtggaagaagagaagacggttcataatgaccctcgaaaccgtacaactgccagaatcaaaggacgcattttgccaaaagggattatgacgaaaatgccctctgcaattattaaaaagcactttttactaaaaaaaagaactttttaaggggcaattgttatactcgaaatttggctaccatctaattggaggacaagtgtcaagataaagggaatatggatcgatgaaatcacttttaatggaataactcattaaatgcataagtagcagagcatactggcaacgcactgactataaggtcttatacaaggaaaagatatgcaaactgttgtttggtatattaacgagaaaccatatgtcattgaatgcataaagcgaggcatcaactccgttatatttgggaagacgaaagcgatgcatatcgactatgaaaacacttagcaaataatgtacaaactaagtataacaatcgggttggctcgagacctaataagcgaggtgcctatcttgctataggaaggcgcattcctataacttccccaattaacttcagacatcttcttatcgagacttaccatcttgatgagttagaagataatattcaagtgaggctcgagaaactctctgttaataaaaattgtgattgtcacaaataaagcattaa

SEQ ID NO: 241436 - DNA, 854 bp, Cannabis indica
gtacaatcatcatcagcagtcaattcgttccacggttcagtaaacttttattgctttagtagtttattttactagtatgatttaagaaaagcctgttaggaagcatgtaagtagcatgatagttgaataggcccttgcttttaatttctaaataagtagcattagtaattttctctttgatcacgatcttaccagactagctcttggttatgcaggctgttgagattggtatggacgccaagcgaaacactaggagcaagggtaattcggttggatcaaatgaaggtcagggagctcagattcccccaaatgtctgtggtcggggtagaggtctcaggggcagagaacgtggtcggggtgatgctaacccgccacaggttgcccaagctgcccaagctgctaaggatgcccagaatttggaaaacaggtttgcagaaatgcaaactagaatcaatgaacaagaggaagtgatttggaaattaagacagcagggtgctcctgtagttcctgcaccagagataccagtagctcatgcccctactgtgcagaccgaaccgattgttgcaatgaatcagatggaacccctgtatgaaaggttccataagcaggcacctccaattttcctgggaggccccgatgttatgaaactcgagcaatggctaactgtgatcaccaggatctttaattttatgggcgtcatgggtaatgatagagttgtctgtgccacattccaattttaagaagacgctttagtttggtgggacatggtgtccatgatttatgacgttagcacaatgacctgggagaagttccaagaactgtttaatgccaagtactataatgaggcggtcaga

SEQ ID NO: 241437 - DNA, 1007 bp, Cannabis indica
ttttgcggttttttagtgtcgcggtgcgggtgcggtttggaaaattggaaaaaccgcttgtgcgggttggtttgaaaaaatggttaaaaaccgcaccacccgcaccgcgaacacccctagtattagggagtggttattagtctgtgattgtttgttattttctgttattgcagagctgtcttaactggttttttcagtaattcagttggctcttttcattctctccagtgatatatatgtcactttgtactctgtactaaaatcaacaataatggaaagactctctttcaattctcttttcttttcattctctctgtcttttctttcctttgttcttgttcatctttgattctctttctgatctctttcatcatgaaccgaaggaacaacaatcacaacaacctgagaagatgaccagaatcaatcaaagtaggggctgttttgaattcatgaaaaaaaaagtatagaaaaactactacaaaactaaaattcacccgaaaatctagtttaatttgcgtaaaactaatgtcctgacttaagttttcaaatccatgaaatgtagatctcaaaaagttgaactggagttcccaaacaatccaactcaagtataatctgaaaaaaattacatcaatactgtagttaaatatttatcttggtgtattttcttatttttcaaatttgtaatggcgaatttattcatattaaatcatgaaagacaatagtgttctaactattaatgtttcataatagttgcactacagttgcatgaatattttgcaaacaattatttcgtctgatgcaaccttcggccaaccacctaccaaccttcgtttgatgcaaccttcggccaaccatccagcaaccttcgtctgattgaaacctttgtctgatgcaaccttcggccaaccacccaccaaccatcgtctgattgtgtaagtgatgtcagaggtattttggtaattttattttaaaaaatcagcagtatttttcattactccaataacttt

SEQ ID NO: 241438 - DNA, 721 bp, Cannabis indica
ttagctggcctgccaaatggtagctccactctactctcaaattgcaattatacatttggccaaagcttttctttataaaagagctaaagaaaaaccctagccaaacattcataaagtataaatttactcataaaagtaataataaataaataattaaaaaaaaacacacacactagcttaaagggtaaagatgtttagggaaatagttaccagcatttcgggcttttgatgcctttaattactgaagagagcacttttctcaaattggagcttcacatatttcaaagtcatgtggtacttataatgactaatgttggagttataatggctatggctacaaataaaaggttattgatcatgtcatggcttgaaactagggttagaatttgaattttacatataattctattttctaattgttggtttatgtgttgtgactaaatatatttttagttacaatatttgttgtaactaaaattaaattaataacaacttgtaaataaatatactatgttttaatcacaaattacatttattgtgacatatttagttacaaaaaaatttatattataattaaaaaattaatactaaaagtaattattttttgtagtctacttccaatttttttatattaaatcaagaacacatctaaataaggccactcaattcattacttttagaatttgataaagaaaaaatatctattttagttattatattt

SEQ ID NO: 241439 - DNA, 878 bp, Cannabis indica
agagctcgagagtatgttcccaacgctcaggttgataaaaggcctactgcgctcggttacttatcaaaatttgatgccgtttcgaccgtcagtctagtttttctacaatgaaaataatccatgaagtcagagaaatcaaattctaaactttgcatttctcatttctagctccaccataaatgaagagtttcgagtctctcatttccataaaacaacaacatcttttagaaccagtgatcaactttgccaaaatacataaatagactaagtgatgtcaaaatatcacttaagcatcttaaagtacatttattggacgtttttacacttacccagcatctaggttgatgtcatatgtcaacctggacactgggatgttaacctgggcgctggatgtcaacctgggcgtcgggtcatgaactaccttctctaaaatagtcatagctcactcaattttaattcgattgatgcgattcaaattgcatttcgaagcttatttcatgatctatcaagtcatgtctcacaatttagacttaattctaaagctatcattgtcaaaattaatcccaaggtagttacaaaaataagctccgagttatctgcagtgggacctgccaggctccaaaaaatagccatcaccaccaagagataattttcactattagatcatcatccatggtcaaaaacacattatttgtatgttcccctatttttctttggcctctttcacctataaaaggagagttccctcagcttatttttcacattcagaaaactacccacaaagtcaaagcttctctctctagattttctccttctagaatttgaagtttctgaaacttagtctatcattgtaattaccatctcgtgagaaataaaaa

SEQ ID NO: 241440 - DNA, 1030 bp, Cannabis indica
ggtgattcgctgcccagccatttgacgaagacggagacgacagcatcttctcccctactcgctggcgacgacgcccatctcctccctaagtcgccgacggcatcttcaccaaccacggaacccacacagcccctccctctccgacgaagacacagctcctctctctccaacgaagacacattcttcctcgcaaacggcagcaactcaggtcttttaactttctcttatttttcatttttcatagttgaaaccaaaaccagtgacttaattagttcatttttgtctaattaacttggtcaaaagatgtaaccaataatagttaatttgtgagttgaaaaatcaggatacatatttttttgatcaagaataataatctttctattaatcaaacaagccatttacaaccaaatagggattacactcacaaatttacatcaaaactattaaattgtatatatattaaattgtatgctggaatgaatttgctaacatttgaaatcatacattaaattggaatgaattagtatcaaagttaagtgttttctttagttttttgtattatagatatatgtaaatgtatcatattcctttcaattctaattagtttctgagtgggtttcctttaattatatgataatcaattttttttttatcatattcctttctattctaattagtttttgtgcttttattttggacttatgttaagatttaggttgaatttatgttggacttatgttacaattaggttggctttatattgggttgtaatattttgaactaatatattagccatttaggtgaaaaatcaagttttactcttggattggattggatggatccaatcaatccaattaatattggattaaaaatattggatggatccaatccggtctaaaaaatattggatcaaaagtattggatagatccgatccaatgcaggaattcatccataagatggaaccgattcaatccaataatttattggatcgcttcggttgagcctacaatattggattggatcggttgg

SEQ ID NO: 241441 - DNA, 833 bp, Cannabis indica
taaaatacaatttaatataatacaatacaatacaatacgatctaatacagcattccaaacaagcccttaaatggtaaatttatgcatgatatgaacaaaataatatagaaagaaaaaacaaaatgacactatcataacattgactagcataggattgggtggaggtattcgcggtacaggtgtgggttataatattttttttaaaaccaaatcgtacgtgtgattttagtaatttctcaaatcacaatcgcactgcgagattttaaaaccataaaaactacatcgcaaaaatatagtatgatgtcgtgcggtttgaacggtagttcgaacagtttacactatcattattatcaaatattataaaaaattcaaaaattaatctaataaagatttaataataataaaaaaaattattattaaagttttaacatcataatatatatactaatcatcaagtcattttattgaattgtcttttaaaaaaaattatataatatacacatatattatatatatttgttcttatatgaaagaaaaaaaaacaaaaaatcatattataaaaattgataattttataatgtatagtacagtgttgtttaaactgcaattattaaatttaaaaccacgaaccaaactgcactacaagaatgcaaactataatctcatcgtaaaaaatttcaaactatattttttatacggtgtagtgcggtacaggcagtttgtaagttgagagtaatttgataaacacccctagaattaggggtagcatatgcacaccttgaaaacttaatatttaagttttcattaacattttattcatttttatttttttt

SEQ ID NO: 241442 - DNA, 1512 bp, Cannabis indica
ataacgctggtggtaaggctagccgatacgctacctacccgaccttcttgagtatctcaaatggccttataaacctagggctcaacttgcccctctttccaaagcgcctgatacctttcattggtgaaactctcaggaaaacatgttctcctgcctaaaatgcaatgtctctatgcttcggatcagcgtaacttttctgcctgctttgcgaagcaagcatccgagccttgatcttgtctattgcttcattggtcctttgaactaactcaggacctaaatacttcttttccccggtttcgtcccaatgaatcggagaatgacacttcctagtgtacatcatttcatagggagccattcctatgtactttggtagttgttgttgtagggaaattctatcaaaggtaagtatttactccacgaaccctcaaagtccatgacacaagcttgcagtaagtcttctaatatttgaattgttctctctgatttcccatcagtctgagggtgaaaagctataccgaacttcagttttgtacccataactcttcgaagacttacccagaatttcgatgtaaactttagattcctatctaacataatgaattctggaactccatggagatgaactatctccttcacgtacaactctgcaaattgatccaccgtataggttgtttttaccggctaaaaatgtgttgacttcgtgaagcggtccactatgacccatactaagtcatacattcttgtggttctgggaaaaccaaccacgaagtccattataatatccttccacttccattcaggaaatgctaatggtttcggtaaccctaccggcctctggtgctcagctttaatttattgacatgttagacatttagacacgtaatctactacatctttcttcattccacaccaccaataatagggtttcaaatcctgatacattttggtggttcccaggtgcaatagataaggtgtagtatgagcttcgtcaagtatttcttttctgagttcatcacagtttggaacacaaacctgagctttgtagagtagcattccattattcgagatcgaagattccttaggccgaccggccaatatctcgtctcaaattttaactatctcagcatcttccaattgtgtctttctgaccctttccaacaaatctgactcaagtgttaagttaagtaactttccaaccacaaattcaattttagccttaaccatttctgaagctagcggaggagctaccgttacagcattaaagatctgcccgagactttttctgttcaaagtgtccgccacaatattggccttcttgctgacaagttgtactccatgtggcaatgatcttacccacgtggacatgccacatcatgtggacaaaaattgagataacaagtagaatttttgtttttttttttaatttgtttatgaaaaataaaaatgtgttttgtacctatttttgttttgtaagtttaaaaacaaaaactgtgttctgtaaatttaattttt

SEQ ID NO: 241443 - DNA, 1932 bp, Cannabis indica
cggttgcccaaccggaattccagttctgggaaattcaggaccctcatccagttctgggaagttcggttgtgaaggaaaggagacgtttgtatgtcgacattggtgaaaataattgctccttcagaattttttagcaatattatgcatcgggtgccccaccatataacaagaagggccgtgttgttgggaaattttaagcaaaacttttgtagcctcaatttttgcatctttccctaattctaagcaatcaaagatgttacaaaacaatttagtttttaacaacgaatctaccatgctatctggttttggtggttcttctacaatttcctcttctgtgcatgtcatagcagctcctccgttttgatgttgggaaacggcatttgttccacttcatcttgatccaagataatttccccttttgctaatcgctcatgaaaaattttcctcagagtgtagcatcccatggttgggtggttaatctttcggtggaagtgacagtagagttcatgctgcttttcctctaaagtaggtagttttgcgacaaatggtagtactacctctccatccctgatccatgcctccaataggctacagattctttctttgttacaagggaactccgccggtttatcattccgtcgaccttttttatgaacttcaaaatttcatttttcttgtgccattgctatgtcaacaccacgttttgaacccttccatggccgattttgatcgttttggttagacggcttggccagtcgacagacagtagcttcagtattccttgatttggcgatgagctctgcaaaattgtatatagcatggttttcgatatgtaagcgatattcatcaagcatacctttgatacacattttgactagatctttttcagccatggtttcggcacagtcaagagctttttctcgaaacttttgaacataattaacaagtctttctccgaagctttgtctttctcctgacaagtcagctatgctccatttatattcaatcatgaagaatttggcgagagaccatatcatcccaactccttacacttcctgaaggcaagcttgcatactaatagtaagcgcgatcagtgagagattttgaaaactctcggatccttagttcgaaatcatgggcgtagactcccaaatcatcaatgaattggatgatatgttctttagcattgccgaatttcccattgtactttctaaatacgggactcatataacctcgtgggtaaggcttcattgcaacttccaaggggtaaggtggatgaaaatcgatagaagttaccgatgatgatgacttccctctttcagctttaagaagaccgatcaattcatcttttgtgacaaattcagaggaagatcgggcttcttcaccgaccctttgagcaatcttagaagttctgatccctcgaacattatcaagtgttgcctgatttctttgttcaacagtatgtacttgccttatttgagattcattcatcacacgctcttcaggtaaatcgcttctatcaatagatgcttcttggtgtgactgtggcagaagtgagctcaacagttgcatcatgccatcttgggctttttgaagcttttccaatcttgttaacacaacatcatctgtgtttgtcagattggtactattattatcatttcgcaaggtttctgatctgatcgattgtcttgctctcgggtatcagagatagacatttggattaaataacaacaaacttgagcgttttcctttatgtatttataggaatcagtatatatatattttaaggaaaacactccccagtagagtcgccaaaatgttcaggggttccagccaaacatttaataatataaatatatattactttaaatatacacatatatcatatatatactgttttaaataaaaaataagacacaaatttacgtagtt

SEQ ID NO: 241444 - DNA, 714 bp, Cannabis indica
tgagagaacattttattcaccatccgttggtacgttgctccgacatttttgagcccgaagggcattaacttataaaaatatgttcccctctcagtgctgaatgatgtcttatctctgttgggaggatgcatcattatttggttgtagcctgagaaagcatccataaagctcatcaactcatgctttcggtagcgtcgattatcatgtcgatgtggggtagcggaaaattgtcttttgggcaagctttattaaggtcggtgaaatctatagacactctccactttccattctttttcaaaactactaccggattggcgagccaagtaggatattgtacctcttcaatggtatcatttttcagcattttcgtaacttcgtcgttcaccgctttgtttcgatctactcccatcttcctcctcttctgtttaaccagaatatagttcaggttcacatttagtttgtgagtaattatggttgggtatatcatgggcatgtctgaatgttcccatgcaaacacttggaagtattccttcaacaaacttacagccgggctccttcggtcctccttaagccccatgccaatgtaagttgtcttggtcgggtccgtcaggtgtataggtacctcccgtaactcctcgactgtgggtggtgttgctataatttataaacactacgcaagtatacgcaatcaagtagtaaactcacacaggtgag

SEQ ID NO: 241445 - DNA, 1134 bp, Cannabis indica
ttcttgacaactcaccttttgttatgtatctgatcatggggtccatccaacttggcccttgctcaattgcaaccaccgtatctttaattctgatgctcggctccgcgaggtgttcaacgggcactacccccagtctctctatctcgttgtctgatgccaacttggccaaacagtctccatgaggattcttctctctgggaattctttccaccttgtactctgtgaactcatggagccattcccgaacaatagctacgtacgccgccattttttctccactcatttgatattctcccgagacttgattgaccaccagctccaatcgctgaagatttctacccttgcggcccccacgacttttgctaatacttctacaatcttaccctttactgacactctttagtgacccacatttttgtgcgggtcactaaaggattagggatgagatttagtgacacacacaaaaagactctaatacagctgtaattaatatatttttttaatttataaatgtattattttttggagaaaataatgagacacgcatgcatgccttattaatgcttttccttttttttttctaagaaaattacactattttaatacataaatgaccctagcagctagtataacatgtttacatttacacgctgaaaattaaggacctttaaaaaaaataaaaaaaatagtaaaaggaaagaaaaaagagaatggaattagggtttaagttattagacttcctctctctttctttcttctctctctattccactacgcctccttcctcttttttttttcgtctgcacatagccaacccaactctggtgactgctatctaaacgaacaacataaccaaaatcctagcccccaaaaacctctagatccgccactcacttttgcattttgtcggataaatctcatattcgcctccatctcactttttttgcgttcttcatgcctgtgtggatctctctctctttctctatttcctcaggtcaatgagggttcgtgtcgacggagctttgagtttcaaggaagttcgtacacgacgctgttcgtggatgacgaagcttcagagcttcgagattcatggctattcgaaatcgactgagctattgggttcatagtggttca

SEQ ID NO: 241446 - DNA, 661 bp, Cannabis indica
tgggtgacctcttgagaagctttcccggaagtgtgtgagtgaggacaaaatatgttggaaacactcgtacgttggtttgtagggtcagtcatcattccatgaagcaaccaaagtgacgttctcgtgtataagaaccatcattctatgggtctaagggcctaatagaagcttgaagcggggatgttacattctaaaacccaagccaccacatcttttcgcttgcatatattcttccacgcagcaagagaaagatatttcttcccattcatcctgccgatccaccaaaaatgccaagtgattttatcgagctcagaaagaataacagtaggcaatttgaaaattgacatggaataggtaggaagagcttgaaccacactatggataagaacagtacgagctaattgagagaggaattttgccttccaaccttccatacagctgactactttatccataacaaacttgaagtctttacaacagttgccacgaacaaaaagaaggtttcctaaaaatttctcatcccttcccatggcatcgaaatccaacaactcaagaagttcgtcctttagctgagccttgcaattattggaaaaagtaattttggatttgttaatggtcagttttttcctagactagaggcaatacttttctagacaatcaa

SEQ ID NO: 241447 - DNA, 607 bp, Cannabis indica
aaattaacaatatttatttaaccgaacacacatattatatatatagaagaaaattaatagtataataataataataagaaagatatacctgctggccggggcaggtgaagaagaagaaataagtgtttgttggggttgggatagttttggagaggtgacacacaaagcattctcaatatcttgaatatttgggcctgagtctaccttggccgagttgatcttcattacaatttcatcactactgctactactaatagtatcatcattatctaataatgataataattcatgttgattataatgtgattcatcttcttctaccacaaaaaatggcgacacgtcatccaaaagctctctcactagctcgtcttcatccgacgaccctgatgatattgatgatgaccaacctctactactaccaattacttctaataattccatattatatatatataagaggtgtgtattaatgaagaagagaaagagagaagagggtgttgattatatgatgagaaagatgattagggtttcgagtgatgatatatatatatatatatatatttatatgaaataaaaggatatgatagaagatagagtggagtagata

SEQ ID NO: 241448 - DNA, 818 bp, Cannabis indica
aaaaaaataaaaaaaattctttaaaaattaaaattaaaaaacaattttaaaaaataaaaattaaaaaacaaccccaattccctaacaaattatttctcttcttctcattctctctctctctctctcattgccctaattccctagccgccatccccgtcgaagcaaccatcaccatccacgacaactggtgactaccgccaccaccaaccctcacaactgcctaccatcaccaccactgtcgaaacaaatgcacaccatcacaactgtcgaaaccacaactgctcatcaccactactatcgtcacctccatcctgattcaaacacaaccccataactcatatccaaacacaatcaaacaaacataaacacctatcacgatctcagttccaaattccacaaaaacaaacaaactccattcaaatctataagaaaaaaaatcttaaattaatcgaataattaaatctgtcaaaagaaacaaatgaaagagagagagaggtacgacagtgaagaagcttgcttactaaaggggcaagaactaagaccccacatctcgttcaggtgcaaagcaaaccctcgccattgttatcgttcaggtcccatacctcagaaattattctcatttttcatgtgacgccttaatgctaaggcacgctacagtaattttttaattatagtgctatctttgctagccaaaaaattttctcgaaaataatgtcaaattaaaacttttatattaaatactaaactttaaaatcttgacattaatatatacaaagttgggatcccatttcaaaaccttttacaacataatccaaaat

SEQ ID NO: 241449 - DNA, 971 bp, Cannabis indica
tttacaaattctttagaactcttaaaacaaaaaaaaaaataaaaaaaaaaaaaaaaaaggggaaaaaatgcacatggagatcttttgatcgtccagggtgagtgacttgtttctagtttaattttcctcttcgatgtgtgattgatttatgaagacattgatgacaggttgaatccaagataggctatctgacacacctctacaccgatcaagaaagcactattaatttaggggtattcacaaaataataaatctaatttaattagcacgagtcaattcaatcaaatccacaaaggacagatattcgcatttacacaaattgaatattggtatataaatttatatattttttaaaattttaacaatacgatacaaatatattacatatattaaacatatattacattcttacatataaggaaaatataattaaagataaaattaaacattttttttttctaagtacaattttttttcctttaaattttttattttatttattttaatttgttgttaaagatataaaacaacaataatttattttattttcaccgctacaaaaaccactattcaccacgatcctaaaaatatttttttggggagaccatcgctaaaaaaaattaagtgagtatttaaaactgttggaaaaaattgagtattccatacaattttaaatactcgtgaggtatttccgactgtttttaaatgtgccttaagaattgcagatttttttcaaaggggaattaccgatggtttcaaatcgtggcctatagtgttataggccatagtttaaaaccgtcagcaattaattcaaatctaaaaattttcaaataatgcattttccctcgctccaatataacgtgtttttagatatgaaaattttcaaatctatacatttttaaactctctctgacctctgctcctcgtcgtcctctctctttcttctaaacggcggtacacgagctccacca

SEQ ID NO: 241450 - DNA, 1733 bp, Cannabis indica
cgtacgtaccctgatgggggaaatacgacaaaccgctctcgggaggaaagaacagagcgtgaagaagcaagggtgactttgaggcgttctagaacccataaccaatcaacttgaaaagaagaaagtactcaacgatctaatgatcgagaaagtatgggaaccagtaaatccgtgagccattcaaagacaaagtctatgatgagtaggacgcggtctatgagtaagacgagatctgccagcaattactcccaaccagatctgtgagagcacttgaattggaagaaacctaaccttcgccaatagcttggtccaaagcaagaggatccaatccaattgtggataaacgagcttaaggacaagtttaggagatatcaagtggggaaattagggaaaacatctagatacgactctgacgaggagcttgagcagtatcacccagatattatgaataccccttttcctttaggattcaaaaacccgcatgtctcgtcttatgacggaaccacagattcagtctcgcatttgaataactttaacacgataatgcgaacgagtaacgtgacgaacaactaacactgtattttattccccacctcgcttgttggagcagtgagtatcttgtttaacaagtctactcatcattcaataacttcttgggagcagttgtctagggattttaagaagcaattttaggccgctagggataggcgacccgaagcgacctcgctaacctaaataaagcaacgggctggcgaaacacttaaggcgtacttaagctgttttagcactgatgccgctagggttcgaaattttgatgacaacacgcaactaaaagcccttcaggcggggatctccaccgatccattaatcgctgtgggcgagttgtgggatgatttacaaggacgtctggtgagaagcatcactgagttcaacgagagggcttaggtgtttgtccagaaggaagaagcccgaaaggaaatgaacttgttgaaaacaagctcgggaagtaaacccagtaatgtttcaacggggctgcttccacgagaattgatagctcgggggcttttggtccgaaaagaaaggaaagaattagggaaccattgaagtatagaaagaaacaaaagaggcatgacaaagacgttccattgtatactatttacaccaagcttaatgaaactcgagaaaatattttcctcacacatgagcagaaggtagccttcggcaaacctgagtctatgaggaattcgaggagcaaaagagatcctaacaaatattgtaaattccataaagatattgggcatacgaccgacgaatgtcaccaattgaaagatgagatagagagtctcatcgctcgaggccattttaaacagtatgtgaagatatagggccagggatacaacaaggggttacaacctattcctatggaaggagaggacatcctggttatttcgacagggccgcatatcgcaggggaaagcaataacgcccagaaaagatatgtgaaggagataaagaatgagcagtcggtcttggccccagaaccttccaagaaggtgaaaccgaggaaccccccattacattcacagaggaagatgagaagaacgtgagatatcctcaagtggatccgctagtcataaccattcatctcgccaataagaggatcaagagagtgttaatagacaatgcgagctcgataaatattatttatatggagactctaaagaaaatggggc

SEQ ID NO: 241451 - DNA, 772 bp, Cannabis indica
aaattataatttatttttatttgataggatgtgactatttggaatgtgttatacatgtttgcttggttaaaggattgataagttgggttggatagaacttgcattacttggtctttgaggtgaaatccttgatgatgtgtgctttcaaaaataatttagaaaatttttttggaacgtttgtgactttcaagctacccttgtagtttatatcctagtttacccttctttaagcttttaattttagctttattctttgtttttacacatgccttgagctaaaaatttgaatccattattatctacctttgtccctagctataccataagtggatcgttagtttggggggattgtaatggaggaaagtttatgttatgttttgtgaaaaattaatatattattgagagaatttttttaaaaaaaaatatatataattgcaacaactcagaaaaaagaaaaaaaagaacaaaattttgacaatacagtgtacattgggaaaaaaagttgtttcaaggatatcaaagagaagattctttcatgaaattagtaaaaacaaggggatattgggatcaattgtgaaaaccatgagataatttgattggaaaagcttatggtatatgtgagcataaataacatctttcatctacaattgacctaagcctaaaaagttttaaaaccattgaagtctttaaagcacatgttgttgacattagtggataggctaaatattgcaagcttactgataattaggttgtggatatgttggattgactt

SEQ ID NO: 241452 - DNA, 1157 bp, Cannabis indica
tggctcacaataggagacttcaacgaaattatttccaactccaacaaatctggtggaagccttcaaaatgagaaacaaatggagacttttcgtaaagtccttgatcattgctcacttcatgaaacttcttttgagggtgaaccatacacttggataaagaatcgttcggctgtgaacacggttaaggagaggttagattggtgtttcgttaacaacctttgggatattactttcaacacccccacggctcatcatttggactactatagctcagatcaccgagctatagcagttactgttacaccagtgggaatcacggaccagcaagaaaaaagacgcagccgctttcgattcgaaaagctttggctttcagaccccgaatgcaaagagctaatcattcaatgctggaaccaatccactttcactgacccggttcaaggtttattgtctaatttggattcatgtgctacatccttacaacagtggcatcgacataaatttggcagcatgaagaaaaacattgctgaaacacagtctcaagtgaatgttctcaacaacctcaatcatcggaatcgtgaaaatatgaatgaattaaaaagggctgaatctattcttgatgatttattggagcaggaagaaatttattggcaacaacgttcaagggtggattggctaagttcgggtgaccgcaatacaaaatttttccatgctaaggcttccgcaaggaaatccaacaacaagatcaaatcgcttatcaatgcagcaggggttcgggttcatacaaaagctgatttggctgccacagttcatgaatattttgcttcaatttttgctactgatagcattgatgaggattcactttcccaaaccttggctgctattccacatatggtaacaactgacatgaataatgagctcaccaagccttttttagccacggaagtggagaaagctttacattcaatggcccctgataagagccctggcatagatggaatgtcctcaatgttttatcaacaaaattggtccatagtgggagaatcggtcaccaatgcagttctaagtgtgttgaatgatggtgttgatccaacaagcctgaataggacgataatcacccttattcccaaaattaaaaatcctcaaagggttcaagatta

SEQ ID NO: 241453 - DNA, 1550 bp, Cannabis indica
tgaatatgtgattggttgagaatttcaaaataaaaaagtaagagaacaattggaaagtttttggatttcatgatttgaaaacataaaacataatgtgttttcatttttcagcgtaaaaatcaaaataatattcaaattttagtttttgaaaatactcaaccaatcaataattcttaagtagacccccaccattttaatttttaaaaacataaaacaattttcaaatcctaaacaaatcacacctattatatatttactattttttggtgtgtatgtttagattgaatatatgactttaaattagaattgaatgaatctatattgagtgcgaattatttttcgggatgatttagaaaaagacaagtaatttttctttatgcctatgttgtcttagtggtataattaaaatcataagtcatgaagtagaatgagcacaaattggtttcataaacaactatgttaacaattattaatttttttttttttaaaaaaaacaattatgttagcaaccttaaaacaacccaatcgcatatagtaactatgttaataatttttacaataacccaatctcctacaacaataatgttaacaactcaatctcatacaacaactatgttagcaactctttcaacaattcaatcgtatataacaatcatgttaacaactcttacaacaacctgatctcgtacaacgatcattttagaacccttacaacaatttaatatcatacaaaaactattttagcaatccaatctcatacaacaatacttagagaaactcaatctcctacatcaaacatgttatcaactcttttaacaactcaatcttatacaataactattttagcaaccttacaacaaccatattagcaatccttacaacatgttagaatttgggataaagtgaatgaggttccatctcaaaactaattggctatgggaggagtagtctttccacacattagcgatgtgagactatctaacatcctccctcaagatggtagctattttatttgctcaccatcttggacaacttgatcataagtggctcttttttagctcactatccatgttgatcacaagtagttctttttgctctactttttgaatcggtatttttttgtgtggcttctttttatttttggttcactattcttgaatcacaagtggcttttttaactttggctttttggattcatttttttttagattttttggtggctttttcttatggtattcgcatattaaaaattatgacaattatgtccttaagtcataaattttattccaaaataaaccatataaatttgactcatttatataatgacccaatgcatattttatatgtacaataagtgaccccaaataaataaattctaacaatcttccactaggctacatatgtatgcatataaatgtgtcaatcttattgtagctcatatctttgtcctcataaccatgacatgcaactcgtccattaatctatcaacataggatcaaagcagttttcatgtatcaatcacactaaacccatcaatggtcacatatatt

SEQ ID NO: 241454 - DNA, 762 bp, Cannabis indica
gtaatacgcctaagatagttgggtgttacatggtgcttcctggattttgtagacctcctatgtccactggtatatcccttgtactccttggttgatcatcctaggaatgcatgggatttctgtggttatcacctctaggagtttccccatgtctattggttctccagcctctaggtcttccctgaagtctcctagtggatgtgtttggttggttaggaggtacatcattgcatgtagcccttacagccacagcattgcgttccaacttagcaattcttcgatttgattctgccaacctttgttggagttgcttgttttccaattccactaacaacatgtatcttatgggatcgtatgtgtcctcactacgtatttttgggatttcacccccaatttttgcaaatcctccttctcctaatcgagtacttcaaaaattgttaagagcagcaaaagtcagtgtgcatgccatggtaagaataaacgcgtgtaaactataaaagtctttcttaaaaattcacagcaaaacgtttggggggaaaatgttatacccaatttttgagaaattaaagaagttaactttaagactttaaccaagaagaaaaagacgaaatagaggctaaactcgactagattactaaatggcacttgtttgagtgccacatggtggaaaaaatgccatatacgaccactgacctaagatagtgtcagtggttgcatacctagggtttcaccctagactactttcttaaatatttcatgtaa

SEQ ID NO: 241455 - DNA, 944 bp, Cannabis indica
tttaagatccaatgttactaggcgtctcaagtttccaatttctggagggagagtaccagttaaatgattttgacttaggtccaaatattttaagtttctcaagtagttgccgatctctggagggatagaaccagctaaatggttttgattcatgaacaagctttctaagtttctcaagtttttgatttcttgaggaatggagccagataagttgttttgattgagttgtaagacttctaggcttctcaagttgccaatttctggagggatggaaccaataaattggtttgagtgaagagataaatacgacaaattggttaaattacccaaagctttagggatagaaccattaagtttgttatttgaaatatcgagaaaagttaatttggttaatcgaaataaagccgagggaatgggtccgctgagatagctggggtttagatctaggtagagtaacttctctaactttcctatactgttaggaatggaaccattgatttgattttcccacaactctaaacgagtaaggttgattaaaagaccaatggactcaggaatggaaccaatgagttcattgtaagagagaacaagtactttcaaatgagaaaggtttgttaaagaaagaggtatctcacctgtaagaacattgtaggaaaggtcaaggtgggtgagctttgtaagagtgcctatctcctgtggaataatcccaacgactccagcattagaaagatcaagagtagctaaatttggaagacaagtgaaattgagattctttaacattctctcttccaatttagcgacaccatcattaatatcatgcaaagtgatttgagtaatgtgaccagattggtcacaactgataccttgccattggcagtgcagtctggtgtgctggtcttcactataagaatattttttatttaaggaaatatatttctatttaa

SEQ ID NO: 241456 - DNA, 1284 bp, Cannabis indica
tctcctacaatatgtgaccctcccaagacaaccggcatatcctctccctcaacaggaggagtttgtaatcccttgttgcttgggttgttgggtgtattgggctagttatgtccattgccctgtcttttcacatattgcttgaagtggcctcgtgcaatgagactctctatctcatccttcaactgacaacactcatctgtcgtgtccctgatgtctttatggtacttacaatatctcattggatctcttttatgccttgcgtgcctcatgggctcaagtttactgaatgcaaccttgtgctcatgcgcgagatagatattttcctgagtttcattaagctcggtataaatggtgtaaactagcacgtacttgtcgtgcttcttttgtttattcttgtctttagatgaccccttagattcgtccttcctctttgagtcggaggcccctggattatcagctttagtcgagacagtacttgttaaaacagtggtgggtttgcttcctgagccagtttttaacaatttcatctctttttgagcttcttcctattgtaaaaacacctgagccctctcattgactcgatgatatttttcactggagggccctataggtcgtcccatagtttgccttcagtagtggagagatcagtagtgattcctgcctgaagggcagtaagctgggtactatcatctaaattccttaatctcgcagaagtcatactaaaacgacttaagtatgccttaagcgtcttaccaggatgttgctttatgttggtgagtgaggatgcttcgggtcgcctatcccttgcagcctgaaactgcttcttaaagtccttagacagttgttcccaggaagggatggaatgatgagtaaacttattgaaccagctgcttgctgctccaactagtgaggtaggaaacaaaatacaacgtagattgtttgtaacattgctaactcgcattatagtactgaaattattcaaatgcgagatcagatcaatggtcccatcatatgacgagatgtgggggtttctgaatccctagggaacaggagtattcatgatatctggatggtattgcttgagttcctcatccgagtcatatccagattgtttttcttgctccccgcactactacaaaattggattttagtgacacgcacaaaagtgcgggtcgctaaaaattaaagggtgagttttagtgacacgcacaaaatgactacaaattcagtgttagtgtcacataatgcatgtcactaaaaatatgaggtgtcactaaagagtaa

SEQ ID NO: 241457 - DNA, 577 bp, Cannabis indica
tcgcagtccaagtgtgttgtccatgtgtagagttgtacaaaatatcctgccaggtcaatcttggtcggccatggtcctgtcagggtctggtaggacaaggcctgcaagatctggcaggataaggccagcaggatctggcaggtcactatagctccactaagaggaggttagccttttgcaagttgaggacagctttgtacacaatttccttgtagggaccaagttcccttggtcggacgaaagcctccttggttcggaagtcacttcttggttggccaagttgtgcacatatcctggcaaaataatctaatataaaattaattttatttattttaaaattaattatgttggtaattcaattttaattaggtgaaactaatataattagcctaatataattatttaaatcaggtaaatgggccttcataattggggtagtttatgtgagggaggattgggttcagtataacgtacccactactatggccccctaactctcacacaagacccataggagaggaacttaatcattcaataaataattgttatttatcaaataagcccaatattaattggg

SEQ ID NO: 241458 - DNA, 1150 bp, Cannabis indica
ttcttatatacaactgacatttgcaaaaacacggttttttatgtatattttataaattgattatttagtaaaaattctttagtatataatatatatgatgagagagaataacactaactcctcaaaatagttaagggggttttttgtaaatacactatagaaagcccaaaaaactattctctcttttataaggtttatagattaaaataaagaaatgctaaaattggacactaataattaatgtgttatatatactggtagagaaatgttaaagggcattaatatatattcaaataataataataataataagaaaagatatatatatataagtgcaaaatatagtcaattaaaaattactttttactgcaaataaaattaaaaataattaagatcgaactatagttttttctctagaaaaataataatgttttaatatatattgttgtgaaacaacaacaataataataatgacaatgtgaggtccttttaaagtctatcattcatgccattcgtaattatgctatgaatttgttttgtttgccgatgaaaatcgtcaatgagattcatcaattgtgtgttaaattctggtgggaaatggatgatgataagaagaagatgcattagtatatatatttggtatcacttgtgttgtcataaaaataatggaggtatgagctttcaggacatatttttttaatcaatcattactcgccaaacaggttgctcgattatttaactatcctacttctttagtagcgaaagtgatgaagggattttattattctaatggttccttgcttgatgtcgaagagacaaaacatgcttcttttcttcagaaaaatcattctttgggatcaggatctttggaagcaatgttatcgttggttggttggaaaaggtgatactatcaagatacgggaagatgcatggacaccaaaggaccatgtgggtagagcttactcttttaaggggggcctaattttcaactgtatattagtgatcttaaacttgactctggtggatgaaatttttctcttattcagaacatgtttgacactgtggcggctagagctattttgtctactcctctttgtttgaaaaacaagataatgggatgtatactgttaagagtggttattggggctct

SEQ ID NO: 241459 - DNA, 852 bp, Cannabis indica
ccttagttaacagttctagttttcttaataatatatattataaaataaatgtatattattaattataattataattaatatttataattttgttatatataattatttatacttctgcttttaaattgtacactttatattaatattaatattaatatttttttcatatataattatttatctattatcgagtctttatttatgcacatatattaatattaatatttatatttctatcaaatatatacatattatttattttttactatattttaaatttagtctttatttacgagcttaaatggtaggcactgcctcctaatttttttgttattttattttttataatacttggtgtatgattccctgggaacgaaattctaaaaattattggttaaaagaaaattatcgtgggttgatattaaaagtgaaaattttgacatcatggaactaaatcaagtaaatgtggaagaaaaaactctcattgatcatttttctcccatttctactacgtactcccatcatgtcattatttttcctgaaacaaattgctatacattttaagttgaaaccttccataattcaactttttctatctttttatgagttcaatagagaaggatccatatatacatatgaaaggttttttttataaatttgttctgctttttgatttcaaaatttttctgattaatctgttaggcttagaatttttccattctcactaaaagataagtctaaagcctagttaaattcactcccagcccaatctatttctacttgagatgaattagttaataaatttttgtctaaatttttctcgtgtcttaaacagataatattaggagagaa

SEQ ID NO: 241460 - DNA, 1868 bp, Cannabis indica
tgaaactgacacgaaacgacaagttgtaaaatcggttttcaaccccctgctgcaaaatccgggtaaccgattttacaagcagtgtaaaaccagttagccggttttacccagaaaacctagaataatcaaacccctaaccaaatcgtttccaaactcaaccaaactttctagaccttcatattacaccccaaaaaacattttccaagtgatagaacaacaatcaaagctcataatcaaatttcaccattaaagaccaaagtttgagtttctaaaactcaaactttgtcacacaactaaaacaagctaccaattaacttcaaatcagctcaataatcataatcttaacatcagaacacctcaatgaaaacaaatcacaagaacaacaaccttaacaccaaaatcatgcaaggttccaaccaaaaacataaaaaaattaaagagaaggatatcaaagctattacctccaaagaattcaccaagaatcaactatgaattagtaaaaccagatgaagatcaccacgagcttatcattttttcccaagggttacgagagagagaaaaatggagagagagaaaggtgttttcccttaaattatctacaaaattaaggaaaaaaaattagattattcatttaactatgtccactaaaggacaaaaatttaattggggcaaaatgaccattttgcccccacttaagccaaaaagtcataaaatcacttaggggtatttttggaaactctaaaatcccgactattcccgatattcccaatgtctaacttattgtaccgatatactaaaaatactaagatgtgattctaatagccatacaccgcgttccaatgttgtcgggtacaataatatgcaaaattgtgaaatttctatatgtgacataaaaatgcattctgaattcaaataaatcatcataaataattaattcaataataataaatgatttttcataataaagccctaattatctgctaattttcaaattaaagctaagcggtctttacaattattcccctcttaaaaggattttgtcctcgaaatctaatctgaacaactctggatattgaggtctcatatctgattctaactcccaggtggcctcctccaccttgctatttctccagagtactttgaccagagctatggtcttgttccgaagaaccttatcctttctgtcaaggatctgaactggttgttctttatatgacatgtctggttgcaactcaaggttttcataactaagtaaatgagtaggatctgaaacgtactttctcaacatagagacatggaatacgttgtgaactattgaaaaagctggaggcaaagctaatcgatatgccacttgtccaaccttctcgagaatctcgaaaggtccagtaaatctacaacataacttgcctctctttccgaaacgcttgatccccttcataggagacacccgtaggaacacttgatctcctacttgaaattctacatctctatgtttcggatctgcataactcttttgcctactctgggaggcaagcattctagctttaatcttctcaattacttcattaattggtctgttgtactaattttggacctaggtatttcttctcccatgtctcatcccagtgaatgggagatctacattttcttccatataacagttcatagggagccatccctatcgtaccttgataattgttattgtacgaaaactctatcaacggtaggtacttactccaagagccctcaaaatccataacacaggctcgtaacatatcttctattatttgaattgtcttttcggactgccgattagtctgaggatggaaagttgtactgaatttcagtttagtacccatagcccgttg

SEQ ID NO: 241461 - DNA, 1206 bp, Cannabis indica
tttaaataataaataaaaaaaattaatgacatggaccaatgaacgagtgacacgtaaacactaacctggcacataacggggaggtacctacggaagttccagagtagtgacgaaaggtatttttaccgccaaaaataggacttaagtatttatctgctactcggcataaaacttaggtatttatgccgcaaattactcatttttttctccattatagcccaaacatacttagatagcatagcctagttccacttggatccctctttgaaaccgaggcctccatcgacttttaggagacaaactttctcccaagaagtcatatagattttgctcttttcatctttatttccccaaagaaaacctctgcataatctttccacctcttttgttacacgctgagggagaatgaaaatgctcatcgagtaatttctgaggccaaggaaaacaatgtgcattaattgagctctccctgcaaaggacaagtgtctactagcccaattatgtaagctttgcttaattttagagataataatcccacaatcttcaaacttccattttgtacataccaatttctttattattaaaatatttttattttattattttttctatgttaaagcatatatatgatttatttaattgtcatttatactatatatgatatatataatttatgatatattattacaaaaatttattatttaattttgtgatttaaatttttattatgttataattatctatattaaaatatattctatatttaattggtctttatttatttatttatttattattattattattattattttaaaaaaaaaatagtccaatctattttaaaaccaaacacaaaattacattcaccataatctaatctgattgtaaagtccattcctgcatgccaaacgaatcttcaaggaatagaaaaatagattatttctataaatatacaaaaatgataataaaaaattaacggttgtacgaaactttaaatgattttgcggtttttcaagttttatttacagaaaatacggtcttttgatattttcatgttctttttattttgtttattgtatttttttgttattttatatatttatttttattatttgtttttgtatattttgttggtatgttatttttactttactttttattttgtatttttttatttattctttgttattattttttaaaaaataa

SEQ ID NO: 241462 - DNA, 1071 bp, Cannabis indica
ggatcgttcttgatactttttttgcttaaattaacccaagtgaaaccaagttcgtctgttttaactttggctttattctcacccaagaaaattttagaagtggaattcgaaataacctataatcaagctcccatatttcatcaataactccataatatgtcatagtggattatactgagtttctttcctttgctgatgtaaaatgcattgcttctgcaacaatacttactccactattttgaattgttcgagcatcatctcttgcctttgtatgaaatcttctcccacccacaatgtaagaatgatgatttattaattacttgagtatctattccaaatgatatgtattctaactcttttgacataccatgaaggctagaatggtattctttaacaatccaatgaattgacttaggatgctcttctagtacccatatctatttattcttaaccttacttctaattattgattgtaataatttcaagtgatcactgaaatgataaagtataagttatatacaatttcatttgatcgagaaaaatataaagtataaagttgaataaaataatatataacttacgttatatatggttggactttaaggttattctcaagcacaaccaaatgagctttatctaattatgctctagatatagtcaccactgatcatttctctcgtaatcctctatcaaccccatttgagtgattttgtggcttgctaagtgcgattggattaactcctgctatttactccatgtaaaattccattgcatcttttgatatatgactctcaatcatgcaagcttcgggctgattgtgattacgcatgtaacctttcaacaccttcatattcctttcaaatggatacattcatgtcacccaaactggtccacacaacttcaattttcttactagatggactatgaaatatatcatgatgttaaagaatgggggaaaaatatttttttatgattgcatagagttttaactatgtcatcatgcaatgaatacaatgttgtactttaagcttcgaacattagatgaatacacgtcgggtacttttatctcag

SEQ ID NO: 241463 - DNA, 958 bp, Cannabis indica
ttttatgtaattttcttgttgttacatgtgtctaattctaacaatttcatgtttttattttaccttattattatttgcagtctatagagctttcatttgtgaatcaatcattgatcaacagcataaaattaatcaacagcaaaaactttaacataaaagtgtttgggtgccaagacacaacttttgaaaacattcaaatcacagctccacccacaagccccaacactgatggaatccacattggttcatccactggaatcaaaatcttcagctctagcatagccactggggacgattgcgtctcaatcgggccggggacagacaacctactcgtgagtgggttggcatgtggccccggccacggaattagtatcggaagccttgggaaatatcccaatgaagctgatgttacaaatttggtgatacaaaattgtaacataagtggtacttctaatggagtgaggatcaaaacttgggctccttctcctccaagcaatgtttataatgttacatttgagaatattggcatgaataatgtggataaccaattattattgaccaacaatattgtccattcgaaaccaaaaaatgtggtaatggagcttcatctcaagttcaaataaggaaagtaaagttcaataatatttatgggacatcaaagggaaaagttgcagtggaattgaaatgcagcccaagtaaaccttgtggtgagttaagtttaacaaacataaatctgaattttcctgggggtgctacttcatcttgttctaatgcacatggaactgctacaggtcatgaacaacctcctccttgtatttagatcgatcttatataattacttaattaatacttcacagaatcatctcatttttgttaatttattaattataattactctctctatatatacaaatctatatgctactttcttagtgtcatccaccctttgtttcatcat

SEQ ID NO: 241464 - DNA, 1295 bp, Cannabis indica
ttttttgattactcttaaagtttctcagagaatatggtccttacaacttttattttaagaatctaataatgtagatggctagaaacatgatttacaattatggaatcctaacatccctaatagatcgattggtgttccctttaagtgttaattctagaattaaaatgctgtgcacaaatttagatgggatctaaattatacttccactagtgaattaatggtactaaatgataaataagtaactagatgggtaaaacggtaatttgaccaaaactacttacgaactaatacatggaggctaatcactagaattgattatatcaatgacactacaatgaaactcagtaaatataattctataattactaagagttcaattccatatttatagtggagtaatcatagaattaataaataatgattatttagttgatgagattcaataaataatctagcttattggagcttagaattataggtccatgattcccaaatcaccaccttgaaacactatcaagggtagtgttatacccgaaatttggctatcggttcaaaggaggacacgtgttgaactgggcagaatatgaattaacaaatgtaatgataattatatttgaaaattgaataactcattaatgctgaattgatagagtatatttacaatttactgactataaggtcttatgtgagataaagatacaccaactattgcctcattcattaacgagaaaccatatgacttcggatgtacaaggcgaggtatcaacctcgctacgcgttaggagacgagacctggtgactggtaaaacacttaatgtataatacaccttatacaggccaagtataatagtcgggtaaatccaaacagctaatagcgaggcacccatctcgttataggaaggcacgctcatgatatcttcactaatcagctccagatacctttcactggggttcatggcctcgtcgagtcaactttcttagacaaaagctgacatacaaatgatgttgactactgaggtccaccctgtcaactagaactgtgattttcagatgaagcattatgtcttcaagcgcaggaacgacgagacttacatcatccacctcggaaagatatgggaaaagctccagctcgctaccaaggttattattgctgtgttcccagcgagacatcccagaatattacgatttataacgtatttaatacatgtttatattgacccggtaatagcggacccatcacaactgtgcgatttttaaatattaaccacatttattttacgtggtatgtaatcgaa

SEQ ID NO: 241465 - DNA, 1322 bp, Cannabis indica
ttctattaagaagtctgccaaggcttggcctttgatggacgtttgagggtgatacattatgtcaaactgccccagttcgatggaccattttatcaatcttccagaagcatctagttttgataaaacttgtctcaagggctaatcggttaacacctttatagggtgtgcctaaaaatacgatcggatcttgcgagactcgtggactaggcacaaagcgagttttttaagagggtgtatctagattctgcccttagtaaccttttacttacatagtaaataggttgctggtgcttaccctcttctcgcactatagctgcactaattgcatcttccgagatagccaaatagagaagtaacgtctccccagttattggttttgccaaaattggaggcgtcactagatgcctttttatattctaaaaggcctcttcgcactcttttgtcaactcgaatttcttgttgcctcgcaatacactgaagaacaacaaacatttattgacttcgaaatgaatcttttaagtgcaaccatagccccaacattcttcagcccagacgacatgactttgtagcagtagagtcctatgttggttacgaagctcgtatgttcctaatttgggacatgcatttttatctggttatatccagaataagcatccataaatgacataagcccgtgcccagcagttgtatctatcaactggtcgatcctgggtagtggaaataatcttttgagcacgccttattcaggattggctatccacgagggataaaacacctcgcgtataaagttattgactaataacttgtccacttcctgttttagcgccccttgtctctcggaacccaaaggtctccttttctgcctcttcgctgggtagtttggatcaagatttaaatgatggtagataatgttagggtcgatccttatcatatctccatggctctaggcgaattgatcctggttcgcctttaagaaacttattagctgctattttagctactcttctaggttcttcccaatgtaagacactttgtgggatttcttgggtcgagaataacttcttccaattcttcaatttgttttaataagtttctttcatcttgaacccaaaggtcaagatccttgtccttcttttcactttcttctgccaagatcgccattaactgatgaccgtctttcttatgctgcaactctatgcgatagcaatcgcgagccagcatctggtcaccccgtaccactcccacaccttctggtgtttggaacttcaaggataggtgcttgatcgaactaactgcccctagttcgatcaatgctggacgac

SEQ ID NO: 241466 - DNA, 888 bp, Cannabis indica
taaaaaataaaaaaaaaaaaattgttgagaatagtattacatctttattaattttaagaaaacagatgtttggttaaaaaaaaaaagttttaaagatacatttttgttttctcatcaaaataatacatcaatcatgaaatttagattaggaaaggtggttcaaatttaatacttgtttatttatcaacagagatgtactattagataatatttataatcattttaacttaaataatttaatactttatatgtaaagatatatatatatcataaattctttaataaatggaatagatcctttacaataatttttcgttttttcttactgttttttatttgggtgtatacatatttggtactttatgtttaatttaaatacaaatttggtaccctatatttttaataatacttatttggtaccctgtattttaaatacatacacatttagtaccctaaactcaaaattttttgatgaaattttatcaatacaattaaactgtcttcaatattacaaattttagattcaaatttaattatttaattacatataactgagaatcatttagtcaaattaataaaattatattgattaaattttactttagggtacgaaatgtgtattatttcaaaatataaggtactaaacaagtactattaatcacacaaggtaccaagtgtattttaagaaaaagataaagtactaaatgagtatattctattttttattttgttatcttatttatattaatttttcttcttgtaaaatcaaaataagcatatcataaagtaaaaatacggaaaagtcttataattacttttgtttcttcaataacttttttattttaacggataagtatttcaagtttttttaagtccttaattttaata

SEQ ID NO: 241467 - DNA, 794 bp, Cannabis indica
atctcgaaatacttgaggttggaaagagcatcttctcttccagtgtacatcttccaggctggcattttaaacttgtggggcaatgtcaggaaattgatcacgggggagaaaggggttccacgtgcttggtccaactcgagatcattgtttctctgtccggccatgccttggaacatattctttagttcgtccagttgtgcattgttcggcattttggccgatctaagtcacatcagtatctttttgagcaagaatttgagcatgggtttcaggctgcacgtttggcatgtcaagctaatcgtctactcctctcctcctatttagatcgtttctgaggttatgagtcgtccccaacctattgaatacaaaagcgcctgggtgtctcattgattggttgatttggttaatgtgctgaccggcaccattaacttggttggaattacctggtatgacttctcccgattaattactaaacaaggtctccccaactactgcttggcccacaggcagaacctgtgaccagagattcggaggctgaccatttatagtctgagaagtattaatggttggatcttcgtctgtttcacccagggggatgacattcgggggttgttgcccgatagattgataagctttttgtatcagcacagtagcttgccgactacgattgtcaatctttgtatgataagcccttaacgcttccatctctttgtctccccattcggcaaatgcgcctctgctcttcgaacgcgagacttaccgcagcacggagttcctgttgatcaagatgtagg

SEQ ID NO: 241468 - DNA, 2347 bp, Cannabis indica
cttcgcagagtagccgtcgctagacttaaatgatcattactgtagcgctgctgtttgggggatgtgccgtcagactttattgcgtgcacagtcccaacacgcttcctcccatgcggcattaaatgcgacttgatgtctcgggagagacctgacacatcccggagtgcctttgagctatgcttgcttccgggagtaccttgtattccgggtgcatcttccgggacccatgtgaataacgcttcctggtgtcatacaaagacttagcagttctttcttaagtagtttgatccacgtgtcccttcctgactggtccacgtatattgggcgattttaggagcaacaagcacaatcaagatctccaagaagtcttatcgttcgtaggcccttttgacccaaaggcatgaaagtcttcaaactgctgaagctatagctcaaagctctactacccctagtactaccatgttccctttaggttttgtaacccattcatctgagttttctcccccttttcctcttcaaactgatattgaccaaattgtgtataatgccaaacctattcaatctattttgaccgactctattactgtgcattttgacagttagatctaatattgggctatcatcagttgagagtccgagagtaggatattccaaagactactttcgacactaggtatggacacaatgaatttttagttatgtcttttggactaaccaacgctcccgcagcttttatggatctgatgaatagggtattcaaggatttctttaatatctgttttattgtatttatcaacgatatccatgtgttctctcaattagaagaggagcacgagctacatctttagatggttctacagtggctgcaagaacttaaactgtatgccaaatttaagaaatgtgagttttggctatctcatgtgtcttttcttcaacacattgtcagtaaagatggaattaaggtggatccatgaaagattgaatctgtcggggattcgccgagatcgaagacagttacagaagttagaagtttcttggatctggctggttattattgtcgatttgtagaaggattttctaagatctctacacccctaactgaactcactaaaaagaatcagcagtttttatggacagacaagtgtgaagcaagctttcaggagctaaaaaagagattgattacagctctagtattagccctaccatcagatagagaaaagtttatagtttactgcgatgcatccaaacagggtctgaggtgtgtactgatgtaggttgaccgagtcatagcttatgcctctcgtcagttaaaggaatatgaacagcgatacctaactcacaatttagaacttgccgcggtagtattttctttgaagatttggtggcattatctctatagagaaaaatatgagatttataccaaccagaagagcctcaaatacttctttacccagaaagatttgaatatgagacagatgtgttgattggagttggttaaggattatgaaatcctttaccatcctgggatggccaatgtggtggctgataccctgagtaagaagggacccgggcaggtaactagtatgattaagatttcacctcagttagcagatgacatggtcaaatcaggcattgagttagttgtgggcaaacttgataacttgacattacaatctgatctattggaacaaatttaaaatgctcagttatctgatccggaattagtgaagatttgagaagacgttttagctggtcaagctaaagattttacggtgtcagataatgagatgttgttgtataagaccaacgtttgtgttctaagtaatgtggaacttagaaatgagattcttgagagctcataccactccttattcactgcatcctggcattaccaagatgtaccaagatttaagaccctactactggtggtgcgggatgaagaaagatgtggtagaatttgtatcccgaagtttaacttgtcagcagattaaggctgagcatcagagaacggtaggattattgcaaccactggcacttcctgagtcgaagtgtgaggatgccactatggagttagtggttgggttacctagaatcacgggaatgtacgattcgatttgggttgtggtagatcgatttacgaagcctgcacattttctatcggtaaaaacaacatttacagtggatcaatatgtaaagttatatgtgaaagagatagtgaggttacatggcgctctaaaatccattatatcggatagagatctgaagtttaccttgaaatctggcagagtcttcagcgggcaatggttaccaaactaaaatttagtacaactttccatcctcagactga

SEQ ID NO: 241469 - DNA, 1086 bp, Cannabis indica
tttgtaggttatcttaaatagttataacgtatatgaatatgataaaaaattagactaaaaattttttctggatgccgaaacaagtcaagggtgaatcagtatatcccttttaaggggtgcattgtagaatcacccaatgttaatttattataaaattagtaaaaaaatctgtccttcataaatggttgtttaagttgtctactataaatatttaaaatttatgtcttaaaagtaaacaattaatgaataatatattataaaatacataaaatacaattataaaatacattaattataatagtataactaataaatgtttgaaatttttttattcatatgaagaatgtataatcctataaggatgtacgagaattaagattatatgatatgaataaaacaagttagcagtgtattaaagtagtgagaatctttaatatggaactgctaattaagtacggtttactatacaacatacttctagtgtgtgtgattttgattcagatcacatatgtggatagacatgtagtaaatgtgatgtgtatgattcgattatgcatgccttgactgattgtgtaataaacatctttcattaacgtgttgtttaccatgaaggagttattcatatcacaacaatgatcattagtatatcagcctgaatcgtgagtatacatgaactcttgtttgtgtcaattaaattctttgattcactcgttaaagttttccaaagaagatgattcttacaatttttgtttaggaacttaataacatgagtggctggaaatatattatacaataatggaattcaagcttttctaacggatcgatagagatttttttagacctacaatgtgtagtgacagcttaactttaatatgagaattagtagataatgagagtaattttataattagacttctaattattatttatgtaattatggagatatatttgaattctacgtgtattaattatgatatatatgaattttaagtttctcatatttttatgctcggtaacagtagaatgcgacgtttggcctatagagtcacataaacaaggttttgtatcttggttttagtggggaaa

SEQ ID NO: 241470 - DNA, 652 bp, Cannabis indica
tttttttttcctatacccactaaattttaaggttgttaagaaatgtactaggttcaaccaaggaccaatgtagtacttgtctaatccttgttgggaacaatggtttgatcttctttattgatgaacaaagcttaaaatgagagaagttaattaaagagtaaacaatctctttaggaaccattcttgaactctaaactctctgattttgcaacctgaacttggtgatagaaattcacttgtctaattcctaatgtttgtaaccgaaataactaacaagttaagttggccgagtttagttaagttggtttagattttggttgaccataaagtcatcaaagtaacaatataatgtgtacattacagtagggtaatcttaagttataggacgaaaattaaaacgagtccttttttgaggaaattacattgtatactcattttattttacttattttaattttaactttatttttcatattatttaaaatatatccacttttatagatggtgtctctattagaccctttaggttaatataaattatatattaaacttaagtagaaactgaaggtatcttggataacctctaaaaaaaaataggtatattttaataaatatgatatcattaatagataaaaaaaaagatatttttcaa

SEQ ID NO: 241471 - DNA, 1341 bp, Cannabis indica
acaatcccttaatagagcatcattatttaaaggtacaattatttagactttgttatagaataattagaaacacaaataccataactacctcgaggcatcttctagctccttcttcatggaagaaagtaagttctacatttcacagaatatgatggaagggccggtggaacaggcgataagaagacattagaggttgatgctgtgattggagccgatggtgctaattccagagtcgctaagtccatcggtgccgtgattatgaatacgccattgcctttcaggtattacagcctatgattcttctatcgtgctagtgttgggtttttttgttttcactatagagaccaagttagaacttagaattttgtgttgttaattaatttgcacttagattatgcttatggcttttgctgacatttttatgcaccaatagttgtaatgggataagggagtatcttattaggtgatgatggaaacgaatgatcaatactgatgtgtaatcttatgctatccaatacatttgtgtaagagaattttctaatcttgattttgtattgtatattttcaggaaaaaatcaaaatccctgatgagaaaatggtgtactatgagaacctaggtgagatgtatgtaggtaacgatgtttcacttgatttttacggctgggttttccctaagtgtgaccatgtggatgttggtactaggacagtgacatacaaaggagacatcaagaagttccaactagcaacaagaaaccgtgccaaggacaagattttaggtaggaagatcatttgaatcgaagcgcatccaatgcttgaacaccctcgcccacgcaggctagcgaggagactggtcttggttggtgatgcaactggttacgtgaccttatataatgaaaaagggcactcgtttgaatggaataaataggttatatgagatgattaggggtgtttattggaccacatccaatgtttttaggtctatccatatttgattcaattatatattggatgttaggttttaccattcgattcgatccaattaattttagtcatccaatctatccaacatccattagatgttggattggatcggttctatccgttggatgtatttcttatatatttattagtttaatttgggtttatcaaatattttagacctagtattttttagatcagatcggatccatccaatattttagctctagtatgtattggatttgattggatccatccgatccaagagtaaaagagtaaaattttaatgttaattgttatatatgcatatatattttacgtataacaatataaaatctaattactcatccaaactaaataaaa

SEQ ID NO: 241472 - DNA, 787 bp, Cannabis indica
gtctcctatttggtctccccccaagagattgagtcaagatcaagtgtgacgttaaagtttgtagtgactcaatgtgcgtggtaccacaaggaggcagttttgtgggtggctaccaaaattctcaacttctctgacccgcttattggagaagttgtggcctatttattagccctggagtcagtggtcctatggaagcattgcgtgatgattgagagtgattttgagacggttattaacacactcaagggaacttattctgtttagggtattggtaactatatgcttcaatgtaaacatctcttaaatcttttgattagttgtaattttttatttatttctagaatgtgtaactttgcggcccatagtgtggctaagtaagcttttgccaaagatgtagcatggtaaattcgccttccataccagataatttattatttaatttcttttttaattttcttaatcattcaaaataattttttaagatctaaattaatttttttaagatttactaaaataataatatattgaatcttttttatttttattttgaggggatacgatttgatagttgtcaaagtttaaggggtaaaattattaattaacaaagatatgacaacgtttaaacgaaataataaaacagaacttaacagaaggactaaatttctgaaatttaaaagttcaggaggaattcttaacaagttgtatattttagggagcaaaatccatattatcgaaagttttacagaatcaatattttagggagcaaaaaatatgacaaatcttatgt

SEQ ID NO: 241473 - DNA, 1177 bp, Cannabis indica
gttgaagggttctctaaaatttcaatacccttcaccgagcacaccaaaagaatcagcattttgtatggatggataagtgtgaattaagctttcagaagctgaaatagaggttaatcatagctccaatgtttgctctgccttctgataaagagaagttcgtggtttattgtgatgcatccagatagggtttggggtgtgtactgatgcaggaagattgggttattacatatgcctcttgatagttgaaagattatgaatagcggtacccgactcatgacctagaacttgctgcggtagtgtttgctttgaagatatggcggcattatctctatggagagagatgtgaaatttatacagatcataaaagtctcaaatatttcattacccagaaagatttgaacatgaaatagaggtgttggttagacttggttaagtattacgattgtgagatcctttaccatcctgggaaagccaatgcagtggttggtgccctgagtaggaagggtcccgggcaggtaactagcatggttcaaatttcacctcagttagaagaagacatgttcagatcaagcatcgaatttgttgtaggcaaacttcataacttgacgttgcagtctgatctgttagaacgtattaaagctgcttagttaactgatccagagttagtaaagatcagagatgaggttttagcaagtcaagttagagattttacagtgtcagatagtgggatgctgttatttaagacaagggtttgtgttccaaatagcgtggatcttagaaatgaatttcttgaggaggctcataccactccatattctgtgcatcccggcaccaccaagatgtatctagatcttaaaccctacttctggtggagcagaatgaagaagaatgtggtaaaattcgtatttagatgcctaacctgtcagcaaatcaaggctgaacatcagagaccggcagggttcttgcaacctttaaccctacctgagtggaagtgggatgatatcaccatggactttgtggttgggttaccttgaagcacgggtttgtttgattctatttgggttagggtagactgatttatgaaatctgctcattttttacaagttaaataacctttccagtggatcaatatgcagatttatatgttaaagtagattgtaagattgcatggtgtgcc

SEQ ID NO: 241474 - DNA, 1161 bp, Cannabis indica
tggttaaggattatgattgtgaaatcttttatcatcccgggaaggccaacgtagtggtagatgccctaagtaggaagggtcatggacaagtatctaacttagttacaatttcacatcagtgggcagatgacatggtaagatcaggttaagagtttgtcatggataaacttaataatctaacgttgcaatcagatttgctagatagagttagagatgcgcagttaacagagttagtgaaagcctgagaagaggttctagctggtaaagctaaggactttacaatatcagatagtggattgttactttataacacttgagtctgtgttccaagtagtttggaattgagaaaaaaaaatctcaaagaagcacataccactccctattcgttacatctgggcactaccaaaatgtatcaggacttaacaactttgtattagtggtgcgggatgaagaaggacgtggtggaatatgtatctcggtgcttgacttgccaacagattaaggctaaacattaaagacctgcatggttgttacaacctttgactcttcctgaatggaaatgagaggatgtcaccatggattttgtggttggattacctaaaaccacaggaatgtttgattctatgtgggttgtagtgaattgatttactaagttcgctcattttctactggtgaaaacaacctttacagtggatcaatatgcagaattatatgtgaaggaaatagtaagattacatggggctccgaagtccattatatcagatacagatccaaagttcacttttacgttctgggaaagtcttaagcaagacagatggtcaatctgagaggacaattcagatactaaaagatatgttgcaagcctgtgtattagattttgaaggctcctggagtaaatatttaccattgatagagttttcatacaacaattgctatcagagtactataggcatgtctcctgtaacaccctaactagcataggcatgttagcgtgatttttaacgtactgtgtagctcgttgctaatcaacgaggttattgaaaaacgtgaataattaaaattttgcttatttaattaaaacataacatataacttttataaactttcgggatcccatttacaaaatacaattacaaaagtttactacacatttacaaaata

SEQ ID NO: 241475 - DNA, 1183 bp, Cannabis indica
aaccccgaagaagttcttctcatccgattcaacaaacttaccaatgtaatttgcaatatccgtgactatcgttgccgttttaaatcccgatcaaagatcatgtaattatacccacatatcgacctcattcagctctaacattctcggatcttcccccctcctcagccttctgaaaatcagcaagaacttgttgaacgtccacgggctacgatcaatcatgctttggatatctaactcatggtagaattgaaacaagtatcgattagtatccaattctttaacgaacattcctttacccggttgccaaagagatgccatcaaatgttgcatagcatcaaaatcaatggatctttctgtcaagaaccttccaacaatgcaccatcggtcatcataatcattccccgtagtattactagcatcataggacaatatcgcctcttcttcatcgtcaatagtgacaatcgccatattctccgctgcctccatttgctgataactactcgacgccatggacagtcgaacaaactcaaaaccaagcactaacgccaaaacaaataaaacaaaccaattaaagaaaactataaaaccatgtcaacagacaagacatttatactagtaaaatactaatactaacactagtataataccaatactaatactagtataataccagtactaatactagtataatactaatactagaataatgctatactaaattacatagacagaaagaaatcctaattcttttaaaatacttagttaaaagtcaaacattataattctaatactagtctaacgcaaatactagtaaaaccttatactaatagaagccctaatcaaaaccaaacactttcaaacttaacactctaagtccctaatacaaagattttcttttccagaaaccaatccgattgcaagggtgcatagaccaagggtctctgtcggtcgtcaacagcgcgtagaggagatgcctgtccgtccattgtcaaccacgagcaatgcccgccatcaccatgagccatagagagatgtggtgaaacccagccttcttatacgcaagagagaaaccctgccttcatatacgcaagagagaaacccagcccgtcgcaccttcatcgtcgacgcaccattgctgccctcaccgttgttgcaccactgtcgtcacagtcaccgtcgtcac

SEQ ID NO: 241476 - DNA, 1410 bp, Cannabis indica
ttataaatcaattaatcataaaccaaataaagcataaagcataaagtatttacaacatttaaaacattatataattaattggcttccttcttaagaaggtaatgctttggccgtaggaagcaaacccaccaccaagggttctcctttattaaggcatatatatatatatatgtaaacccatccttaagggttttgcccattttggcaatggaacgtcccatccatttgggatataccatcatacaatatatgcctattttgcctcctttaataatgcatgcatgatacaaaaaccaatcagcccattcgttgtcatattatttatattgcatgcattttcgacattctcgacaatttcggtgccacctgatctttcttgccaattagcacccgacgtgctacaaagcaagcgtaacgtctcgaaaatacgcgggacgttacaccctcccccactcaagccttcgacgcctttggagcttagtgagcttcgaatccagttgaaggaaatgattgatgctggaatcatggaagcctccaaagcgccctttggtgccccggtgttgtttctagaaaaaaaaggatggtagcctaagaatgtgcatagactaccgtgccttgaatcggatcactatcaagaaccaataacccattccacttattgctgacttgttcgatcagttgggaaatgctcaattctttaccaagctggacttaaggtcaggttattaccaagtgagaattcgggagggggatgagccaaaaactacatgtgtgactcggtatggctcttatcagttcttggtgatgccttttggcctcacaaatgcccttgcaactttttgcactttgatgaatgaagtatttcatgcattcattgatgtgtttgtggtggtatatcttgacgacatagtgatttatagcaacacccttgctgagcatgtggaacacttgaaaatggtgttcactgccctgagaaagaattccctctatgtgaagcgggaaaagtgcacatttgctagaaaagaagtgatgtttcttggccacaaaatcagagatggacttctgatgatggaggaggagaaagttcgggctgtccaagactggaaagcgccaacaaaggtacctgaattacggtcatttcttggtttagttaattactatcgacggttcattgagagctcctctgcaagagcagcccctcttactgaactactgaaaaaaaataaaaagtgggattgggatgcttcttgccaaagggccttcgaagacctgaaggctgcggttgtcaaagaacctgtgatggttcttcctgattggtcgaagccatttgaagtgcatactgatgcatctgattttgctataggcggggtgcttatgcaagacggcaaccctgtggcgttcgaaagtcgg

SEQ ID NO: 241477 - DNA, 1746 bp, Cannabis indica
gagctgaagcttttctcctctatctttccgaggttgatgatgcacaccctgccatttctttgttcgaaaacttactgcttcattctgataatcgtagttcttattaacggagagttcctcgatagtcatttgaatgtcagcttcagactcgtcaagattataagtctcactgaaaagatgtctaaagttaattggttgaagttgcaggaatgcgccttcctatagcgagataggcacctcgcttgttaggtctcgagtccacccgactgttatacttagtttgtgcgttatacactaagtgtttcatagtcgatatgcgtcgctttcgccttcccagatgtaacgtgtttgatgcctcgctttatgcatccaatgacatatggtttctcattaatacactaactaacagtttgtatatcttttcctcgcataagactttatagtcagcgagttacaagtatactctgttacttacgcaattaatgagttattccattaaaagtgattcgatccatattccctctatcttgacgcgtgtcctccacttaaatggtagtcgaattttgggtataacaattgccccttaaaaatttctgttttaataaaaagtgctttttaataattacagagggcattttcatcataatctactttggaaaaatgcgtcctttgattttggcagttgtacggtttcgagggtcattatgaatcattttttcatcttttgccgcactctcaaccgttagatttcccaacctttggccttcttgtcactggacttagagtataaaatggtggcttaagcttgccatattccacacacttttggtttttttttagcttcatcttgtgattggattgtcattctctcgctaagatgtcccgtctgagttcaaaaacttacccctctaaattcataacaccagaatgcaccaaccacctctcttctccatacgttcccaagaacttcaaacttcaatttgaattggaaacgaaggattccaaggctaaggagcttttgatcaatcaaaaccaaggaaacgttgttgatcgttacgggcgatcctcataaaagattttgaaggtacgttccatcccttgtgaatggtggtttgaactggatcatgcatattattattattattattttattgatcttttatctctgtctccacaggaatggacatagattttacgagcgatcttagaggtcctcctcaggcggacaaggaatccaggaagaaggtagtcctggttggcatggtctcggattctactaaagaactcaaccagcccaagacccaagcttacacaagaagaccttcatgccaacctttctttggtatcatgaaagtagctgaggctgggaatgaggtctcagctgcaggaaatgggatcttttgatgtggagaatgaggtctatgcagaggtagagaccttctacgtgtagatggtctttctcgagctatgtgtagacggtctttctccaagctatgtgcagacggtcttttttttttttgatgaatcaagtagttgtattgctcataaatctcatttgtacaaacaaaatagcatcctcatagaaataaggacctatatgaatcatatataatctctctttgtttatcaatgctagttactctatctttacaatttgtaaaaccaatcttgatcctttttcttgatatccttcggccaaagcaccaaaatacgggcccttactatctcttttgtgtgctgaataat

SEQ ID NO: 241478 - DNA, 506 bp, Cannabis indica
attttttttaataatttttcaaagtattatttatctttgcagtaagggcctaattggccttaattttatttttttttttacctatgacccatttcaacttaggatcgaccctacacatatgttagtgttatctaccttcttctcccacttttttattcaatcatggcaggtattttttttttaaatctctcttacttaaaaaaaataaaaacaaaataatagtgattaattgaatcactagattgaatcaaggagatgagggatcactttaattttaaaaatattaaactataaatttttaatttaataacaaaacaaattgatttttatacttaatttaagtacttattaagaaaaatatataaaaaaaatatcttttcttacactatcaaaaatatatttatatacaaaatattaaatcaaactcaactttttttttttccaaaagatttttttcttaattttttttaaatgaagaataacctcaactcatataatgtaaaaat

SEQ ID NO: 241479 - DNA, 1231 bp, Cannabis indica
caattattccttgactgacactatcaccagtaaatccacaaagatttatcgtgcaaggtcttaacttagctttttcaagctccatcttctttagtgtttccttttaaaggatgttcactgaacttcctttgtccatcaacaccctttttatcctcttgttagcgagctggatggtgattaccaatgggtcgacgttagggtacctcacatctttttcatcttattccgaaaatataatcggatgttcttcagtctttactttcttggaattttctggagaaaaggcagattgctcatttttcacttctttcacgtacctcttttgggcattattgctttctcctacaatatgtggacctcccgagataactatgatatcctctcccttaacaggaggaggttgtaatccctagtttcctgggttgttgggcgtattgggctggttatgtccattgccctatctttttgacatattgcttgaattggcctcgtgcgaagagactctccatctcatccttcaactgatgacactcatatgtcgtgtacccaatgtctttgtggtacttacagtatctgattggatgtcttttatgcctcgtgtgcctcatgggctcatgtttactaaatgcgaccttgtgctcatgcgcgagataaatattttcccgagtttcattaagctcggtataaatggtataaatcggcacgtagttatcgtgcttcttttgtttcttcttgtcttaagatgaccccttagagtcttctttcctctttgagccagaggccactcggttatcagctttagtctagacagtacttgttgaaacattgttggttttttcttcttgagccagattttaacaagttcatttcttttcgagcttcttcccttcgaaaaaacacctgagccctctcgttgaactcagtgatgtttttcactagacgaccctgtaggtcgtcccacagttttcctccagcagtggagagattagtattgatcactgcttgaagggcagtaaggcgggtactatcatccaaatttctttctctcgcagcagctgtgctaaaacgacttaagtaggccttaagcgtcttgtcaggctattgttttatgttagtgagtgaggatgcttcgggttgcctatctcttgcggcttggaactgctttttgaagtccttagacaactattcccaataagtgatggaatgacgagtaaccttattaaaccagttg

SEQ ID NO: 241480 - DNA, 709 bp, Cannabis indica
tttttgaaaagagaaagaggcctctgactgacctccccccgtaatgtatagaaaccctcacttgtcgcaaaagaaaaccgtggtgacagtagcaattatagttcaaaaaggaaaagcaaaaagaaaaatacagataaaaattctccttaggggctaataaaacagcacctaaaatgataaaaatgtctaaagaagtgttcactctctacacagatctaaaaagaatactatatgttaatgcaccaatgccaggatctttccattcaccaatgtcaggaattaccatatgttaatgcattttccaattgatattggcattaagtcatcaaacatgccattgaactgaacaatacagtttttgaagccattaaaagtaatttaacttttgaatcatgtcacctaggttcctttacaaacctatagttccaattacattaatttttcttcattttccatttcatatttcttcctagaagaatgcaatagcataggcagaaagaatctgttcccaaagtaagccttacatttcaaatacaatatcaatggttgtcaaaatttaatttctcaaattattcagtttgaaactagaggacccacaaaatccctatattctaagggaaacttgccaaattgaatataataccccgattgagaaacttaatgaattcttaaatggtggcctgcaagtgcttgacatcaatagagtggc

SEQ ID NO: 241481 - DNA, 708 bp, Cannabis indica
ataatcattaattaactaaagaaccaaacaaagatgacatatgcacccgtactatgaattgtttgaacaagaactaagcaatcaatttcaataataatatgttaattcttacgcttaatccaactcaaagtcttcttaatcccaactatttctgccatagcgagttgattaattatacaactaaccaaatttatagaaaaagcttccactaaacgaccattaccatctcgagctaccccacctgctccgaaaagacttttggaatcaaagattgcaccattaatatttatcttaattgtatttaaatatagtttagtccaatgctctaagacattatttacccatgaataaataatgactcggccaatttcctttcttgagcacttttccattgattaagcaccattctagctgacataataacctccaatgtagaagaagtcttatccatccaaacaatatcattctgagccttccaaaatgcccaagccaccatagctagctcctcacgcacactcaaagcctgttaccgcaacaaatgagaaaaccaactctaaaaatcctaagcagacacaatccctacactaatacttgacatactccaacaagaatgagcaaacgaataagtcaccaaactatgaagaatagtgtaaagaccgcttagttcaatttggaaattagcagttaatcatgtttaattatgaaaat

SEQ ID NO: 241482 - DNA, 1594 bp, Cannabis indica
ggtttgggcagtttaaaccgaccaaaccgaggttcaaaatgatcggttttaagatagattctggattggttggtccgtttttggattgtaccaatccaaaccaaaaaccgaattttggaattttatatagaaaaaaaccgaccaaaccgaccgatgctcagccctaaataattattcattgaaaaatactagtgcattatcaatattaaaacaatcatcaaagctatgtaattctagaaagtagatcttttgagtaattatacaccaacaaaaccaaccatttcattaaattgatgataactagattgtttagtactaagttacaacaaattgttgttttatgaaagaaatgaatatacataaataagggaaagaaagaatgagagttatttatgtctaattttaggtctaaatataattctaataaactaccatcagtataaaataaaacaatcgattaaatacttacagtttcaaataaataaattgtagaaagaattggtagtataatccttccattttttgagatcttctgtaattttaagtcttaaaaccagtataccattcatgggtaaagtataattgaatgaattcctatatcctaccacaatataaaataagaaaaataaaacttagttgaatgaaattaatgagattacctgtcttgaggctttggaataaattaaatagattcatcatagtataacaagcagtaggagttgcccgacagaaaagaatattatcatctgcaaagaaaagatgggaaactgatggagcagttcgtgcgactttatatccaaaaattttgtgtgtaatttccgcatgacataaaagagaggagaaaccttccgcacaaaaagaaaaaggtatggtgaaagaggatctccttggcgtaaacttcgagtcggaaccaccttccctttaacttcaccatttatattaaaagagtagtgaaccgttcgaacacccttcatgagtagactaacccatggagttgcaaagccaagttgaagcataattgattctaaaaaattctactccactctatcataagctttactcatgtccaatttcatcaccgagtaacatcgccttccacttgtaacgcctcgtagattatgtaataactcataagctaccattgcattatctgtaattcatcgacctccaatgaaagcactttgagaagagtatattatagagtctaaccatggtttgaaacgatgaaccaaaactgtagatacaattttgtatagaacattgcactaactaatcggtctgaaatctttcatattgttggttgctttagttttggggactagagtgacaatcatagatttaatagaagacatatctccttgcccattcaaacattctaggacagctttaataactacatccccaatatcattccaatgattttggtagaacattccattcataccatcttctccaagacttttatcggaaggtgaaattctgtattttaatattctcagtttacttatttaattaagtgattaattaaatgcggaataataaaacaggtactgaaaacaatttttccgtagttacagaatacaactctgtaact

SEQ ID NO: 241483 - DNA, 1396 bp, Cannabis indica
cacccacagaatgaatggctcttatacacgagtacgtcactctagttgctttatggcctaacgactgaccctatagaccaacacgaatgtttccagcgtgctttgtcctcactcgcacgcctcttgggaaaacaactgtaacaccctaccaattaggcacattacccaaggtgattaccaaaccctaatcccctaaatgggatcactagaaagataaacatgggtaatttaaactttaatcgagaacagattgaaaatcaaacttgtaataaacttaactttacaaccaaaaattacatgtttcgggatcccaaaaatattttttacaaaatattacacgtcttttcactagccgccctaggcagaaaaatcagagtttcaaaagtacatcactggtagaccccaaccctcttggtctagtgtggcccgaacatgtacatacattgcttagcactcgcactcatggctgatcagagacagatttaccctatcctgcacaatagagcacccgtgagccaagcccagcaagacagtataattatcaattatcaatatttaacacactacataattattaatgccatttcacatttgtctgtatggcacagacctgcgtgttacactcacacgcctatttatgtctatgtggcatagacctacgtgttacgctcacacgtctatttgtgtctatatggcatatacctacgtgttacgctcacacgtctatttgtctctatatggcatagacctacgtgttacgctcacacgtctatttacaataaggccttagaacggttcatctcggttctagttaccgagcctaattcggttatgccttgctcgcataaccctatttacatatatacataatccatatattacgttctttcggtggtttatcctggtgatatataccagatctaacccagttatgtcttattcacataactcttaacataaatgcatgcccacaatttatactataacatatagaatcttagggtaataaccctaacttgcatactaaataatcactcatataacatattacagtatgctcaaaataacatctattgagggtaataaccctgactcatgtcttcactggatcaataatattaccatacatcatcgctttcttacctttataatattctagggtaataaccctagaccacatttaattaagctcaaggtactagtttaccgagtctagcttatttatgccttaaacgcacaattcataatctcaatatacatacatatatcatggcatatcaatacttattaacaattcactagggtaataaccctaggccaataaaccgctcactttagagtaataactctaatcccagtttctagttactcatatatatcatatttcatataagcg

SEQ ID NO: 241484 - DNA, 1211 bp, Cannabis indica
aaaataatttccaacacatattaggatgttaatgaaacatacttggtagtaaatctagatcctggtaaaatatttccaacacatggtcccatggttgatatgctatccaacttaaagcttctttgatgcctattaattccacaattttaggttgagcatgaccaatcttccccttagtgaaagcttctaacatattaccatgatgatctcgagctacgcaacctacaccaaactgaccctcttgatcaaacaaagccccgtcaacattaactttgatcttatgtaacataggtgcattccaatgctcagaatgtcgcccccttcattcaaaggagacaaagaaagaccctttttaccttgagcacatttatactaatcaagtatgtttttcgctgatgtaacaatatttgatgtagcccaactcttttgttgccaaacaaaatcattccgtgcacgccaaatagcccaactcaccacagctgcttcttccatctcacaaacacgccccctgctgaataacagcaacaaccagctgctaaacgttgcagactcgccctaacatccaccaagctgcgattccaggcagctgtggcaaactcacactccaccaaagcgtgatacacagtttctgcagcaacattgcacagaggacaaacaacattaacagggacatgacgtttttgaagctgaaaatacgttggaaggacacccgatgtagctctccataagaagttactgacctttgaaagtcttccaaaaacctgtattgccatccacactccaagctccttttatttcatgcaagaacttataggcacttttgactgaatactggccacaagtctcaacttccaactccatccatctctaacagccgagtcactaagctgaatgctaaaaatcagatcttggtcacgagccataaagagatctcttaccatatcttcatcccaggcccgagtatccatctgaaataggcaactaatagtttattaacaagggcagggtgccttgtttaaccagagccattagtgttatgagggagccaatggtcatcaagaattgagacattcaccccattagcaatagttcttcgagctcccaagtatattaggtttttggctttcatgatgcttcgccaaataaagcttgggttatctcccaactcagttgagaataaactaccatgcgcatagtactttgccttgtaa

SEQ ID NO: 241485 - DNA, 613 bp, Cannabis indica
tggattcatttccagaagaatggttgctcccaccgactttaactcatttggtaatcagtgattttgataagcttacagctctaaacagcaagggttttcaccatctcacctcacttcaacgattgcatctttattacttgagcaagctcgagtgcttaccagaaggaggactgccccaaactcttactactttgaggatagaacattgtcctctgttaagccacaggtgcaaggaaagaataggggaagattggcctaatattcaatacatacctatcatatacatacattagtaacaaagtctcttttactcaacaggtaacttttcttttgtattttaatttaaatgttttgtaattgctaagtgtgatatgttattcttataatttcttttatgtcattagatcaatgagctacaataaatgaggagcttcttcaacttctatctcttgatgctgctgatcttgccttcttgaagtttttagagggttgtcctgctttcttgaagttttatgttagttggacagttggaagcagattgatttcgttttttattggcaaaatcttctactcgatgtctgtcatttgtcataaagagtctttacaaacattg

SEQ ID NO: 241486 - DNA, 1256 bp, Cannabis indica
ttaatcttattaaatttctgatatagttgtagggtcttttttcttatgaaatttttcgtccccttttttagtgcaacatgcctctatttataattacatagtcaggtagttaatacatagttgattgatatctttacaacagttatcccctgaaatcatgaggtttgattacataccacgtaaaataaatgtggttaatatttgaaaatcacacacctgtgatatgtctgcttttaccgggtcaagataatcgtgtattaaacacgttgtaaatcgtaacgttctgggatgtctcgatgggaacaaagcatcaataactttggtagcgagctagagcttttcccacatcttttccgaggttaataacgtaagtcttatcgcttctttgtttgaagacataatgctccatctaacaaccgcaacacttggcgacaaggtgaacttcaacagccaacaccatttgaatgtctgtttccatccgagagaactgactcgctaagactatgaatctcattgaaagatgtcttaagttgattagtgaaggtaccagaagtgtgccttcctatagcgagatgcacgcctcactattagttgtttgggtttgcccaactattatacttattttgtatactatgtattatacgctaagtatcttaacaatcattatatctcgcctacatctctttatgcgtaacgaagttgatgcctcaccttacatatccaacgacatatgatttctcgttaatgtagaagacaacagtttgtatatctttatctcgcataagaccttatagttagcaagttgtaaatatactctgtaactcccacattaatgagttattctattttcgaatgtaattactgttacattcattgattcatattcttcgcaatttgacacgtgttctcctttgaaataatagtcgaattttgagtataacactaaagtattatatatacatatattttaaaaaggtaaaacttttgaaagagaaaaaatattgtgttctatgctgatataatttcttttagttagatattttgatttttgttcttattagagattatattatggttattattattattagcttaattgaaggtttttattaaaaagtaaaaaaagtaaaacaatgagagaattaagaagataatagatgaagctattgaagttatatttagttaagcttttctaaatttaaaagtctaagaaatcatgtaaataaaatacaaaaatactctattgtcatttcttg

SEQ ID NO: 241487 - DNA, 1438 bp, Cannabis indica
aaatataatataattaattttgggtttataatataaaatataatataattaattaaatttttaaaaaaaaatagtttcgccagcgcattactgcgccggcaatacgtaacataattaaataattataatcaattaatttttttaaaaaaaaatactgcaccgacgaaatgtaacactaaaaaggttcgcgccatttctcagattggcgcgaatagttttgctggcacacctatagcgccgacaaaactttttgcgccaatctgagaaatggcgcgaacctttttcccgacgcattattgcgctggaaaaaaattataaaagtaggttcagagcggaagggtatccttttataccggcgcaattagtttctggtaaaactacgcatttcacctacgcgccggtaataagtcctttaccgaccaagattcactgacatgttttgccggcgtagtattgccctggcaaagctatgccagcgcagttagtgtacttttgccgatgctttttacgccggtaaaagtatgttttcttgtagtgtgtgtgaatgataggttatgagcattggaggttaaatgatgggtggctcctgtgtctggataccaattgtagtcaccaaccatttctggtgaggcatagagttgtgcaactttagcaatattggcacttcctacaaaagattacagagtttctagtccttggaatgatttgttgaatctgtaaaagcacttggcaactgtatgtcccagcttatggcacaattgacactgaactttttggccccaaggtgaatattgattcttgccataagtgaaagctcctctattggatggttgagtgccacaagattgacctcctcaagttgtaggagaaggtgcttgttgaccaaatccagggggaggatgatgagcagagtagtgcatactgctattctacatctggtttcctcgagacatagaattgaagccaggattagtcaaattagaaagataaggtgaaaaaaggtacctctaccaccagtgaatggtttggtatgagcaagatttgcttcaggcttggatatatccagttcttgagctgatttttccaggcaaactcttgtgccatgagtaaggcttcaatttcagtaacactatagttgtcagttcttgtgttgattgatgtaatgaatgcattgtagtcactggtgagactgttaaagatcggtttaatgtgttcaaaaggagagataatgtggccaaaagatgctaaaagatcgactaatcttttgattttgagaaggtaatcacacagggaaccttgcattttggcattttgaagcagagtacggtattgtactgtgcgttcagcaacaccattttgttcatgagtgtgtggataagagaccttgtgtgtaatgccatgttcttgtaataagttggtaaaagcttgatattcaccc

SEQ ID NO: 241488 - DNA, 1060 bp, Cannabis indica
gtttaattttttattatctgtatgttattttttgttgttattttgatgttattttcatattacttttatgttgttttcttgttgattttatattgttttcgtgttattttttgaaaaaaccgtaaaaatataaaaaaaaaaacaatactttaaacgtaaaaatgtaaatattttacaaaaaatagtgtcttatgtaattattcctaaaccatatattggcaagataaactatttagatgtaccatatgtcttataataattatttacatattttaatttaataattattataataaactattacctatatacaaagtgtcaccttatagtgtgaaacaatactaatgcataataaatgttcaaaaaaaaaaaaaaatataaaaccgctagtagaaatattcattcatctaattcgtattgtttcgttcgtagtatatctgatttgcgctatgtgcggattttatattttggatccaatccaattcgcccaatagttcaaatccaatcaaatctaatccacaaaagtatggattagataggttacttttcaatatggattagatccacaaaagtatggattagatcggttattttagataggttacttttcaatattaaattattttatatatctgaaaaaatatattttttttcacatatcaagcaacaaaataaaataaattattgttattttgttctccaataacaaattaaaataaataaaatgacaaatgacaaatttaaagggtagaaaaaaattattttcgtctaaagaaatgtttaatttttttaaaattatgtgtcgaaaaaaaaattatatataagaatggaataaacatttaatctattaaattttgaaatatatgtctattatatgtattagatttttaacttactattttctttacaataaattttaattgtatatataatttttgaattttttttataaatatgtgtggattattggatcggttatttttaagaggaaattacactctataccctttttatattgttctattttatttttaccctaatttttaaagtctatcatttt

SEQ ID NO: 241489 - DNA, 755 bp, Cannabis indica
atgagaaatttgattatatatacataaattattagggcaaactttgatacccaaatataagtgtattacaattgttaaaataaattaattttgcattaaacccaaaaatactcttctcattttttaaactcctatctctctactctctctctctcttcattgccccaacctacgacccacacccataatgatccatcgtcggtcccaacgacactcacgaccacctaaaaatcagacccacaagtcacaaccacccaaaaatcggacccaagatcaacgacgaccaccgacccaaagtcccaaacagccacaaccatctcaatgtctaaggtaagttctcagacccttctttgttctatttttagtgaaaatgttaatagaattattaatttatggtagaaatttatagaaaaattaaacaaaattttttaaatttaacaatctcaatagttcagggagaatttttaacgactttaaaaattcaggaatcacgatttagtacatgtcgaaattcgagggaaaaaattctaattagccaatttataattgaatgataagataataaagattaaagttttttttatcttttgaaaagaaaaaagaaaaaactaaaatattaatatttgacacaataaatgcataaatgagtctccctggtagaacttcagcaaataaaaagcatgaatgactccctgtccatagtacaacttcagatagtacaatattctttaactctctttctctttttttttttt

SEQ ID NO: 241490 - DNA, 1140 bp, Cannabis indica
ggagaataggaaacataagctgaggctaaaccaacaccacctacacccactgtcaggatctgtaatttgttttttaactgcaaaagcaacacaacaacaacaaaagaaaaattacaattctcgtcaactctactctagaagcaaaagaaatacaagcatcaacaaggcaatatacttctattaccttagtatactgttccctcgattgagcagcaagaactgcagggtccccttttggttgccttagttcccgaaacattgcttcctgcaggctaaaattgtgtcaaaagactcaaaactacaaatgaagtgactattctggaagttattaggatttcaataagaacttaatcaaagcgaattttcgaaggacaaaaagatggtagaacaaaaggctcacagtgcctccagttgcagccttcgcagctctatcccacttatcttgctctcgccttgttggtgctggtctccatttggtcaccgtgctagctttaaactgacaatcaatatttttccatagaataagatacatttgaatatgcacagctgtagcataaacaagttagacaatagcaactcacataggcaatgtacctcagttgtaggttctacttgcagctctatctcacgcttggtaggagttgtgagttctttactcagatcaacctccatactgttaagaatgtccagaaaatccatacaatacaagttaagaacactaaaaaatcaaaatcaaacatacaaagatctaaaaacattcatgaatgacacttgaaactactagttagaacaaacctgtcaagagacatgactctgttaatgctgagaaacccagaaggcttttcctgtaatgcattcaacccatttgatcacataaaatccattaattcacacatgaaaaaaacaaaaacaaataagcctctcttttcaaacactctatttgataatattaggcaataaaattaattcttcttcatcacttaacagttacaaaaagagcaattaagagtaagagtaggagaccttaacaggaggttgttgaggtggagaagcagagtcatcaatcaatttattcatgcgactcatgaagtctttgttccatataaactcgtcagatgttatagggtcttctccttcacc

SEQ ID NO: 241491 - DNA, 683 bp, Cannabis indica
cgggagtcgagcttatcttttataatgattgtacatatcttgacaatcttcgaagaacaatcttgcggctctaataccaaattgtaacgccctaatagttaggacactaaagtattttttttaattatgatgcataactttgctaatcaaagggtttattgaaaaatgtaaataatttaaactttttaaataaacttaaattttaataaataaatataatttatataacttcgagatcctggtaaaagtttacaactatattcaaaatatattttatacaaaacctgtcacccaacgagcaacaagaagtgagcctaaactgtcccgaagatcctaaacacttcaagtctaattatcttgatatatacaatcttcatccagctctagactcattttgatttggttttagctcttacatgcacatacacgtaataactgtgagtcgacacgctcagtaacaaaagtataaacataaatataaataaataaccagatcgtaaccgagcaaccatacacctaatcaaaatcctataaatgggtcatgaacgtactcgaaaaaagtatgactaaccacgaattcaacctatactgtaatgactgcatgattagaatatggattagtagagcaattagcattaattatttgcatttgatgattttgtatgaatatatatgttatgggc

SEQ ID NO: 241492 - DNA, 1176 bp, Cannabis indica
gttgctcagggtgtgcattttttaatattgaggggctttattcatattcattgatcagttgttacttgttttttttctaaaattttgagtatctctaagtgtctatctttttatctgatgtttcaagtgtgggttgtgtgcaaatattgttggcatatttgaaatttttcaagtcacaatactactctcattaactggtgactttgggtttgtttcggtttgtgtgccgtattatgtggtggaaattattcattttgggtgtgtacatttgtttttggcaaagatcaaatttttttaaaaaaatcatcattagttttctttgcctggtcagctggtgtaagggagcctatatttaaggcctaaggaaagtgaatagtctcactctttcactttactcttagaaaacctaagtttggcaacattcacaactctctctaaaatggagaataccactcccattgcagtaccccctattgccatgttcgttccatcagtgtcaactactgttgatcctgtagttgaatctacagtcgagactaatatgtctaatccctgtcgtgacattgtcctttaccaatcggaggttggtggttctgctcaccattcgagtcatgtgtcgactccgtccccgccttcatggccaatcatccagaaacctcatacgtttcaaggtaaggctcctccactgtctaaaaagacttgtcgttctctgtcgtcaccccctccgtctgtgtcaaaacgagtcactcgttcatcgtcgagtctacagcctcaatccaaacccgtaggacctcctcgtccaccatctaaggtgtctattccttcccaaaccagtgaaagggttcagctaaaatgaaggtcctcacgtgataccacgtatcaaccacctgaaaagaaatccaagaccaaacccattcgagtcccatctatagactcgtctcccaaacagtcgtctaaaggctccaaaaaatcaaaatgtccaaaagtccccatagcatctattgacccaacaactgttcaatgcattgttgatgcctccaaagcctctatttaccaacgatggtttggtagtcgtgatctttggttcgaacaagtagtcatgttagatgatttccctgaatggcatgagttcttaaaaattaggaaatgggtaaacacggtcaccaacttgtctgc

SEQ ID NO: 241493 - DNA, 1067 bp, Cannabis indica
attaatcctagattctctttgtgattttcaaatacagtctctgtcaaagtcttggtgaatgggtcagctaggttgtcttcactatcaaccttttttcaccagtacgtctcgcttttgccacatatgctttgatgatgtgggatttcctctcagtgtgtttactcctcttgcggcttcaaggctctttactgttggttatagcactagtgttgtcacaaagtaaaaccagtggttcttccattccaggaacaacaccaagttttgtgaagaactttttttagccaaatcagttccttagcaccctcagcgacagctatgtattcggcctccatagtagagtcagatattgcggattgcttgacacttctccaaacaactgctccactcgcaagagtaaataccatcccaaatgtagacttcgtgtcatcaagacaagcctgcaaatttgagtcggtatagcctacgagatttaaagcaccaaccttgtagactaacacataatgtcttgtactctttaaatatttcaaaatatgcttaactgcagtccaatgttcctctcctggattcgactaatacatgctcataattcttacttcatagcaaatgtctggtctagtgcataacatagcatagcataattagatttccaaccacatagcaaatattagtgattgttgtgaataaaattaaaatttgtacaagtaattacaaagtttattccctttaaaattatttggaggcatatatacgtgtataataactagagttcacttaaaaatatatacagtattgcaaacataaaaattaaaaaaaaaaaattacaaaggaaagaatagttgattaaaattgtcttttgacaatataaagtcaagatattgaaaaaccttttctttaaaaggaaaaattaaaatagcagttgtaagtgagattttctcataaaacaatagaaagctatatgcgagctgaatatgtaacggctcgcattatcatgacatgtattataaacgaaatacaaatgtgccttgaaaaataatacttaagctaaaaatatgaatagaggattaact

SEQ ID NO: 241494 - DNA, 2222 bp, Cannabis indica
tccatgaaaaatggagaggcagtgaagagcgattgtactccgaactcatgttgatgagtgaaaaagattacgcccagtgatatatgatcgaacggagctctgataccactgatggtttgagaataaatttgtattggtttagatttgtatgggatggatattaggtagtgtagtatgatgatgttgataagttgataagttggatgattggtgggacaaggaagagttatgtagtgttttaatttttatgtgtgtagtaagagaggagacaaggtagtaggctagtagtaaaagacttactttggctactcaagcttggttacaatttggaagcttgatggggtatttatagttgctcaccccttacactttatggctagaattatttcttctagatccttcttttactagaaggaattaaatctaaacaaatctaaatatttctagaatacaacataactagtatattctatacttaatctaatctagaattctcttaagttcttagataatttttctacaagtgtatagaaatttctagactaaattgtgtagaaatgtgtagcaaattctaataagaccaactaggaggccttttatcatattcttttttggaagctagaactgcacttagaatttaatattcttcaactcactgttgctctcatcatacgtcatctttatctccataacaaaaaactaacacgtacgaaagcactacttcaccattcctatggaccaaatgaacctcctatatatttatgtttacgtctctcttccattaaatgtggtatttaaagaaaattatttctatttaaaactagtatcattaaattaatcatttatttattaacatatagcttaattaattatttaaaattagataattaattttttaatataaatcttaattgaaacttaaatttttttcagatgaatttaaacttaaattaaatcttaattcaattaattaattatattttataacaaatttattagttatattatttaaaatatctaaaattattactttaataaacttaattagatatatgttcatataaataaatttaaaagtagaataattttttaaaaatataattgaatggtattagatttaattattattattattatttaaattaataattaagtactagcaactctaattcaattttaagaaaatgttactaatatatagttatgtgttattttctttttgtttttttatttttatttttaaaaaaactcactgcaaatatctcttttattttttatcttatattaaatgtggttaaaattttttttttaaaacattgcaatacaaatttaaactcattgcacatatatatctaaaagatatatttatattatcatttttttttacccaaatcacaaatatttaaaaaaaaatatctttatattattgttttctttttaaacaataaaataaaatatgtttattttttaaaataattactattgtgacactattacctatttgccgttactaaaaaataaattttattattaatattattataaaaaaaaagtgtatgctgtttccaaaaaaaaatgaaagtattgtaaaattaaaagtgttacagttatactaaaattaattaaaaacaaattttgaatattattatattttcttttttataaatggcacttaaattaactatttttaattataaatgatgttgtttaatgaacaacatgaaaaacaataatttatacaactaaaatatagataccaaaataaaattaataatataattaagcatatgttcattgtacgtaatattaacctagtatatatataatgctctaattttgaaattgtaagggtaaaaataatttaagaggtataaaagtaattttacttttataacaacatcagaactaacaaaagttgatgtggtaggaacaacataaaacatgtcgtttcattaaaaataaagaagaacagaccaagcttgaataagctaaggaagagaagcttaatgagcatacgcaactgaatgagaagggtgagtccactcaacatctatttcccataaataggaaacccccatcattagaaaatgtatgacagattccagaccagcctgccggaataacctctgacatacttctagcttaggatcaagaagtgtaagaagagaattattgtgaacttaggaaataagttcgcaaactatcagagttatactagtgac

SEQ ID NO: 241495 - DNA, 723 bp, Cannabis indica
gccaccttcaaacacgattttcaacaacaattcaacaccaaattactccaaaacttgatcaaactttcaaattaccaaataaagttgctatcaaacattataggattaaaatatacaactcaagcattaaattccaatattaaactaccaaaatcagattgcacaaataacccaaaaatcaagcttcaactaagcaaacttcaagctcttgaacttgagcttcaacttactcaattcaatcaattttccagcagcaaacaccttaagaacacaaggtttcaagctataaaatactctatccttttactccaagctcaacaacataaatccccaacaattcatgcaattccataatcaatttaccaagattaaaacccaaaaccatgaacatgcaacttcacaaacacaacaacacaaaacatgcttttcaacaaataaaaaccagcaagaacttcaacaagaaatttcaaataaactcagctagaaactacctcaattccaagcttaaaatccttccaattcaaagctccaaaatcaagcaattctctccaaaataaacaattgacaaaagaatagggttagagagagagagggaccgggttggaggggaacacaccagaattttttatctccttttccaaaaaattaatttcttttggttaaatgtaaaatatgggtcaaaataccaaaatgcccctagggccaatgcatacataaccacac

SEQ ID NO: 241496 - DNA, 1215 bp, Cannabis indica
agttctttgtgctagttcgatgccttgtacggtatgggcacccctcaagcgaccatgcaggcaaatcccttggtcacttgctattcaccaagtttcacagactttgcctgggttcttccttgggctggtgtccatagtacacatgtggaactaaaagagtaactttaagaagttaatcttatgagcaagtgatttagacacggtaggtctaacgtgtaacaaaatcttatagcttattgtccacttttgaaaacacatagtggctacccctgcgtggcttaacgaagcagaggccaccattgaagaacggtaagagaccacgccaagaaggtcgcgggtactagcacttttatgggttcttgaacgatgaaacgttagagaaacttaattgacaagttggctagtgagagtacttaccgagatgttccttattttagtgttagggtagaaattctaacttcaagttctcgtcgtactcgccaaacttgtgtgcaccttcactgttatcttgtaacatggtgcggaccttctcagtttggtctgaacatgcttgctatagaggatttgttgtccaggaataatcttcagggagttattctctttcgaagaatttctttcctcgacttgtttattgacgggcctggtaactccttgtgtgtagtcatgctgttttcagttggcttggtctcttctgctttcccttttgttaagaaatcctactaacaagatgtcgtgtacctcttggtcattgtagaccagaattatgagagcagagtactagtggatcaaactggccaggtaagaccaagtggccaaccacattgagggagcattgtatgggcagttgaatgaggccatggccggccaacatgtagaggtaatggttggccagatcgtggaatctatggccggccaccttgctatggacatggtcggccagccttctaaagggtcggtcgatgttgtggttggatctcatctacatccgattggctttgccccccggcataattttcgtagagcctttgtgcacttctgtcaatagctatacaacttctttcttggaaatgctccttggtggtgttgggatactatttctatgtgttatgctgtgtaggactggacaccttgtagccgtcctcctagtccatgctttctcgcaaggtctttatttggaggtatgttgctctatgtgtatccgtgttggttgtctag

SEQ ID NO: 241497 - DNA, 954 bp, Cannabis indica
aaaataaaacagtttaaatggtgaattgattgtacataatgttaagataaaactgctaagataaactgctgagataaaattctaatatgctgagatgaaagattaagataaactgttgagatgaaagattagaattttatcttaatctttcatctcagcagtttaaatagtgaattgattgtacttcagactcatcattcgttctggatctacatacaactcgattattcatttttttgttgataatttctccgtaattttttagaaaaacaaacaatgtttctaaaaattaatttctcttttcttctatatatatatagatacatctccatagatacatattcactttttatattttttgttttaatgattatgatggaaagaaaaaaaaatacatgtttaggagtagagagttttgctggaaagattctcaatagcgatattaacacgtaaaggtgcttggcaccaatggtgccttttagcatttcttataatttatatgtacgtaccatatgtctttatttatatacactcatatcatttaatttgagaaatatttgtcaaagaaaaaagtttacgagagctaattaaatgaacttcaaatttcatggtttgggtgagcaattgatacatttacatatcatttaacaaacaaaattagaaggattttaaatactaaaacggtaaaatttttcactgattttcatacactgaattttcccatttattcagctcccctgaaatcacagacaccacccaattaagaaaaacgttacgtacaattcatgtatcctaagttttgtatatatgtttatttttcgtagtagatcttgatttttaattgctataaaagtaaatgtcatataggtaacttaattcaataatattttttaaaaaataacaaaagtaacaaaaataatacaagaggtaagagtctcttccaccaagacaatc

SEQ ID NO: 241498 - DNA, 1497 bp, Cannabis indica
aagtaaaagtttaattttaacgtacttaactacactccctgtgggatcgacctcactcctggtgagtttactactcgaaacgatacgtacacttgagtgtgcaaaatatcgcaacagtgtcacatacaccacactggtccactaatttggataataaaatgtaccaaatgtccatcaacgtcttcaatcagatgttagagttccaatactcgaatcgaagacgaacaacttccacaactcaagattcgcctccatagcgatccaatgtttctgtcggtccaagaagatggccatgtatatgcactccatatccttccaaaatggcatgaattggtttggatccccacgaacgagttcgaagatggactcatcccagacaaacccagcatggtcagtattggtcttccaagcatcccaccgacccttcaacgatgaagcaaactaagatggcatgacagtacacttacgtgggtacaactccaggaagaagtgttgtcgcctcatcatcatatggaaaggcgcatccaaatgatacacaataaagacaaataagtcagcacgagcacattagaacatgaaaaaaataaaacaaataataacggtaaataactgtaaataacaacaaataatacttagctaataaacttacatcatcataaagaaattctttattcgtaagtagcctctggaaccaagccacgccatgtacaccagtgaacacgtccctcagatacttgtttccgatggttcccactaaccaatttcaaaaactatgcagtaccttctcatcaacgggctgaagtgggtcaacactcacatgagctatcgatggcttcatcttcttcttcattttggtgtactcgtcaaaccaccttggccttttcttcggtctcttctccaccggtgttggaacgttctctaaaacctgtacctctgaatcttgcgtatctccaatggacgtgatcgacatgttctgaggtgtatggagtacatcttccacatcattaggtctataatcattgggaagaatgaactcatctcatagagaaacagggtctggctgtggctctgcctctgcactgggccttctcagatctcccatgagtgctaatagggtcttcaagtaatccattatctctgtctgccctttcagaatatcagtctggccttgtttcaaagcaagttgttccctctcaacacgctccaatcctaccaatatggcagaagatattggttcttgaggctgtgaagtgctgggaatagatgctgatgggccaagaggatgatcctctgatctaggagatggtgcaggtggtgtagtgtctctaaatattccggcttcatctgcctgctcttctactgttaaggcaagcttttgggctttactacgcagagcatcttgagttgttggcccatcgtagcctaacactagttcttccaagtcaacaaatatcagcccctcaccgctggtgatagtcctcaccaactcctcttcat

SEQ ID NO: 241499 - DNA, 769 bp, Cannabis indica
cacatttacgcgctaggaaaagttatttttgccagcgcttctcattttgtgctagaaaaagttctaatactaacgttgatttgtcaacctttttgccaacacatcataagtaaattttattttaccaatgcaatgcaaacttttaccagcacaaaaatatgcgggcaaaaatgacatttcttgtagtgatccaaatcgttagaattatttattattttggacatataaatatatatatttatctatatatatctatatattcagggctagccctgaggtgagacgaaggaggcagctgctttaggcccccgccgatcaggcctccattttgaaaaaaaaaaaattataatatggtgatgaatggttagacatgaaataatttcatttgggaattggagttggatttgttgaagtttgtgtcaacatcatgacatcttggagactttatgtgaggatttcaatcaaaatggagaaattcaagagaatgttttcctcaaatacttaattatcaggtactaatgaattatatatatcattacgtttttaaatcagctaattattagatgaaagtgtttttaatcatgtgatcattaggtacatatggagttgtggagctatatatggtagtttgcatgaagtttcaagagtttagagttcaagtgctgaagtaaattgagataatcatatttttgtaattttaaaattatacatattagtgctttatgagtgtactgttttgtgtgtaatatttgctttttgtgttggtttc

SEQ ID NO: 241500 - DNA, 489 bp, Cannabis indica
ttagggcacaaaacccaataggacttgccttggtcggtcatccctaggcttggcagttggctattgctggctagctctaggttgggtatcttctggctggttgctctcccttggctggccaaatcagcttgtttattaacgagaggttgatcgtaccaataagttggatttggcagatccacctgcctaaattattgttcagtggcacaacaaagtcactttagttctcgctcctcgagttgaagttgtcatgtgtgtttctactcatcccaggaccaagcttattaaaaataggccttaaaatgactttttcctaaatattccaaggagcagcatcactatgttgtcctattggtgatgcttctattccaagaatgtctggccgtccccaaacacctcatggtgcctggggctgactactcttcccatatggtctgcttggcaagatttgaccgtctttgggcagggaaaggtctgtcctcgtgctta

SEQ ID NO: 241501 - DNA, 2062 bp, Cannabis indica
tggcatatgtaatcttgcaaaaaaccaagtttcttgagggttctaccagttttggtagttgttattggttggttgttggatgttgcagcagactcagaggttgttgcagtaggttcagaggtagttgttgcatcaggaatgtttggaacaacaggatgttgttctattgcaactaactgaaatggagcagataaagctgcaaagttatgtgaggcattggattggtgatgccgatttgaggttgagaaaaaagtgtcaatttgagtagtgttattgttggatgtattaagtaagggataaatggactcatagaaaatcacatccctggaatggaagatgtaattagtttgaagatcaagaagtgtgtgagccttcatgttatcggggtatcctataaaaatacatgctcgagctcttagagagaatttggtggggtggttaacatgagaagcataagctagacaaccaaaatttcttaaatgattataagttggagctttgtggtggagaaactcgaaggatgtcttatcatttaagagaacagaaggtgttctattgatgagatagaaggttgttttaatcatgtaactctagtagagaaggcgtaaatgtgattgaaatgctaaggctcgaaaaactgtcaaaatgtggtgattttttcgttccacaacagcattttgttggggacgaccaacacaagagtgatgattaagtaccgctttgcttgcgtaaaattgtgtaagtgtgagttcctttgcattgtcagttctaacagattttatatttgttttgtaatgaactttgatatatgtgaagaaattttttaattataagtggggatcccgatttggctcgtaataggtaagtccatgtatatctggaatgatcatcaacgatggtcaaaaaatatttttatccttcaattgaaggtaaggggtaaggtccccaaatatcaaggtgaattagatcaaatattgcttttgcaaagttattgtttgaaatgaatggtaatttcttttgcttggataaatgacaagtaggacaatgatatgtagaggcaagattcttattaaaatgtaactgtttattgattttatttgtaatgagtacagatggatgaccaaggtgtgtatgccattggttttgagatagtacattacaagaaaggaaattacaatttgaagttggataatagccacaataatgccgattggaggaagcaaaccggcgtaatgccgaattagagcgtgaaatagccatagtaagggcagtgcaggagaatggtacccaaaatcaacctgaccttgggagaagagattcacgaggcaaacctcgtagctcgcaaaccaaggggcgggagacaacccagagatatactcagacctctcaggagatgcaacttgagataattgaggaaaatctagggacacaacctgggatacgtggaacatcgaacaaaaatcaccaaccctctcttcaggttcatcggaaagaaattcgcacaaactcttatagggaaaataaggtgaatcaacccctaagaggaagagtaaggtccgaccgcagtcacgacgggagtgatctacgagagcatttgaacttgaagaagcctgaccttcgtcgacgactcggtccaaagcaaaagaattcactccatttgcaaatggacgagttggagaataagttcaaaaggcatcaagtcacgaaacctagcagacagctggggcatgatactgttggagaacttaattcagaagcctcaggatcaaagagaaaagacgattccaaaaggctacttaaggataagaaacccaacaaatatatccctctttattttgaatataccgagctcagtgaaactcgagaaaatatatacctcgcacatgtacagtaagtcgtttttagcaagctaaaaactatgaaacatgcgaggcgcaaaagggatccaactaaatggtgtgaatatcatggagatattggtcataccacagaggagtgtcgtcagttgaaagatgagatagaaggtctcatatcacaaggacactttcaacgatatataaag

SEQ ID NO: 241502 - DNA, 1080 bp, Cannabis indica
aagatttttgcttggcgtgtgattcataatgcactaccagttgctacctccttggtcagacgaaagattatcacggattcaacatgctcgatttgtaaatctgcctgggaatctataggccacgccttgttcagctgcagatacgccaaagctgtttggcaaaaaatgaacttgttctttgactcgaaacgggcttcatcaatgtacaaaggtgattacttggtgcatctatcaaccgtctatacacagcatgaaatggagcttatcatttgtactctttggtctatctggaccgaaagaaattgcattgtccatggttccaaggccaaaccagcagctgttcttgcatcctttgctgacaactacttgacaaacttcagaacagcaaggaacaaatatcatgttgctgatcctctcattcatcaccatccgagaccaccagaagcatctcctccatggcaaccgcctgctgctggtgacttgaaactaaatgtggatgccgcggttgatgctactcgtaaaattactggtattggggcagttgttcgtgattctgcaggggttgttcgtgctgccttggccaaaccaataattggcaattttgcttctcatgaaatggaagctaaggctattttctatagtcttaattgggttttacagcttcaaatgccaattgctattgtggagacagatgctctccttgttgccaatgctatccgaaatggctcctctgctcttacttcctatagtgatttaataattgatgtaactagtcttttatcctttttccctcagtgaatgttgtacatgctaaacgttcggccaatatggttgcgcatactttagctaagtttgctttaggggtggatgagacttgctcatggttggaggatttacctccttctttttactctattattgtaaatgacattccagtttaatttataataacaggtatcttttcctcaaaaaagaaaaaaaaataataaattgaattcaaaatgtattaaaaactaataataaaatttgaaaattaaaaaaaaattgtagatttttcgaaaattaaaagaaagtacacat

SEQ ID NO: 241503 - DNA, 1488 bp, Cannabis indica
agacaaaataatgtcgtcaattgaaagacaagatagaaagcctcatctcacgtggttacttccagtagtatatgaaacgataaggcaatggacaaaaccagccaaattcgcccaataacctaggcaaccagagattacaacctcctcctttagaagatgagggcattttggttatctcgggagagccacatctggctggagaaagtaacaatgcccaaaaaagatatgtcaaggaagttaagaatgagcaatcagtctttgctttagaatcgtctaagaaagctaagactgaggaacctccaattgtgttctcggcggaagaggcaaagcatgtgagatatcctcatgtcaacccgctattaattacaatccagctcgccaacaaaagaataaaaagggtgttggtggataatggaagttcagtgaatattctttataagcacacactgaagaaaatgggactagaaagagcaaagttaaaacgttgcatggtaaatttgtgtggatttataggcgatagtgtctccagtcaaggaataattgaactcccattaactgtaggtgagacgcctttatccactaccataatgcaaaattttctagttgtcgacttaccatcggcctacaacatactggctggtcgacctgccctaattgaactaggggaagttagttcaattaaacacctatctctaaaatttcaaacactaacaggtgtaggtgtggtgcgaggtgaccaactactggcttgtgaatgctactgcatagagctacagaataaaaaagttggtcatcaactaatggcagtcacaactgaggagggtaagaagcaagtcaaggacatagatcctcaagttcaagatgaaaagaaaaaattaaaaccaattgaggaattggaagaagtttttttagatccaaaaattcccacaaagtgcgtattcattggaaaaatctagatgaaaaactaaaatagcaactaacaagttttcttaaggcaaaccaggatcagttcgcctggagccattcaaacatgatagggattgaccctaaaattatttgtcaccattttaatatcgacccgaattatccaccgaagagacaaaaaaggcgacccttggattctcaaagaaaaggggcacttaaagaggaagtggataagttgttgactaacgactttatacgcgaggcgtttacccgtcatggatatccaatcctgtccttgtcccaaaaccaaatggaacttggagaacttgtatcaacttttcaaacttaaacaaggcgtgccaaaacgattgctttccactaccaaggatcgaccagttaatggatgcaactactagacacgagcttatgtcattcatggatgcatattcaggatataatcagattaaaatgcatgtcattgatcaagagtatacaagctttataaccaaaatgggactttttgttataaagtcatgcctttggtttgaagaacgttggggcaac

SEQ ID NO: 241504 - DNA, 968 bp, Cannabis indica
ggacctagaccgtgactcgaaaccaaacccggtcctagaattagaactgaaacagtgactaggacccagacctgagaccataaccgaacccaaaccataacccgaacacagacgagacctagatcgagaccttgactaggactgggacgtgagacctaggacccaaacttgtacccacttggacctgacctggtcctaaacactcactgggacctaaaccaggttctggaccctgatacggaccagaacccgaacctagaataagactgtgaccgagacctggaccaaaacccggatcgggacctggactcaaactaagactcgggacccaaacaaaaacctggacccacaccatgacttaggaaccggacttagatgggggacttagaccagggacccaaacccaaaccaggacctgacctggacccgggaatttgaagtcggacccagactcagacccaaaacctgccctgaataaaaaccaggacaggaacctagacacagaccaggacaaaacctgaacccagacttgaacccaaaatccgacctgaactcaggacccgaactcagacccatacctagaataagacccaaacatagacttggacctaaacctaaactcgaacacagaccgagattggaacccaggacttacaccaagaattgaacccaaacacagattgagttcaaaacttgggacttgaacatggacctggacccacaccaaggacacgaacccacactcggagcctaatcaagacctagaccaaaatccggaccagaacccaaacttagaatagaaattaaaccccgacccgaactcgaattcaaacgcaatctccgaatcacaaccagaactagaatcggactaggacccgtaccaagaccaggacctaaaccccaacccgaacccaaataaaaacccagaccgagacccaaacgtgcaccaagactaggactcaaacccg

SEQ ID NO: 241505 - DNA, 915 bp, Cannabis indica
tacgacaattacgctgggggcaaggccaaccgattgcagaagagatcaaacgacagcatcaacctggccttaagaaggctgggcaaccatgactttagctggaaggttggccatacaatcatcaatatggccgaccactacctccacaagacttggtcagccatagaatcaatgacttggttggccacctagtcttgccttggccagcccgatccaccaatagtttgctctcatacttttggtctgcagtgaccaagaggtacacaatatcttgctagtagcatcccttgacaaaagcgaaagaagaggagaccaagccaactcaaagtagcatggctgtccacaaagagtttccaggcccttcaacaaacagatcgagaaagaaattcttccttgacagcaaagatcatgcaacaagcatgttcggaccaaactagaaggttcataccatgttacaagatgataataaaggtacatacaagtctggcgagtacaacaagaacttggagttaaaacttctaaacacttaaatagggaacatctcgatatgtactctcaaaagccaacttatcaattcattcctctaacgtttcattatacaagaacctataaaagagctgatacccattgcttttcaaccatggcctcccatcactcttaagtgatggccgttaagcggtaagccgcgcaggggtagccactacgtgttttcaaaagcgggcactaagctgtaagcttttgttacacataagaccaactatgtctaaaccacttactcacaagattaacttcttaaagtgactctttcagttccatatgcatactatggataacaccccaagaaagaacctaggcaaagtctgtgaaacttggtgaatagcaagtgaccaagagacttgcctacatggtcgcttg

SEQ ID NO: 241506 - DNA, 1000 bp, Cannabis indica
aatcacataatgaaaccgggtaaatcacatgatcaaaaccgtaatctgggaaacccgaacccatcactccaggttctgttacactctctagggaacaccctaactcagtaaacaggcacccaactacgacactaaaatggatgagaatttggaaaatggcttgtttggggatcttgccagaaccgactagctgattttacaggcctggcaaaccggctagcctgtttgcaccaggtttccccaaacaagctccaacttgctcaaaactcatccaagtgcattcatactttccagaacacctaaacaatgcatatacaacatattctaaccagaaaatcttagaaaaactcagtcaatcaaattatgccattaaataccttaaattaggtttttaaattcaaacttgcataaatccaatctcatacaccaaaacctgctacaagaagctatattcaacttaaatgaaccctagaattcgaactatcaaacaacctaaccctaacaaccactaatttgcaaaatcactatttgaaaccaattaaaatcttgagaaaacatagctaggaagtatctagtgtttaccttggcttgattctctcaggattacttgctgaaaagaccaagaatttgcagcaatctcccttgttctagctggtttcgacgagagagggaaggaaagtgagaacttttcttgattttggcttatttctcttattttctttaatcctttctaaaatgaattaatggtttaactaaattaaaccttggctgaatcttcccttgctaggtgtcaacacatagggctgccaccactctccacttaaccaattactaaaatgcccccaatgcttaactttagcctattttaagcctaggggtaaaatggtcaaaaaccataaccccccacaacctcggtatattatttcctccaacataaatcccactaataaataagattctaaacttgctcatgtgatcaaactagccatccatcgcattt

SEQ ID NO: 241507 - DNA, 826 bp, Cannabis indica
ggcataaaacccaacagttcacacccaagggcatcaagtacttatctgccctgttcatcctttactccactcaaggatggggtgtgctgtccccgcacgacatcaatagtctttttgatctgaagtctacccctaagcagagcaagtcggggtacttccatttctctcagctggactacaagtggctgacgggcaccgtggacaccgaggttagcaagattgggggttttgttgatgagtattactttgtagagggcatggaggttaccgatactcagtttcaacatatccctttgtattgccgtccacccttcacattggcacttacggaaaaggcccagaaaattctccaactgtcggatgctgctcgaaatatcactttgttgacctcgaaggacaactttctgaagtataagctttatctagcaaactttataccccagcttgtgaaggggaggaaaaagaagtccaggtctggccgggctgagggagttgagcaagagaaagagctcattcaacttaagcgtgaggctaagttgaagggtgatgctggagccaagcagtatgctcagcaatattctgagctacaaaaggaggctaaagaatattcagagcaggagaggccgctaaagaagaagaaaaccctcccgaccgagcataggccgatagaacatactatccggatcagggagcctggcctgcctactcggccatctccccctatagaatgaaagggaaaagtcgtcctggaggagcaagaagattcctcggatgacaatgctccatctgtacttgtttgggcagatgctcctgccagcgtgcagag

SEQ ID NO: 241508 - DNA, 1148 bp, Cannabis indica
gaggttgaagaggaagaagagggtgagatccttgcccctctggaccagaagggcaaaggcaagatggtggaggttgagtctaccaagaagcccaggagggtcgatactccggctcccagctctgactcggggatcccacctgaggcggaggaatatactgtgcctcccagcattgtcctgatccctgtgcctactgatgaagagagacaatagcttcggattgccaagcgtaactatggtatggctgaatacacaaaggggaacgctgaggttgaggccttgagaaaggtcttaagggaggccgaggagaattcctcacgtaatgagtactttgggaacgcctgggatctaaacatggaccccctgacaaactggttcaatcgcttcatcgagcctatcctcgctccttttgcctcagagttgacaagccactttgtctctaatttgacccaacttcggccaagagatatacagtctgtgcttccacgaactcaatctaccaaattcaagatattagcgctgccatgaccgcggtaagtctatctgttagtgttctcgggccttgttttatggcgcctgacctcttgtacttacacatttttcttgtattgctagatttctgcagagactggtcgcctctcaaaggctttaattgaccatgggtacatcatgtccgaatttgggggcatggatgaggccatgaagagtctaagagactggacagcaaagaggaaagctatcccggaggaggcccagcagagggaggctcagatggagcggagtcaccaggaagcgttaaaggccaagactgaggagttaaaggcaaaggacgatgccctgaagaccagggatgaggctgtgaccaaggctaggcgtgagcttagggtggccaaggaggcggttgaagaactgactgccaagctgaagtccctagaggagctgcaccagggtgatttaaaaacgacaaccaacctaaccgtcgaggtgaaggagctttgcgacttcagggagcaggctcaaaagaaggcaaaaagagatgccctcctggccccagttacctgccagcactgcaataagcgcttcgacgacggtgtctttatggcctggcagactaacggccaaaaccttaagcttgacttctatcccaa

SEQ ID NO: 241509 - DNA, 753 bp, Cannabis indica
tgggtttgcaactgaaaaattctagggccattgccctcattgaaacgttcagcaagatcgttccacatttcggtagctaaatcaaagtacataatactttgtgcaatctcaggggtgacagaattaactaaccaagacattacagtattgttacaccttaaccaagaattgagagaggggttaccaggttctggccgagggagagagccattgatgaacgagactttgttcttggcagccaaggccattgtaattcctcttttccatggttgatagttggggccattgagaactgtggacacgagtacaaggccagggtgatcaccggtgctcaaatagaaagggctggaatgatcttcagcaatcgagcgagggtgagaagcttgaactgcgttgtcatcaacaatggtggtttggtcctggggagtaggatctgtcgattgagattgagtccgagtcggtgggttgcgagcaggaagggctgaagagtgtggagcttgaacgggatcggaattgatctcgactgtgtgattgtcgaccgtcaaaggaggagctccatcctgagaacgggtcgaaggtctggccatggaagctggaggccgaaatacgtctgataccatatgagaagaaagaaaatagcagagaaaaatagagcttatttctattatgaattctcagctcaattttacaattgagggctagtcttatatagccctgaataatcaagatatgttagttgcataactaacttac

SEQ ID NO: 241510 - DNA, 941 bp, Cannabis indica
tactcaaattcatggctattactctctaaacccaaatatgtttagcagctcatgactctgtcgctgcacctcctcccaaactgaaactttcctcttatcaaaataaattcataaaagtcctcttcatagttttttatgctagtatcaacactcaaccaacatactttttttatttttttattagtagtgggtgtgatggttgtggggtgctttggtcgactacaatcggatattcatttgaatttggtacctgttaatgagcggtgtagggtacctggtgaatattgtcattgggcacaaagcaagtattgttgtgaaggactgtattgtgaaggtgagtggggatggggtgagaattggagatgtgtcgatgatccatactgtctacaagctggttctccttgcgctgctttgtcaagtccctgctgctacccgatgcgttgcaactctatggagcgggggggacgttgtgtatacccctggtttggcgctagatgttcaacaaaacgcctcataagatataattaataaaaagtgtccttggttaggtgtggtgtggtgtggtgtggtttgttttagtactaataaaaagtgcacttggggcatttgttttttgcgtgtttggtttagctttgagattaattagtatccctatgtatacagggcattttcgtgaaagggttatttctatgatctgtgcttgggacttgggaatgaccataattaattatgacagaaaaacaaaaacgatgcagcaaaaacaataataggaaagcatgtatttgtaaattaaacaaataatttatttactgaaatcttatttttttaatatatatatatactagatagatgttacgtgccaagacgtgtgttcattttattttagtttttagtttttttttatatcataattttaaaattaataatattcaatatagtga

SEQ ID NO: 241511 - DNA, 652 bp, Cannabis indica
ataaataagaattttatatttctttttcataatttttgtttaatttatttaattttactaaattagtgattgtttatgtactaaatcattctccttactttgatatctatcaaaccacactccttgaactttcatatgttccaaattatactttaaacttttatccatgttaaatttttgttattaaaattagacaaaaattcttaaatctaacaagctcaatagtttacgggggatttttaacgtctttaaatgttcagaaacataatttgatatatgttaaagttcatgaacaaaaatcataattagtcttttaaaaaaaatataaaataataccctgaactcgtcaaactacctttttaacacatgaagtagttttcaacacaaatacatgcaaataaatataatcagcctagtcatagatactttgaggtcaagttagctattaagttttattttgattaaagttaaacttgatatttgttgttagaggaatttagacaacaccaaatatctactaagaatataattatttaataaaaagtcgcgagtactcaacctagaatggcgagtattcaaagatctggcacacagacaaacatgaaaactaatatagacaatgaatacaggagaattataatggttcagtcag

SEQ ID NO: 241512 - DNA, 747 bp, Cannabis indica
aataatataccactctttaatgttttatttcttaatatatcatagcacgtacataataaagatataccatagtgcaaaatctaagaggcgagagaggaacaaagctggacttgtcggtaccgagagagaagaatgtggtgagacttttggccttgacacgagagatgaagaagaggtagaaagctagggtaaattttctggtagtgacgcgatctgcggtggtaatactcaaggggtggcggtcggactggtagaggcgagatggtcttggtgctgagggagaagaaagagacgagttatctggacacaagaaaatgagaatagggtagaaagttagggtttattatgcaaggttatatttgtaatttcatcattaaatttttaactgaatggacattttgttaattttttataaaaagggacattttattaatttaattattagatttaggatcattttgcatcttggcaaaaaaaaaaaacaaaaagctagaatgatatattgaatatatgtaattggttgagtacattatttaaatctcggtacgcgtaatgctatttttaataattaaattacttttgttgttttatatataaatatttttaaaaacacgtatagatgaaaaattccctacatattatagcaaaagcccaaactcacaaacctttggttgggcttgacatacttagctaaggacagatccaatagttcatgaagcaattcaagtaaccacaggcccaaaaatc

SEQ ID NO: 241513 - DNA, 1107 bp, Cannabis indica
gtgtcaggctgggtaaagttgttgatttcagctctcagcttggcaatcttcgcaagaggaaagtatttggaaaggaatttcagggccaattcctcccagttgttgatagaattggatggcaaagataccaaccaactcttcgctcgctccctaagtgagaatgggaacagccttagcctgatggcgtcatcgctaactccgttcatcttgaacgtctgacaaagctctttgaagttggcgaggtgcatgtttgggtcttctggtggcagcccccaaactggactaaagattggaccatctgtagtatggctggcttgatttcaaaattgttggcatcaacagcaggtggccttatacaagatttggccgctgacaagtttggtagcaaatagtccctcaagctacggtcattgttgttatgaccattagcttggtcttctacaactccttcattattgccattattggcgttgtcagccatgactccttcttgttcaatctcttttgcggcggtttccaatttcttccttcttctattctttttacaagttttctctatttcaggatcaataggtaatctggcaattgcaccttgacttctcataaactagttaaacgtgaaaaagataagattctaaaacaaacagaattagtactataattgaaaagaaaaaccaaattagaacaaaatttaatttttaataatgttaactatcaatccccgataacggtgccaaaaacttgttgtgatattttacacacacaagtgcacatagcgtgacaagtagtaaactcaccaagagtgaggtcgatcccacaaggattgtagttaagtatgttaaaattaaattttttacttctatttggttgaataaaaaattaagaaaggattaaaactagaaaataataaaaacagtcaaaggagaaacaacttaaggaaattaacagttaataaaaactagggctttgatttcaattgtttctattgattatggcctaatacgattatcttcctattatcaatttctatacaatagcaggtttactacggtaatttatagtcttctcagatatataaaccttaattacatgcaaactttctactct

SEQ ID NO: 241514 - DNA, 704 bp, Cannabis indica
ttctaaattagcaaatttgctctttaaattttaacaactatcaaatcgtacttccaagaaagatttgacatttcttttagtaaattttcaaaaattaatttaaatcttaaaaaattattttgaaagattaagaaaattaaaaaaataaaattttaacactaattaagagcgatttaaaaaattatttattttttattaaaatatttatttagatattaaaaaaaatatattaaaaatttaattttcataaaaataaaattttacggaaatatacttgagtctattttatttttttcgaaaactgtagatttgtttaagtaaaaataacattttttaattttttttttcaaaataattttatatttttattgaatatttaattatttttctttatttattaagatatgagtttataaatataaacaaagttgatctttttttattttaaaaaaaaaaatcttagtttgtttaaattatttattggattctctatcattttggtttgatttgttaagatacgtgtttataaataaaataaaacttgaaaatatttttttaggaataatttaggttttaaagtaaaattaatattttttctaattaatttaatatttaaaactttttaatactttttattaatttttttcagaattaatgtaaaattataatatttaaattaatttttttaataaaatgggatgaaa

SEQ ID NO: 241515 - DNA, 530 bp, Cannabis indica
aatgtaatatgttgatttgattttagaattaaaaaatgtacataacattaatttaatagtggagttattttactttggttcttaggggactcaaggagtagttgattggaatatgttttcagtgcaggtgaatcttgtaaattcatgtgttcatattgatttacattctataattttaattttaatgatcttgtaaatcacttatgaaataggttgaatttactttttttttttttggtattagaatgattagtggtaaaaatacacttatttattttaaatattaaaataaattaaatttcaattatttttttatgagattattgtgatatattttataaataaaattagaggaaattatactctacacgctttctatagtgtcctcttttatttttatccctttttttaaagtctattatttttacctctctttttaaatattgtaccaattttgcccttatcactttaagatattttccatgcgactctcttatgtcagggtattttgggtacaatacatataaaaa

SEQ ID NO: 241516 - DNA, 1256 bp, Cannabis indica
attttatttaattttattaattcaatgattgttcatgaactaaattgtacccccaaactttaatatctatcaaattgtgccctcaaattttaacatatattaaattatacctcatgaacttttattcatggcgggcttccattagtaaaattggacaaaagtccttgagtctaataatctcaatagtttggagagaatttttaactgtctaaaaaattcacagagtatgatttattaatacatgtcaaaattcagaaaataaatattctaattaatctttaatttattaacacttggtaaattctattccataatttttcaaatgaaatatttattatgttataatgatatattacaattctcacaccttacatgagaaagtacgataagttacaaaaaaaataatcactttcaaattattatataaaaaaaaaaaaagtaaaaacacacaaattataacacattaattcaaatctgacaatttaattaatggagagggtaatgtccatgttttagtagaaatcgtcttctactagctagtggtaaaggcattcatgggttatgtaagcacaagagtatgggtggaatgaaatttcagaatctttaagattttaatctagaaatattgggaaacaagccaattactcactagacatgattttttttctactaaacttctaaaagcaaggtatatttcttaaatagacgttatctcaatgcccaattaggtaatgatcctaattttgtttggtatagtatttgagaggcacaagagatagtaagaagtggtgttagatggtacattggtaggagtagtaagataaatgtctttggggaaccatggtttcaggataagatcaatcctttaggcactacattcaatcctggtcttcaaaatgctactgttgttatcttcatgatggtaggtggacaaagttgggattagaaaattgtatatagctgatatgtttaataaaaggtatcaaagtcttattcattctattcccctaaatttgtttcataaagaaccttgatgtgtggactagagaggttttcagagaatgtaactgtaaaaataaacacttggttcagagggtcttattttggtatttgctaattatgtgtaacgtcccactagcttatgcgggtctatagttgatttttaaattactttgctaacttttgctaaccaaatgatttagtgatgaccatggagtatgccatctcattcatttatgcttttttccactagtttc

SEQ ID NO: 241517 - DNA, 990 bp, Cannabis indica
ctgctttgatcaggctctcatttctgtctaaaattatacactgatgttctctgaccccatatgcttcttttaattttttgaaaaaccattttcaagatttgtcattttctaaattgacaacacaaaatgcaagcgaaaatatgtgttatgctacatcttgtgtgcatgatgacaataatgttcctccgtaagccgctttcaagaacgtaccgtcgaccactattatcggcttgcatgttttctacccttttattgaagcatccaaagccataaaaacaaataacaagctattgtcttctgctgttatcaaatccacaattgatcctgggttgtttttctccaccatgtgcaaaaaacttggttttaagctgtatgatttcttagcgtttcctcttaagtcatttacagcatgctctttactcctccaagctttcatgtagttcatcttgataccatacttgtatttaaattctcattttatatcttgtggtgttgcttttgtcttgatgttcagaaactttagtttgatgcattctcctatgaattttatagttgcttacctttggtcttcatgtctaatatttattgggcatgtgtggatgtttgagaacctcctgattatgaatgtattcgttggtccattttatttcttcttcttcctctactggttgttccagtgtgtttgattatgttgttggtgcgttgaagcattttgacattttctcgttcttgtgttctttttgatgtgatcataggtattgcagcagttgttaatctgttgttatgcgtgttgacatctaataatatgtggtgaaattagtttctttgaatttcagttgcaagttaaaaaataggctcggatcattgaatatttttatcgggggtattctttcttttacttggtactggatttgcatggttgttgttgttgggttgcattgcaatgaagagagtataatctgtacgagctgttcatatttgcaatccttt

SEQ ID NO: 241518 - DNA, 790 bp, Cannabis indica
ctttcagataataattgaaacttcatttgtagaattcttgagaaatgtcagccagataacaaagaagagagcaattaccaactacaaattcattccctcttcgcataatcttatggtacatatatataagcaatttttcatgtttgtggtttcattttagtagctatgacagagaatcattcaatctatatcttctcatgcgacaatcttcttctactcctttctcattaagctttgatctctttcaatgatggggtctcctttttcaaatctggtttaagtaagaacgaagatggatacgatttgaaatcttctaatggatacgactgagttttgtaaataactaatatgtcaatataatattaaggaggtaatgaaatgagagattttgaatattttggcattttctattttcttagtcgccaatttagggtggatgtaattttaatttattttttatgtttgttaacttggcattgtcaatttgatgtgtgagaaatgatgcatatgggcatgtgccaaatatgttatgcaacctatctcttcataaataatggtaaggcaagctcaccttacctcttgaatgtgtttacttgtcttactataaagggtaaatattattttggaccctgtgttttgtaaaagttaccaattggaccatctgttttgttaaatgacaaaatagaccctgtatttttcaaaatagtacaaataggaccctgaacttaatttttgtacaacttttttttttaattataaccaacttgaaaatacaaacagatataaaaaa

SEQ ID NO: 241519 - DNA, 1192 bp, Cannabis indica
caaaataaaaaaaataaaaagaagagagagagagagagctaactctaatattttattatgacgtcaatttttgtgctttaaaataccttaccaaaatatttattttttttttattttttttatggcagtgtttattattattacaaataatgttttaaaaaaatttcaaaaaaattgacttaatttttattgttatttttttgaaataagacttaaaatttaacatcctaaaaaaaattgaacatcctaaattgaaaaaaaaatatatcaactctgtttttgataattaaactctgtaaacaaaactaccttcataaaaaaaaattgaaaaaaaaaattaggtatataatttcattgtaataagatgttgtatatttttatttcattactagttaaataatattattattattaataataaattataaaaattgtagctttggttttcaaaaaagctaaaggagaaaaagaagtttccattttgacaattctaacgcgttgttaagaaagtaatttggccacaaaaatcggtatatcactgctttttgaatatttaaccatctctcattttccacgaaagaagagagagagaggccaatggctatagctaatagatacggagaaagtgccaaattgtatacttattttttttattttcatatattctataaaatatatatttttataaatgatgttctaattatatatgctacaccgtggataatatgagaatatttataattaatgaatatattatatacttaatttattttatatcattatatgttttaatttttatctatattttcatattttttaagatatacttacttttataaataatgtctctattatatttcttagatcaatgtaaattatatactagacttaagtggaaggtgagagtatattaggcaactcactcacaagagtgaatacattttaaagaaatataatatgagaatatttttaattaatagatacaaaaaagggtatttctcaacttaccttattttaattagtattatattattgttggtgtaatttaatctagtgattctagtctcttatatattttaatttaattaataatataataaataaaaaataacacataatgggctcgtttagaacgatgtattagatcgtattgtattgtattgtattgtattatactaaattgtattttatg

SEQ ID NO: 241520 - DNA, 1169 bp, Cannabis indica
ctcagttaaaattagaactaacggacaaataaaaaacatgactttgaggactattatcgctatttttcgaggttggggacttaactatatcaaacttaactttttaaggactattttttatgttgttttcatttatttttttgtattatttttatgaacactgtaaaaatataaataaaaaaataaatgtaaaagtgtaaaagatttacaaaaaatagtatttgatgtaaatattttatttttctggatcaattaaatttataacataaactcttttctttaattaaaaatgaaaccaatttatatatatatatatattaaaaaaaaagatgaatgaatttatcagaggtttttgacatgcagagtgggagtgagagtgaatctgaattctgggataaatcctagaaattgtttttcgtggtttggaagtaacacaagacgatttgatagagaggagagagttaccaccggtatcaatgccaccgtcaacaagaaaaagaaaaagaaaaatgttccgaattcaccacgctctcggggactgtatttcgttgatgtcgatgctggtggctggttgccggaaagtgggaaaacctgaggaggcggcgagcatggggtgatttggtttagctatgtgtttgtggtggagtttgtgaagaagctgatgtgggtttctgactgtaaaacggtgataagcggtggcgatggggttgagctttggccgcggaagctcgctcctgctaggttttgtttggatgatatgaagatcgttaagaaagccttcgatgatgtgtaagtttctctctcttttggttttttcatttttatataattactattatttgcaaagcattttgaatttttattattatactttgaattaaaaagaaaaagcaaaaattattgttttgtatttcaagattttagatttattaatttctgtgctgttttattattctcatgtttcaattttcttttttgagagatttcaataatacatttacattgtcaatgcttggggtggatctgctgccttgatgtctctgttaggagcattcacagcagattctcttatagggcgatactgcaccattccctgctcttttttgccttagctagttgatgacagtaaggtgtttgggtctaaccggtatttaatttggttgtcgtcg

SEQ ID NO: 241521 - DNA, 895 bp, Cannabis indica
attcgaaatggtgccaactagaggtggcatattgcgagcagtactcccagccagtgctccccgcttcgttgggcaaggggcaagaaggttcaagcagaaccatttcaggccctttacttgaagacgtagcatgatgagtcgagccctagacttgttcctcaacgtgtacaatggccagagtgtgagcttgaaccctgatcttctgctaactcgggatttataggctacgaggcacgtttcttgttggcagtggtcttccttgatctcttcagaggttctgtattcaatctcgatgaggtttctgaggcaacaatcctcttcttcccttttttgctagaggtgttgagaaggttttctagacccatatctgttaggcaagtaaatacgttaacacttgttcaaaaatagataaaaaaatgaggaataaactctcacttaaagaaaagttaccataatcataaaatgatgaagagggaggactatagtaattactaaactccttagaccatgtgatcattaatatatcataagggtttattagagataactcctaatttgaatctggatggctcgccctatcaaagttggtaccatacggcttagcaatcctgtaatatgagctagtgcaactaagttggacgtggaacctaggataccaactatcaaacttatgtgttatacagtctatgaggaaattattccaagtatagaaattatattggttatgctgaaaagttactagtgaagtacactctatccttagtacggtaggtgaccatccacattgattacctcaggacgcttcttcttcaccttcccgaggggttactttccagaggtaatgtaacaccctaactaacataggcgtattacgtgagttttaaacatactgtgc

SEQ ID NO: 241522 - DNA, 726 bp, Cannabis indica
tggcaaatttctgctcaagggcgcgccaaacagctgcagaggaggcatagttggctactgaggcaagaataccttcagacatcgatgatcgaagccaagacaacaagagttggtccttctttctccattgttgatactcaggattcgggttaccagtgacaagattcattggaggaggcacacctgtgaagagaatctcttcaagatcatgaccgataacagtcggcaccacttgagatttccaggataggtagttgagacgatctaatttgagggtgagggaagaggttagagagttggagaaaggattccagtgttggtttgctgtagcagcggaagtgggggcatttgccattgttgcagaagcaggatcggaatgcagagagagtttgttacaagctttcataccgttactagtgataaaacagaagtggttttttattagtgcagtttcggataatggctaggtttggattgaaactcagcaacatgtgggggattattttttttatccaaatattcatgtttgttctttctttatctctttctcatgtgccacagttagattctttgatcattccttgtatctcagatgaatggaattctgaacttattcatatttcttcaactagtgaaattaaagatgtggtgtggcatatgacccctctcaagactcctaaaatagatggcatgccaggtaaattctgtaaggatcattgagatatt

SEQ ID NO: 241523 - DNA, 1124 bp, Cannabis indica
aaggacaaagaaacttcatgatttggaacaagccacaagtgcaagttcgttcatgaaaatccactatagcaccgaactcaattgaccctccagggtggatatatattcaacgtgtaaggtctacatgtgtcaatttttaaatactgagatttcgcaaactacaatgccaagtcctcctccacttctggtgttagggtcttcgtctacttgttagcgttttcttttcgcgtagcaaactactgttggactttgaagctcaggaatgctacagaaacagtgatcgaaaagccgcttgagtccttagttgtgttgttgaagttctcagcctagttactcgtcattacattttagcgtacctctgcaaagtacaaccaaactcatttctcaaatccgattcctcaaggtataatgcaattgtaacattcattgcccgaatcttctcaaattctctatgaaattctatttttgaatacgtgtagggaaatgtgtaagtatgattcgtgaatacgttagtcttgaacttgtggttgacgttcatagtaatacggtggtagcatggactgtggtgtgcatcagggaacacgagctccaaagcataaacaatgctttgatgcctatccaacgtgaatgctaagttatcaacatcactaatcgcttctttcaagtttctcataaaataggttcaagagttgtagttttcgctgtcaactacagcgaaagctatcgaaaaatgtggctgcctgaatccagtgccattgcacacaatattttcctaccatacttaggttttaagaaagactcatcaacacatacaataggtcgacaaaacctaaacccaggcctacaaggactagtgagaagtaacaatatatacttgaagcgaccatactctaccataacatatgtgatggtacctagatttctcaactttagcatgtgcaagtaaccatgtaattttgagtatgaagcttcaggtgtaccccgaactaggtgcagtgccttctctctggacctccaagctttttcataattcattggaatcccaaaatccttgtgcatatctttccttaatgtcagaggccaaatgaattgagccgtcagttacaaatttatccttaattagg

SEQ ID NO: 241524 - DNA, 779 bp, Cannabis indica
ttattttgtgtattttttttattagtaaggacttaacatattttgtaatgtatactttaactttgttataatataattaaaatgtcttttgtacttaattttgttatataattaaataatatttattttataattagtttaattattttaaaaaaatttaatatataattaattattaaataaaaaattaatatatatttaaaatatttaaataataacctactatgcattttacaataaccgaagatataggtcttttttctcttttgatattcgaaacatatgtcttcggttattatataaaaaatgaagagaaatgtaacctacgtcttcggttattatataaaaaccgaagacataggttacgtttctcttcgatttttatataataaccgaagatgtaggttacttttattttcggtttttttataataacagaagacatagtctcacctttgacttttaaaacatatgtcatcgcctcaaatgacttcggttgcgatttttaataaaatctgaagataaactggcctaaacaccgaagataaaggccttttccctagtagtgattatgttaatcataagatggtgagaattgtgacaaatttatcgttaataaattgaatcttatactaggccatttttatttgattatcattccataattttattatgtatatgcttttggtgatttcaagaatttttttgtgaatattattattattatcattatgattttttttggaacatatactatggataatgtgaataaatattag

SEQ ID NO: 241525 - DNA, 1245 bp, Cannabis indica
aaaatagttatatttagtcacaatatttggttataatataaatttttttatgattaaatgtgatttttagtcacaactaagtgggttaggaaatccacgatgtaattagatttgtgtgtaattagaagtaattacacaatttgatatgtttgtctgaccataggggttccaattacactctccaattctcatgggtccctatgagaattggatgtaattacactgtataattagtgaaaaccttccatattaaacattagctactaaaaaatattactttcctatgtaattactaataactattttgccaaacaagatattaggaattcatatgtaattaccacctcatatccaaacacaccttacattttaaaatatagagtaattattaaactgtgtaattatcatcttagtaattaccctacctagtaattacacagttacttccaaacacatccaagttatttgtaaataaaacataatatttataacaaattatcactaatttagttttaatcacaatatatattataactaaaaatagtcacacaaattataatttttgtgactaatatttttagtcacgaatcttttagttacataacttataattaataacaatgtttttttttacttccaataacaaattttattgcgagtaaaaataagattttgtagtgaatattcatattataacatttttaattatcaactcaaactacatcaaaataaatttataatttatatacatcaatacattaagtattgatcaaatatacacgcaagtgcatataagatgcatatgcattccagtttttacccatattatatatttatatgtaattgagaagaaggcctaccatgcaagcaagtggttcacacaaagtcagaaataagttgggttgaattctcttctagcaaaatatgataaatatgtaggttgatcgtctactcccactattctctttttagtaaaatatatattattttagtaattatatattgaaatgtaccacatccacataatatattgacagtgaacgaaaaaattcagcaaaatgtcatatttttttgttaaaatatttctaatatgtgtccttaattattacattgtacaaattaaatgcaagcttttctctaaagaaaaattaaaatgcatggtatagatatatatatattttatatattatttgtgtattggtcactatagaggaatagtacactattgactctacattctatctg

SEQ ID NO: 241526 - DNA, 585 bp, Cannabis indica
gatcttctttccctgtgtacatcaacgtcacatcttgaatttaaggggtaattcaagaacatcgatcttcggagtaaagggtaatccgggtgctcggtccagctcgagatcagtgagttttcggccggtcaggccttgtaccatattgttcagttgatccaactatgcttgcatagaaggatgaaccggttgaacctcttgaccaacctgtctcacatcaagatctcttggaactgggtcttggatgtggatacccggctaagcacctggttgaacctattgttcgtccagacctcttcttttgttcaggtcagccctgaggtcatgggccgcacccaatctattgaatacctacgtacttggtggtctcggtgtctgattggtttgaccggtgggttggtcagaactatctgtttggatgaagttattaggtataactccacatgaagagcgattaggtaggatctggctatctaccacttggcccacaggttggacctgtggctgggagtgggcggttgaccattatgagtctagacggtatgcccagtagcaaattctcctataccgcccagtgggatacta

SEQ ID NO: 241527 - DNA, 1173 bp, Cannabis indica
ctaactaatctaatgcctcactagttatttatctcactatttaattatatatctatcatttttttaaaaaaaattgacacacacacgtacaattaatactatatatatatatttaactaaactactattactcgtatatagaatatatatatccaaataataataataataataacaatacaattgtatcacacttaatataccaaataccaatatatgtatataaactggatgttacacctagtattttagtatagcgaggcgatatagttagacattgggaatgtcgggaatggtcgggattttagaatttcccaaaatacccctatgtgtttttaagaaagtttagtgtgggtaagggcattttgatcttttaccctagcattatttttttcctttagtggattatttggtagacattataatctgattgtatgagtttgacgttagtaaatcaaagttattttttcatttattggaaaattagaaaatatcatttttggaggaaaggttttctctcttgccgtctctcttttgaaaccatcaaaactagctagggttgctgtgtttttctccattttcaagcttgttccagcagatattaagggatcttaaactctaggcaagcctcttgtagctccctctttagtttctggtttttgaagaaaatgaataatacgtgtttttgggattctagttgttgttcttgctgctggtgtttagttgtgtttttgtagttaatttatgtttggttatggtgaattgagcatgttttagtggttgttgattagtttaaccaagttttgagtttcagaactcaaacttggagctttaatggcaaattttgtttttatgcatgttgtgatgttttattgctttaaatatgctctctaggttgtataaaacaggtctgggaagtttgatttgaattggggttgtttggagtgagttatgaatttttgttggattcctgcactaaaccggaactatggttcagagagacctataggaaccgaaatttcagttgggaaccagtctaccggttgctgcagttttaggaaccctagtttttcccatttttcaaatgtttatggtattgccatgtgattcatcgatagggaaacttttggtttcaagtttatgtccccgtaaagtgatttagcatgtcactta

SEQ ID NO: 241528 - DNA, 627 bp, Cannabis indica
gaagatgtgactaaatacaatagtccttggccaggactacctttgaggtattaaagtaagtgatgaacgacttgcatgtgtggagtgcaaggggttgacatgaattggttgaggttgttaacaacgtaggtaatgcctgacctagatagagtgaggtaaagaaggcgattaataagttgtcgatatggagaaggatcgtcaagaagttcgccttgttgattatctaatttgattctcagatacatatgtgtcttagctggtttgttatcggtgtaccctgtatcgtcaaggagttggaaagtgtacttgcattgagagagaaataaatcgtcctttgcctgagatatttcaaaacccagaaaatacttcaattggccaagtgctttgagcttgaattatttgtgtagtgagtcttgtagctagtgaagtaaagtgagattaggtctgatgatgataatgtcgttgacgtagacaagcaaggtaatgtaagtgtcatcagatccttttgtgaagagtgcgtaatcaacatgtgattttttgaacccttcacgaatgagagcatcagacaacttcttgtaccattggcgcgatgattggcgaataccatatatagatttgtgtaactgg

SEQ ID NO: 241529 - DNA, 622 bp, Cannabis indica
gaaatatggatttaaaatggtgattttgattatttgaatgtgttcattttggtttatgtacttaattgatgattgtttgctaattacaaattttcaacaaaaaataattttatttttgtactggaataattttttttcgaaaagttgatgaaaaattaatcaatataggcttttacaaaactcaatttagatttaagttgaattagttataatttttttaagtcttaaaaatattgggctagggtttccccatccacgcgctgctaattgcgatgtattcgctcagatcggggatggatgaccaagagtacatcctccaatctcaccatgtagagctagatcgctgcaatagaaaagccatcgacctgataaggtggttcaatgaaagaactactagaagaggctaggatctccactccaaggaacaatagtcaacagatcggggagggtctaccaacaggctgtccaactaggttcttcaggaaccaggacaaaccttcctctacccgaaggaggacaggcttttccacaaaggtttaatggctagaacagccagatctcagcaaccaatagcttgggggctggcgagggatctcaaagccaggccctgcccagcacaggg

SEQ ID NO: 241530 - DNA, 1390 bp, Cannabis indica
taaaataaatacatgtatttttccttcaatattaattagtacgtacatatgatcaaaaatatcaattaggtagtggtccttaaaaataaatgcaccgaagagtaaactattaggtattatatatggttcacatgcatgcataagtgtgaatatagaattaagtgcgtaccttgatgccaaaaagaagaaaaactatagcggaaatataggaagtagaaagagcttcaagggagtgcttctttcggtcaatttgaagtttgacttggcgtatataatccaaagggtcttccttcaaatcaatggttagtgggattagaacatatcctaatttgtttccccactctgcttcaccgtttttttccatcatatcagctaaatcctacatttattcaacactaattaattaacaccaatatgtatattatatataggagctggtgaattaatattaaattatatataaattattattagttaggcataaatagtgacctgaattcctggggatggtctaatattaacaagcaatactgatctgaggcggatattattgggaagattattaacggtgcccctacttgaatccccttcatctttattattcttattctcgcctgcattaatataattattgaagcaaataacaaaacaaaataattgtatatatattattgaaaatataaaagagaatatatgtattaataattcaggcgagaccgcgtgtggactaatatttatagaaatttgatgatcacaaatggacaatactatacgtacacgaatcttcaaagtaagagatcgatcacttagctagctaggttgttatatataggtacctaacacaaattagttgtacttagtgtagtcgaaggatatatatcatttttgtggttaaatgatgtatattgtacccgtacaattgccatatgtgtactctataatgaaatgaatttgtcttactaaattttatataaaaacatatctcatgtcctttttagatattcgtgtattttttctaaaatatattacaattttccacgtatatatctagaaagtgaagtgacaatgcatgttatgatcataaccatataacctttttggtaatttatgtcgttacatgcaaatattgtgacatgctttaattatgtcatagaaattgtttttccttttactaaatcaaaataattcatcacttttgtttttctgaaaggattcatttattacttttatattttgtgagaaggggtatttgaatttgtgacttcttaagtgtgaaaccactatacacccaaaaaaaaaggtttgaaacctaggaactaggaagaataactagaattaaatttattaaagaagtaggattatagctaaccgtatcttctgttgagatatc

SEQ ID NO: 241531 - DNA, 1250 bp, Cannabis indica
ttttaatcttcttctcaattattttggttggtttctatttatattccacacgccgtataaatttccgtctcatcttatttaacttcaaaatcttttcctgtcacattgttaatcggtttggcctcaaaaatggtaccactgtgtgatccactcttcaaagtgtttattaattttgagatgttggaagaatatatatatatatatatatatgggtgactattcaatggttacatttttatgtaaccatcatggttacactttttttacctgcaatagcaggttacgaacaggtaaaaattctatttttagaattaattaactatagttaactatttttttaaataattaaataaatatttatcaagactttttttagcaattaaaatttataagcagtattattttttatttatatataaatccctactataataattttaacagttaaaccatttaattataatatttattataattttttttttacaaaaattaaacttatttttatataaaattttgccaaatgttcatgactgaaattatttttcatcatcatcatcgttaccaatatatagcttttaaaaaatagactttagcaacatccatactcacaagtcatcatcacagctcaaaatttgccgactcgctatttaaaaaacttaaaatttgaaaggacaaacctaacccagcttggagatagatgataatgtccaaatcgtataaaagaacctttgtgagtttgtgtgtgttgaagacataatcaaattcaaacgtattaagcaaagtcatccaatgtctaaataacctgataacaaactacaaaataacctgagtagcagagagagacgtcgttgcttgagatcaaagtggtgcacacctccagccttgcttgggaatcgtccagcagcaaaggaaaaaaaagtgagactcaagagaccaactgagacaagttcgtggttcactggaaaaagtcaaaaaatttcagaaatgcgaacagcaacagtaaagatgagagagaggaaaagtgaggaggtacctccagcgaactagcgaaccgtgagcgtcgccctgtggcagagagagtggaggttccgcctgggagccactgccagccagtcacggctcaaagtctatctgacattaagtccctctcttatttctcaccatattggttctcaccataatttattttattttttcattttttaaatatttaaataaaaaaattaaataattagtgtaataatttt

SEQ ID NO: 241532 - DNA, 838 bp, Cannabis indica
aaaaaaaatagattttattaattttcaagttcaaaatctattaatatgtaaaattaatatctaaaattaattaatttcaaactaattattagatttgacatttgaaaaattaaaatctacatacaaaattacacaaaaaattcgaaattaactccttgaataaattatgaaaaatgaaaaatggcaaaaatttgcatttggcacggatggtatgcaatgcataacatctgcacgggcgtccaagggtgcacaaccgagttttaccggcgtgcatggggggttttagacaaaatttgccaaggttgaccgagcatcctcggataggacccttgtccaaaccgcgtgcaccccgagtatcatggggtatccgcgcgcgtaagggggtgatgcccctcctattttttttaattttcaaaaatttataactaattcaaataaaattaaaattaagtttgtaaaaaagtgaattgcttaattttttctaaactatccaagaaagagaattcaattattttatgtaaaaatttcgtaaacatcaatcaatcatcaataaacacatagatcaacatgaatcacatccaaatcacacatacatcattttaaatccatatttcttgaaagtaaatcattaccatggctctgaggtcagttgttggaatatattttactaggatctagatttactaacaagtatgtttttaaatcctaaatatgaattttttaaaacaatgaaacttcaaacatatataaagtttgagaaaccttacattgattgcagcggaatataatgactcctcccactcagatctctaacccttgtttctttctgtcgttaagt

SEQ ID NO: 241533 - DNA, 1672 bp, Cannabis indica
aaggcgaagggagttcaggtggagtactggtgagatgttgtcaaggttggattgagatgaagattcagcaattgtgagaagggtcgggtgaggagtagagccaatagagaggtgtttctgggataagtgtttaggatagatggagttaatagattttcgggttaagcgagttaaaaaagggtatgcattagctttggaaaaatcattcctatatctttcataaccagattttggaagtttgtcacccaacaaatcaggaccataaggcaaatctggttcaattccttcatcaaccatctcaagaaaaccaatacatctttcaaaaggatgacccaaacaaccacaatggaaacaaaaagttgggaagttttcataacgaaattccaaccaatgttcatcacgaatgtgtggaagtttcaccaatttaccacgcatcaaaggctggtggatgtccagtcaaacacggactctaagaaaagaaccccagccctcatgaagtgaatcttcatggacatcaatgtattcaccaaccttacaagcaagagcacgggacttactaagaaaaggaagtcgatgaacttggacccaaatctaaactgtgtttaaatcctccttagagacattgtgcagaacagttggtgagtgtaagactattagatagttgttgtaatgccaaggttccccctccaaaagtctaagtttatcacctgcacagccaagagtaagtaagtaaagatcggaatgcatctcaaaaatagtgacttcaaaatggcatttcttagaccaaaattctcccattcgtttcataaaggttttggggttgaaatcattggaaagacatcgggccacaaggaaaaattgagagtgagtgcttgaaactagaagatcagtctcagtaaggacatgagccgccctttccttttcagataaaacaattttggaagacatatcaccaattagagattccataaacagagataaatcagaaagagagaacaagaaacgaaggaataaggagaaaatgctttgatcagaggaataaatagaaggtggaaaacagtagttgggtgtgatagagtggagaacgtggatcgtatgtggtggaagagaatggaggttatcagagatcatgacagaaatgggcgaggacgacggaagaacaggggaaaaaaacggttgaaaactgctaactgcaacagagcagaaaaccccactcgggcactacctaaataatatgttcattatttacatgggaaaataataactttaaacttaccattaacaaggaattacttggacatcatggacttgtgtttcaacatggagatattttatattattattgatgtattttaagatatatgactagtcatattatttaaaagtcattacattaaattttatgcaactgataattattatttaggaaatttgattttttatgcttatatgtacttaatttttttttcctaaactcatactattttatatttgtaagatatgacacattttttaatatcccaaaaatattccccatttacatcacccctctctcttcttccctcttttatttcatagccatcgggccccatcggacccattatcgggcccatcgggcccactatcgggccatattaaattctattttttttacacagccatcgggccccat

SEQ ID NO: 241534 - DNA, 1363 bp, Cannabis indica
cctcttgaagaggtacttttggtacttgtcctccgccatggcaatgatgtcatcccggaacaccttctctgcggccggagcactcacgttcaggcagatgactttggagagattgtagtcatccaccgactggtgccccaagatcaacttggccctccgacagtgctctgtcgtgaccaactccccgacatcgagggccttcttgtcgtatgtggcaaaggtcttggcccgttgaagaaatatttgagtaggctcggttcgcatgtaaggagggatcctaacccactccgtgagaagctctggatggtccatggcttggaacccggaggagaagaagaagcggtgacaatactccttcacctgcttctgctggttgtaagggaccgggtcctcattcaaaggatgggcccggaggccgtaaaaatcgtctttaagtttatctccctttttagggatggaaacgagttcataaaagtacaaaatttctgccggactgggcgagccccagctccgggcagcgtaaaaaataaacaagcctgacagaaggcggtaggcttggggaataagctggtacggcgcaaggccaacaaatacaagaaaattaatgaagtaatcttggagagggagcatagccccggacatcagatgcgtctggctccaggctccaaagcccccatagttatggttgggcgtctcctcgtcccgaggcagccggtggtaggtctcagaggttgtaggcttgatgcctgccaccactacgatctgctccagctgatgagcgcaggtcagggtagagcgaaggtcagccgcttcccacccgttggcacgggacttgtacccttcttgggccacaggaccctgcatgacctcctccagggtggccaaacgcttttcccctttctttgaagacttagaccggatgcagacgtagacatttttggatgagaaaaagatggaaaaaatctagcagttaggcccaaaaccaaacccaaattcaaaaagggaatgggggtcccctaaccgctggaaggaggccccctccggacatttgccaaaaatgaaagcctcaaaaggttttccttgacaagagtcgggtgcaagaatcccacagtgacattgcaaaaaagtaaagagagaaaaggaaaaagggtaaaatcgaaaagacgaggtctgctctaaaccctaaagtgtcattgcatgggacgaagagggttcctcgacaaaaacatagtgaaaagaggtaatataaacgcaaaagaggaggaatctaacgcatcatacaaaaactcaaacaaaaatattcccagaagttcaaactgttggaaattattttagcagaatcttagatctactcacaagtatg

SEQ ID NO: 241535 - DNA, 817 bp, Cannabis indica
tggtacagttaaactcaggaggtataggagagcaaaattccttaatggactaggcttgaaatatagtcgaaattgggtgttgatgtttgccagaattcatgaggtttcgagatgtttgactacgatctggtggcctctgaacctcctttcgacaaatagtctccaaatctgtgttcttcttggcatgggcttctcgatcccatgatccaaaacctgtttcgtcactgttaaacttggacagtcaccttacgtggtggttcaacgaaaatgctctattttgaatttctagattttgttcaagacattgaaatcatcattaggaaattcaaaatctctctctggtttgttcattatttgtttgatagatctgatttgtaatttttttaatattatttttattttgtattttgtaagtgttgatttgaatgtggaaaatataatggtggtgcatgcagtggtggtggtcttgtggtggtgatggttatttcagtggtgtggttttggtgagggtagttttatggtgatcgtgtaatggttgtggtgtaacagaaaaaagagggagtgaagaagttgaggagaaaataacttttttctttcagttcaaggaatccatggtaatcaaccaataagttctttttttgggttactcttacaagaccgttagtctttactttcatctttaccttctgtgagtttgcgttttattagacgatcagcaaatcgagttgcccatgttgttgctaggcactctcgatttctctctggtcgtagtgttttttagtacaatgtatgatctaatcttgaatctcttttgtac

SEQ ID NO: 241536 - DNA, 663 bp, Cannabis indica
aaccatgcaacattaaatgttatttctgataagtaaatctgattatattgaaatgagttttatttagggcataaaacccaacaaaaaagtacctaaatctgaaatgagctatggagggaatcaaagatatgaaaaaataaagagaaaaaataaaatccaaggaaaaggaaagggtctcttaccttgaagaccaaacagatgaagcaaaaacacaggatctatggcgcataaaggggggaagagaagaaagggaaagagatagagagagatcgagctaaatatgagcttctctttgatacccaaaaaataaattgaagactatgtgtatgcattctagaaaaaaaaagaacacaaacctaccacctggcattaggtagttgacatctggagtaaaaataaacatgtgtcaagagtatcctttgtacaaaagaaatatatttcatttctaaaaaaatatatatatttattagcataaattatcaaataaataaaggctatttttgtaaattaactatgaaaggccgaaagatgaagtattctcttttttatagaagttatagatataccaaaaaaattgttgatcattattttcgacaaatacttaatcttatattataaaaattgattatgtataaactatgttatttttatatggttcaggta

SEQ ID NO: 241537 - DNA, 990 bp, Cannabis indica
ttcatccctaatagatggatgttcactagtaatttaacgttgtaaaatctcgaaagataagtaatattgttagtcttttattcttagtaaagtccatcccaatagtggcttctaagagtagggcttacaaagtatgaaacaatgagctcataagatagaatggccttgacactcgcctaatacgggacaacaccggattctagtcttgatcgaagaaaagttttctagaatggtatccattttagatgagtcgacgactctatttaatgaatgatatctttgactctcgcctaatacgggacactgtatcagtttgttggaaaccttagaaattatttaagatgtgtttgttttgtactttcacatgtctttcttactcactgaatgtatgataatttatgaatgtgtatgaatttatagtgaatcatgttgtaaactattattaatgttgtagtataattttgaatcttcattgttggtctaacttaatttgttatttttaatgggacaaatcccaaaggattaccatccgttagacaaatacaatagtgttagatctcgacagataagtatttgtaaatgcaacatctagttgtacatccaaagatgacaacttaagagtagtctttacaatatgaaacaatgaagaattattaaataagaatgactttgactctcgcctaaaccagacatcgttaaattcttattttaatcaaaattattctttagttttttcctcttagctttttcattaagaaattgcttagaaagtatataattggatagattgtttgtaaatcatatgtgtatgatgtcattctattttctcatataaaattgaatagagcagatgactatattccaaatattctatcccaaaatgatataaatccttaatcttaagaatctcctacttgtatatgtttactgtaggcaactcagacttgaattagattgtaagtgctggtccaagctagaatagtcactccg

SEQ ID NO: 241538 - DNA, 657 bp, Cannabis indica
atctcaatagttttcatactttttaaaatgtatatgaaaaataaaataaaatattatatatttagatgatggtagatttatagcatcttcaaaaaaatatgctctaaaagtattatttttggcgccaaatattagaggtgatttttgaagagtgatatgtcgtctcgcctctaatagctatctattaggcgcaattttctgtagtattagtatgcccaatttcactatagtgaattcactaaagctcgatctccaccacctatgcctcctcctcctcccagacctccgccgtcaccggcacgaattcggctgaatcagaagaaactagaaagaatacagagcaatgtgaaaagagaaataaccatggctataacttcgctgtataatcagagaaagaggaagaagaagcagagaattgcgaaaaataattactatttttccactccgtcttctccaactgaacaactacggtctcattacacgaaagtacctccgccaccacctcctccgccgttcaaaatgccggagttcaagtacttggttagtggagacttcgttaaaattagaagcgctcaaagctctcgctgcgactcctctgagccaatggacgaggctgattcatcgtcaattaccgaagaagaatcagaatcagtcaac

SEQ ID NO: 241539 - DNA, 814 bp, Cannabis indica
gatctctccaaacatttgtattctctccatttttcacgatcttgcaggcaccccttctcaaaattgtatttgccttcacaacactcttccagaaccaagagtctgagtttttatacttgtgattgagaaaatcatttccttttaagtacttggctgccagaactttacagcacaatgattggctaccagttaggatattccatccccattttgctaaaaaagcctggttcatttctctcgttttccggaatccaaggccgccaagagattttgggaggcagagcttgtcccacacttttaggtgaatcccatgatttcctttttcaaaaccccaccagaaatccctaactaatccatcaatccggttgaccattcggtttgagattttggtagtttgcatagcgtacataggcaaagacaagcccactgattttatcagggtagctctgcccgctttggacaacgtcttatccttccaaccctgtagctttgccgagagattatcaagaatgaaattaaaatctgcgtccttttgtctagaccggaaaagaggtagccctaaatatttgatgcaaccttcaggagattcaatcccaagagtctccttaatctctttcctcattcccatcggggtgttcttactaaaaaagactgaggtttttagcctattaacctgttggccagaccaagagcagaaattctcaaggcatctccagaaaccattgacctcatttaaattggcttttcccaccaaaattaagtcgtccgcaaagaaaatatgggaaagggttgggccacccctgcttagctttat

SEQ ID NO: 241540 - DNA, 956 bp, Cannabis indica
tcgtggtgcaggtaaggaggataagaattgtgttcggccatgagtcagaggtctcccaccgatgtacatattagccgtggcatcttggcttccgggaagcaggatcaaccctttttttatgtttggaaatgtaaccttacttttgtaatatctgttttgtaacttgttataaaagaattttataaataagggatccctgtattatagtagtattttatatgaaagttttattctaaaccacacttttttctaaactagtaggttagtcagaaataagtttgtaaaagcatacatatggcgtccctgagggtttggacgttacaacatggtatcagagcgaccaaggtttaaagatcctgaagattggcttgatatgtacattagctgcgaagactcgttcgactcatggcttagaagatgctaattgttagttgattaatagactatttgttgattgtttgaattgtttgcttatttgaaatgtgtaagctgttagagaagcatgatacattttgatataaaattattaaatatgtatatgcatgtgcggtaatgcctattagcattgattctggttcgaaagattttaatgatggaaaaaaatagtcgcaagtgtactgaaggtgtacccaaggcaatctagtaagaataattgcgagctttccaggctcggagttggcggtgtgagtgtgaatcctccaccaccacaaggtggggagcaaatatatgttgtgatgtaagagaccatctgagttgtaaagatagaaggatttacacggttaactcatgtcagcgtggtgacagagtgagataccaagttggaccgattggcagttgcctttaatgacgtggccactaaggtcgccaggaaagttaaattcattcgatgtttggaagaacatatcgcgcggggtgtggttttaatttctaaacaacctaggttcgttcgaatctat

SEQ ID NO: 241541 - DNA, 1596 bp, Cannabis indica
aaaccatgaaggaaatagcatttgtcaacatagtgtcccggtttaccacaatttgtacaagaaggtcttggtttctttgaacgattgggatttgtaggtgatgaagggcgagcggatgcagccatggaggacaaattcgaggatgatgaaccaaggattctttgtctctcttcttgaacaatcataacaaaaacccgagagaggttgggaattggttcatagagaataatttgagccctaactgaggaataagactcatttagacctgtgagaaattgtaagacttgattttgattgtagtaatcaagaaatactttcattgcaccacaagaacaagtggtgttgggttgaaattccttaagctcatcccatatagacttgagctttgtgaagtatgtggtgacggattgatcaccttgctgcaaacgagtgagttgcgtttgcagctgaaagattatagggccattagcctcattgaatcgttcttgaagatcatgccacatatccgtggcaagatcgaagtacataatgctctgtacaatctcaggagacacagaatttaccaaccaagacattaccatgttattacatctattccaagaattgagcaagggattaccaaaaatcggccgaggaagtgtgccatcgatgaaggctgatttgttcttggttgtcaatgccatggtgatgccttttccaagattgatagtttgcaccgttgagcacagtggagacaagaacaagccctgggtgatctgccgtgctgaggaaaaaagggcttgaaacatcctcatgagctaggcgatcaatggagggtctgcgaagtggaacagtaggaggaggaacgggttggacaggggatggaaaatcaggatcgatggtggcttcttcctggggcggacgggatctggaagttggagctcgacgagtagccatggacgggttgatgttttgcgcggaagtggagtcgggattggactccgaggtagtgttctctgctgtgggcggcggaagaccgtcttgcgagcgagtggagggccttgccattgaagcttgaacaaggtcttcgtctgataccatatgaggaggagcaacctgaatcggtttgcagatagaaaagagaagaactctgttttatttgaaatgttctgaaatgttcaatacaataaggaaaagatacagcaaggtttatatacccaataataagggtgaaatagtcagaataactaatcaagaattagttataactaatatagcctaaataaccacttaacaaccttaactaatctcctaatcttaatattgaatgaggtaggctattcaataatttcacaacttccttcacaccactgtgtagaagctttgatactgcagtgaaagcaaatgctagagctatgcccatagccatctctctcatattctaattaaccaaacagagttatttcattttgtttttttgttgctatttagttgcccttagttgtttttcattttccctgttttattgggtttttttcataattgtacaacaaaaataacataattataaaaaaatgtgcaaaaaaaaaaatatttttaaaacttatacattttgaa

SEQ ID NO: 241542 - DNA, 821 bp, Cannabis indica
ttaatacatgagggatggtttttttttcttacaatgaataaaataagaaaccacattaattttataattacaatgtgaaaaatagaaaacaagaatgtgttgccattattctctgactcaatcccgtgattataaggattgtcttcacatctggtcacaacgagattgatctctagaatcgccatctctcatacttcgcttgacatagacatatccatacttggttggacatcttctcaaaaatcatgctcggacgcctgagtgttacagatgctagttagtcttttgtaagcttctagggatatgttcctccacccaggtattgaaaatatgggacacgtgtcattcatttctattggcacgtcaaggtgcaaaaaataggataacgcgggaccttcctagttgcacgtggacctcactcagcctggagtcttgtctagatgagtaacgcgtgtcgtaagtgtcaaatgacaaaccgacgtgaccctgactaggggtctctttaatttctacccatttaatgctaatggatagttttacctcgaatcacggttcgatgcttgtgcatgtttggcggttacactccctgtaatgagtacataatgtacactttggggggggggggaattagagaaatttgaattttcaaaatgattaattctcttcttggattgcttataaataagagtaggaacctttagtgatcctttttagccattttaactcttgaaaaaccaaagcaaaaatttccagacgagttttctctcaaattctttgaaggatacataggaaaaatcttgacgatatcattcgaggagaac

SEQ ID NO: 241543 - DNA, 652 bp, Cannabis indica
atttggcatcacaagttgaataggaaattcagtgttttcgtttcatttcaaatcaattgactttaatttgaattcacatcattagttcaaattccctaaaactttgtttactagttttgtggagagtttcagaaaaggcaccaaacaagataaaaattaaaatatataaatatatatatacataaaaattatatagtcatacgttcaaaacctactctggcttaagagggcagcacaaatggtcgggcttgcaatttactcctacaaggttaaggttgaagaccctcctaagcaactacatagcaattgctatagttttctgatctccaaataaatatactacagttacacaagcgagaagccctaatttctgggtgaaaaaagaaggcctacgctaggagaatttactattctaaaattgattaaaatcttattctaaaattttccatagctagcatgacagtatcatatttgaccaagaatataatgagggaaaccattgtccatatactaaacccgctaaacccacactgaaagattctgatctgagacagtagtaaactacactatggaaagaacactgcttcaatcatacaaaaaggcccgaattgttccctttcaaggtgaaaaaaaaaagtaatctcttcagcaa

SEQ ID NO: 241544 - DNA, 678 bp, Cannabis indica
tgagagaagtaaaagtgaaaaaagggtttccccacaaaactcacttatgtacatgttggcccccttttttctcacttactttaccaactcttcataaaggcacataaaggagttatttctctattgcaataagataaaacaatcaagaaaaaatgcttcaacacacaccactttttatttagcaaaagtaactacagtaccgataacatcaatcttgttggtaaagtccatatccatacagatgtccgcacagggatttgggaggcaaatgttatcccaatttttatcctcatgatgtggcatacttacgtggaaagttactgtgccatgtggaaatacaactcattaaaaggagggtcaagtgagcattcgagccaacgaagaccctaacacttaaacgggatcaaatgatagtccagctcattctcaagagttggccaaccacccctggccaatcctatggctggctacgctaggaaatggcatcatggccagccagcctggccagcacaaggccatggccagccaaggaatacactgtaggtcccacatgactctcctactcgtgcacaataagaatgggctacgagttgggcaccaaaagcccaacagataggctgagacgtatctagaatctaagggaatttttggtcttttgtaaatatctagctaactatc

SEQ ID NO: 241545 - DNA, 795 bp, Cannabis indica
aaaaaattgcccaactcgggatacgacagatataaaagggatgtctctcaggcaaatgtgtatcccttcctcacaagattggctcgtaacaccattgtctcatcccttcctaataccactcatcgccgaaactatatctctagccaacttcctctcccttccccaataactatttagtattaaaaaataaaattgcttattataaataaattttttccctttttttcttcttttttgtttttctcttttctcttacaattttttccatgtaacttaatttccactcgcactcccattgtctttcgttctttttctcgcacacctccgacaagtcacctctagtcacctttaactcaaacaaacctcaaaattgacttcccgaccttacaaacctaacccttcagcctccctcaaagccccgagacccaacccttctttgaagtttttctttcccacctcgacctcgtcggattcgattctccctcttccgtaactcttcgttggtaccactgcagttggaggagtttgctaggttttctggttcgtccctggctttgacgtggtctggtgggttcattgcagaagaagaagaaggaacaggggaaggggatatatgatggttcctgtcgcagagcacttaacagagccttttgaatggaaggggtaaatagctaatataagagaggtttggaaggtttcaccactaaaaatttaatttatgtggttaagtgtcaccaatcataaagttaagacattgttgccactaatataatcaactaaaaatttgtcacgtgt

SEQ ID NO: 241546 - DNA, 900 bp, Cannabis indica
taatagtgtgatatattatttttatgtgggtgatatataaagaacgaaaaataaagtatattacatatattcatattcaactatattactttatagtgtgatatattatttttatgtggagtggtatataaagaacgaaagacaaagtatattacagtatattcatattcgagtatattactttaataatgtggtatattatttttatgttgggtggtatatgaagaacgaaagaggaaaaaatgtggaatagtagtttaagtttgagttatggctatattcattggagtatttttttttattattattttctatggtatatgaaaaagaaaaggaaaaaaaattgtagaatattaaactaaatatttgatattattatttccttttgatgctatattaatttttaaatgtgattaggtcaaaaaaaatgtgatatatctactttgaatataagagtggtatatatttttatatgaataaaaaataaaaataaaaaaaatggtatatgtcttttatgaatattgagggaaagaataaaaaataaacttattaattaagtggtatattaatttaaaagattgctatatctattttatgtaatttagtatatcatgaaggaaataaaaaaattaagtagcattacttatattagttttgtggtatattcatattgttgtaaggtatatcacttttatgtgatataatatatattgagtgaaataaaaaaaaacgtacaaatattagtttaagtttgagatatatatatatatgttatatctgaaatttagcagtatttcagaaagtgacacacgtcaatctcgttgaatatgaaccaacagatttaatgataattatgtcattaaatgaaaaatagaataactcattaaatataaaataaat

SEQ ID NO: 241547 - DNA, 571 bp, Cannabis indica
aggtctatctatggacttaagcatgctttttgttcttagaatattaagtttgaagaaataaataagccatatgtttcaaacaaaatattgatgaaccttgtgtttaccaattaaagaaaattttaacagtggtactcctagccctttatgtagatgatatcttactcatcaaaatcaatattaagaaattataaaaatgtaaaggaatggttgagcactcaatttcacatgaaggatttgggtaaagcaagttatgtttttatcaccaaaattataagagagagaaataacaaactcttagctctctcaagcaacttacattgataagatacttgagtgatgaaatccaagaaaatacggttagataaactgatgttagttaagtcttgttggttttggttgttatactttttgctatagcaagtgttcattctttagtttgtttctctttcttgaactgtatatatactgagctagagctccttttctattcaatgaaaatcatttccttcaatatgttttacactcatataatggtatcagagtaaaaaaaatttctctctctctctct

SEQ ID NO: 241548 - DNA, 1075 bp, Cannabis indica
acattaagccggagcatagaggctggcagtggaggcaaggatggaaaatggtgggctgtggatgttgtagtattgattcttgtttgggcagtcctgtattcctgcaaataactactgacagaattctccaaattgaaatcagtgaaactgtattgattaaaaatagctttgttcctattgttccaaatggcccaaagtaggcccaaaaaagtagaaaaaacagatttatcaagacaatcaaaacccctaagcataaattctttgatatcacagtttctattagtaagataaaattggcgaaaagaggagtttttccatattttacctgctctggaacattgaatgagagagtgagaattggaatcgagttgggagtgacaaatggaacaatgaggtgagggagtagaatggcggtgaaaaagattaagactggtagggaggatgtggtggaatgctttccaaacgaatgtttaatttttggaggaatgttagaagaccagacagtggtccaccaacgtttaaaggtgaaaggatcagaagggccaggagtggagcagctggagttggctaagtggtaagcagagttaacggtgaaacaaccagaggggtgatgtttccagatgaggctatctgggctgtgaggatcaataggcactgagagaatggcagaacacatctcctcatcaaaataagctcttagtttgtctaaatcccaatgtcgattatcagtaaggaaaaaggaaactgtgtgagcgggagggaggatcccaggtttgaaaaaaactttatcatgagagggaagccaattggattcagaaatattgatggaagtgccatccccaattttccaactgaggcctttaagaaggagttcccgtccccagagaatactacgccaacagaatgagggcgagtgaccaatggcagcatggagaaaatcatttcgcttaaagtacttggcttggaagagccgagcaaccaaggagtccggagaggtgaagatgcgccaggcttgcttagcgagcatggcttgattatggtaaattatgttacgaaaacccaggcccccgaaaaa

SEQ ID NO: 241549 - DNA, 841 bp, Cannabis indica
aaattatatgtaaaagtcctacacaactgcggtaaattttgcattaaattaagaaaacctaattgctacacaaactatacgggtactttcgtccaatatcaaaatctatatctattttactatatcataatcaacactcacttttcaaattttgtattaaaatcataaataaataattggcgatcaagaaattataagaattaagcacagataaaatagatgcacataaaaaattggaaaagaactgaaattgcattaaaccataaagaaatatcaaacaatctccattaatactcaaattaaaagtttagctactcattgtagttgtgaacaattgaattaaactaaatagaaatatgaaattaaaagaagaaaatatatcgtcgatgaacaatggtggtagtctctccagtcgctttctgcctccaattttatatcctccaagtctcaaaattcaaaagttccccatatctctcaaaattagggttcaaaaccctttttagtgccaaaaaaaaccttagcaggttgtgacattgcttagtgaatgtcgcggctcgtgtctttgatagtgcgcaaatctaggtcttttgaagtgtagtgggccgcgacattgcccattgaatgtcacgacccgggtggccaagtatgggcagggaatactcttcacaccaatgccttgacactaacttcttaatgtagaggcctgtaacatctccgcttcaagcttttattgggcccttacactcacagaatgatggttcttatacacgagtacgtcactctatggtacgaaataaaaaggtttttataatttattggttactgtaggtatttattataa

SEQ ID NO: 241550 - DNA, 588 bp, Cannabis indica
tgagtaaacacttaataaaaaaatataaaaaaaaaaaattatatcttttatatcaaaaatatatttatataaaaaatatttaagtcaaacttaatttttttttattattattacttccagccgatggaataactctaacacttataatgaaaaaatgagaaatttttaagggactaattcaaaaatatacaagaaaaatattacaaaatacggttgtacgaaattttaaacatttttaattatcgcttttaagattttatttacagaacatgtttattacaattcatacggtttttttaatattttcatgttatactcttattattttattgttggctttttgttatttatatattacttttatgtttgtttgtatgttattttcatattacttacatataattttttttgttgtttcactgtaaaaaaataatatatcaacataaattgataaaaagtgtaattttttaccaaacattgggtatttttttttttttacatagttaaaaaattaagcataaaactcaaattatcataataataataataccccttaatatattaagaaattgacatgtaaataactgc

SEQ ID NO: 241551 - DNA, 1181 bp, Cannabis indica
ttatatataataaaaactaaaaagtaaaaaaaaaatctaaagtcgagttggtcgggttattcgatttaattgggcgggttggacctattttcaacctgcccaattaacagatttggtggtttataattttttcgggttatttcactttgtaatttttatcggtttttttggtttggtttgggcgggttattcggtttgggcgttttacaaatttttttgtacaaccgtagcgcctaggttgacaatttttcaatctaggcgccttccaagtattagatcgatgatctgacttttacatcttcttcgtcttcatcaaaaatggtgaaatatgtacattcggggaagaaacaacacttcttgagtgccaaaagcaaggcccagtgcctaggttgacacctggggctaactaaatgcctaggttgacattttgtcaacttaggccaattcaaatgatgtcgtttgagaactcttctaagaatcttctttgtttttagaaaaaattaagattcaactatttttgaagaccaaacggaacttccaaagggccataactgggacccaacgcctaggttaacatattgtcaacctgggttgtttctaatcaagttctcaaaaaagtgtttcgagtatttttttcgtcatcaaacataatgaagattcaagcaatcttggggaaaaaaccacaaaccacaaacccgagcccctagaaataggacccaacgcccaggtaggtgttaggcctaatgcccaggttgacaatcaacctggtgcgttagttttgattgctcaaataccaaatttgattcgaccaataaatctagaatggtcaaaaacagggtaagagacctcatcctcaagttcgagaactttggaaatatcaaattgagatcttgagagctcaagaatgagcacctagtgcctaggttgacaaatagtctggtgcgctaggttctgcttatctaattctgattccgttttgaccgtccttctagtttttacaataaataagattcatgaagtcagagaattcagattcataacttcgcatttctcatttccaacatgggaaaatcactcaaaaataaaaagttttgagtctctcatttctgcagaacaacaatatctctgagaattggtgaccagctgtgccagaacacaaaaaacagactaagtgatgtcaa

SEQ ID NO: 241552 - DNA, 1524 bp, Cannabis indica
aggggtacgaggagatgtatgttgcgaaattttccctactgccctgtcggaagccgctcagcaatggtatttcgagtttgctcctataaagtttagttcaaggaaaaccttctcttcagaattccatgcacaattctcctcctcacgccaacttccatttcatctaggagacttggtcaatgttaagcaaagaccagccaagcctctctgggcatatatcagtagattcatgatggaggcgacctaagtttcacgggtaactgaagattgaaagttatccgttatactgggggcattgaagtccttggctagctttggaaggatataaggaagaacgggccggtagactcaatgagtaattttcttgaccgtgtagaaggcttcatcaagctcgaagaagccattcaacgagcgcaaggtgagaaaaagcctggcaagtcaaaggctccttctactggaacatctgcccaacttccccattacccaaataattcaagttcaagtggtaaactttccaacaacaaccacatggaagggaatgggaagaaaggaaagttcactggcaaatttgaacaagctccctaggaaaatcaaggaaagtacactgcattcactattttgactgaaggtatagaaactgtgtacagggcaactcagtcactggccccatataggaagcacggacccatgaagaaagatgtcaacaagaggcatatgacaaagttttcggttccatggagactacggcaacgacactaatgaatgcaataacttgacatgggaagttgaattcctgataaggaaaaacaacgcacacctgcaaaagtatgtcaagaccgatcagggtcagaggaacgacaataaccaggatttactacctccaccagtagatgagcatttgcaagttattgttggaggcccgcacattgctggagatttgggcaaagctcgggagaggtatgcccgaatagcacaacacgagcaagaagaagttatcctggccgtggaagaaaggaagccaaaagttccacgaacaggagagccgaccataaccttcaacgatggagatgctgtcaaaattaaattttcgcacaacaacccgctagtcgtggaagtccagatagcaaataaaattgtggccagaaccatgatcgataatggagcctcttccaatatcttgttcaaaattgcttatgaaaagatgggactccaactcaaggatctaacccaatgcctcaagcctgtctatggtgtctccgctctaggagtcgcacctataggataaatttttctacccctcactggttgacgagcaccgacgagcatgactgtcatggcacaatttatgatattagatgttccttcaacttttaacgtaatgctaggtcggccgaccttgtacgacctaaaggctgtcacatcaatatttcactcatgcctgaagatgaatggggtagggtgtttaagaggaaaccaacagtctgctcgggaatgttataatcttgtagtggccgaggctaagaa

SEQ ID NO: 241553 - DNA, 1020 bp, Cannabis indica
cggtcctagtcttgttctagggtcctggttcggcgattcttgttcagattctaattttgggttcctggtctaggtctgggctcgggtttggttcttcgtctaagttctggtactagtctgagtcccagatcttgaaactgactactggtctgttccaggccaagttatccaaatcccgagtcaagatctagatcactgtcacgggtctcggtcttgttctagttcaggtcctaggtcttatttctgagttttggttcgggatcgatactggggtgctgttctaggtaccgaccctggttctatgtccttagtctggttccatgtttggctccgaattcaggttcgggttcgggtcccgattcctagatttggttgggatctaggtgcggctcctaattcgggtctaggtctgatttggagttcgggtcctggtccggttacggttctagatctatgtccaatttcaattatgattccaagtcctagtcctagttctagtcccggtcaactttcggtattggttccaatttcgggtcacagggtaagagttcgggtccacttttgtgttttggactgggttaaggtctgggtgtgggtctgtgtccttgtcagggtttggctccagggctgggtcccaaatccatacaccgactgcgggttttgtccaagccctgggtcaaaatccggatcccaatctcgggtcccagtcttgttcgatttctggtgcagagtcacgagctaggtcctatgttcaagttaaggtcttggtcgggtactaggtcccagtcctagttctgtttcccatgtccctatcctgattctaggtctaggtcccggttattgtgtgggtttgggtttttgtctaggttcgggtttgagtcctagtctctgttcgtgtgtctgagttttgatctgggttcggttttgtgtttaggtcctgatccgggtcctagtcctagttcggtgctagttccatttgcgattctgagttcgagtttgggtttgagttcgggtcggagt

SEQ ID NO: 241554 - DNA, 720 bp, Cannabis indica
cgaagttggaaagagatcaaaaattcatctggaattttcagctgcgaggattcaaaaacctttccgaatttctcacaaaagtttccatctataattggtttgttctccagccaaattccattatcatttttgatagcccatatgaaattacgtttcctacgaatcaccatagaggcatgaaaaaacttagagttcctatcacctttggatagccacaattccctcgattgtcgtctccaaatagagttttgtctggattcaatttcctcaatctcaagcataatagaagcttccattttagtattctcttgggaaggaggattcttttggatttttgccagcactttttctaacatgttcaacttgattttgcataatccaaagtacttaacattccacttttttagagcttcaacaatatagttgagctttttggaaaggatataactatgataaccaaacaccgctttggcccaagcctcattaatcactttgtaacaagtatcatctcaggcattcaaaaaatggaaagaaattcggattctctctctgtccctcatcgcatccaacacaattgtagagtgatgaaagtgacgagttgcaagcgtcttaatccccaccttcttgaattgaatcactcagtcagcagagcccaaagccctgtcaagcttttctctaataagagattgccatttatgaccattcatccaagtgaaaaaa

SEQ ID NO: 241555 - DNA, 1081 bp, Cannabis indica
acaacaaaatgttacttgtgactaaaacataatatttagttacaatttgttactaatttagttttagtcacaacttgtaactaaaaaacatttagtcacaataaattgtaatttttgtgactaatacttttatctacggatcttttagtcacaacataggaatcatgatttataattagtcacaattttttcacttttagtcacaatttacaaacatttgatgttctttagcattccctcaactgtgttttagtgaaaggtgttcttattcttctccttgatttggtagcggaggaggcctttgtcatctccttagctttagagagtaggaggccttcgacatccccttgactttgcagcaaaggaggccttcaacatccccttagctttatagcggagaaggtcttcaaaatcccctcaactttgtagtagaggaggtgttcatcatctccttagctttacagtagaggaggtcctcttgacgactatcaacaatgtgttgaagtagtcgctggctattctttagtcaattgaggatgtgaaaaactcctaaattattatacctaagattgggtgatgtctactccatctcgggtgcatcttagagtgattgtaggtgcagttgccattttctctttggtcttaaccttagaggtcttcattgttccttctattttactcacaaataagaggccttctttgtccctttggttgtctcgatagtgaaggagttcttctacttcccctcgactgctaatacagtagaggaggtctttgtcatcctcttgactattataacaatgggagaggtattcttggtgattgtcaacaatgcattgtaacattcacatgatacactttggttgccaaggagatgattgatatcagtcgttgtgaaaaacttgatagacaagtggtagataggggagatggttcagaggtggttgggggttgacttttggtgtcgatcactataaaggtagtcatagtgatgtttgccattgggaagttccgactgtgagtggtaatatgattttacaacagggtgagatgttaggtcacctaaaaccatacatgagct

SEQ ID NO: 241556 - DNA, 1632 bp, Cannabis indica
ttttcacaataattctgcaagatgatttataatcactaaaaacaatcgacagtttccttaaatatttatatttttatggttcatccaaaacatgatcaaatgtctcattcattggggctttgatcgaagcttggtgaattaatgccgttatatttaatttaagagtattgttattgagcactaatagatatattatcatgtaattagatagtgatacttcccaaaatttattacattaggagtatatgaaactcgatacttaattggactactaatgatattgatacgtagaaaaatactaggcaccactaataccttttagcatttctcttaatttaatgcacaaatatttggaaaggaaccaaaaaacaaaatgagattctataataaaaggttctctttaacaggttctctttaacaaaatgaaatttatactaatttctattattgttccaattttactcttaacatttcaaaaggttctctatctctttaacagccaatttggtacaaatgtattgtgagaaaaaaaaattatagctatactgtaaagagaaagtagctataggaaaagaagttagttgaatattagataaattatagattttaaaacattatgaattattaagattatattataatgataataatattacaatctagttcattatgatcacaaatatataaaagtttatgttatgttaaaattttattttttattttttattttttttttgtctaaagtgcaaatttatatccatttgataaaattaattaatagtatttttcaattttattttttatcacatttatgaaaaataaaaacttaaatataaaagaaactctagtttagtgttgtttgttaacataaaaaatataaatataaaatatttttttaaagcaaaaaagtgttagatctctttgacaatttaattgtcaaaatatattttaatacaatttaaatattatgttaaatgtttaatgccttgatttgattttatatggctaatcttaattgggttgttctcaaaagaaaggaaatattcattttatggaacactattttcgacacgttgtataaaggaaaacaaaccctgaaccccgcttctcaagataaggcaatgtcacctaccacaaggggcatccatgtaggcatttagatccggcgaagttgtttccaatgtttttgttagggtttatgctttgaaaagaatgtatagatattttttgttacaaatagtagttaaaatttttgatatataattcaatgttgaattattaatattttatatttaataatttatatataaataatatcaaaaattccttattcatatataaggctatgacttatattgtacggagaattaagatcattgatcataaataaaatagttagcaacatattaaagttacggaatctttaatcaacggttactagtacggtttattgatgcccattattcggtgcaagcattctcaattaagatcgctaatgtagcaagacatctcagtgaaggtgctatatataatagaaactacatatgataagcaccaatatgtaattaagttatctttattaaattagttgtttactataaatacctaattcatatcacaacgatgatcaat

SEQ ID NO: 241557 - DNA, 1153 bp, Cannabis indica
tctctctctctcctctctctctctctctatctcttatacatgcccaaagggctttctctccctctctctctcaagcctccaagtctctatctctctctcattaaagacctgcctactgattcatacattgtaaccttaagagagctatataagatcctacctatagtgatatgaatatattatctctatgtattagtacaattaaaaggagagttggtcattacccgctaactaagagggttgaacctctatacacaacccttgttttcttttactttatagttctaattgtgtaatacgtggtaaatatcagattaatacgaccccactgtcggttggccacttttcgaggtcaacagtttggtgttttcattgaaagtgagttgatatcatatttgatcaaacactatagttaacaagagaagaactccagttgcaccatctgcatcttcgggtcttcctcaagaccctcagactatagatcctgatgtaaatgttccagccatgactagaactcccatgaacagtgcaaatgtggtcaatcctgccatctcgacaggcaccacgaatttggccactatagctggccaggatggcacaaatatctcgatggatctgagcaatcgacccttgcctccaagggaggaccctctacaagcgcctcccactgaaggaaggatccttggggaacattccccaaggacaacagccgaaccacatcctcgatattatgcaggagagacaggactaggaattggcaagccccatgtagacttgggagaagatctcaagttagccagatttatagaggccatctgctaagctgacctaattgaagaaccacgcgttattgattgcgatgtattcgctcagcagagatgcaaattcctaagatggatggatgaccaagagtacatcttttgatctcaccagacaaagttggatcatcgtaacgaagaagccaacgacctgataaggaagttcaattagagaaccaatagaagaggccaggatctcatcagagatccactccaaggaagactagttgatagatcagggagggtctatcaacaagctgaccaaaattactccttaaaagtagatatttttgtagcattttaatgggctgtcaaggcccaactcgtagcttggc

SEQ ID NO: 241558 - DNA, 784 bp, Cannabis indica
ttcccaggtccctatcctgattctagatacaggtcctggttctagtttggatttgggtcccggtctaggttcggggtgggtcgtagtcccagtttgggtttgggtctcagtttgggtttttatttgggtttgggttcaagtcttggtccttgtcctggtcctagtcctaaacctagtccagttccagttctagttgcgattcaaagttcgagtttgggttagagttcgagtcttggttcgagtttgggtttggattcggatctcggtctaggtgtagatcgggctctgggtgtgggttagggtcctgggtctgggtctgggtcaaggtttgggtctgagtcccaggtttcgatctcgatctgagtctgggtttagttttgggtgtaaatcctgggttctgatcccagtctgagttcgaggttgggtccgggtgtaggtctaggtttgggtttgattctaggtctgggtctgagtttaagtctcgggttcgggttcgggttcgggttttgtcctattatgggttcgtgtgcgggttcttatcctagtttgggtccagggtcgtgttcgggtcccgagtcttgcttttagtccagttcctagtctgggttcaggtctaggtctcggtcccagtctttgtctgggttcaagtttgggtccttatcagggtccggatcctggtctcggtcgcaggtctaggtcccggtgagggtttaggattaggtcaggtctaggtcccggtctaggttcgggtcccaagtctcatgtcccaatcctagtcaagatc

SEQ ID NO: 241559 - DNA, 878 bp, Cannabis indica
ctccttagatctgtctctttctctctcactactctcggctcaaagtcaatgagccacctccagtgacactcgaccaaaatagagatcactaggaccctccctaactatttaaaccccattgccttagacaacaatgacggcgatgcaaacgaattcgattcttgttcgagatcgtcggaagcgacttgtttcggatgatcgaaatttgtaggaacgatgatcgtagacatttttttttcttttaggttttgtttgattttgtgggatttggatctaatattgtgacagatatggtgtgtatagaattagtttttaatttttcagatctggtttttggtagtggttgttgcagtggctgcgatggtggtggtgtggttgtggtgggggtggtttcaatgttggtggtgtaatggtggttgtgtaatggtgaggtggtttcggtgatggtggtgtaatgttggtggtgtaaatggtggttgggtttgccccacttacatctcgtcgatcccagcagtacagggctcttactgttccagagcttactcaacagatgagggattccaaaaacatgatgtgtgctgctgatcctcgacatgggcgatacttgactgcctcggccatgttctgtggcaagatgagtaccaaaggggttgatgaacagatgattaatgtacggaacaagaattcatcatactttgttgagtggatcccgaacaatgtcaagcctactgtttgtgatattccaccttctgatttaaagatggcttctacattcattagaaactccacttcaatccaagagatgttcattggtggtctaatgatggtggtgtaatgaagatagaggaagaagaagaagaagaaagagggcggaagag

SEQ ID NO: 241560 - DNA, 841 bp, Cannabis indica
aaaattgtggcgcaacaaatcttcacaatgtataaaatattaattcgctgattatttgactaataataattgcttacagaaaataataatataaataaatataaagacaattatgacttaatgtaaaactaaaggaaaaaaaaatataacaataatatagtaaagtataaaattaattattaataaaatcacttaattaatggacttaataaatttcaataaatatcgtttcaaacaccaaattaaaatatatttataaactacattatatccatataaattaataaataattaataagattatcaaatctaataaaacccggatgtctcaggttacttacaaaattcacatgtaattactttacgcaaaactagaatcaaaattaacaaactatacaaaaagtataggtaaaagtgccaggttacaatttgaagcaaaaataaagtctaaaattcaacaactatgttactttttttcaaataaacacgttaatttgagcaaaaatacaatcaaaactcaacaaactataccaaaatcaaaagtaaaagtaccacgttacttcctaaagcaaaaacaaaatttaaaattcaacaactaggttacttttcaaattaacacgttactcaactaggtatattactaatacagatgtcatgatttattttgtaaatgaacagattactttcttcataaaactctgtcataactcaatacattaaacaaaattcagtttgcatggtagtagattatttgcacaaagtagcaaagtccaaatttgaacatttattatctttgaaaaattgtccttctactaatatttgcaacttgtgagtttcaatg

SEQ ID NO: 241561 - DNA, 2921 bp, Cannabis indica
gcatgtataccaccttctagcgagataaatgcctcgctgtccgttatcttggctcgtcatactatctatacttagtttgtacatcgtacaatatacgctaagtatttttaatattgtcgctttctctttcacgcagagaggttaaggcctcgtcatgaacgtgtgcgcccacatggtttctcgtcaatatataagttagtagttcgtacgtttctgtctcgcagaaggctattcagccagccgagttataaacataccctgcgaattatatttgcaacgagttgttacatgccaagcatacttgtcgtttccatgtttgaattcttcctagctcgacacgtgtcctcctctgatgtgcttactgaacttcgggtataacaattgccccataaaaagttctttttaataagaaagagctttttaatgattacaaagggtatttttgtcatgctcctctatttttgaaaagacgtatttcctctaattttggcggttgtgcggttttgaggtacatcagaattaaatgaccatcttttctactttagcttcgaatcatgtccattggatcaaatcttttttgaaatcgttatcatgggtataaaataatgaaaaggaaccactattgcatcatttcagaaagtttgagaaaaacccttaaacttcttcgtcaaggatcaccattaaatccgtctaaagacttgcatgccatcattatccttgacctttttcttgccagtttcctccgacttcattttctcaaagtgatccttgcttcattcgaaagtttgcagatggaattcccaggcattgccccaagccctagcttcaaacagtaagttattatcttctttctcatgtttattacatagtgtgaaccagttacttgattcgttatcatcttatctggttttagtagctttttagggttaaagttgttcatactaggacttaggcaacatgtaggttgttttaagatctccaactcattaccttctggtttgataaaattctttccagggattgggactgctttttactggtatcaatgtcccactctagtttaggaatttatcgtccagaaattttagagtttgagttccctacagaattggccatcccatacaaacccaatccctcaaaacccacctctaaattagagctaaacgatgctagggctagggaacacatagtgagaacccaacaggaagatttctctagtcgctacaggcacttcttgcaagaaatatgcaaaggcaaacgccaattcttgcgagaagcggcctgaccagattcacccagtgtgtcctttattcctgtggtaaagcctttatttttacccaatgtcacaatttcttttgaaccaggtgacttggatttcgaaatcacgcctcccaaaccacgtacgtctaaaactcctcaggatcccaacgtcaccttcgaggctgagttaataggatcgaaggtgcgatctatctcaagctatacaggcgatatgctgaagacttgtggaattgcacttgggcaatcatgccaggttaggtcagtacgagagggtgaattcagttgctactcccctgcacactttgccaatagtaacccacgaaccagtggcgagactagtactagtggttcaactagtatgggcgcttggagcctttagcatatttgtgtaagggccatcctccctcttctggactacttaaaagacttcataaattatattggggtttccccattccagctgactcccatcgcctacaaggttcttgctagtttgaaagtattgtacaaaattttgaattggggttgtcccacacccgtagagattgcatatctttacacagttaaggctgttccatcaaggaagaacgctgcagagggatttttctatcttggtactcacactagcgagccaaaaattattgtagacttgccaaataaggtgtctttcaaagacaacttcttttggacatctggtctctcccccattggcacaaccacgttttgtaaactccgtaagtgattgttctcttcttacttatttacatcattcttcctttttcaagtacttgactaatgttttgtttgttctagcagctcttcagacgagacctactcctacccccgagatagttagtaggcacaagtgtctgatgactctcccttacggtctttgatcatgcaaattccttttgaacgaactaagcttgcgatcgatgggccttctcactgacaaagaatacacttgtgattacaagattcccaagtatacttcttggcagcaaataattgttccacccgaggatcaggtctgggaccgcttggcccaagcacaataccttcaaagcactgcccctcgcgaattcggtgaaggagcatcccgaggtaatcaatgtggctggtcacctactgtacttagggctgagcgtaatatattagttaccttccaagactcccgttttaatttttatacttggaatcccattctcgtggaccttattgctcataagtttgacaatcggtatcctagattccacgtccagattaattatcacgagtcattttacggtatagccgagcaatacagtactatggaagatagggcaggtcacatagatgcgagctgggatctagaaccagtcaagcattttgatatattcaaaattacaggctgtagggattttagcgggtattatggtccttctacccctttgtctagtgatagctcgccttctactgatttcggtaaggcccttaggtggaaaattgtactcctcccctttttaatcggctttcataatgattgtaacgccttgtcttatttcgcagacatgggttatgaagacatccttgaccataaggggaagaaaatgacacccaaccctggagtcactaccactgtcgaagtggttcctcccaag

SEQ ID NO: 241562 - DNA, 669 bp, Cannabis indica
tgaagaagttcttgaagtcgaacctaatgaattctcggaggatgaagatgacattcatgctttaagaactgggaaactggaccaggaagacttttttcgacctccattatcacctagatcgcctctacaccagatcaaactacaagaggaaattcaagctgattttgatttcttccttttagcaaatcggaggtgtgccacctcaattgctcaaggtaattctaatactccccttgttttgcgatctggcagtgtggttagaaatctggaaaattcttttaagaattctgagcaggatactaaagcaaaattaaagatcacaatggaggacatcaaagatgaggtggaatttcggagacattccatagtttgctatgtgttaggagccatcttcctttatcagtgatagagggctttattcgaagggtttggaagggagaagttgatatagtgggaatgctcacttatggagtctttctagtcagatttggtagagagtttgtgatagctattcaatggcgatggacctcaaagtctgtgctgtagtaggatgggattagaaggagcttaacgtaggtggctatggctaagaaccaccaaatccctaaaatggggttcttttggttgctctgttcttctatggagctaaagtattgagaaaatgtgtac

SEQ ID NO: 241563 - DNA, 1108 bp, Cannabis indica
ctcagactttcactattgttgttaatggatttgtgtatcactcattcccaggtacaattccctgaacgtagtgcaaccttcagtccttctgaagtagagaaggaactacttcttacaatccctactgcccggcattgctcctcaaaacgacgctagttgttcagcttttagaactaacctaaatagaagggaaaacctagtgtgacaagctgactgggattgaatagctatcctttctaactacggggcaaagaactttttccaccaagccatatgtcggaagactaaacgggattgaaattatgggaacactgcatgagacagtatgattgcgggatcacctcttggtacgtctaagatggtattttttatcctattttcgagcctatctcgctagttcattcaagcgtatatacaagcttggacaattgtccttccttgtacattttgttcatccaaccaccacccatgcttcagttcaaggaaaccaaataaagaaagccaatcgaaaatgattttatcactacgaatcaaaacatgttgccccattgactaagaagggggcgggcgcagtagctacatggaccccttcctttctgttgttgccagcggtttcccaggctgagctggaattttttattataaagggcaggaaaagcccgaaggctgctatcccaataggtcagcgaccagaacgaggagaggacccagtaaactttcctattttcaagggataatttagtcatttgaacattattatttaaatatgtaaataacaactttattttacctatttctaaggatattaggcatataagctctactatataaagagcattagcctatctttaaaatcctaagtcatttaagcctccaagctccctaagctctcaactctaagtctgaaatcctaatcttctcttttccctctctactacaagcccaaagggctctttccctctctctcgcatgtctctaaggctctagctctctcgttagagacttacctactgattcatacattgtaatcttaagagagctacttcagatcccatcactatagtgatctgagtagtattatctctgggtattaatacaccaaaaagag

SEQ ID NO: 241564 - DNA, 880 bp, Cannabis indica
gaaaaaaatcctaattagtctttaatatatttatatatatatttttaatagttaacacaaatcactcaaaaggatatcacgtaaactatttgaaatcatagaatccgaatagccacaacaatcatttaatcatgaagctctagccaaatagtgagcaacacgattaacagtttacttgacaaaaattaaaaatacattattcaaactagaaagaacatgtgtgcactcatcaatccagaacctaaaaataaaagccatatctaatgaacttcgaatagcttggatcgtgaccaaactgtctgactctaccaccacatcatgccgtcctgtttctttcaaccaactcaagaccttcttaaccctgatagcttcagcgagaacatgatcaccacccttattcgacttactgttcaaccataaaaacctaaccagaagcgtcccgcgccacccaaccatacccatacttatctagattgctaaagatagtttcatcaacattaattttaatcatattaccaactggtgcaatgctcatgcccttccccttcttgtaaaaagaacaaagaagaaccaaattttttatcttgagaacacgtatattgatcaaaactacccttagcaaattgtggtgaatgctcaccctcaaaacaggttgttatagcagtaacaatattcaagaatgcacaaacaaaactaaaaccaatcataaaatcaaaagtagaacttaattgaaattagacaaagaaaacttagctcgagaatgaatgaatcatggatcttttttgcttgaatagtcagtagtacacaattgaatatgtccaagaataaaactcaacacagtgaataattacaaagaaatgtctcacattgatggaaatta

SEQ ID NO: 241565 - DNA, 1140 bp, Cannabis indica
  modified_base (1120)..(1120): a, c, t, g, unknown or other
agaacacagcggacagagtatcggagaagaagactgaacgcgataccgtcaccagagaagaagactaggatcggacagggaaagtatagctttcccgctctgataccataatgcggaagagagaacagaaggaaagagatttattaatctgaaagttcagtttacaaatgagaacaggggatatatatatatagtcgaccataatgattaacagtaataaacaaccaccgacttagacaataacaaactactgacatgtaactaatattctaactaacaataactgttaagctagaaaagaggaaccgtagttagacaattaaacagaggacttaataggattagaataaaaaaaacaatccaacaaattggcctcttgattcttaaatcgtttgacaaagaaaactaaaataaaattagatgaaaaacattgcagcatcacaattaactttaagaatacatacattcaatttttttctactactcaaaagacataacaatagaaataattacatcaagttcatttaaccccttcacttgaacactcaactatagtgtaaggtgtgtaaactgcaccactaacaaccttttcagcctttaagaactcgttattgttaggatttataccttgaaaagcctgtaaagatatttttattattaaataaagaattaaacatttgatatatgtgtgaatgttaaattatcaatatttattattaaataatttatgttaaatatccgaaaattctttattcatatatgaggctgtgacttgcagggttccccgaatgttctattttctcaattctcgtatatttcagtgctgtaattggatgtttccctattttcctgagttagtgtaatccatatagagtataacagaacctagagttgtgggttcaagtttcccagattaggattttgatcatgtcatttacccagtttcattatgtgattaaggcatccatctagcgcaagactttccgttcaggtcggccagcacaactgaaaccggaaaaaaggtaagaattgtatataatgtgtgatatggatatgtgaatgtatgtatatgttgagtgtatatgcatgcttatctgttgtgattcatatactccaaacncttgtacggttgcggtacag

SEQ ID NO: 241566 - DNA, 814 bp, Cannabis indica
atcggggcggggcggggcggggcaatagcttgtcggggcggggcgggtcagaagcggggcggggcagacccgccccatttgccattcctaaccacaacgcaaaaaaatacggtttgaaattctttgcagtgcggccgcagtttgaatttttcttaaaccgcgcggtgtggtgcggtttgcggttttgaattgttaatatgtgggtcaaaccgcactgtaccgcacattacaaaaataatcaaaaaccgcatcacccgcactgcgaacacgcttaccttaagactctttaaatattttgatagttgtatttttacttatatttctaaattctgtaattttattgctctggttaagtgagctttaactcataaacggtatggtagcttatatatttattctattttgacagacttcttttataatgatactacaaaatttaattttcagtatcaatgaacgcttatttaaaaaaaatgtatatttttactgatttgtgatataggatacttaagattcttccctataatttttttttttcatatgtttgattatttaatcaatgaaattaagacaagtgttattgagtaaaaaataaaataaaataataagctatgtgttggagtgtggtagtgataataagaaaagtctcgtggagctagagacttgaaacgtacgagtaagaaatgcaaaccaaaagtaacgactaataataacaagtctttttaactgttgaaattgttagactatatttatatttggtaagttattttgaatctcccatcatttattttatacaatctaaaaaaaaaaaaaa

SEQ ID NO: 241567 - DNA, 1002 bp, Cannabis indica
atcaaatatttacaagtaatctgatccacgtgtccctgttcgattggtccacgtatattgggcgaaatcaggggcaacacataataaataaaaacaaataataataaataactcaaccagtcataattcaaatagaaccaattttataacataatcaataaaaataaataatacaaaataactcaaaacaattataattaaaatagaacccgttatataacagtcttataataaataaaaacagataacaccgaataactcaaaccggttataattaaaaaaaacggttctataacaggcttatagtaaataaaaacaaataacaccaaataactaaaccggttataattaaaaaaaaaacggttctataacataatgaataaaaataaataacacagaacaattcaaaccgtttataattaaaacacaaagaagaaatcaattcctaaagcactgaaatataaattaaaaacaaaattagttccacaacaaaatgaataacacataatacctcataaaactgcttattatgtttttcttatgaaaatgtggagattaatttcaaaaatactgaggcataaatataaatagaactggttccataataaataaataaaaataaataataccacacaaaagaactcaaaaatttataaaataatgaaaccgattatatttattaaaaaactaagattaacaaataataacacacaattaactcaaaataaagacttttgttaatgacttagagaaatgatttgtaaaaactaccaggatttgaaagcattgaagcccaagcttccattcttgatcttggaatgtaggggagttgaacctcaattatgggcaagatatgattctcttgtctttttaatttatgccatgtatttaaaacaaaaatttatcttttagatttggtgaacttagcccaaaaattttgacattttaatataaaaaaggctgtggttgagccaaaaagaacttttattagctatattggaa

SEQ ID NO: 241568 - DNA, 658 bp, Cannabis indica
gatcattaaataccgatgagcttcgtactataactttctggacactgtcctttcttgaggtagttctcctgtcgttatgtacttaatgatagggtccatcccactcgacccttgttcattagtagccactgtttctttacacctaatgctaggttccgtaaggtgttcaacaagtaccacccctagcttctttatcccactatctgaggctagcttggccaggcagtctgcatggacattttttcctcgtggaatttgctccactttgtattccttaaattctttcagtaattccctgacgattgatacataagcgaccatcttttctcctcgggcctggtattcccctgacacctggttgaccaccaattgcgaatcattgtacacctctactttgttggcccctacaaccttgtccaatttcaatcctactattaaggattcatactcgacctcattattagaggccggaaacatgtaccgtagggtagcctggagtcgtaacctgtcaagtgagatcattgctattccagcccctgacccatattcattagatgcctcgtcaacatacattttccacgtgggcacatcctgagttagcacactggcgctagcctctgtctgattatattctacaataaagtctgccaatgcctgt

SEQ ID NO: 241569 - DNA, 1256 bp, Cannabis indica
gttatataatttgaattaattttggtagtctgtgtagtgaattattattattcttgaataaatgatcacactactacaatataggttttaacttctttttttttcaacccgttttataaaaaagaagctaaatttaacctttagaggcgaatttattatttttttttttataaaaaccgtatgtatagaattggattataccatttagaatcagttgggaattaaacgatagatcattttgtgggagaggcctatgtcgtcggttcttatataatataataaccgacggataggatacatttgaaatttgacacgtgtaccctatgccgtcggttattatataagaaatgacggcatagggttatataaaataaccctatatcgtcttcttccttctccttcttcctcacgaacaaaaccagaccatcccaccagaccccccccccccctccccccttcgccaaccaccacctccgccagcccatttctccaccatttctccaccatttgagcccattcttttttaaaatcttctattttcgatacttaattacatacaccgaaaaagttttaatttttttttcctatttaagtgtcatccgaacccattagaaaatagtgggtataaatccggttaccgttatttgttgagaaaacgttgaatttcaacattcattaaggtataaatatagtttctattcatttttataatgtacattctttaatttttgatttttgtaaattatttgttggattttttgtcggaattgctcgtcggattgcgcttatatataaggtaaaaatttaaacctcaatatagtgtatatatatatatatgtatttttgtattttagaatatgtgtatatattatttatgtaaatacaatttgtaattgtattgtatatattcttagtaatatatgtatatatttattgtgaatgagaatgagataggagggatttaattagtttagaaataaaattcttaaaattgtgttagtgtgggatataattgattatatatgtatatataatttagtaactattttttataactagtaagtaataaaataattaatcttgcaaattttgttgtatttctttatattataggtttgacataattttgtgttgatcgcatttgagcttgctataggtatatacattcattaactttttcttattatttaattaattatcaatgcatgttagttgactttgaatatcttaaatattcatccgtagtgaagtaggtt

SEQ ID NO: 241570 - DNA, 763 bp, Cannabis indica
ccgaaaagtgtgggccctaagcacgggcctagcccgcctatgcctaggcccggccctggctaaaacttgacatatgctagagccaaatttgatacatgatatatcatgctaaattggcgcataattaatgtacctttttaatttacaatattattgtcatttattattaatgatttttttttatttaagcgtttatatattacaatcatgttttatctgagactcgaacccaggtctcaacacacacacacccatctatggccacttgagctggaaaaaaatcttctgtccccaaaaccatgtctccaccctgtcccaccaataaatttaagccacctattttcttcatttaatagatacttcaataaaaatttaaaacgttaagatagattaactaaagttaacagacacttatcttttatcctacaattaatgttatattctctctcttgattcaattattcaataataataataataatagtactaaatattaaattaactacataatatattctttcatttcctatcctgtgctaatatttatatattattcaatatatttgtctagtctagcaagtccctcatggcagcgttatttaatttttaacaccccattgttatttaattttcaaattttcatctctcttttgttttactcgtatgtatttatataacatcttttatatatatagtcaaattccacacaattgttaaaaataacaaaattctttataaacattatattctaactccacataat

SEQ ID NO: 241571 - DNA, 1072 bp, Cannabis indica
ggtttttcaaagctctttgagtttccctctctcaaaaaagtatttttcctcaccatatgaaaaactctctatgttttattgtgttaccaatgaaatgaaatgaagagttttgaataggctaccacagttgtttaagcctaattcctagttaataggtcttgatgatgtgtcaaaaaatcccacttgacttgtcatgtagttgattttaaactggtttcattaaggtcttattaaacaataggttatgctttttcaagaactctatgcactgatataataaaaagcctttacgtgtgtttattttttgaacttttgaagataggatcacaaccttactctacaataattgggagtcaagaaactataacaatttctatataacagtatacccaacatttaaggtacctctcgatcttgagtaatttctcacttaattcttgatattttcccacaacaatttctaattccaccatcaacaaacttgaatcatcatgttttcttttattatgtcattctatcctacaatgtcatgtctatttatattcatataaacaaattaaaacaaggagataacaattaaataatcaaggtggcaagtagccaaacaaattgatataaacaaatgaataaaaattgctagtttaatttcatcttcattgtcaactgtcttgtacagctcatgatgtagttaccaaaatatttttttatataatacattttagatgcaaattacgtttgttaatctgtccaagtcatccttgtatatatgtctatagctttgactcaaccacaccccacccatgactttttttaaacaaatcaccgaaataataacaaataattagtttatatatacatatacttctatatatatacacaatgtaagaggcaattttcatagaataagaatatttaagaagaaaaagaaagataatggaaacctctgaacaaaacattaagagcccagcagaacaaggaataggagctcaagatgataataataataataattctaaaaatggaggctggattacctttcccttcatcatgggtatgtattctcttttataat

SEQ ID NO: 241572 - DNA, 1037 bp, Cannabis indica
aaacggtatatagaatgtccaaaaaagacactcgagtcaaaagttatgacaaaaatacgatttctgatctggtaggaatttttaaaaactatgaaactcaaaaatctcaatttttgcactcaccgaaacactaccaaaacttatccaaatcactccaaacttcatagggcacatatataccataaatattacaatcgtcgtacaacagaaattaaaatcgagcccttaaatgagaaacaccactaaccgttggactaagctttaaaaagttccaaacttgatttttaactcaaaatcacctcaaattcaacaagtaaacatcgatactagtcccataactaccaaagaataattttacgaagtcaaaatttccataactattttaattcacgaaactcctatataaaaccaatcgtttttagcttaaaacataattaaaccataccttaagctttccctctttaaggatttgctatcccgctactactggagcttagatcactaaattttgggttgaaaattgaaaaaaatgaatataagaaaataaatattttattagaacggtggatagagagctcatacgtttatgtttcagttttaagaatattacatacatatgtatactgataagtatacgtttttatatttattaataataatataatatgttgttgttcggattatccattgctcgtctgggagggccttgtccgtgcagatatatgtggtgttctgctcggaacatctcttccgggccactatggagaatcaattccacgtgtcaccagcatgtgatgccacgtcagagtgtaaaaattgggatagcatataccttatcgctgattatcatgtcagtctaaatccagtgaactgacaaatcatgggaattaaactttgaacatataatcatgattatattctactgtactgacgacactataatcatgaaacaaatatatacatatttatatatgttctggacttaatataatttatacattaattcataaatcaatgaaataaaatcatatgaacca

SEQ ID NO: 241573 - DNA, 1243 bp, Cannabis indica
tagttttgtttcttagaacaccaaaagactaaagagtttccgaaatagatatagaagtccaatgtggatctacaatcatctggatcagaggcccaagctgcatcacaaaaagcttgaagctaaaaatgagaagctttggagagggtgagaccatggtccattgggtcagcaaggcacctaagaatacgcttggcatcaatccaaagaggaaagaggatcggtcataaatcggcacatttcgttgacactaaaggcaatgtcaagtcatgtaagagtggcatattgtaaagcactagcaaataattgatatgtacaaatggacatcaggaacagggccgccttcatattgaggccactggaagctaccattcattgaagtgttttgagaattaaccctctacatatgagccttgtgaagaagatcattgatatacttggcttgggagagatgaaggccatctatggtgggagtcacttagattcccatgaagcaatcaacaattccaagatcttttaatgcaaaagtgtgacagatttaagaaatcatagatgaaacaacttgatcattgcttcctatgaccaatatgtcatgaacaaccatgagtgaatatgtaaagtaagagggggtttcttgtataaacaaagaatggttcactttggctaaagagaaaacaaactggagtaaagctggaatatctaaacaagctctaggagcctgtttgagaccataaagagcctttcagagtttgaaaactctatttagataagtggagtcaatgaagtcagtgttgacccatactcttaactctccttattttgatgattaacaaatatttgattattaattacttgccactaatgttttgttgattttgtagcacaaataattaaggattttttaggcaaaattaactccaacgacaaaatggaaattttaccaaaattctcgaaagtgacccaaagttgattctaagactcaaagaactcaatacaagactttatgaaggtttatttacatttcctagtgttgtacagtgatttacacaagtccacacttaaaatttctaagtatgaaatttggctcactaacttgtgtgacatgttatttcacaaaaatgatatctaaattttttaaaatttagattttttaggttcacttatcactaaactaagagaatagcaattagattttaaaattggataacgagctaagactatgagcatttaagtgccgaaaaaatgg

SEQ ID NO: 241574 - DNA, 504 bp, Cannabis indica
gatttcctctctctctctctctctctcttcacgaactcacaaaatcacaaacccaaacgaaccaggcgaagcaaacccatcgccgtcgacccgtctccaccacgaaaccaacaaacccacaaaccaagcgaacccaaacccacgaaccatgcaaaccgaaaccgtctatcgatcttcgacccaaacccacgaaaaactgccgtcgccaccacgagcaggagccgccgtcgccacctctagcaggaaccgtcgccgccaccaccaaactcattcaaaggtaaggttttttttgaaaaaaatatatttttcatagattttgatgtcaatcacatattgttgttgagattagtgaaatttttgtagattttgtgctctttcttgtggtaggttgtatatgttggatatgtttcaatggtacttttgtattttgacagtgttatcgatgcaatgttgataggatatcgatatatttggttatctatttttgtgtttgaacaatgttgt

SEQ ID NO: 241575 - DNA, 872 bp, Cannabis indica
atataaacatttcttcctctcacttttgcaaaattgagaacttaaacctttaaaagggaaatgatagcaacaaagtagaacactctacccattaacaatttgacattgaaatagtaacttaagcaattccattccaaacaatcatcacatttacaaatacgatttaagcatagaataaaaaaaaatgcataattaccttctcgttaatgtcacaaaatttcaatctttcagtaaaaatacagtctccattgctgactttgaacgggtgcgaaccaatctacataaaccacattcaatcactaaacccaatttaacagctcccaaccacaaactttattacaaaatattaactaagagagaccagattgaacctaacaatggcaaaataaggttcgtaaggcttgaaaactcgatcggacctctccaccggtcgaaccaccttgtaaccaatagcaacagcctcagcttccttctcttttggtgtatactctcttttcacaccaatgctcggccacaaggctagattcatgttcaaatagaatccatataaaaattgaagccttagttgctttaaaatactcttgggtgaaagaagagtccaaaataaaagacatgaaccaaaaatctcactataaccaaagctaaagttaaaagaaaatgcgagtccaatacaactcccttccaatgataaattcacatttaaaaagactataaaagtatggggaacctgaaattagtgaacaaatgcatatgctatgatggacaacataatagagaatacctaaaagaaagaaggatgattaaataagaattgaaataatcatacatgacacattttctcaatcacctaaaataatggagacagaaagaaa

SEQ ID NO: 241576 - DNA, 1113 bp, Cannabis indica
tactactcctacctaattttagtctaatttattttttttaatagaactaagatattaacaaatttaaagttagttcctatcacaaagagggtacaaaaaatgtagtaaatttggtcataacacctacaatcatggtattatattctattttgactaaagttgggctcacattattattatattctattttaaaaaataattatttgacaaaacagatggtctagtcggtaatttttaaaatgcaagattcaaaataatatttacttaatattagattttggacatctcgaaaattcattacattaatatattttgttgataattttattatattaatactaaccttttgaaaaaatatttatggttaaagaactctgctaaatacaataaattaaatctttaaagaaaagaaaaattaattttttatctcttttataatttaaattttcttgatataaaattcaaaaacttataaattagtcattaaaataattattatatgataagtaattaaattgataataataaaaagcctattttaacaaatttgatgttttcttctatatttctattagtaaatatgttttggtttaaatatatacattaatcgttaaaaataaatacacaaattaggtattgtaaaaaaagagaatcatgaataccaaaaaaaattattgttgataaataaataatttagaaattttaaactgggaagaaaatgaatgattatagacttattaactataataataaaaaatttgaaatttcatttcaattttcaatagaaaaaaaattataataaaaagtagactcaattgtacacgtaaatgaaaattatatatgttaagaaaaaaattaagatgaactttaattttattaaaagatacggcatagaagtttattttaaatctctttgatacaagttaaactaatagcatgtatataacatgtattaacaaagaccaaaaactttacaattctagtcttatatgttatttattctttagtaaccatgtttcaaattgtagagtcaaaatatatatatatatatatatatttattttgtatttaataaatttaatacaatatgaaatttttaagtatatatatata

SEQ ID NO: 241577 - DNA, 978 bp, Cannabis indica
ttttttttttggaattatgctgctcaaagaattgcaaaatttgttggcacaactcacaagattaatttggctgtttgagaaagcattttttaatgcattattatataatactatcatttattataagaaaaatcagaaaatctaatttgctgtatctcatttgtttcttctgaattttacaggaggaatttgaatcactgtgtcttgaaagtcaggtatccttccccaaattttattaataatgctgctttagtgtgatgatgttaggccctaggataaataggatgtgctagcatattgtaaatcaaagatatgtgagtttttgtttggatgggtaattttgagtgagaaattactatatataggtgagtaagagaatagagaaggtatgcaattcattgagtaaatctctttgcatcaaaagagccttcccatagtttgtaattggttttctcatatatattctatatacaattcctactgtttttctattaatttgctactgttcaactggtattcttgttgctgggtttgttttgctactgtttgactactgtattattggttcgctagaactatttagacatttgccacataaatttacaattcaagttgaagtgattggtttaaaaggaatgaaatataatattgaactagtatcaaacttcctcatatattaatgctttaatttgacaccaaagcatcattctatcgtcaatgtaatccttcggttaccctctcatggtttttatttattgccactgtcttatttatcatgtggactttccaaatgcaggtgggaactacccttgatacggtggagcaatttttggaagaacaagctctcaaccctttgcattcagataagtaggtttttgttttctgattgctcacgcaacataaaatggatcaaataaataagttgcaagaaagaaaaaaagaaaagaaagcacggaaattttaggtcatttccttttc

SEQ ID NO: 241578 - DNA, 1623 bp, Cannabis indica
gccctccaggagtacgtggaccccccatgccgtcttcggtaggtatgtttcttcctgatcctcttgatttaacaagacttagtcaagttatctcaaaactatattcctcaaatccacgtgtcgcagtcgcattggtacacgtattttggacgaaattaagggcaacaaaggtcattttggatcttagcccaacaatatttggatataacatatccacgatctatgaatatcaatagcacttatatgaaaaatattcttttatttagttttttttttttgaaagatatgaaaaatattcttaatccttcaactttaagaaatttctaaagaaagataaactgataagacttcaaaaactatggtgacttgtgagtaaggtgaggaaagaagtaaaaatactaaaagaaaactatgaatatgatagctgcaacatcgtgagagatcaacaatggtgagaaaaagagtcataataacataagggcccgtttggtacacaagattagattggattagactgactaatttatcaaattcagtattttgacatgttagaagtctggataactaatctagctaatctcatctatttaggattatttatcccatcgagcataaataatcccatgcatgtgagattttcttattgttttttaaaattttgattttattaatatatttaaatttaataagaatttaaataaaaaaaattatcacacatttatttatatatttttttatcaaaaatttattcattaaatttaatgaaaatgtataattttaaattattatacatacgtttttaaaatttaaaatattattaattaaacaatgttacgtaaattaattctaacataaacaatatgacactaaaattgtatattatttttaaattactagaaaaattatataaatattataaaaaataaatatttatattaaattagtgtttaacgtaaataattttatataattcaagtatttttcttttactattttaattatttatttaataaaaaatatgataaactattttattatatatttatgatatatacttgattatataagatatattattttattttataatttgattattttttttatttttttttttttgctgcgaatcatttatttttatttaattaatattatatatttttattttaatttaatattatatatttttattttaatttaagtttttttttctaaaaggaaataaataaaatagttcagcctattctttaaatcaaacacaaaattgctttcagcataattcaatattgtctagttcagtactctaatcattttcagttcaatcatgcgtaccaaacgggagtatagtaactgtaaagactcggttttgaccgattcaaatgtttatatatatgtaaaataataattaaataataatatatatatatatgtaaaaaaaagattaaaattaatgtatacataaagctgaactcttcgtccccctctctctacctatctctctttctctttctctctcttcaaagcttcaaaggaaacccacaaacctccataaccaccacactccggcgacccacctccggccaccgcccgacctcacgcgccggacaaattgaaagcccaagt

SEQ ID NO: 241579 - DNA, 1637 bp, Cannabis indica
ctttggcaaccaaagaccaagaagaagaagatgtttggcaacctatgaccaaaatgaagaagaatacgtttggcaacctaagaccaagaagaagaacaagaggacaatctttcgcaggagggaaacccagttgaccatatcaaacacccaacagaaaatagtgagaaaattgtaatctctttccccttttgttttttccattttttattcttcatttggtgaaatgtgtgtttcttattgtctaatttttatttgtgatttctatttgtgatttaattttttttgattttgattgtctgatttctatttgtgatttaattaattttgatttctatttgtctaatttatttgtgtttagccaattatctataatttatgtgatatattttattgaaatttttattgatataaaatatttctctgtaaaattagtattgacatttcattagtgattcgttagattttaattgtgttactttagaatgagtccgagttttattttcagaagtggaaaatctgattgtattaaatttgtttttgctttgttctctgaaatgggttttgggtttaatctctaaaatagtatttcgtacttttgaaaatgcagctttggcaggatgctctcatgaaaaaaaacaagattatagtgattgttcatgggtcagttggtgatttattcatcaagtctatatgctcttttttatttgccttcatttttaactttctacaactattatgtgtatagtatagatagctattgtatatttttttagtaatcttaaggactaatcaaagagataaaaaatatatatataataatgaggtattactatgatatttttaaatgaattacttagctgttatttttttctaatgcaatattagatgtgattcaatgttaactttacccattactctttcatataataaaaatttagtggtatcctttagtggttttgcatgaaaatgattttcaaaagaaacaaataaggtttcaagaattatcactcattacattgaatacaataggaagacaaaaattcttaaaatttttttaaaggctacattataattttttttttcctttataatttttttaaggtttcaagaatcatcactcattacattaaaattttttaaggctacattataattaatagaggagaaaagtaaataaaaaaaagagccaaaaaaaaagtccaataaaaaacctaatccgtatttttttcatctctcctaacctttctcctgccccatccttctcttctcttctcttcgttttctctacttcctctttcttatgattctctcttctctattccctcttctctatgatctaaggcttcaggtcaatttcttcaggtaaagatcttttccttattacctttggcaaccaaagaccaagaagaagaagacgtttggcaacctaagaccaagaagaagaagaagaagaagacaatctttcgcaggaggaaaacccagttgaccagatcaaacacccaacagaaaatagtgagaaaattatctctttccccttttgttttttccatttttattcttcatttggtgaaatgtgtgtttcttattgtctgatttctatttgtaatttaattttaatttctatttgtgatttaatt

SEQ ID NO: 241580 - DNA, 1373 bp, Cannabis indica
gatatgagactattgtgaatgttgaacttattgattatatattttctattattgtttgtttcaaaattagtatatatattttatatgttggtgattaatattatttatttactacgtgtgtgtgttgatcgcgcttttagccaatgataatgagtcaaaattaaaacgattaaagaataattaaaataataaatatgaataatataaattaaagaaaacaccagaattataaagtttcgatcccttgatgatggtaatagcctactttcctttagttgtattgacttgtgagtagatgaacaagaaaaccttgatctctattaaaagctcttacaataatctctgagtattacattcttaaatttagatttttctcgtgttttttctctgaatcaattttgtgtccctatatagtgagacgagtccactattcgtagggataaattacatcgaataggtttcttaaaatcaataaggaatcaagtcgaaaatttattggttttaatagtactaaatcagctacgcagtagaagaattcgtattatttgattattattgtaatatagtccaatggatatccaaaggtgtatacattaaatctaaacataaaaaacaagataagaatatatacctcttgatgactatcaggatatcatcgaaacttctcgaatgttgtatccttttggttgattagaaactcacaccgtagtcttccaaatcgatccaccacacacaaggaatagtgtgggctattaagataaagtgtataatttgttgttgttgaattctccacacatgagtaagaactatttgagatagaaaaacagtttaccttttctccgagtgaatttcagaagtttctatgttaaaagctcttctgaattctcaatttaggattctatttataatagttaaattcctattaaataaatcatatttaattattaaataaatatttataaccaaattcaattaatgatatttatgagggaatctctcaattacttgagagaatatttcaactactttgaaatatctttaaccacttttaaaatttaaatatttatctaattaaattaactaattaattaattaaccttaaagaaaaaactaatagggacaccctacactagggcaggcacctacattctcttatttagaacaaagatagtgtcttttgtccagactacttttgtcttttccctatttaattaatttaaaaaattatttacttattccaaaaataaataattactatttttctaaattcaaaatagtttttttcgaataacaatattatacaactctttatatcttcgcttgacagtatttcaaggtagctattcggggaccatgaacgtataattctaagt

SEQ ID NO: 241581 - DNA, 743 bp, Cannabis indica
tgacacatggcaaaaaataaatatagaaagaaaaaattcaaataatcattgattaagtcttcttaatcgtgggaggtcacaagaaattatgctggcccagaaaggtctgactcgagagaagcattgagatttattacaaagcaaatgactatccaggactcagaagccttaccattactctgggacccgaagaggaccaacttacttataagcgcaggcagatgccggggagtcatgcaaagagcctaagacggatgccaattatgcaaggagaactggaagctacttacgaggccatagtcggatggctttatgacagtgtcacaaacaagttgaagatgaagaccccgatgtcaaagacgagaaggaagacgatgatggatacataaaaaattgttattaaaaagaccggtactattatgagaaagacccagacctaggtctagtatctaatgaattgcataagacccaacataatgtatctcattaggatgaggtctctcaaaaaactggaaaagataatggcccacctccaagtgaagtttggagccctaaacggagatctgaggaagatgcctcggtggaagtggtcaacggagacaatagaacaaaccctactaacgccaaagcctttagctagctcctgcaaatgataagggaaaggtaaaagtggatgaccctacatacaaaaaaattcccctacctcctagataaagtgtaaatgcagccaactggcccttgca

SEQ ID NO: 241582 - DNA, 2095 bp, Cannabis indica
taagtcatgaaaagaagttacaagatgagtagaagacatagtattaattgcgtttgccagcaagagagaatccgtttcaatcaaatgaatggagagctggttgtgaatggcccatgttaaactgtgaaatagagcaacaacttccatttcttttgaagtgaaaaaaccatcgaaaggcctagaaaaaccagcaacaacatcacctaaatgatctctaattagagcatcataacctaattttccagcagcctgatcacacgcagcatccacatttaatttatgcaagccaggagggggagatcgccatgtttgaggattccttatagcagcaggaacaggaggaggtttcgaaaatttagcctgagatgatacaccagcagccgcatgtattggagcagtggctttgtgaaactgagctaaataagatgcagaataagagcacaaaacagcaaccggtttgggcttagtaccatggatctctttgttcctttcagaccatatactccacattaaacaaactatctgctctaattccaaatcattgtgagcagctgcaatgtaagaaaaaatatcgaaacctttagcattacccatgtttggcatatgaattttgtattggaattgttgccaaacagcctttgccctttcacatcgaaaaatagcatgtccggatgtttcccaactggattgacatagagaacaagcattggaagaactaatcttcctatgcgcaagattaacagccgtggggagcgcttcattaatgaatctccacaaaaaaaatcttaagtttttttggcaaccgcagagaccacattcgattccaccattgtcgatgagtggaagatgaggagtgatcatgttgagtttccaaactagcagccagttggtatcctgttttcacagagtaaattcctgaatcagaatgatgccaaatcaacttatcatctctaggaaaaggactgagtgggatagatagaatgcgctgaatgtcaatgtctccaaagtgggtctgaagaatccttaagtcccaagtccgatgagtagagatatagtgctcaaccgtaaaagaggggtctcccgtataagagtaaggggtcatagttgtattaccaggtaaccaaggatccgaggcacaacgaacattcgcaccagttccaatcttccatcgcaaaccttttaacaacaagtctttaccatcacatatactttgccatgttaaagatggtagaacaccttttttagccgagagaaaatcaccatttttaaagtaccgagcttgaagaaccatagccaataaagaattaggattatccagaattctccatgcttgcttagctaaaagagcttggttgaaatgaataaaagagcagaaacccataccaccatcagctttagaggaacacatgaacttccatttcttccaatggatcttagaattattagtatttgaaccccaccaaaaattagccatcatagactccaattagtaaaactttttagggagactgaagcaactcattgcataggtaggaatagattgcaccaccaccttaagaagaacttctcaacctccaatggaaaataatttagaatgccactgattcatcaatttccagatacgatctttgatgctactgaaaagctcttttttgtctttgcccgcataagaaggaagaccaagatatttttcatggagagaacaaataggcataccaaggacattgtggaaccgatctttaactgcagaagctgtgtttggcgagaatgacataatcgttttatctgtatttagaagctgtccggaagcacgatggtaataatcaagatctctattaacagcttgacaagaatcctcagttgcttgacaaaacagcaaactatcatctgcaaacagaaggtgagaaacagctggggcaaccctcgctatagccaaacccttcaaatttcctaacatttcttcatgctttaaaagaactgagagcccttcagagcaaataagaaataaatatggtgataacggatctccctgatgaagaccacgctttggaacaaccaaacctcggatagagccattgagattaaaagaaagttg

SEQ ID NO: 241583 - DNA, 1468 bp, Cannabis indica
aatgaggcacaaaactcctatatttagtgcctcgctacacgatggtagagggcaaattgtatagaaggggctatttaatgcccctccttcaatgtgttcttcccgcagaagcaaacgagatcatcaaggaaatccatgaagacttttgtggggatcatgcaggttggcaatgtctatcaaaaaagattattagacaaggatattattggccaaccataaacaaggacacccataaatttgtcaagaaatgggataagtgttagagatttttgcatatacctcgcgtaccaccaacagaactaagaatgatgacctcgccttacccatttgcaatacgggggattgatttaattggggcacttcccatagggcgaggaggagccaagtacgcagttgtggcagtcaatttctttacaaagtggatggaggctcaacctctagtttccataacctgcaaaaaagttctcaaatctgtggtcaaaaacataatttgtaggtttgaaatacccattaagatagcattaggtaacacgactcagttcgatggtgaactattcactgagttctgtgagaggaacaagataatcaaaatcttctcgtcagtatccaggccttaggcgaatagacaagtggaagctgttaacaagaccttgaaggatactatcaagaagaaactagatgctatcaaaggtagatggctcgatgaactacctcaagtactatgggctcataggacaagtgataaaacagcaatgagacatactccattctcgctaacatttggctcggaggcaatgttgccagtagaagtaaatatctccactcacagacgagagttttataaacaagaagaaaacctagaacttttaaaattgtccttggatctacttgatgaaaaacgtattgagtcgcaaattactaatgcagcataccaacaccgagtgacgagatacttcaacaagaaggtgaaaacgaggctcttcaatgttggacacttggtgctaaggtgagtatttgcaaatacgagagacacatctacatgagtattcaacccaaactgggagggtccttatgtgattgaagcgatagtaggaactggggtttacaaattggctcggctgaatggctcactgataaagaactactgcaaggtagaacatttgcgaccctactacaaataaactgatgctgtaactcatatttttgatgtaatattttgaaaattcagttattaataaagttgaatcaattcaagtaattacaaagtgtcattctttaaaattacttgaggggcatatctatatgattaaccgaaatttatctagaactacatgataaattgcaaacccaatactttagaatttgtgattaaataaccattctcacgagaaagaaaaatcaaaagttgtaaaagagatataactcgtaagctacatgcgaagttgaatactaacaactcgtattttgt

SEQ ID NO: 241584 - DNA, 700 bp, Cannabis indica
cacgtgttccacttatgaaaccgcaatacagatgaaaaaagtccatctccgctttcttcaactctaaagagacccataatccttactctctctctctctctccaactcactgtaagttttattttctctgcaatttaattatgaaagtaatttgtgatccttccagttttttgaacataaaggaaggttttaaagtttctatgtggcagtctaactgagatttctttttaatctcttttttcctaatttttctaatctttcttaatttttgtgatttattatgtattttaaattaacatataatgacattaatgaatatttaatctatttttgtataattatttaaacatatatatccaattaattccaaacgtcaaataatttttgtctttttaatttctgatctttcaaatttttctaattaacattccaaattaactcatgcaaaattatttctataaatatgatctcatctctattttcatctcctcataacctctctctctacttttttcttttttttttttatttagttttattacagattataatctatctatatatttatataatttagttgttagagtgagtgacatggcatcttagaactagggctttacatcggtcggtttgggtggtttatcctatatattttctaacccaatctaaagttcgggttgctaaaatttaagtgcaaccc

SEQ ID NO: 241585 - DNA, 604 bp, Cannabis indica
ggttcaatgaaaaaactactgggagaggctaagatctcatcaaacatcctctctaagggagactagttgacagatcaaggagggtttaccgacaaactatccaacgaggttctttaagaaccatgacaaaccaggccttcccctattcgaaggaggacaagccttagcataaaggttaggtggtgagaacaaccaaatcccgacaaccaatggtctggggggccggccagggatctcaagctctacaatgccctcacttggacaacctctagccagctagcctcttagtagtacacccctggccagccagcaaggtgaaatcccatcccaaaggctaatcttcattcggctaggtctgagaacgggtggaaacaccaaaaaaaaacaacttgagaagtgtgtcttgtcacttcaaatatctagatcaacctaactcctgtaatgggtgtaatctacccctatcaatacaatagttgtaccagccaattagtggataacgagtgcccaagccctacttagcatagggctggccgacccaccataccctctcctagagaatggccagtcagaccctaacacatttagggttgcagctcattcaaga

SEQ ID NO: 241586 - DNA, 1091 bp, Cannabis indica
actcaaagtctagtaataagaaggccaaagattgggaaatccaacggttgggagtgaggcggaagatgaaaagacggttcataatgacccttgaaaccgcacaattgccaaaatcaaaggacgtgtttttccaaaagggattatgacaaaaatgtcctctgtaattattaaaaagaactttttaaggggcaattgttatacccaaaattcgactaccatgtcaatagaggacacgtgtcaagataaggggaatatagatcgatgaaatcacttttaatggaataactcattaattgcgtaagtaacagagtataatggtaactcgctgactataaggtcttatgcgaggtaaagatatacaaattgttgcctagtgtattaatgagaaaccatacgttattggatgcataaaacgagatatcaacttcgttacacctgggaagacaaaagcgatgcataacgattgagaagacacttagcgtataatgtacaaactaactgtaatagttgggcagactcaagacctaataagcgaggcgcttatatcgttataggaaggcacactcctatgactttcaccaattaacttcagacatcttacagtaagacttatagtcttgatgagtcagaagctgacattcaaatgactgctgaggtactctttgtaaataagaactgcgattatcaaaatgaagcattaagccttcaaacaaagaagcagcaaggtgtacatcatcatcctcagaaaaataggggagaaagctcaagctcgctatcaaggtcattggaaacaagttcctattgagacatccaagaacgctacaattaaagacgtgtttaaacacacgatcattttgacccagtaaaagcgagaaaatcagagctgtgtgatattcaaataataaccgcatgtatactcagtgatatgtaatcaaaccccacgattttaggggaaaacattgaaaagattacagccaactttgtaattaactgtccactatgtgattataaatagtggcaagttagaacaaaaatggacgaaaaaaatcatacaaaaaaggccctgaaaagctatcagaaatctaataaga

SEQ ID NO: 241587 - DNA, 862 bp, Cannabis indica
tatatataaaaattaacattagaattttattcttttttttcttgtattggatggatccaatctaatctaatacatactagatctaaaatattaaatggatccgatccgatccaaaaaatattaagtctaaaatattaaataaactcaaatttaactaataaatatatatgaaatacatccaacgaatagaatcgatccaattcaacatccaatggatgttggatcgattggatgaccgtattagatcggatagtaaaatttaacatctaatatataattagatcagatctgaataggcctaaaaatattagatgtgatccaataaacactcataaccatacttatattctcttaaccaaatcttggcaaagatcatacaaagaatattaatattattttaatctcaggcgggaattaatttattttaaagtcattgactcgattaactagtatgaaatatagtgaatattttcttaaaaaatatagattcacataattccaaatccaaaatacaatatataatgcctgaatccatggcatcagtcaccaacaaaactaggtagaataatatatgaactacacctaatacattggataagatcatacacatatactaaatgatatggaacacaaaaaattatataatcttcttatataaaaagacagctcgacacccattgagttcacaaacttttttaattaaaaatataaaaggacaatgccacaatggtgtccattttaaaatcttttaataacttctctttctatcttactacataacataatataaataaggatgcacatttttcctacgggaataagatcccgcggggacccgcccctaatggggcgaggattcccc

SEQ ID NO: 241588 - DNA, 1063 bp, Cannabis indica
ttttttagagtttattattggattttgaattttaattgttatgtagatgaaaggaaagaagaaagttttaagagagcacttggctctactgactcagccaccgatacacccaatgaggctaaagaagcagtctgtcaaacggtacattccgcccgcaaagacacaataattgcttgaacttttagagattctgaagaattggtctgctaagaaatcaagaaatattatattaaaccagaaatgttcggaagagaaggccaagagtgttagatcagtgtagatgaggtggaagatgtgtgcgagctgcagaaaattagaaatacttttatgtgtctttggtgcaggtataatagttaataactaagttaatatctaagcaaaaaattatatttagaattgtttattaataatctttttaaatttaattatttgtaagaacacacgtaatcttggtggattgaggaatacatacacatttaataatcctgcttcagtagcaactgaagctggtaaactcgaacaatgttcagagaatatatgtcagtgattgatgggtatgcaacctgaacaatggttgatatgtccgtggaattcacagtaagtatatttttatattaataaatgtaacaaactaatggatcgattggtaagctgactggattaacatgttttattctgtagtgaccactaatgacaattatgatccatgccaatactcaaagtattgcatatctcaactcgacgaataattttatcccgactgatattatgaattgtatcaaaaagtaaactataaatttttaaatttggattatgttacaaatcaattcattaattaatttctttcttgtttagtgctgtggacatgtacatgttggaaattattttaccagtatcttagatctactcacaagtatgttgattaacaccctaaatatgaacttctaaaacgattgaaataaacacatacaaagtatgagaaaccttacattgggtgcagcggaatattatgtctccttccgttcagatctctaacccttgcatcctttctgtcgcagagtat

SEQ ID NO: 241589 - DNA, 1264 bp, Cannabis indica
attttattttatttttttaaaaaaaaagaggaaattcattcaacagagagcaaatcacaaaagaaaagacatatcctcaagcagcataaggtaaattttcaattcaactatcagatgcttttaacaaccaaaacatgtttagttaagcaatgggcaagaagttggtatctctaagctctcaaaacaaatgtgaaatagaaacaaagcaattagaaagaggaggaatatcaagtacatgtgccatcaacatcactacagcctattatgaacaagcgaacctcaccatctttagattaactatgtgctttatactcgaaaaatattcttcaacacgtaaatcttatttcacattgtacctaaaatcactccaataacttgttggtggaattgcgtatggaatctcaatcggtcaccaaaagtgaaagtgtctgtttggcgtatgttattctatttggctttaccagtagcaacacaaggagaagaagctgaaactcctgagcatgctctatttttgatgtgcatatggaccaatgcaagaaattctcctattactctttgataggttatctcgtgagtttttgaattgatgatgagaaccttttggtgactgtggtatgataggaattaagtattatttggcaacaagcagtcaagattagatattattccagacttggccaataaccatctagcagagtttaaagagtatgatcggcgacagggccgaccctgaaacaaagtgggccatagggagaaaaaaattttttgggcctttatgttaaaaaaatatggtatttttcaaaatcagtaaaaaaatgtataattttaaaagaggaaaaaaaattttttgggcccctgggctgggtgggccctaggcacaggcctagcccgcctatgcccagggccgggcctgatcggcgaggccttcatttgggtttgggccttgtgaacccagttgtaaaccgaactactctatggataccacctcctactaaatcctttgctctagcggatgcttcggtaattttggggaggggctttgttggattggggggagttatacgagatgcaaagggtgtggtttggttggtgtggttatcatgtgtgttaggtgatttctctgctaatgtggcagagctgcttgtcattcgtttggacttgactcttgcacatcaattttggtttcaatatcactattattaatagtgattctatcgtgacaattggttggattataagctttttattattttagttttctgtc

SEQ ID NO: 241590 - DNA, 940 bp, Cannabis indica
acccatgcacccgaacgatctttaagctttgcaacaaaattattccttcgtctcgcagttgcagaagcatgaaagtacttgctattattatctccctcttgcaaccacaattgctttgatctttgacgccagaaaacttcctgttgcacataacattcagccaagtccttctttgcttgtttgtaattggctacagagacttcatcccgacccaatttctacttctacacttcatttttaacctttctttaaaattgccagtaacctccttaccttaaactgtcagcttgtccccacaaaactaaattttatgcctaacattagcagactcacgaatctcccagctatcctttacaatcggataacaaagaggttccctcaaccatgcattttcaaacctaaaccgcttaacaatatggtggcctgcagcaggaaccatgaccataagaatcgaagcatggtctgaagttgaaatttcaagattatggagcttagcagaagtgaacatgttcaaccaagcaagattagctagccccctatccaaacgcacctcgatccaatgattagtaccccgcccacgctcccaagtaaacggataaccacataattccatgtcttgaagtccattgtcaaccaaagactgttgaaaaccttggattaaaaaatcaaggtacctattaccgccccttttgtcatcatgagataaaacattgttaagatcacccatcacacaccatggtagaacgatttgcaagagtacgtaacagattccaagtagaagcatgcctactcctattaggttccccatacacactagtgaaacgccattcctgcacaccttcagaagcaactctcacatctatataggcatcagaaaacccaagcaaagacacttcatcttcaatttttcataacaatccaatacctccactcctaccat

SEQ ID NO: 241591 - DNA, 636 bp, Cannabis indica
tttaggttgtaaaattgtatataaaacataaaaaaaagagtatttttgaaaatttccttaggattaatatgtctcccttattaacaaaaagaatttgtggtatagttcctccaaatgaaaaagtttctgcgatcgtcatttttggaaagctattcactcgatagtttcgatcccagaaggagttgtgtggaatgatagtcgagtccggaagagagtttccggatgagtatcatgtccatttcgagtccagtctttaagatagctagcccttccatggaaaggaattctagctggctagttatcccttctggaattgtagtttcgaatagtcgactttgtagtcttatatcctatacagaagcatcttcagcaagggtccgtggtcctcgagcccggaagctcattcatgctccaaaaggccctggtgcttatgctgacgatttcgctaaataaggagttggttaagttagttaacaacctagtttcttccaaccaccaactttaggatcttgatcctaagcctataaataccacctttggctcaacatttgaagacacgattgagatgcgagtttaagaactctgttcagaggagattgagagtttgagagagaaaaaattgagaggtagagagag

SEQ ID NO: 241592 - DNA, 644 bp, Cannabis indica
tttgtacactttattataactaaactctcctaactacaaattaagaatatatattgcatctatcagtactatcattatttttttaaaaaaaatatatgtttgcacataaaataatatataaaatgtattttgaagtaattaattctctaatcaaactcatatcaaaatattttctaacataatccttatatatatagagaaatcatatataaaattacgtataataaaatttatttttttattgtaaatataaaatatgtatatacataatcagtaaagaacaaactaatatagccgcaatagctaaaataaactctcaaaattaaaatctcaaaaccttatttcaaaaataaaaaaaaataaaaatacattacttaattaaaaaaaattgaacatacatgtattatacttaacatgctcacttaataaaacctaattaaaaacaaaactaattatacgtgcattgcacgtaacatcaacctaatatatatgtatataatttatactagcaaaaactaacgtgcgaggcacgtatactaaatttatgctagtttttttcttatgttatttgaaagtgatacaataaaaattaaaagaaaaacattattagttattaggtgagattatttgtaataaagaacaat

SEQ ID NO: 241593 - DNA, 742 bp, Cannabis indica
ccacaaatactaggaagagactgcgttgcttataatagtgagtctacttggaaaatctcttgttgtggatcagattaccaagaagtgtgtaagattgaactatcctagaatcatagtagaaatttcaatttctcaagaatttcttgttgttgtctgtgtttctggagcagtgacgtaaacactaacgaatcccactatcagcgaaggtagtccctccctaggcccaaccagattaataacttagcccataaacaaagtcaagcaatggctctggactcagatgcaacccttgttacatacatagaagggttggaccatcctagtctgggggataccgtctgtatcaaaagaagaaaagcccaataggactaatctggataccctcatgggataatccagacacagatagtcaaagaggcaatcagagagcttccaaatatcatcttacgcagagtcctccagacacagtatcccacagtgtcagagtttgtcttctatgtcaaactcggggagtgtgcgcaccactaaaagaagacaactttttgtctaacaccatattctctaatattctcagtacaaacatggttgcgaatgacaccttgcatcctcgaatggtcccctctcatacggatgatcgtgcctcacttaattggctaaaggtcaacaagctgcacaggaaaagcccaaagccaatcccagggaacagtgaagcttcatagggtctttctgtccaggtgcaggt

SEQ ID NO: 241594 - DNA, 1014 bp, Cannabis indica
atcaattcaataaatgtgtgttcgattatgtgtcctcaacgtgtgaattatatataattgttgtaaaggtgtgagtgcttggtatattatggcctatattcaagttttggtgtaattatttttgcgtaattacgttttcacgtgttgtgttgtcctacaagtggtatcaaaaccaggttgggttggtttatactaagagtcatttgttgaatttcttaaaatagttgtgtggagagttagttagagaaggctaaatcagtttaatatacctagcactttggtaaaaccaactcaactaaggcaacagctcgagtcagctggtaatgagctgaaccaattaaactaaaaactgatccagaaaagataaatgaaaccagacaaaacagatgcatctaagaacattgaggaaagaaaccaattcagaacataactaacccaattttaagcaacataatttgccatacaaagacatggcacttacaaacacaatacattggaaggaatcaattgatagtactatctctagatttatgcatggaagcaaaataattcttgattgattgcatattcacttgtcactttagatactagtacatataaaataacatgctttgtttgagccaaatatgttcggtggttcaacaatcttagtttcctcttgtatttctgttccaagataaatgtaaaggctcctctaattgcctgcaaagaacaaggaacaacattaatcaataagattaatccttgctattcacttgtgaataaacaagcatttaatatttggagagaaagaaagaaaaaaccatttgagtttagccaaccaaacacttggtagtcaatcaatctaaagctaattttcagtcaaattttggactactagtatctgaattatgagttaatcatagtttttcaattatgagccatagctaagaagaagcccagcccaccaacagcaatatcaaatgcccattaagtcatttttaatttccatcaagccaactaattaactagtag

SEQ ID NO: 241595 - DNA, 1094 bp, Cannabis indica
aaaaaaaaaaatgatatttagaagcaattagttaattgaggataataaaactgttccattcgaactcactttctttatacccagctgtcgaggctcgacccgtggccttagccgagggccggatgtatgccctagagtttctcttaagagtccttgatgtgtttaagagttttggtggtcgagattcgagtttgagtcgcaactgtctagaatatggtaaaggtgatggggtcgtctttctttagataataagtctatttttgatagtatggtatattgtggtacgtactttgtcacaattgattcttgtcattgttttaagtgacccattcatacgttgttttataggtatttcatacttttagttgacgttgtgtcatatgcaacgttgagagtattaaatgtgtgttgtttgacctattaacttcttgaaatttttatctcttcatcattgatatattttttttttttaaaaaaaagccaagttgttgatcatatatttatggcaaaagattaaaaaaaagtatggatccaaggggaaaaatgtagagttcttaattacttggggttgggttgggtgtctctctgtttctttaactcagatacaagaaaaaaaaaaacgaaaagaagttaatatagaacatgataatatattttttgtagcaaaaaaataacaatgataatgttttttaaaataataataaaaataaatatatttcatttctgcagatatatggcacagcacgcccaagataattaaaagaaacaaactaagataataaaaaaatcgatataattccaaagatgggtatttattagtaaacccatcatatatatttatatatataaataataatgttaggccaacaatatttacaagtaataatgtgtttgaactcaactatataatttaaaattttgcttagtaaaaaaatcaataattgaaaaaaaaaaatgatgtaactaactttaaggaaaaatattgaaattttaatattaattacttgtcatcatttataaatgttaacaaatgttcatagtgttaaatttataatgtatgtatattattgataattattataaaaaattactaa

SEQ ID NO: 241596 - DNA, 999 bp, Cannabis indica
gagatatgatctctcaactccatctatttagatcaaaaaaattctatcttcacatctgatgactggtggtgcaaacacctttcgacgaccaccgccgttcgccggccttcgaaggccaaagcgacctccatcggcggacgacagaccttgaagccccaaaaatcccaaagcctctccccctagcacatccactctgaccgcggatctaagattcgacatctcttcaacttttttttctctatttctctcttttctgtaatgcaggctgatgacgttgaatctcgttgtagatcgatctcagtgttgaacttggcttctgggttcgtggtcgtcaagactgcaacttggtgttgatattcttttagttttattttgttgtaatgttcattctatttgtgagtttatgggtttgaattcatatccaatattgtattttagctttgctgaactttacttcttttttattatattcatcaaaggaatattttcagtgtaatgtattctatatttgcttatttatttaatttttttattaattaatttttgttagttgaatataaatttatatatacacctattatcgtgatttaatatataatacatattaatttacttttttaaaaaaaaattaatatagaataaatattattaatttttttttaaaaaaataaaagcatgatttagtgacgctcattgagtgtctgtattatttgaaaaaataaattaaaaataaataaaaagatacatacagtgacgcgcaaatacatatagtgacgtgtaatgagagagtctaaaataatttagtgacatgcactgaagtgtcactaattattacttttcctgacactcacattagtgacgcgcattgaagtgtcactaaaagtttttagagtctttaaaagtgtgtcactaaaccccatatttgtagtagtggatgtatcaactatctgtaatttgtttcattatattattggactaaaagagaaataataactattc

SEQ ID NO: 241597 - DNA, 1053 bp, Cannabis indica
tctgcttctgattccacaggtacaaatctagtatgcaaacttcaaaaatctatatatggcttgcggcaatcctccagacaatggtacaagaaactcactgaagctctcattcaagaaggctttcatcaatcacaagcggactacaccttattcactagaggaaaagttgacaacttcatagctttacttgtttacgtggacgatatagtcattactggtcccaacatcaacattctccaacaacttcaagactctctacatgacaaatttaaactcaaagcccttggtaaactaagatatttccttggctttgagatagcaaggaccaaagacagtttatttctttcacaacgcaaatatacattacaattacttgaggacagtggttacataggcagcaagcccgcaaaggctcccatggatcctagacataagcttgatgatcaacaaggtgaactgttgactaatccctcaacctacaaacaactcataggcaaactgctttatttaacactgtcaaggccagatataacatatgttgtcaatgttctaagtcaatttatggcctctccacgaactcctcacttacaagcactacaacacctcattcgatacctcaaaggcagccctggtcaaggtattttatactctgcaaactcctcccttcatctcagaggtttttcggattcagattgggcatcttgccctatcacgagacgctcaacgacagggttctgcatcttcttgggagactgtctcatctcctggaaaactaagaaacagccaacgatatcacgcagttcagcagaggctgaatacagggcacttgctgctacagcaagtgaaataacttggctgcaatacctactccacgacctacacattcagcaaccaaaccctgccttcatctattgcgacaatcagtccgcaattcacattgccaacaacccgacattcccacgaaccgtaacaaagcatatcgagttagattgccacttcgttcgtgacaaaatcaaccaatccaccattcagctcatacctgttccaagcact

SEQ ID NO: 241598 - DNA, 504 bp, Cannabis indica
ccttaaatcaagagtgaagtgggtcacgcaacccagtttctacacataattttggctcgagaaatcaacagaaaatagagggattaagatcggcatggatttctaatcgatctatagtgttaattttgggtataaacgcatacgcttggctagatctgaattagtgcaaccaaaaaaaatgaaaaacaaaaaggtttgaatcgataagtttgaacatattgggttcgaaattatatgtaaataaaatattgtaaagtaatacaagatatttatatatccaataacaaattataagcaacacgaattgaaaatcataaaattaatttcataatttaattatataaaacctaaaactttatcttaaaattctcataatttactcaaccatttcacacatataatatcaatatcaatatatatatatataaaagaaagtacaagaatagtttacgtgtcattttataaaattttcttcctatttttcttaatttctaacacattctc

SEQ ID NO: 241599 - DNA, 1058 bp, Cannabis indica
tcatcacctattcgggatcccttgataaggatactaacaaccaggtcacaccaatccaagcaaccaaaactctaggctcttaactctagattcaccaacccaaacctaatcattgaaaacactgtctaggactacccttccgaaccttaccactcaaatcacatatgacaagtacaactcattcgaaaccattttgggcagaaaagagttcaaaactactcaactttcagaccttcaaaattaagtcattccttgaccaaaggctatcaaacttaccaaaaagagggtaatctaaacaaaacatacacttcaaaagcatctaaaaccacctaaaactaatttcaccatattgttgagtggactttgagttcaaaaactcgaactcctccaacacgaactacatcagctaaaatcttacaaaccaacacagaattcaaccttaaatcaaaccaacaacaattttaagctcaaacaaactctacaaaacctaacccataaaatccaaactaattacaacaaaagcttttcttttaaaaatttaaagagacaaaggagataggttaccttgatactccttctaattcaacactaactctagttagaatttcttagttaattggtgtgtaaattattataaaaaatctggtttgaggttgttatgacctagaaatggaccaaatggatgtgaaaacaacatttttgcatgggagatcgacttgaagaataaatctaaatggaagagcttgatggatacaaaagcagcaaaccaaaccaggtatgcctcctacaaaaatcactttatgggcttaaacaagccccaaggcaatggaatctaaggtttcatgaatttttgattagtattgggtatagtagaagtgattatgacccctgtatgtattataacaatgaaccaatttggttactattgtatgttgatgatattctcataattgttaacaaaaggcaggctatagaaaaattaaaacaaagtctgaatacagaattcgaaatgaaagatcttggagaagccaagatgatacttaggattgacataagaa

SEQ ID NO: 241600 - DNA, 1542 bp, Cannabis indica
gaagacactatcgtcaaagcgctcactgcagtgctggcaggtaactcggaccaggagggcaactctttttgctttctttagagcctgctccctgaaatcgcgaagctccttcacctcgatggttaggttggctgtcgtcttcaaatcagcttggtgcagctcctctagggactttagcctagcagttagttcttcaaccacctccttggcctctctaagctcacgcctcaccttggtcacagcctcatccatggtcttcagggcgtcgtccttttcctttaactcctcagccttggtctttaacgcctcctggtgactccgctccatctgagcctccttctactgggccttctcccaaatagccttcctctctgccgccaagtcttttagactcttcatggtctcatccatgcccccaactcggacatgatgtacccattgtcaataagagtcttcgaaaggcgaccagtctctacaacaatctggcataacaagaaaaatgtgtaagtacgggaggccaggcgccaaaaaacaaggctctagaacactaacagatagacttaccgcggtcatggcagcactaatatcctgaatctggtagattgagttcgtggaagcacagactgcatatctcttggctgggagttgggtcagattggagacaaagtggcttgtcaactatgaggcaaaaggagcgagggtaggcccgatgaagtagttgaaccagtctgtcaaggggtccatgtttagatcccagccgttcccgaagtactcaccacgtgaggaattctcatgggcctcccttaagacctttttcatggcctccacctcagcgtgcccctttgtgtattcagccatagtatagttatgcttggcaatccggagttgttatctctcttcatcagtaggaacgggagtcaggactatgctgggaggcacggtatattcctccgcctctggtaggatccccaggttagaactgggaaccggagtaatgaccctcctgggcttcttggtagactcaacctccaccatcttgcccttgcgcttccggtccagaggggcaagaatcttgccctcttcttcctcttcagcctccccatcctcatcaatcaagatgatttggactaagggaacgctcgaagaagacctccctggggtcaccgtttggtcaggtgccagagggaaggctgggtcgggactgtaggtctgggcaagagttgccaaaagctcgtccattggcctagctgcttcaacaaacaaacaaataagtgtcagaatggtcacgagaaattatgcacacaagaacaaagcagtaaaactaatcctacctagaaaatctaattcagccctagcaaagtcctgcactataatactggcttcgtcattcccaagaaagctgtccgacgggagaaaccagctggaagacagataggctgaatgatccaaaaggataggtgcgggaggcacggaccccatccgggaattgcctagaaaatgacctaagttggaaaaataaaagcccttggcatgatcacccca

SEQ ID NO: 241601 - DNA, 778 bp, Cannabis indica
attagtaatattctttaaaaattctatttcattaagttatttaggatctaatatttaattaaactaataataatataatacttaaaaaaaatagtaatcgccaataatcacttttaacatttctcttaattatactactaaccatatcacaatttaggtagtgtcttttaggctttagcatttctctttcattgccaaaaaaccttgaattgagtcctatatatatcctaccaccttgatacaatagagatcatgtaatgattgtgttacatagatatatagaccatttttccaagaaaaatacctcgaagaacaaactcttcctttctctcatatatatatagggatacgattttgtttactttcacggaatatattccgtggtacattagatgggtcttgaggtacattaaatgagtatcagggtacgtttctacatttttaacctaattatccctagatcaatctcagccgtcagatcaaataagtccctcatttgacggctgccgtacatcacggaatgcattccgtgaaagtacaatcacggaacaaaatcatatccctatatatatatggaaactcttcctaaatctgcatggtttgggatctgaacccacttcgcatctctctctcatctgtatagggaaatttgaattttcatgcttaataaactcataaattggttttttaaactaataatatgtataatttgtaaaatgggataactttttccaaaccccaaaaaccctcccattttcccaaccgtccctctctcttc

SEQ ID NO: 241602 - DNA, 1415 bp, Cannabis indica
ttatttttcccacttaggctattttttaggtcgatcccatatgggttctagacctccggcgcctattcttctagaccattcagcccatttatcttccaactggtttatcccctcgaacagctttctcggggatgatgaagccagcattatgatttgagactttgctcgggctgaattagagagtcagggtaggactagtttcattgcttttttttttgttgggcgtatactattctcatgaatatcctaacacttagcttatttctttgttgcagtaattaggcctatggaagatctctaggctactcttcctgaggcgtacagtcctaatgcctctctgcctccggctccctcccagtcggtgacccccgggaggtcctcctccaatgccccttcaggcgcgatcgtcttgatagacgaggagggggaagtcgaggaaggcgaggtggaggatgcgaccgcccttgagtgccagcgaaagggcaagatggttgaggctgaaccttccaagcggacccacaggggggacactctggcggtgagcaatgattccaggattccttccgaagcggaggatacattgtgccacacggcatagtgttgacccggttcccgcagatgaggagaggcaaaatctccgagtggccaagtacaactacgcccttgacgagtacaggtgggggcatgctgaggtggaggccttaaagaatatttttgagagaggagcagtagagcactcttcacgaggacgcctttcgaaatttgtgggacctgaacatggaccctctgaaggattggttcaaccgctttgtcgggcccaccttagctcccttcacctcggagatgaccagccagtttgtctcccatcagactcaattcccatccataagatatgcggcttatgcctccttgaactcggtttaccaggtccaagacatcagctctgccatggccgcggtaagtacttgtaatttattccatcctttggtattttgtctaaggcatctgatctcactcttgtctcttttttcagattactgccgagaccggccgcctttccaagaccctgattgaccatggctttgtcatgtccgaattcggggacatagacgaggccgtgaggatcctgagggacttatctgccgaaaggcgggcattccaggaggaggctcaacaaagggaggcccttgcaaaggcgaagttcccagaggaggccaagcaaaaggaagctgaggcggaggcgaggcaccaggaggccttgaaggtggagggcgaggctgcagccagggccagacgcgagcttcgggaagccagggaggccatggacgagatggccgccaaggtgaagtccttagaggagttgcatcaggcggacttgcagtctatggccaacctgaccgtggaggtgaaggagc

SEQ ID NO: 241603 - DNA, 1597 bp, Cannabis indica
aaataagtaaagtctctccagttattggtttagccaagattggaggagttgataggtgtttctttatgcttgcgaaggctttctcgcactcggctatttattcaaactttttgttgcctagcaatatattaaagaaaggcaagcacttattagttgatttcgagatgaatcaattaagcttcgccattcttcctgctaaggcctgaacttccttcgacattcttggtgatgacatttctatcaaagccttgattttttaggatttgcttcaatgcccctcgcattgactatgaatcccaaaaattttcctaaggagactccagaggaacacttttttggattgagtttcatattgtactttctcagtatctcaaagcactcccacgaggtcttttgtgtgatctccattttttatcgacttcaccaacatatcatcaacgtagacatccatgtttcttcctatctattttgcaaacatttcatttactagcactgatacgttgccccggtgtttttcaaaccaaaaggcatgactttataacaataaagtcccatgtttgttacgaagcgtgtatgctcttgatcaaggacatgcatttttatctggtaatatccagattatgcatccatgaacatcataagctcgtgtctagcagtttcatccactaactggtcgatccttggtagtggaaatcaatcctttgggcacgccttgttcatgtttgaaaagttgatacaagttctcctagttccattttgttttggaacaaggacaagattggatatccacgaggggaagaactccttgcatacaaagtttttagtcaataacttctccacttcctctttaagtgccccttgtctttctgaatctaagggccaccttttctgtgtcttcgctaggtaattcgggtcgatattcagatggtgacaaataattttagggtcaatccctatcatgtctgaatagctccaggcgaactgatcctggtttgccttcagaaaacttgttagttgctattttagtttttcatccagatttttcccaatgaatacacacttgtgggaatttctagatctaaaacaacttcttccaattcctcgattgattttaataggttctttcatctttaactcgaggatccaagtcctcgatgtacttcttgccttcctcagttgtgactgctattaattgatgactggcttttctattctgtagctccatgcggtaacattcacgagccaatagttggttacctcttaccacacctacacgcgttggtgtttgaaacttcagagataggtgtttaattgaactaactacccctagtctaattagcacttgtcgacccaacaatatgttgtaggccgatggcaagtcgacaactagaaaatcttgcattatggaagtggataaagccgtctcgtccacagttaatgggagttcatgattgacgacattgtcgcctgtaaatccacacaaatttaccatgcaaggtgttaactttgctctttctagtcccattttcttcagtgtgtccttataaaggatattcattgaacttccgttatcaaccaacaccctttttatcctttt

SEQ ID NO: 241604 - DNA, 1447 bp, Cannabis indica
gcataaaacccaacaagtacatgccctgactagaagaatggcggcacttaacagattcattttgatgtcaattgataaatgtgtgacgttcttcaacatattgcgaggcaacaaaaagttcgagtggacaaaagagtgcgaagaggcctttcaaaacataaaaaggcatctcacaacgccacaagttttagcaaaaccaataactggaaagacgttatttctttatatagccatctcggaagaagcgattagtgcagctatagtgcgataagagggcaagcaccaacaacctaattattacgtaagtaaaaggttactaggggcagaatccacgtaggcccctctagaaaaactcgcgttatgcctagtccatgcgtctcgcaaaacactgtcatatttgtaggctcaccccataaaagtgttaaccgatcagcccttgagacaacttttatcaaaaccaattgcttctggaagattgataaaatggtcgattgaactggagcagttcgacataacataccatcctcgaacatcaatcaagggtcaagctttagctgactttttgatagaagatataactccagaagaaatcccaccttatcagtgagacgcggaaacctggaagttatatgtggatggcgcatccaacgaatagggtttgggtgaagggctaatattaatatcgccgaaaggctttaagtttcactatgctctgagattccaatttcacgcatcaaataacgaggctgaatatgaagccttgatcgccggcttaaagatagcagaggccttgaatgtcaaaaatctcatttgtcgtagttattcacaactgatcgtgaaccaagtccttggggaatactaggccaaaggcttaaaaatgacaaagtatttagagaaaaagaacttggaaagatttgattactttaaaatcgaacaaattcttagaaaacggaacttcaacaccgatgccttagcaaagctggcctcgtagaatgacttggatgaactaaatctagttccgatagaaatgctgagcgagccaagtatatgtgaaactgaagacgtcgagatgatagatagctctccaacatggatgatgcctgttatcaacaatttactcgacaggaaaactattgtatacagtgccttggtacacaatgatcgaaggcaaactatatagatgaggttatttaatgcccatacttcggtgtgttcctcctgtagaagcaaatgaaatcattagagaaattcataaaggcttctgtggggatcatgcggaatggcaaagtctgtctaaaaagatcattaggcaaggatattactggccaacgatcaataaggacacacatgagtttgtcaagaaatgggaaaaagggcaaaaggttctcacatatacctcgcgtaccaccaacagaatttagaatgatgaccttgttgggttttatgc

SEQ ID NO: 241605 - DNA, 1240 bp, Cannabis indica
ggctaagttgaagggaggggccgaagccaagcagcatgctcaggagcattccgagcaggagaatgagctctttcaacttaagcatgaggctaagttgaagggagaagccggggtcaaacaacatgctcaagaatattctgagcaggaggatgaggctaaggaagagtaggaaagaccgctcaaaaggaagaagaaacttccgaccgggcacagacccattgaacatatgatccagatcagggagcccggtctacctgctcggtcatccacccctgtaggaggaaagggaaaagttgttctagagaagtaagaagactcgtcggatgacgatgccccatcagtacttgttcgggcaaatgcccctgccaaagtgcaggatactccatcttgtttttaactttcttaatcagcatgccttcatatttcttacgcttttttctgattatgttacttttgtcctatgcaaacatgtctcagaaaatactcgaagccttgaagaagtccaagagcggtgagacaactccgttcagagagaaggcacctgctgaagtggtcattgatctctccgaggaacaaaccattgtagaccctcctatctcaaaaatgactaagtccaaggattctcgaggaggtagctcggacaggccagagcaggcgagggtcggattcaagctggtcaaaagcgtgtccgaacagattaaggcccccgctccacctccggtaatgcacccagagactaaaagaggcagagaaatgctcactcactatgtgactcggtcgattcttgaggtgaacgagaaactggatggggcacacaacgacctttctctagagctggtgatgggtggagtcttgaaggagctttctagggtaagtcttttctgacaatttctttttgtccttcttcaattagtttagattctgatgttttctctctgtatagaccggtttgaagatggcttatgcttattcccgagctaagttggctacctctaagaaccctgccatttccaatacaatgcggacagaagtggacttggccaagaaggacgccaaggaagccagggttcaacttggggctgtccagatggagctgggagaggtcaataagaagcttcttactgctgagaacaaggtggccaaactgaccaaggatctacaagtcatgccatccaccgaacagcttgaagccgatattacctccttatctaaggaaatgaccagccttcaagaagaaagg

SEQ ID NO: 241606 - DNA, 1178 bp, Cannabis indica
gcttgtcagccattttcggtgctgttgccccacttttttgctttgtttgatgagtttaaaaggataacaaaccgatttctttagacccttttcatgtggttaaggttgatggtttacctcaacaaaccttgaagtaagttgtttaaagtatatattttcaagtgttgttttgtttttttctaggtatttcctttttttttctaatgttgttttcatgttatttgccagtgattgtgattttttttgaggcatcatttgctgaatacttcattgatatgaaaccaatcccttccatatttgctgctgagaaacaccgtgataggctggttgtgttgttcttcaagtatgctctcatgaaagaaattaattttgttgatagtgatgatgaggctcctccaaagggtccaaagaagaatttaatttagttatgtctttgttgtttttagctaaaagactaattgtttagttgttgttatttttataatcaaattatgttgacaatcatagaaaaattcttgtttctagcaagtgtttttatatggttattgtctttattttataattacattttgtttttttagtcgatatattcactttaacccagaaaaacatatccataacaacctaatcacaacctgcttttaatgaatgaacctaacatttaaacacttttctataatatttttgttatttcaacattaataatgttaatatccatttttgggttaaaaacatctcaatatcaacttaattacaacttgcttttaattaatcaaacaaacatttaatcacttaactgtaatattaatgtcatttttatattaatgatcataatatctattttctttcaacaatacgtttgaaaaacttttacaaaataaaaagttccacttaaaaataacgaaacaaccaatgaaaaaaatatgtatgtttatctaaatatttcagtatagttgttttctagttattgaatagttgttttgtacttctacgatgtaatttttctgcacgtttatttgttatgtcccttttgtccacacttaccacacttgttctatttttttgtttcccaagatgtcgtcattctttttttccttgaccttccagatttgattctttctttgggaggcaaactatgatgtgttcaaaaaattctggtagatcccattctctaaggt

SEQ ID NO: 241607 - DNA, 708 bp, Cannabis indica
attaaaagttggtagtttgggtgcctgctgcctcttttctggttcggtagcttcaggttctctgtttggcttttagcctttgtgtgttttgtttatctttttgaataaccctttttaaaaaaaaaaaaagatattttggacctcgaccctaatctggaccttgagacttggattcggaccccaaccccaaactcggacccaaacctcgaacacaggactcgaatcccaaccccaaacctagacttggatcccgaccccagaccccgaacccaggccctagacccaaccccagacccatacccgtcttaaatgttatgaaaaaataacaaatgaaaatgaaatttacaaaatacacttttattttctgtttttagaattaaaacaaaagtggttatagaatacatttttgtttttaaaactatttttttttaaaaaattactttcatttttatgataaaaaattagaaaataaaaagcacaaaacgccacctatcttaattgcaactggtaaaatctcgttttaacacaaccgataatatattggagatgtacatttatgatttattactaaaatataactcattgtaaaaagtattttccaatagtctaccaaaaattgatctaattttttttttcccttgatttctctctcgctcagctcgagctggcgccatggaaaaaacgagatctaggaatttggggaagaag

SEQ ID NO: 241608 - DNA, 815 bp, Cannabis indica
ggaggaggatttggtgagaatgaagcagagactggtgttgcaagtgttggagattgggattatatttcactcagtcattattggggtgaccttgggaatgtcttagaatcagtgtactattagacctttggtcgctacactggcgtttcattagatttgtgaagatcgattcaatggtgcattcaatttttatagattattatctgtatataggtattgccagttatgttacttaaatataaaattatcaatttattttctctttcctcgcattttctcaacctcttcttcatcaacgtttctctatttagtacacaacacaagagatagaagagtctgcagcgacgtctgaaattggaactgatgttggaagtaaggtgtcccctaataaagtcaaagatacggtatgatccacataccaactctatttattggagatgtacaacatgttctacatgattttatatttacaaaattttaacttactaaaaagtagtacatccattatttgttttacaatctttgccatctatgcagttgaagtattatttttatctctgttgaatgtttggaatattcatacttttttctattctgcgctaaagatgggtttaaggatctacgtattatagagttataataggatggttggccatagctaggtcctatacaactttgttttaccacaatatttgagaaatttggagcgaagaagcattgtgaggcaattgtttcctatgatggttttatgatgggtaaattgcggcataaatgcttaatgtttcagattttatacacttaaatacctaatgttt

SEQ ID NO: 241609 - DNA, 682 bp, Cannabis indica
gaggtaaatacaaaggcaaaaatgttgaagaagcgctctccaaaacaccagctgccaaactacacattgaattgcatgaagagacgggcaccccagtcggcaaaaacggaaaaaagttcaacaatatgtgtaaatggatgtctcgcatgtccatccccatgaataaattcaaatgggaagatgtttctagagctaaaattaatgtattgtgggacaaactttaggtatttcataatttattttttaatttttactttactatattcttcttaaatttctaattaatgtattaatgtgaatgtgtaacttttttgcaaacaaagtttgtcctcccacaagataactctacgttcgtagactatggtgagtacgagatgtcaaagaatttacgtgactggcgatctgactgtaagaaaaaatggatacaaaatattgaggagcttggacaggagagggcaaacatgttacctcctgacggagtaactcagaaggtgtggagcgattgcattgcttagtggagcacagacaaacaaaaggtacttaataaaaattttaattgtagtaaagcttcatgttatatagtcaataatacataattaattgttagaaaaattattaatttcaggcaagagcagcaaaaaaataaagaaagtcagggtaagatgaaacttcaaggaggctg

SEQ ID NO: 241610 - DNA, 1198 bp, Cannabis indica
atcggttatccaagtttgctggttagctggtgcccatagatttcaccagaaaacaaaagtatgttcgaggtatgaatgctacaatcagtcgggactttaaaattaccacatcacatgacactctatataagagagtggtagacttggccttaattgctgaggaggccgagcagcaagtaattaaagagcagggtgtaggggatgccgtcacggtatcaaatcctcctgctagtggtaatatcagtaaggggaccgacagtggcaaccttgagcacaaacggaaggctgaagcttccggagaatcagggggaaacagaaagtttcggggaaatagaggtggtcgtcagggtcgcgggtcctcattccggtcatatcccaagtgtcctaaatgcaagaagcatcatcttgttgaatgtcgagccaagtcatgtttctagtgtggcgtagtgggccactttatcagagattgtccccagcccaagaaagaggagcctaacaagaatactgcatagaacccagggcgacttttcaccatgactcaggctgacgctgatgctagtgcgttagttgtgacaggtcagttgtctattaatggtatttcatatactgtgttctttgattcggtagctactcactcctatgtatcgagtagagttagtgaaagtttccacaagccgtgtgatatctatgcttcggggttaccctcgggagaccttatagcatccactaggtggattcggtgcttgtctttttggattgatggttgtgagttgaccgccaatctaattgagttacaactgtctaactttgatataattgtgggaatggatttcctatataaatatggagcgaatattgactgtaagcgcaagatggtggtgtttgagcccaatagtgccaacccagcggtgttcgtgggtaagattcaagggacacgcatatcaagaataacattgttgaaagctaaggacttgatgggcaaaggttgtctggggttcatagttactgcaacggacaccagccaacgtgtgacatcggggcctgacaatatgagattggtatgcgagttcctcgatgtctttccagaagacttgtggggatttccacctacccgggaaattgaatttgttattgaatttgttccgggagtggatccagtatctaaggctgttgggttttatgttggaaattattttac

SEQ ID NO: 241611 - DNA, 858 bp, Cannabis indica
acacaaatatctactaaaatattccaaaaatattaaatctcataattattactgttgtaacatctttggctaatccatcaggtttccacatttgtcgcaccctaaaatatttattttataaatggcacatataatactaatatattctaataaaatctctggaatttacaaattacacatacttatttattcttttaataatctccaattaatacataattagctttgtaagattagaatcttacccattatgccctaaatactcatataatttcatattaaataaaataagcttaagtaaacataatttcttttggggttttttctattttgggttaatattactttaaataaatatttatactactacaagaaaaaataaatatttatatagtttattaatttcaaatataatatttttaaagtttgttatttagaaaaaatacggtagaaaaactcccctaaatatgcaaggagaagtgtgatacgcatgtggctatgtgggcgagtgagggacaaagccttagagtttcctgacgctcagaaactgtagcgtcagaacacagcagtagttgccagtggcgaattcggacaaagcgaatttcaatgtgtagagcttcttttctcgacgcaaaacaactaaacaacaacacaaaaataactagaaaacaacttaaccataacatataaatcaattaaagtttatcatattatgcaaacaaaaataaatttataagacaaaaacttcaaaaaatacaatacggaaaaaacttaatacaaatgaataaacaacacgataacaattctattttaatataaaaattaattgagcataaacacttacgtcaacttaaaaaa

SEQ ID NO: 241612 - DNA, 819 bp, Cannabis indica
acttttcaatattttttttaaacagttttttgtttttcttaatcaatattttggacttcgatcagacccggatccaaatcaccccatggcactagcactgaacccggcctctgacttgaacccgaatttgatctcacacctagacccgacgtaaataaaatcaaaaaataaaactaaaaatgaaatttacagaaaacacttttgttttctgtttttaaaattaaaaaacaaaagtggttacagaatgcatttttatttttcaaaaataaaatttttgaaaacaaaaattttactttcattttgtgattgaaaaattagaaaataaaagtgttacgaaacggcagttaattgttttaagaaaataattaattatagttaatttgattctaaaaaataaatttttatatgttggtaaactgttattacaagtcaacaaaaatgtaatcatcatggttacaataaaaatgcaggaccggccctgagttgaaattagccataggcaaaaaaaaaaaaaaattggcgtttactataaagataaatggtatttttaaaaattattaaaaaaaaatatgtatattttttaaaatgtattttttttatttgggctcctaaaatgagcagatactaggtgcgagcctatcccgtctaaatttagagccggccctttaaaaatataaccattaaatagtcacatatatggagtaataaatttttgtaaataaaagataaattatttaggatgcattaacattttataaaagttatatatcgatttgttttatgtctttactatttttttttttttagtttcatatatat

SEQ ID NO: 241613 - DNA, 983 bp, Cannabis indica
tctctctcatggtgtattttcagctaatataaataatacaattttttaaaaaatttaatagcgatccgaaataatttataatgaacacgttcatataaaaaaaaatattgacaaaaatacttccagatttaaatatcaaaacaaatataaattttactaaaacaccaattaaagcagcatactgatagacttactttatattaatatagtataggaatatataatatctgcagatctaattattaagaaataaagttggtttttttttttaaaaaaaaaaagttagttcaaatttttttatatctactcttttttttttatcgattcagtaattataatataccattagtaaaaaaataaaattaaataatgtataaatttctatctcaaattaatattcatatatattttacaaaaatattaaaactaaatatataaatttattacattacaaaaccgcgcaaagcgcggtaatatttcctagtatatctataatgttattgttagggcaaacgaggtgtcggtttaatctttgctcttcctaccttatctattttctctatttttcaaaattttcactcacttttatttttttaatttaataattctattaataataaaaaaaattattatgtaattcatttatgatagtactctcacacatacgtttttttttaaaaagaaaaaattaactcttttggttatagttattcgataaaaaaaagttattgatatcaaaataagttacaataagttacaatagtatttattattcttattaataaataagtatttatgatcagtttattatccttatttaaactgatttgtcattttttctatttttattgtccttattaatttgttattttgggtggaattccgttatgaacgtcttccgaattactgtatggagtgtggacgaattggacatgttttaacaagtgtgttgtgcatctcgaaaatatggataatgggattga

SEQ ID NO: 241614 - DNA, 873 bp, Cannabis indica
tgcttagactgtaggcaagatctggtcttgtgcagagcatacagtacattaagtcccacacatgaggcatatggaacaatgtccatttgagccttatcttcttctttctttggggcttgggattgtgaaagcttgaaatcaggtgctaaaggtgtggtaactggttttgattcactcatgcagaacttgtctaatatcttttgaacacagttgctttgtgacagggatatactgttagggtctctctcttttgatatcaatcactaggattcttttagcctaccccatatctttcatttcgaattctgtactgagctactatttcaatttgttgatctctagtctttccttcccaatgatgagaatgtcatcaacatatagcagtagccaaattcgtatgctattgtagtgcacacaaggatcatagttgctccttatgtaaccagtttctgtcatgaattcatggaatcttaaattccattgtctaggagcttgcttaagcccatatagagacttcttaaggaggcaagcttggtttggtttgctactcttgtagccatctggtttagccatgtagatttcttcttcaagctttccatgcaagaaggatgtctttacatccatttggtccatttctaagtcaaattttgtcatgatcctaattgaggtctattttgccattggagagaatatgtcattaaaatctataccttccctttgactgaaaccttccgctactaatcttgtcttgtacctgatctcttcacctagcagtccttccttttccttaaaaatccatttgcaatcaattagcttctatcctgttggcctagtaacagtcttccatgttttatttttcttgagtgatgtcat

SEQ ID NO: 241615 - DNA, 1408 bp, Cannabis indica
atttctatatatgacatataaaatgcattctgaattcaaataaatcatcataaattaataatttagcattaataaatatttttcataattaaaccctaattatctgctaatttccaaatttaatctaagcggtctttacaataagtgggccacttctgagattaatgcggtagaaggaatggtttccaatatgacggattgaaaatctaagtggttttacatattcaaagtaggaggagttagggcagatttcaatcgtcaacctagtacgtcgcgtatctcaacacttagtttatatttttgttaccttgtgaagttgccaatgttttgttttttgttgatcacagatagaccggctcgacctgtttttgaccctgctcgcaaagaaatcactgaagttctcggtagcttcctgttcaagatcgcgattggcaattcctgtgcacgctgcgagaacataagctaattcttgagaacgccagcctccatcgagagccagtatacaaggagccatctgagaagcaaaaagaaggaatgtaagcgtctatctaaacaggcatcaagaccagcatcaggtaataatatatcgaatataaacatgttcttttatataataaacgtatactcatctcttggcttttcgcagaaatgaagttcctgaagcatgctcctatcctcaaccgaaagcctaaggcaggaactgcgacgacttcccctatccttcggcagaagtggaaaagcaaggttatcgtaactccaatggctcactcctctaagaagcatgtcaaaattgcccaagacaagggtaagaaagtcatgattgatcctgctgtttgggctcgcaactttataaccctccaagacaagttcgtgagcgatgactttgtgtcgaaggtcgaaggggttcctgccgaggaattgatgtcgcattctgcaaaactggcatcgtagtttatgaccatgttcttgaaggcgtttgtcgctggctccaaggaagttgatcttttgaggaaacagaacactcttcttcaggagaatgtgcggaagttgaagctggatgcgacttccagggagaaagatgtcgagaacctccggaaagccaaagagaatgcggaggagaaggcaaagcaggcggaggataaggccaacctctctgaatcgcgagtttaggaattgacatgcgatcttgagactgaaagggagaatgggaagaaacagtacgaacaggctgtttttgactatatttatacgacgttatccaaattgtcggactttgacttctccttccttggggcagaagcaactgagatatccgaggattttcgtgctatgtaacctaatcaaacacaaggatgcgaggaaaccttttcctaaagaagcagagaatgcggacacgagaggaagtcgc

SEQ ID NO: 241616 - DNA, 1504 bp, Cannabis indica
tatacattaaacatataatcatgaaataaatcatgtgaaccatgcaacataaaataacttctaatcttttattaagtagtaaatctgattatgtaatgggttttatttaggacacaaaatctaacacttgtgccattttaatgagcattacacctttgtacttactctttaaccaagttccatccattacaataacctttctcataaaatgaaatactttaatgcatgccgcatatgctacgaaaatatatttgaatttaaagtattcatccacctccaaatgtgtgatcgtgcctgggttcatctttcgaaccatgtacaagtaagctagaagatttagaaaaatgaattcagataaacctctaagaaagttgtttgcaatcttttttcctttccaagctttccagtatgttatcgacatgtgattgttttgcataattgtcattatttctttaggtttcggtgtctctttctgaccgtcaaaacttgacctcacgacattagcagctactttcacacttgcttggcaatattttctctttcgactgataagggagcaagtgtgagtgttacaataagttcgtattgaaaaacactctgaattggtaacttttactacacgtactgcccatttgcatgacttgtcaatgtattttgtcagatagattgaattggtatattttataattttcatctcaaagcaagccttcatggaaatatctttcaacataaacttcacctcatctttattcttgaattcttgaccaattgtcaaatccaacccatctatgaaactaagtgtatcttcacttatgagttgattttattggtctgagtgctccaacagatcatagtagtcaagtgagtcgatgtgattttcagtcatcaattcttcttatgaacggtttggagttggagatgatcttgttgtacttctgttaagatgatctacatattcacaacaaagattaacaccactttcacctagtacagaagcaatatcacaaacatcttttttaaagtagaattcacgatcaaagtagttatctactaaggattgctcaatttcttttgtgcaactttcaatctcatttttacctatgtctttctttataagctccacatgtagtgcaattccgtgattgttctctccacagtccaaaagataagctgcaagacattcatccccttgtaaaataagtggcgacatgttttcttcaagtgttaggagtaacttatttttaattcgatgtcatttttattgtctccaatcttcttacacaatttatccaataacatctcaaaatgtagtgctcgaattattgattatagatataacttgtttatttttggcgaccacttatataactcatgttcatccttccactccccatcgtactaaacatagattactattcaagtcattcctgtatgaaaaatagatggttgaaaaaaaaaaatacaatttttactaattttttacatttaaaataaaaatttaata

SEQ ID NO: 241617 - DNA, 1372 bp, Cannabis indica
atatggaggaacttagttgataatgtgtgatgctaattttatccttaagaatgcagatagaaccgtctctcatgggagagaccaattagtcccggtaatcaactcttcaatcaacttttaggggctagtggaactacctatcaaaggtgactgcctgacttgggataaccatagagatggagagcatcatataaaatatgcgttagataaggcccttgccaatgatgcatggctaacctttgaatcctaaagctacattgagattgttttcatgttgtttagctctgaccaaaggcccttgtgtctctattctagttgtttggacgggcatatgtaaaggaaattataaacccgaaaatattctttagtgatgcgcacatcaatgtttgacatgtggtaagaaggatgacgtcatggagttaagtagactcgagtcatagcagtcgacttgggaggggatcctagccctacacccaagttaactttgggagcttcaggatggaagttcaaacttcaataacatgaatccagctcactatctttcaatatattgtaccatgaagacatggattaaccaaatccaagtcccgggagctgaaattacacgaacctataactcgaaagccaacttgggcacttagggtttcacccaatgccaaggttgacatcccagactagggttacagtttttaggatcatcttattgaaaatgggtcaaaacatgcattgggacatcaactagacaaaccacagacatatttgaggtgtcaaaattaaaatcagagcaagttaatttttgagcacccaaagcctcgtagcctcgagcaccccaacgcctaggttgataagttatcaatctaggcgccttggaagtatcagattgatgattcgacttttgtatcttcttaattagtcttcattagaaacgaggaaatatgttctcctgaggaagaaacaacacatcttgggtgctaaaagcaaggcccaacgccaaggttgacattttgtcaacttaggccaacttcgatgatgtttttcgagaactcttccaagattattttccacttttagaaaatattgagattcaactatttttggggaccaaacggaactttcaaagggccataactgggacccagcacccaggttgtcatattatcaatctgggctataagttttcatagtgatggttaacatggtaataccctaaatatcgctataacatgaaaatctagggttcccaaaactgccccaaccggtaaaccggatcttaactggaaaattggtttctatacatgctgccagggggaaccggtcgaccgattccacagggcaatactaaaccggtcgaccatttcagtacatgaatcac

SEQ ID NO: 241618 - DNA, 906 bp, Cannabis indica
gaggaggagcattggactaaaccgggtacaaatatggtgaagataaatgttgatggagtaatttttgaagcttataactcttatggttttggcattattgctcgagacagctccggttgtatcattgaaaatgttacttcgtgtagatcaggtagcacttcccctgaaattgttgagctaatcggaataaaggaagccctaagttggataaaaattaagggatggacttttactatacttgagaccgtctgtctgatggcagtccaagccatccacaacaactgttttattccttctacatttgggatgttggtccatgactgtcaacaccttttatctgagttgtctaatgttactttgtcctttgttaagcgctctgctaataaggccgcacatttccttgcgcgtattattctttgtcagattgcacttttgatgctagaaattcaccttctgagttggtgaacattgttatgattgatctcaattattaataaagcatctttttcattcaagaaaaaaatatatataaataactctaagcattacaagtagacaaaatatgtttcactaacctctttaatgatatctttcatagtttatcagaaaaagttgacagagatgaaagtatatgttattttctttttcttgaaaaggggcttgtttttgctatttctaatattgttttttagaatgtcaaaattatacaattaatgtaatattaatatgaatggacattgaaagaataaaaataaaataaaaaaaaataaataaaaatttagaaacactgacaaaattacaaaaattagcttcttcaaaaattatggtgctatgtcacttatattagaatatttctaattaaggaaataaaataaagtattgatttgtgataaatgaatattttat

SEQ ID NO: 241619 - DNA, 864 bp, Cannabis indica
cttacctctcagagtaggcacaagagttatgcagatccaaaatgcagaaatgtgaaatttcaggtaagggatcatatattcctacaagtgtattcaatgaaggggattaaatgttttcggaaaaagggcaggttatgccgtaggtttacaaggcctttcgagattctcgaaaagattggattggtaacttaccatctagccttgcctccagcaccttcaacaatccataacgtatttcatgtttctatgttacagaaataagttccagttcccactcatgtgctgggttatgaaaacctagaacttcagtctgacttatcatatgaggggcaaccacttcagattttagacagaaaagataaagtccttaaaaataaggccatagctttggtgaaggtgctgtagagaaacagtaaggtggaggaagccacctcggagttggagtccaacatgaaagctcaatattcagagttgttaacgttagattaagaggacgaaatctttttaatgggggataattgtaacgaccgcttaattttagtatgagaattagcagataattagggtataatttggaattagaattttaattatgatttgtgaatttatggtaatatatttgaattgtaggtgtgctatttatattatatataatttcatgtttttcatattttatgctcaaaaacagtggaacgtgacgtttggccgatagagttacattttcttatgatttaatattttagtaatcgcaggaaaaattagatagacattgggaaatttgagaatatttattgttttagatttgaccaaaaatgcccctaggtggcaaaggtgctcttagactaaggtaagggcgaaattggt

SEQ ID NO: 241620 - DNA, 1003 bp, Cannabis indica
tcaagttgtgtaccactttgaagcgttgtggccttgacattctctattggggtacttctatttgtgtaggtaaagtatttgaactttaaatttcatacccactcatagatgtttctattggctccgcaagattctctaacttttgcagagattgttgatggctccgcatagtttcatgaaagctttgctcaaactacaaggtattagttgcaaacattttaatcagctcagcaatagttgcttttttcactatttggtgcaacatgagtaggttattgaaattgttcattatctgttccatctgaatagtagaagccaccaaagtgttgagtagatcagtaagagaatgatcttgatcttgtggtgctacaggaggatagtaagaagttggttgaacatattgaataatcccacagtaggaagcgctagaatagtctctccattgttgattaaatgtgcaagtgtcgtagtaggaattatattaataaacttgtgacgagatataatatggatcacagtattattgattgtacatcgtcatgtttataaagaaaaatctaaaaattaaaatcacaactcaaagaacaaattagtaacaagaaaaaaaaatgaataacaaattgaataaaatagtcacttgcaacgttgccaaaaatttgatgagtgtggtaagccacaacaatttactaattattttatttctatattaccaattactttagtataacggtaaatacaagtcgatcccacaaggactattatcaatttattattcaaatatttgtaacaagaattaaaaagggggtttaattataaagatccaataacaaaaaaaaaaaaacaaatataatgagatactacgatatgaaataaatagttaaaggttaatctccaccctcaacaatcatctttaattcctaataatgaatgtaatttcaaatttctaatcaaactattaatcccgcaaataattctaaagtagtcaattatcttaatctcccta

SEQ ID NO: 241621 - DNA, 801 bp, Cannabis indica
ttagcaacaatcacatctaaaaaaagtatttgaatttgtggttaaaaacataatatgtccgtatggactcccgcacaaaattatttcagacaatggcaaacagttggacagccaattgtttatagattattgtatcactcatggaatcataaaaagtttctccgcagtggtaaaccctcaatcaaatggccaggtcgaggcggtcaacaagacactcaaagacaccatgaaaaaacaacttgaagaggctaaaggaaaatggccaaaggaactactaaaagtattatggtcatattgaacaacagagaaacacaacaactagacaatcaccatttgctattgcttatggttatgaagttacgctgcccattaaattagaacctccgtcccacagaagaatgatctacaatcaagaagctaatcatgctctcctagtagagtcacttgacgagattgaagaaaaataagccttaacaaacctaaagttagtagcacatcaacaaaaggttgctcgatacgtcaacaagcaaatgagtgcaaggaatttttttgtgggagataaggtcctcagaagagtattcctgaaaacaaaagatagtgcgactagcgtgcttggacctaattgggaaggaccatatgaggtggttgaagttatagactctggagcatataagttgggaccgtatgacgaaaatatggagctcgctcctgtacaaaggtatttgaatgggggaaatttgaggaaatactaccagtaagtgtacgaggtcggatgacaactttaagtacacaatgcaagaa

SEQ ID NO: 241622 - DNA, 820 bp, Cannabis indica
tgcggattggattggattgatacttagtgaacacccctagtaaaaatgcactttgagtatcggatatgatggatggcataacactcttgagtctattagcaaccacttaggacacaatcttgtacaacatattacataaaacaattgatcttaaatctcccatatccataggcttcttcttcttaggaattaagattaaaatagttttgttaagatctataggaagaaacctattataaaaaattacttgaccatattgatgatatcatctttaacaatcagccaacacttctgaaaaaaccaggggtcatacggtcaggctctggggatttatccggatgcatttggaacaaagctttgcgaagctcctcatctgaaatcggtagcaacaactcgacattttgctgtaatgatacacaagtttgcacacagcttgtgacttctctccaatcggtttgagaagataaaaaaagttcgttgaaataagaaaccataagttggtccaaaccactatcccagtcaacccacgcaccagaacggtcttcaagttttgccacaaaattatttcttcgtcttgtagttgcagaagcatgaaaatatttcatattattgtctccttcttgcaaccataattgcttcgatctttgacgtcagaaaacttccctttgcacataaccttcggccaaattcttatttgcttgtttgtaattggcaacggagacttcatcacgattcaatttctacctttggatctcatttttacacttttttaatctttctttaaacttcccagtaacctccttactccaatcaaccggct

SEQ ID NO: 241623 - DNA, 903 bp, Cannabis indica
gtctctgcggtaatctgggaaaagaaacaaaaatggaatcagatacattgagacaagacataagtgaaaagaaaagaacgattcacaaaaactcaccgtagccagggcagcgctgatgtcctgaacttggtaaatcaagttcactgaggcgcaagcagcgtatctcttggctgggaactgagtcagatgggagacaaactggctggtcatctctgaggcaaagggagcaagagtaggcccgacgaagcggttgaaccaatctgtcaaagggtccatgttcaggtcccaaggattccggaaagcgtcctcgcgcaaagtgttctgttgctcctctcgcaggattttcttcagagcctcaacctcagcatgtccacgactgaactcgtccagggcatagttgtgtttggcatcgcagagcatttgcgtttctttgtctgcgagaaccggggtgagaacgatgccgtgcggcacagtgtactcctccgcttcggaaggaatctcggaatcagtgctaacagccggagtatccctcctccggggcctcttggaagactcggctcgaccatcttccccttccgcttgtgctcaaaggcggctgcgatctcgccctcgtcctccttgacttccccctcctcatctaccaagactattgtgcctaaaggggcactggacgaggacctcccgggagtcaccagttggattgaagtcgggggcaaagaagcatccgggctataggcctcggcgagggtagccaggagatcttccattggcttggctgctacagcaaagaaataaacaaagtgttagaataaccataagaaagcatgcacccaacaagaaaacaataaagataatcctaccctgactctctaattcagccctagcaaagtcttgaactacaat

SEQ ID NO: 241624 - DNA, 672 bp, Cannabis indica
atatgaagtttgatttgaatctttgataaacaggttgtttgtttgttggttcgattgattaatgcattttttcttcaatagtagatactatgaacaaattgttatattatatatgcttaatttaataaataaaaaaaataattatttgaataaaaaattaatttttttaaagagttgactgagttggctgagttgatcgggtcaacccgccaacctgttaaacctgaccaactgaaacccgccaacccgtgacccgctgacccgccaacccgccaacccgtgccctattcgggtccgggtttggtttcaattttttgaacccgaaactcgccaacccgaaacccgataaacccgcccaatgtttagcccttattcaaaataatttgattaatgagaatattaaagtagtgaatataattttttaagaactcataacttatatagttgtgcgtgaaaatattaaaatataatagagtagctttttcaaaattttgaaaataatatactatacggcaagtgttagaacttctcttaggaaaatacttaaaaaaatactccatattaaactttagacacccaattaatctatacaaaataattcttttgtttacatatccttaactaattaaaaaaagccaaaacacaattaatcacatgctctctctctctctc

SEQ ID NO: 241625 - DNA, 871 bp, Cannabis indica
acttaaataaaagcctaatattttttttattttttcattttgggcccccgaaaagtgtgggccctaggcacgggcctagcccgcctatgcctagggccggccctgattaggagggaaaataatatcattatctaagaattttttctatatatatttttaattttacatatatataaatataactatatgcatgttaaacgaatgaaagagagtgaaagggaaaagtaattctctgttattgatagaagtgtagtacagaatatatatatatacaatggcttaacagaaagatagaggtgtcaactaacagtctgacacacattacctaacataacagaaaataggaaactaactaactaactgttaggtaactaacacactgtacatataatattgagaattacatatccttaacatcccccctcaaactcagggtggagagagacaaaaccctgagtttgtcccttaaaaagagaaatctgctgttggagagagccttagtgagtacatctgcagtttgatcataagctggtgtatgtttgactgtgagagtcttggcaagaaccttttctcggacaaaatacaagtcaagttcgatgtgtttagtgcgagcatgtagtattgggttagcagacatgagcactgtgctaagattgtcgcaccagacagtgggagatcgtggaatctgaatttgtagttcaccaaggagagcttgaatccacgtaatctctgcagtgatacttgctaagcttcggtattctacctcggtactggatcgagatactgtgtgttgtttttgaggccagcagcagggttcgacccgagatcacacaaaagccagtagtcgactgtctgtcatcaacatccgatg

SEQ ID NO: 241626 - DNA, 1517 bp, Cannabis indica
tggatggccgagcaggtagactgggctctctaatctgaattgtatgttcgatgggtctttgcacagtcgggagggttttcttctccttttaagtagcctctcctgctctgaatattcctgggcctcatcctcctgctcaaaatattcttgagcatattgtttggctcaagcaactccattcaacttagcctcacgcttaacttgaataagctccttctcctgctcagaatattcctgagcatactgattggctcctgcatcaccattcaacttagcctcacgctttagttgaatgagctcctcttcttgcgcggctccctcagcccagacagcagtggactttttctttctccccttaacaggttgaggtataaattctgctagataaagcccgtactccacaaacttggcttccgaggtcaacagagtgatattctgagcagcatccggcagtggacaatcctctaagctctgtccctaagagctagtgtaaggggtggacggtaatatattgggatttgttaaaaccaagtataagtggtgtccatgccttccacgaaataatactcgtcaacaaaaccctcgagcttgctaaagaccttgtccacagtgcatgtcaaccacttgaaatctggttgagagaagtagacttcaggtcaaagaaccatttgacctcgtgcggagatggcacaccccatttctgaatggtgtagaggatgaacatggcagacaaatacttaatgcctttgggagtaaattgggttgaacaaaggcgaaaataatctgccaccttcttgaagtatgagtgcaagggcaacatttccccttccttagtgtgtgcacctgaccaagcacacatccttgtccaaggccctcatgcatgcctcgctgatcttggatgcaggactcacccatctggcacctaaggcacctttcctcctgtgaggaactgcttcagtgagctcctcggtgacatagtcttccccttcaaccaagacttcaccctcagcagacaccggctccccagcctcattataccttctaaagtttaaaggttcgaccacttcttcctcctcagccccggaagggctcctaggatggatgtcgtcctgctcctcaatttcctaaacctcaatgtccccctcatgatctccctcctccatgacgggcagatcttgttcggcacttggtaacgtggcgagctgggccacatgaggatcagatgcgttgaccttccgcaacgtcggctttgttcgggccatcatcctccttttggacagacactggtgtgaatgtcgggcaaccgtaatagcaggaacagcaattgggatgccgaagttacccgaacttggacagccaacaggaagagtgtcagcaacacctggccagacaatatatgtccacttggacaagagataacgcctccaacctttctttaattcctaaataaagcgctcgtacccctctccggtgatctgctcggagtaataattgtgttgcactacggattctggagt

SEQ ID NO: 241627 - DNA, 1343 bp, Cannabis indica
gtgattaattaaaaaatttcttacaattagaaacataaagtactaaatttataaaatcccgggatcccgttacaaaatatatttacaaaagtttgctaatcatatacaaaagttctgtcgcctagcgactatacaacgaaagccctgatgtcccaaagatcgtacgctccaggcctaaccgccccgacatgtacaatcttcatctgctcgctctcacggctcctcagctttagccttgcccttacctacacgtggaaatagcattgtgagtcaacagactcagtaagagaagcataacataaaacttaataatatcccgggttataaccaggcgcccatacacctgactataaccctaatccccatgtcccacacggtactgggtctagaacgttcatacaacaataccatcgactataatgtcagcctatacttaatatgctagtcatacactagccaacatacatttatcagtaatcaatacaactctaagtatattattactgttatcaatgtaatctaacaggcataaacaacatgtatgctaaacatgtaataacatatgcatgacattatactaatcttacctcaatttcgaattcaggtgtatcgaccaacctgagtggaacaactgctcggcgaattacaggctcctaaatcacatcgataacaacatggataagtgatacgctaaatcacaaccagggacttagattttaaaccaaaaccctgtctactgaaacttaacatggtaataccctaaactaacaaggaattaaccaaccaaagccctgaaactaacatgaattgacaacatgaattttttggggaacccaacagcaaatctgggtaaccggttttacatgcattgtaaaatcggttagccggtttataccagaatacctaaaaaaactccaaaacctaaccaaattgattccaaactttaccaaaccttctagacctagatattataccccaatagacatattccaagcaataaaacaactacccaagctcaaaatcaaatttcaccattaaagagccaagcttgagttctaaaactcaaagcttgctcaatcaacaaaccagccatcaaaacatgcttaattcaacatttctaatcataaataaactttagaaaaaaatatcaaacactaacggtagctacagaactgtaatacccaaaatcatgcaaaattctaaacttgaaacttaagaaaccaaagggagttactcaaaggcttaccttggcttaaatcactaacaaccaactgagattcacaagaattacaggaaaaacaccaaccctagcagccctaggaattgagagagagagagagaga

SEQ ID NO: 241628 - DNA, 697 bp, Cannabis indica
acaaaggtgcaaactaagacagtaatgatcaaacccaaaaaatagtgaaataaaaagacatacaagaaaatagagagagataaatcacttactgtttgacatcgggttttgatgcaatgaacgattcagcaatcgacgatgcagcgaacgacgtggtgatctctatgaatgcttgaggtcgtaaagaaaatctaacgaaactcgcaagaagtaggtcaaagacaaaaatggcatgcaaagctttaaaaaatctgggggggttttcgcaaaaaaaaatctcaagaaattttttgaaatggcaaaggtgatgaaaaggtggctctttttttttttttattaccattgggttgatctccgtcagattaaggagtaagtgatccaacgggtagataataaggaagaagtggaaaagatggttaattaatgcttatgatgtgcctcaaaactacaaaactgccaaaatcagagggcatgcattttttcaaaatggaatatgacaaaaataccctcggtaatacatttaaaaagcactttttagtgaaaatgactttttaaggggcaatcgttataccaaaaatttggctggtactttagaggataatatgtgtcaaccttggagaatatgaatcaataaatataatggcaattttattaaaggatattaaatggaataagtcattaaatgtggagttagtag

SEQ ID NO: 241629 - DNA, 1073 bp, Cannabis indica
tcatcctcatgaaccggccggattaactcttcattttgactattcgaaatggacggtgtaataccagccaccacagcatcagtaagagcattagttgaagtgaataattcagaaaaatacatgtgaataacgtcatgcaaacctgaactccaatcaacccaagtacccgaactgttttgtagccttgtaatagcattgttcttcttgcgagatgtagctttggcatgaaagaacttgctgttggaatctccttcgcgaagccaaagttgcttcgatctttgtttccaaaacacctcccgttgagtaagaatttctgtcaagcttttttctgcatttttcaactctacagccgactcttcatctctcaacctcttcaatcgcttgatattattcttgcaatttttgattcgatctttgaagttgccagtgtactcattaccccagcttgaaagaacctccccacaacgcttaattttttctgtaattgactctccattactggtttcccaagaatcccgaaccacctgcaagcacatgggttcacgcagccaagcgttttcgaacttaaaatggcgaggagcagcagttagaacattgttcaccaaatcaagtaacaatggacaatgatctgagcttgagatttccaagttcaaaagttgagccgaattaaaaatctcaagccaaaggggagtagccatagcacggtccagtctaatttccacccaactatccgtaccacgcccacgttcccaagtaaagggatatccaatgagctctaagtccatcaggttgcaatccgagatggcttgttggaagccttcaactaacccattaggataacgattgcctcctcttttgtccgaatgagaagcaatgttattcatatcaccaattacgcaccaaggtagctgagattcatcagcaatcgtacgaagcaagtcccaagttctgaatcgaaaagctcggttgggttcaccgtacataccagttaaacgccatgaacctttctcaacattattaattttcacatcaatatggtaattggagaagcccagtacttccaaatcattctg

SEQ ID NO: 241630 - DNA, 825 bp, Cannabis indica
atactgtcgaatagtacaaaagccaacatacatatctaatgcaatctaacaggcttactaacatgcacactaaacatgtaaatacatatgcatactgttatactaatcttacctcatttctgaattcaggtgtgccggccaacctgagtggaacaactgctcggcgaattacaggctcctaaatccatcaattataacataagtaagtgacacgctaaatcactttccggggactgaaacttgaaactaaaagtttccctatcgataaacaacatataccctaaacatcacaaaaatgggaaaaactagggttcccaaaactgccccaaccggtagaccggttcccaaccggaattttagttctgcagggtttcctgaggaccaaccggaattccggttcctacaggtccccctgaatcggaattccaattcagtgtaggaaagtttcaaactttcatatctcactcaaaataaccccaaatcaaattaaaccttccagacctgctctatctatcccaaagaacataaacaaggaaacaaaacacatcaacatgcacagaaccaaaacatgccattaaagaccaaagtttgagttctcaaactttgtctaacaactaaatcaagccaccaactagcttccaaacaactcaaataataatatcaacctcagaatataatcccaacaacaagaattaccacagaacctaaccattagaaaaatcataaagcatataacttgaaacttaagaagaacaacaaagaatgagctagaacctaccttgagttagaaatcactaagagtttgctagaaatccttgaattcag

SEQ ID NO: 241631 - DNA, 908 bp, Cannabis indica
agtgagtatgtatacattccacttcaaaccacttacaatgcacaacacctaaaaaataggacctgaatattttacaaacttttctaaaaccagtctatatatatatatatcaatcttggaaatttttttaagtaaaactcccctaattctaaactttacatccaccttaatcttttttacaacattgcatctgttgtattcacttttagattccaaagagctttatttctatatatccatagctgataaacttttgccgcaagtgtagcagcatacacttgtcttctaaacctacttcctctttaagttagcttcttcattaggccattcaaggaagtattcttaactccccagtccttttatcacttttaaacaagccacactcacatgacaattgaaaaacaagtattctttagtttctctatttgattcacatataacacagtcttcatcttgcaccatattgaatctaaataattgatcttttagcctcaaatggtcaataacagaaagccatagaatattcctgtgtttcaaaattgagagtctattccaaactcctccttgccatggttgcttttgaagaggagggcatagaggttcaataacgtctttgattcggtagcattgattggagtaattaacagtggtagccattgccttgaatttctcttttaccttcaccacttgtttctaataccagctacttgttgttgtcatcacataattcctccaacgtttttgatctacgttcatgacattaacccatttgacccataaagagtcttgttttgttgcaatttctcaaacatattttccaatccatgcttcattccattcttgaattcttctaaatcccaaaccccatattgattttggtctatttatttcatcccaagccacaagcc

SEQ ID NO: 241632 - DNA, 803 bp, Cannabis indica
aagcatcctgagacaatgagcgaacttcgaccgatatcattatcaaatgttttatacaagatcatttctaaagtcttggcaaacagacttaaagaagtccttcctctagtcatttctgaatgtcaaagtgcttttctctcagggcacttaatctctgacaacataatgatatcttttgagataatgcactacctaaaacggaagaggatgggcaaggatggttatatggcacttaagcttgacttaagtaaagcttatgatagggtggaatggatttttctagagcaaatgatgttacaaatgggattccacagtaagttagtctctttaattatgcattgtgtatcttcggtcagatatcaaataactcatggcagccatgtaatgggtcctataacacctagcagaggcattcgtcaaggggatccattatccccttaccttttccttatttgtgctgaagggttctcatcgttggttaaacggttcatacaaaataaatggcttacaggatgccgtgtggcaagaggagctccaaatatttcacacatgttgtttgctgacaatagttacatctattgcaaagctaatgaagttgaagctgctaatatcctcaatctcttagctatctatgagcgtgcatcgggacaaaaggtcaacttgaataagtcatctgtttttttcagcaacaataccaaccaggttgtctgtactgatatctgtaatctcttgggaatggtagttgcatcccaaaacagtacttatctcgggctgccgtgtactatggggaggagtaagaatgt

SEQ ID NO: 241633 - DNA, 814 bp, Cannabis indica
tccttcaacacaccattttcaaaaaattgacgaacatactgaaccacatcttccttgacaatcagccagcatctttgatagaaagcaggggtcatcccatcaggaccgggactcttgtctgggtgcatctgaaatagagcttttttcacttcttcctcttgtatcggttggccaaattccatattcatccaatccggaacaatgttcgaaacacaatcaattatctcattacaagaagtgttagccgaagtaaataaaccatgaaaataattatccaccacttgagccaaacccgtttcccatgttacccaatgtccattagcatccttcaaagcactaattctgttgttctgtttccttatggtagccgctttgtgaaagtaactactgttctgatccccctcccgaagccagaattgtttagatctctgcttccagtaacactctctctgatcgatggctctaaagagttgatctttcacttccttatactgctgaactgaggcactatctcttttattatgcagagattttaactgagctttgtaactctttatacgatgatttagagtccctgttatttcttttccccaactactaagcttctcggcacaaagggacaatttttcagcaaaacaattcacctcattactttcccagcaatctctcacaatttccatacagagaggctctttcaaccatgtgttttcaaatcgaaaacggcgtggagaaacaaaattattacagacaataggttcaaggtagatgggcgaatgatctgaagtagtaaattctaaattagtaagagtagcat

SEQ ID NO: 241634 - DNA, 1260 bp, Cannabis indica
aagtctcatgtactttttcactccgaaagatctaaacatgaattaaaggtgatggttagagttagtgagagactatgattgtgaaatcctatatcaccccaagaaagcaaatgttgctgcggatgccctgagtcgaaaagggcttgatcaaactttcagtgcggtaatgatttctccttagttagcctcggatatgtccagggcaaacattgaatttgtaattggagaattatataacctgacacttcattcagagttgttggaaataattagaatagcacaactagaagaccctgaattggctaaggatccagaagatatcttagaaggaaaagctaaggacttctcaattttgaacaatggaatgatgttgtgtaaaacttgggtgtgtgtcccgattgatcttgagcctgagaaagaaattcttgatgaagcatacactaccccttactcattgcatctgagtaccaccaagatgtatcaagatttgaagcccgatttctggttgtacagaatgaaaagggatgtggtggataacatgtctaaatgcttaacctgctagcaaatcaaagtagaccatctgcgaccggcctgattacttcagctattaacacttccaaaattgaagtgggaagacattgcaatagattttgttgttggattgcccaagaccacaaggatgtacgactcattgctttacaaagtcagcacattttttgcctgtgaaagtaacatatacagtggatcaatatgctgacttgtacgtgaaagaaatcattcgtcttcatggagtcccaaagtttattatttctgataaagatccaaaattcacatcaatgttctggtgagcttatagaaggccatagatgctagctggaagttcagcaaagcctttcatcctcaaatggatgaccagtctgaacaaactatacaaatagttgaggatttgtaacaagcttgtgtcatggactttcgaggttcatggtgtaagtatttacctctgattgaattctcctagaataacagttatcaaagtaccataggaatgctccctatgagctgctatattgcagaaaaaagtcgttccccaattcattaggacgaaataggagaatgaaaatatttgggccctgagttagtccaaaaaacaaacgaggcagtagacaagattaaagctcggatgctagcttcacagaggaggcaaaaaagttatgcggatcccaagtgctgggacagttacatttcagataggagatcatg

SEQ ID NO: 241635 - DNA, 1177 bp, Cannabis indica
aaaatttcggtatgtagtgtaaaaaccacttttatttttagttttggacttcattctttttaaagagggttagttaatattttgtaaaattagagcatagttaggaggcatgaaggtgtctaacactattatgatgcggcgttttaaaaattgctaatgttttattttaataatataaattgtgatacttaattgtaccagcaacgatataatatgttggaagatattaaacaccactaatatcttttaccatttttcttttaaaaattcacttaataaatataacaataagtaaatttatataaacatactaattagtgaaagtctatttagtttattatatttcaaaactcatacatagtacaatatattatagtgtatattatctcttcagctagtgctgtaaatatatatcgtgtattttgacatgatatgaaatcggtacgagcacgactaaacacgaaaaaaatataaatttgagcacaatacgatacgatgctacaaattggtacgacacaacataaaaaatatgtatttaagcaccactaagcacggaaatcagtacaagcacgactaagcacgaaaaaaatatagacttgggcacgttacggtacgatactataaattagcacgacacaacataaaaaatatgtatttaagcaccacaggacataggaagcatgaaagacacggtaagcatgaatagactagcttaaaaaacttaacacatgaaaaatccaaaaaagcacgatacgacatattaatgaacattataatttattattaaaataataatatatatgtattcatatattataaataagttaaaataataataataataaaaacttaaatataatattgaatattataattataagagataagtatttatgtctatcaatgtatttcgatgtcacatgtaaaagagcccttctcttttactcttattggtattaagccaaaatgctaccaaattttagatagaaaacttcatattctctatctctaatttgtgaactaagactcattaacatcataaccacgtaaaattcatagtctccatattctcttttcttttctaactctaaattcatttatttaattagttatcaaaaatctcggtcaataattattatttaataaaatagataaactgattggtaacttttataaa

SEQ ID NO: 241636 - DNA, 768 bp, Cannabis indica
gaaacagagttttatttagggcataaaacccaacatattccacctaagagatttactgaagtcactagaaggcgagctataactagaagaaggggtagaagggccatagtatccactaaaatccctacagcctgtaatgttgaatatatccaagggctcgatgggttctgtatcccaactcgcgtctatatgacttgccctatctgcgatagggacatatttctcaactatacaataatatgactcatgacagttaatctggacgtggaatctagggtactagctgtcaatcttatgagcaactcaatctatgagaaggaaatcccaaatataaaaattaaggcaggagtctcggaaggtgactaatgtgttacgttcagccctaagtactgtgggagaccaaccacattgataacctcgagacgctccttcaccggcttctgaggggcagtgttttgaagatattatgctcaagccacgtgatcccaagccttatcctcctctggaacggtgatctgctgccaagaagaatacttgagaaacttgtaatcacaggtatattccttgtcagaaagaaggcccatcgatctcagattgggctcgttcaaaaggaagtcgcatgacttaaggccataaggaagagtcatcaagcccttgtctcgactggccatcgtcaggggtagggaagggcctcatcaagagagctgtaaaaaacaacaaaacattgtcagaaaattgaaggacaaggataaatccaactgagcaaag

SEQ ID NO: 241637 - DNA, 1504 bp, Cannabis indica
gagtccttatgactcacgggtgctatgtggtgcaggataaggtaaagaaaagctagattaaccatgaggtgacaatcttctcctgcaatatacatattgacctcgccggcttgcgtactggttgccgagagttgttttggactgtatctattgtgttatttttgtttatatattttgaggcatcgtcatatatagttcttttgtaaaaattttataacatggatcctcagaacacactttttatgtcgttataatgtatgtttttagtgttttattttagtcaaatttttaatattattacaatttttaatatttaattaatctattagaattaaactagtttataaaattacacacgtggcctcccaatgaaatagggcgttacaacttggtatcagagtagtcatggttataaaggtcctgaagacaggtcgaatatgtacattttctgcgaagacaggtcgactcatggtatcgtgagtgtttatgctatttgctattgcctttcctgcttagataattatagtgtatgatgggaaaaagtagcgtactaattatctataataagaatatgtgtatagtatatgcatattgatactgaaatctgtttgagttttaaaaatttagaagatgtggattaagtgtgtgacaagttatactgtaagggcaattgaatcgcctgattagcgaactgtttgggctcagagcaaacggtaaggaaagggttccttattatcgtaatgatgggaacatataaattctactatgcaggatatgactagacaacaagggaaaacaaatatgagatctgaaagaacaacatgctcatcttgtgtctgctcttgtactaccgacacttcctgttgtaccactagatgtggtgaaatatatgaaccaccaattatgggatagaacgaaaggtttaagggccaccaggatagcagtcaaagtgagaataagaaatggcgaccttatcctgagtgttcaagatgtaaaaagacaccatttggtctaatgtagagccatatcttattattgtggggtagtgggtcatctgagaagaacttgcccacagttaagaaagacagatattaaagaagaacagtgcacgggtcccaagtgtcagttatgattcaaggggactcaagtatcggtcctttggctatgtgcaatattataattgctattttgatgtatattggtattaaacattgtacgctcaatggggggacaatttgtgagtattgtccgaaattttaggtgaattgaaagtgatgattatgtgggttgatctattcatgacaagggaaaaaaatgagatcaaaggggacggtgagtcaaactgcgacagttagagccacgtgatctgcaaggaaaagattggcagttgtacaatcccacatcgcctgcgggaaaagtcatgtgtgatgattctgagactatgtaggtatatatgggactacatagttataagggacttaaatgggtggattgggactaccta

SEQ ID NO: 241638 - DNA, 1103 bp, Cannabis indica
aagatttttgcttggcgtgtgattcataatgcactaccagttgctaccttgttagtcagacgaaagattatcacggattcaacatgctcggtttgtaaatctgcctgggaatctataggccacgccttgttcaactgtcgatatgccaaagctgtctggcgaaatatgaatttgtttttcgactggaatcgggcttcatcaatgtacaaaggtgactacttggtgcatctatccaccgtttacacgcagcatgaaatggaacttatcttttgtactctttggtctatctggaccgaaagaaatcgcattgtccatggttccaaggccaaaccagcagctgttcttgctgcatttgctgacaactacttgacaaacttcaaagctgcaaggaacaaatatcatgttgctgatcctctctttcatcaccacccgagaccacctgaagcatctcctccatggcaaccgcctgctgctggtgaattgaaattaaatgtggatgccgcggttgatgctaatcgtaaaattactggtattggggctgttgttcgtgattctgcaggggttgttcgggctgccttagccaaaccaataattggtaactttgcttctcatgaaatggaagctaaggctcttttctatagtctcaattgggttttacagcttcaaatgccaattactattgtggagacagatgctcttcttgttgccaatgctatccgaagtggctcctcagctattactgcctatagtgatttaataattgatgtaactagtcttttatcctttttccctcaagtgaatgttgtacatgctaaacgttcagccaatatggttgcgcatactttagctaagttcgctttaggggtggatgggacttgctcatggttggaggatttacctccttctttttactctgttattgtaaatgacattccaatttaatttataataacaggtatcttttccctcaaaaaaaaaaaaaaaaaatactaattatttaacttaaaaataataaaacatagcacctaacttcgtaaaattagattttttaagggtgttagttgttataatatactttttttttttttagagagagagagaga

SEQ ID NO: 241639 - DNA, 941 bp, Cannabis indica
acaacacaggcatactatataataatatagtcccataaggacgttaataaattaatttcactattttacccttcacggggtcaaaattactaaaatgcccctggctcaccaacggggtcttaacatgttgttaatcatataaattcacatacattaaattatacaataatataattcctcaataatacataattatctagttagggttttcctaattcattctcagaattctagggtattacaattaccccctccatatagaaattttgtcccaaaaattacctgaacaactcggatatttctgctgcatatccgtctcgagttcccaggttgcctcttccacttcactattcctccataataactttaccagtgcaatcatcttttttctcaagattttctcccttttgttcagtatttgcaccggttgttcctcataagacaaatctgactggagttctaatgcttcataactcatgatatgggacgaatctgagacatatttctgaagcattgaaacatggaacacatcatgtacagctggcaacgctcggggcatacacaacctgtacgctacttgccctatcctctcaaggattttaaaaggtccaatgaacatcgagctaagcttccctttcttaccaaagcgtttaatgcctttgatgggcgatactcggataaataccatgtccccaatttgaaaatcaatatcctgacactttggatcagcataactcttctatttgctctgagtcgcgagcattcgtgctctgattttatcaactgcctcacttgttctctgaacagcctcggggcccaaaaacttcctttcacccacttcatcccagtgaataggtgatctacattttcttccatataaaagctcgtaatgagttattccaattgttgtctaatagttgttgttgtaagagaactcaatc

SEQ ID NO: 241640 - DNA, 587 bp, Cannabis indica
cttactgatttgctttttgaaattgaaatttttttgtgattccaagtattaagctttagagcgcacaaggattgggtagcgatgagattagggatagcttcctccgcggttgagggtttagtccaagactgatcgaaaattctatcccagttcgggtcctggagccacacattctcaaaatgaaaccgcttactatgattccttgacccagttcccggaatggtagatgtgactaattccaaggctctgtggtcagacccaaagaaacccaagtggttaagagcggcatcaggaaaaagatttacccaaggactgttgatgatcccccagtccaaccgctcttggatattttttgggtgggccacattgttgttccaggtgagagtgggccccacggggtcaatcggggaaagattaaaggagtccaataactgtctaaaatccgaagaagggcccctgtcaggattacccccttttttgtcatgggagaagaggaaagcattaaaatcaccaatgagaagccaagggtcacgaggattatcccggccgatccttttcaggatttgccaagtgtgaggtttaagaga

SEQ ID NO: 241641 - DNA, 565 bp, Cannabis indica
gtgttaccaaacggcacctaagaaaatcaaatttgcatgagtcaaggtgaaagggagatcgaagaacaattagttgaacctctcaatatattaagtaatgttaaagagtacttacggtatcttttagtatagtattgctaactagttataagtcgcgcgccattttatagttaacttgacaccatcatcttattatagttaacttgataccttggtattataggacatgcatcgtctaataatagtactgtctaacaacaacaaggcataatgttattgtctggagaaggtcaagtgtgatgattctaagactgtgtaggtatgagactacacagttgaagagaacttaaattaattgattagtactacctatattaacagggtgtatcttgttttctggtagcccatcacgaaagaactccacggttaaacgtgcttgacctggagtaatttcaagatgggtatgcgagtgaggacaaaacacgctggaaaaatattccatgaagtagccaaaatgacgtactcgtgtacaagagctatcattctatgggtgtaagggcccaat

SEQ ID NO: 241642 - DNA, 967 bp, Cannabis indica
attaatctaaaacctttcaacattttagaaaaaaaattcttagttcatttcagaaccattatcgacactcaaaacccaaagccctaaatcaaacctaaatccctaggtcgatggtttgagaatctaaattcgtagctcgaagctttgagaacgacgatgatggacgaaggttcagaacaatgaagcttggatgaaggctgagaagaatggatggggagggttcttacagtagttctggtatcaataatagaaggttgagagtagctggcggttcaatccatgaaagggaacctcaaaattgctactgtggtatcctgtggattggaagaacattgaacacggaggcaaacccaggtcgtcgtttcaagaggtgtagattttcaagtgtaaggattacattttccccttatattaagttttttgtttgtgttaactataagaaaacacagtagttatttttcaaaatttattcaggctgatggaggatgtagttctttgaatggatggatgttgaatcttgtggaaggcgcagagaaataattctaggtctcttgaggaagataaccaaacttgaagatcaattgatgttgtatgaagcaaataaacatttgaaagtaaatcaagatttgggaaaggttcatggttgtgattgtggtcacatatgggtattgagaaattagaaaaaaaatttgatgcttatttgtgtatttatttttgtattttatctggtaaagtagtagtaatatctatgtcatgccaactttcaacattgtgtaatggacatggcacctgtattgccattgttattgagtttgtaatgtatatggtactggttttggtgtttgtataatggagattgttaatgctatttgtgtgatcaaaactgaaattcttgatgcaatatggtacttccaacttaagtataattgcttacaatttttaagacaattgtattgtcaacttaggt

SEQ ID NO: 241643 - DNA, 1325 bp, Cannabis indica
aatcttattcaaatttctgattgcgtttgtttttctagggcctctctcgtatgagatttttcctcccattttttgatcttgtctaccactatttataattacatagtggtcagtaaattacacatttgattgtaatatgtttacaacaatcatccctaaaatcatgggatttgattacatatcatgcaatgtaaatgcgatttatgatttgttaatcgtataaatgtgattttcgtgcttttactaggtcaaaacaatcatgtattaaacatgtctttaattgttgtatctggagatatctcgacagcaacttggttacagtgatcctattagcgagctagggccattctcccttccgaggtcgacgatgtatgtctgatgtcgatcgtgattcttatcctcaaagaattctttgaggctcatttaaatgctatcttctggcttaccaggattgtaagcctcgctgacgctaacgggatgaatttatatgcagtcttcccataacgagacggtcacctcgcttacttgttcttgagctgatccaaattttacacttagtttgttcaatgtatgctacggactttgatgattgatatgtgccactttcatcttccaatgtattctgtccttgatgtctcgctattcatatttagtgacatatggtttctcgctaatatactaagtgccagtttgtacattgattcctcacctaagaccttacagtcagcgggttacaaatatactctgctacttacatatttaatgagttattccataaaaaactattgcatcgattcacattctctttatcttgacacgtgtcctccagaaaaaccttgggtataacaattactgataataatgagccactctcgaaagatcaccaaaaaataaagaggagctcggtgaagtttggcaatgactagaaaagtcaataatatatatgtatataaaaaaagtttcaataacaattaaaataaaaataaataatctaaagaaaaaattacaggaaaattaaactaataactaaataataataaaactatttttaaatactaacaattaatataatctaaactatatatttttttatttcgtaacaacaaataatttaaataatttttttattgcataacaacaagtaatctaaactaaatatttttcaaaatacctacatcaaaaacttaaataattaatctaaactaaatatttttttaatacaaaatctaaaaataattaaacaattcatctaagtatatataaacttattaaatataaatatatatactgtgtatatatgtttaatatgaatataaatatatata

SEQ ID NO: 241644 - DNA, 1867 bp, Cannabis indica
aaaacccccgaagcatatgtatgacaggtttatgaaaactttcaatcactctttatgaaacataagaatgggtagctcccgagtcaaacaatacagtataggaacaaccattaatagataacttacatgtcaccactgacggactagcatctgtgtcagcctgattcgtagtgaaaattcgtcctgggttctgagtagtattctttttcaactcctctttcttggcttgaggacaatctctgataaagtgacacaccatgccacattggaaacaagtcttggcctgacattcaccctgatggtgtttcttgcatttttgacactcaggataagatcagaataaagctctgcggccctgacggcaacctctgtttccccgaaactttttactaccccctgatgttccggaagcatcagccttctgtttgtgatcagggttaccatcgtcggttcccttactaatattaccactaacaggaaggttcgatgtcgtggcgacatcctttgttatctgctcttttgttacataatgctcagcctcctcagcaattaaggttagctctacaactttcctgtacaaagtgtcatgagtagtggtaattttcaagtcctgactaattgtggcattcagttctctcacatatttctgtttcctgatgaaatttgtaggtaccagatcaccagcaaacttggacaaccgatcaaactccagagtgtattcggccatagacattttcccctaagttagtttaacaaaatcttccatatgttaagtccccacagcgatgttataaaatttttcctcaaatagatttttcaactcatcccaagccatcacactaacattgcgattctgccccacaatatcccaccaaacgcgggcatgatcttgtaacataaaagctgtacaatttatctctgtgttcctgtcacccccatattatcaaggatacaggtgattgtgctcatccactgctcagctttaattatttcaatacctcctagaaaaggtggaggttccagcttcacaaaccattcaaacacgaaatctctatgcggcaacatgaacccctggttacccaccactcacataggtggaggtggtaacacttgctcaataggggcagccggtaccgatttccttaactgacgcaactcttcctcttgatgaagtatgatacctcgcatttcttgaaacatttgctgccagtcagcaggcaaattagcattgctaacccctgcattattccccaaattctgtagaggcgcaagcggtgtcggtggattggtttggtctacaccaggctctacttgctcgccctggggtctagatgattacgaagggtccatttttataagtacccctataattaacaaccctagcgagttaagcaccaataccacacttatgcacttattgccttcaaccctaactcaactattccatttaacataaataaacatctatcatataacattctaagcatggcatcatacatcacataaatactctagatactcacatattgcctaaagtggatagcggtaaataaatgatcaaataagcagtaaatcatttactctcaacacttactgcaccacgagccgatcttgtctctgacgatgattgttcatgttcggtcggtctacaagaagttaaaaaacgttgacgctttgataccaaactctaacgccctaacatttaggcacgctacctgaggtgattaaggaaccctaatcccctaaacgggattactagtaagataagcacaggaaaatttaaactttaaacaaaaccagagtgaaaacaaaacttgtaataactttaactttacaatcaaaaattacatgtttcgggatcccaaaa

SEQ ID NO: 241645 - DNA, 417 bp, Cannabis indica
attaattaattggtcaaagagtttttattgaatggtcgtttcagtgtacagtagttaaatatgtatatatatatatctgtatatatatatgcactgttagatatgtctctcactctctctctcagtaatatgttgtaatttacccctaccaatacaactcccctgcttcccttattttcactgttaaattccagtttttattttccatacctgacaacatggaaaaaccctcctctctctctcttttggctatatatacatatatatatatatatgtactatagctatatgtatagtgtagtgctataggccatctgataaattttatatactatatgtatgtatatgtaattgtattattaatgttaattaacaatgtacatagctagagaggtatatatatatatatcctatatg

SEQ ID NO: 241646 - DNA, 1263 bp, Cannabis indica
acctggagtgttcggtctcgggacatctgggaattgtattttgatagtcgctgtgcgacctgtaataaatgtatattttggaatgttaattttacaaagtttaaaaacgggatcccgacatttataaatatgtcattatattataaagtttaatatttaatatgaaagttttaatttgacacgtttttcgaaaaaactctttgattagcaaagactgcactataattgaaaaagcactgtagcgtgtcttagcattagggcgttacaattttgctgcatattgttactaaagaaaactgaagatttagcaaaattgattttctgacccgaagctttctcataagtactcaggagacgaagaacattagccccttcaatatcatttgctttgcagaagatgtagctgtcatcagcgaacaacatatgtgaaacaataggagcatttctagccacacgacaacccgatagccaattcttgcgaacaaataacttgataagtgatgaaaagccttctgcacaaattaagaacaagtagggagataatggatctccctgacgaattcccctactaggagtgataggccccagaacatgacccccatgagtgaccttatatgttactgaagaaacacagtgcatgataagcgacacccacctaatagaaaaacccatccgaagcatcatctgctcaagaaaaatccactcaactctgtcgtaggctttactcatgtctagctttaaagccatagtccccgtcttgcccatagtcttcctcttcaggtaatgcatgatttcaaaggaaatcataacattgtcagagatcaaacgcccttgaacaaaagcactttgcgtctcagaaatcacaccaggtaagaccacctttaatctgtttgcaaggaccttggatataatcttgtaagcaacattacaaagggaaatggggcgcaaatccatcatagtttcaggttgcttcttcttaggtatgagcacaatattagtttcattcaacaaaggagagaaataacctgtgtcaaaaaacaacctgacttgagaaatgatgtcattacccaccacggaccaacatttttgaaaaaaaccaggtgtcattccatccggcccaggagacttatcagggtgcatttgaaagagagctctacgcacttcatcatcactaacaggttccaataacatgccattttgatcttcagttatgacactaggaatagtatcagttacctcattaacatccaaagaagaggaagt

SEQ ID NO: 241647 - DNA, 880 bp, Cannabis indica
ccttcaaaggcaaaaagttatgtatggagagcggttaatgggtgtcttcttacgagcgttcagttgaagactaaacatgtggatgtctctttattgtgcctgatttgtcatggggcagatgaatcaattttgcactatttagttcctgtgattttgtactgagttgttggcgggtagcagattcggctttgattccagttgatgtagggtcatttggggattggtttcttcatttgttctcacgactgggtagggaacaaagtgttcaggcggtggtgttggtttgggcaatttggtttgcacgaaatcaactcttgtggaagggtaggaaaagtcgggtggagtttgttgtcaatttggatcatatcactcttgatcagtggagaaaggctcaaacaaaaaaaatttgtttcttgtgtttgatacttggtatctttcaaatggggctgagctatggtctaaatcaggttataaaaaattcaaggtgaatattgatgctgcattgtttaacgaggagggaaggcatagttttggtagtgttgttcgggatcacaagggtcgggtcgtggctgggattacgggactgcagattgggcaagttattccagatataactaaagccttgactctcaaggaagtattatcatagttgaagcgtgattttccgggtgttagtattattgaatctgattgtctggtattagtacaagatgttagaaatttgaatgttttgtcatccacttttggtggtatcattgaatattataaacaacttttatcttcttttagggatgtttctttacgttttatcaaacggtctgctaatcaggttactcatcttatgtctagagcatcttgtttatatattgatcgtattttt

SEQ ID NO: 241648 - DNA, 773 bp, Cannabis indica
tttttttcttttctatttttatctcacaaagtagtatgataataaattaagaaaacaagagtcatcttattctatttatagggtgacttcaagggctaggtttaaagttaaatagaataaacaaaaagataaaattagctttaatcaacccttgttggtcgaacccctagtgggccctacagggttctaattttgccattttatttaaaacttatctcttctttgtacaaataccatattttaattccaactctataaatgccaaatgtatcaatttaataattataacaaattatgaaatgaaattaccattttacaaagtctcttaatcaataaataaaccctaaatcctcttttcttctcaattaatcccttgctcagtgaaatttcccgaacaagacatagtcttttttagaattttaattgattaattaaaatcaattaattgagtctacaagacaatattatcccaaacaatgtgggaccatgagcctatctaacaaagcttccaataagtagatctgaaatgtacgaagtaaatttcctaccttattaattcctcctgactccactatatattcaaaattatactcttgattacatagaatgctctatatataccaaatatagatacactataaattgttcactgtttcaatccaaataatcgaagattctctatagagtatcaacatcgagtagggataaatttaatgttctaccctctaatatatttaatccttaaaaaaattagctacttgtaaatgatattt

SEQ ID NO: 241649 - DNA, 1164 bp, Cannabis indica
tgccttatgtaattattcctaacattttcccccaagtctgcacgagactttcaaagttacgtgtagaccttacttgagccgaccttacatctgaatgggtgacacgtgtcgaatgtgcctgttcgtgattcgatgtgactgttgactaggagtctcttcaatttttggctaattaatgctctgatcaatttgtacctcgagacgcgcctttcacttgcacgcttttgacagctactcttctgcactacttaattgcttttaattcccaatatttgcttttcagggggaaatcaaagcgtttgagattttaattgattacaccctttcacaaacttgcttataaatagggtggaaaatcctcataaactacttttaccatttttctcactcactaagtaacttcacagcgaaagtagttttctctcgacttcgtcgttgaattctagcagaaagattcgaacagcttcatccgaacaacatcaaagcttcaaacagtgagtaagtttctcacctttttctcctttaattttgtatcttcaattttccaggtttctataatagaaaattcaatcgttcttgacttgttttaggagatctatagaaaatctaggctcaagactttgtaattttaactgtaatagatcatatgacttcgttgtttgtaacattctgactttaacctcacaatgttcgatcttcattttgccctttcaaggcttagtgaagattaacccttaattcaaaattttcaaactcttgggttacgaacttaacctttacaatatttttcatctttttaatccgtcgagtagaccaagtcggtatatttgcctgtttctgctcgatatcccggccaaatactcatctcgtgtattgtcttttgtagatgaaccctggtgaattttggggaggtgaacactatattgaccaggatcttcttcagcatttgtatgaggaccaacctcgtcttcgcgctagtctgtcctcttcgagcgacggactttctaactcaagtttcgaagactgagaagtaagtagtgaaagttctcctactccagaacccgagttgcaacatcacttttattccgagcagatcgtaggagaaggttatagacaatttgtttgggagcttaggaaggggtggagacgttatctcccatccaa

SEQ ID NO: 241650 - DNA, 1155 bp, Cannabis indica
atttttaaatgatatttaattattttgttacaattaaatgaaccaagtatgaggtctcaagctagtcaatcgataacaaaatttgtatatctatgcatcggtctaattttaactttctaacatctcctttttttctccttttaaacttaatacatacattcattgcttagtttatcattaatagttaatctattcggtaacttagtcttatctcctagctagatgtgattcttactaaatcttttatagttttgaaagaattgtcaagttttcactttgaccataatttgaaatgatgttactttgaatttatttatgtatataagattattgagtatatatctttctcacatcatatgtctagacaaaatatcttctaagcacaatatgtagttgaaccatcactctcacattatcttcttcatgctttatgctaactttaagattaactcaaatatatattgaaatacataatcttattataaagacattttctcaatatatatagtgtacttgatttgattcaagatttgtaccttgccaaaaaagtttgtttgttatttttttaaattactacttacattctgaggtaaaacttttgtgaagctgtagttgactttttccaagtaggcttcaattctcaaaggaatttgttggacaactcaagggtcagacaagtctcaaaggactttgcccaacaacaaattattttctctacaacactatgagaacactctaaaaagaaagtgaccactttttataaagttcaaatacttttttgaatatttcaattatccaccaactccatggctatcacaaaatattttattggatgtttatgaacacaaataaaaaaactatacgaccaattagaacaagcaataagttgcaaaacaactccaaaatagaattgttatgtacctgataatgacacatcgtcttatgcacactataggcgcttttgtagattttgagaaaaggaaagaaatcgcgagctattttaaatatttaattcttcaacgagtgtagccattatttctagaaaattctttaacttatttcacttttttattttttaaatatttaaataaaaaattaaataattaaataattttaaattaagatttacaagtataataaaatttaaattatgaa

SEQ ID NO: 241651 - DNA, 557 bp, Cannabis indica
tagtatatgttaaagtttatgaaacaaaaatttaaattaaactaaataaattaataaggatcatggatttttatctaaaaaccaatgaatagtactatctagatattgtgtaattgactaaatattatctagataaaatgtggatcgaaagcttatatattctaccttaaaactaattggtaataaatttagtttcctatattcttgtattcccgtgaacttattttgtaacgaccgaaaagtttaattttctttgaatgctcttattttcaaaaataaaagactcaataagtttacatttaatttatatggaataaaattattcaatatcctcaagataatagctatttttactcactaattttaaactattattgtcacaacccgtgccatttgtaatgagtacatatgctgttcttatttttttgctcatttcatcatctattaattgaaaaataagaagaaagtcaaatatatatatatatatatatatcatcatgaaccatgatctaatgagtacatatctttttactagaaatttagtaaataattaggag

SEQ ID NO: 241652 - DNA, 1463 bp, Cannabis indica
gaacacttcgaatactcgcatacctacttactttaggttttacatagcctttatcactcctagtcgttgtttagaacctaaggttttatattctctgcatgttttgtcgtgggaacattggttaagtctttcaaatggtgggcgtgtcgcaatattccattgctcatacatgcgatcgtatgttccttgagatactgcgatacgcccagccatttacgacatacgccagtatttcctgttccaatataagcgtattcttcgattagtaggtttgctcaaaatcgtgggtgtttcccagtaacttcagggtcatactcgaaaacgtatgccccttgggtcactgggatagacccatccattttttgacgtacatcgctagtcggatatgcgtgacaaattcccaggttgtgattggttaggttcctcaaaacggtgggtgtctcccagtcacttcatggtcatgcttgaaaacgcatccccctcgggtcactgggaaacccccaaccgttttttgagatatccttctattcgcacacctacgatttcgtgctttggtggggctgattggttttcgcaagaatccgaatcaaccttctaagaagattttaaattttatatgcgggtgaggtcacttatcttgttttggcagattcaccacgctgaaaagatcttctatctttcagatgagcgatctgtcggacagccaaatgcttggctcaggaggcgacgcattcgatggcgatcaggaccatcaggaggatagcttcatctcaacttcgatctcagaagaggagatccctactgcggagacacagagctgggtccgttgtcttctgcagacatcgagaggatggtacaagagatcgttgaactagggactatcgagattcgagatagcgagtctacggtgtcagctcgtgaccacctcgttcattccaggcatgctcctgacatcgaggtcgaggagatggacgaagactggatggccccagatcgcgagtcagatgaggaagaggatgcggaggaaagtgggactgattgagtggataacactcaattggatgagcctttctcatgcggggacttgttctcgcgagtcaccaaatcggatcttaccacttttacaagattaaatctgctgcggcttgcctccttgcatcctcgccctacccagagagcgcacctttcttttactaatcagtggtcatacctatagaggatgtggtagtcttaatacccattcttcgatgtggagtatcgacccctttccagccattcatctccgctattcttaagcggtatgatgtatctccttttcaactaactccaaatagttatcgcataactttaggtttttatgcgatgtatatggagtatgtgcatagggagccttcaatggaggagtttagttacttttatgacataaagagtgtaggtcttcacaacgacttctactgtttcag

SEQ ID NO: 241653 - DNA, 1013 bp, Cannabis indica
tgttttttattacaaaatccaagacattttttttccgttatagatttcatcagctctgcttctgtccacttcatgaaataatctacagtaactattgcagacttaactctacattttctagttgggagagatcctataaggtcaatgccccataccgcaaagggccaaggccttgtcatcaatgtgatttaatttggtggggcccttgggatgtttacgaacctttgacatgggtcacaatttaggatgtagtctatgcaatctaatttaggatgtagtctatgcaatctttcttcatagtgggtcagaagtagccttgtcttaaaacccttcttagagcggcttggacccctagtgtgatctccacaaaatcctttgtgaatctcttgtatgatttgtttagctttggagtttgagacacacctcaggtatggcatgctaggcctctccagtaaaggatactatctatcgtgagataatggggggattgatattgtatccttctggaagctgtccgatcttgaggcaattctccctttgtaaaatagtcgatgatcaagtccatccaactggatacttattcattctttgcaatctcaaccttggacacaatacttggggctacaagatacttgatagggggtactcccagtttttccatttcctgatctaatgctaacttagctaagcagtctgcatgagcattcttttcttggggaatttattcaattctgtagttcttgaattcttggagcaactcaatcgtagctaagacacatgcagaaatcttttctccttgggtttgatattctcccgaaacacttagttaataaccagtggagagtcactaaagacttttatcttgtgggctcccatggctttggccagtctcaaccttacgaataaggctttatactcgtcttcattattgaaactagaattaaaccttctaagcatttgtagcttaccactctgtagatatcaatagtagttcctgtccacacgataccgtt

SEQ ID NO: 241654 - DNA, 1205 bp, Cannabis indica
tgcctctcttttctttgccaattaggcattgcgctccacgacttgtcgtcataaagaaacaagttctgcataatcatcctcctcgtaatcttttgggtaactatatccctcctataatttgaattgttggtgttgccttcttccccttcaacttaggaagctacctcttcctcgtgacgttcttgaggatcaggtggtgaggtggtggtggaggtcgttggttatttttagtcttcaccattgcgacggaaaatttcctaggtgaaagtttcccacaactttcaataaaaataccaaaatattgacgagaatttttagcaactacttaattttattaagttagatttaattatatttagtggaagagaatttttacgtggttaaggcgttaattagccttagtccacaaattatttgtattaatattatgtaatcttgtcgttataataggatttttttacgaaggcaaaatctccttgtttttttttctctactgtttctctattaataggcgaaaataagggagtatctcagtgactttggtacatccttcattgccaactaggatctatgtggccattcttaagtctcagaaataatttttgataatggttgttttgagtaggatctgatgtaggcattaggtgagacaagattggacgtgtttgcggctgataggacagcgcagaaataagccatcaataggcgttcatggggagatgcaatgtcagacaagtatgggccaaaaatctcaaagacatctccttgaattacatatattagaagctctaggaggttctcgccctcctgtaggcttgagtcataactgacctttgggagccccgctagtattatgccttgctcctggatgctaatgcactttccagaaacttacatgatttttaactacttaacccccccccccccccccccggcccgggccgcccgtcaatggggtcgttggacatgtgggtagcttttgatcaaccccacgtatattagtgaaaaatggtagcaacaataagtaatatttattaaaactacattcatatatatttatattttaacaaggctaatatatattattgcttaaagattcgtattcaacaggtctacatagcatttagttaaattaagcaacaatgatagtacatcactattataatgtaagattaaaaaaaattaataatttttaatcaattttt

SEQ ID NO: 241655 - DNA, 756 bp, Cannabis indica
tcttttatattcaaagtatcaaatataactttgcataacttattaaaattagagtttaatgcacataatgcagatacaacttataaaactgggtataaattaaaaaataataaaatgaaggtaaaaattaaaataaagtgtaaaaaataagtatagagtgtaatttcttttttttttttaagtgtattattttacttaatcaaagaccaaaattggtctttttcaaacaaaaaaaaaacattattggtcatttctaaccataattaaataatttaatagatataaatgtgtaaagccctcgattaatgaattccatttcaagaaaaactaagtaatcgtcggcttcaaaattacgcaggcccaatttgtagcgaggcccaatctgcagttatatattcttgagagtttttacaaaaatactgtattttgggtaaaaatttacaattttactgtagggcagaattttttacaaaaatactgtctgttttataaaacaaccgtaaaataacaaaacaaaactattaaaataacagtagaacaattaaaaaacaacaatgaaaatttaacatagtacacagtataaaaattacacggtattttgaaaaaaattctaccccacaattaaaaaaaaatgaaaaagttatgcttcaaaattatgcagagccgatttagtataggccaagtttttgttatataatcgtcggcttcaaaattaggaaggcctatttattataattaattatttattggattatt

SEQ ID NO: 241656 - DNA, 959 bp, Cannabis indica
agacggtgagccatctcatttctagaccgagggatccaagtgatagccaactctgggagatgatccaaccccgtcaacatatgtccgaacacggcagcggtcgtccaatcaggaaccttatgagatttgattccaagcacagaaatttgacagtccgaaacaaaattgacattagaccagtcatgaattctacagtggtggaagagagcccaagactcagcttctaggggaaacttagcctcgaaacgcaccgagaaaacttccacaaccatgccctccgaattggtgatcacaattcctgcagtagagcacaagcctttgttggccgcatcaataaacaccacatggtcgccctatagcagaaaatcattaagggcatcaagaccatgaccaacgtctaactgagcagcccacatcaagtttaggttagcggccatggacctaatttgatcaagaaccaccacaaaaaacggtcgaatctgatcatgataggcctggtttcttatagactagagaataaaacagagacaataccaaatcgcctaaaaaatagaaagttcaaactattatatatctttcatggtggttgaaaattaactaaaatataacaattgaatatgaaaaaaattattagtgctcggtttaggcgggttaactcgaccaaaccgatcaattcattggggaattgaaattttattttttcttaattaggcggctgcacttagatttttgttatctgatctttatgttaggttgaataaaatgtaacgtaaaacgaccaaactgaccgacggacgctcctagctcatacaaaaaaaatattagcaaaacaaatggatgatcaaattagaattaaaaattaataaaattgatattgataactttcagtctctggtaatggcgccaaaaacttattcggtaaaattagtacgctaatatacgcaatcaaatcaagtaat

SEQ ID NO: 241657 - DNA, 894 bp, Cannabis indica
ccttcgatcccataacccattggtggggtacagtaggtgttctcttttctcctatatgcataccttcaagactaatattccaaccctctgacttttgctacacctaagccaaatttgtaagaaataaaagacgaagatttcgattataagaaataaaaggcttgcaaagtttgaaacaaaaagaggcaaatatgagaattttaagcttgagaataataaaaataattgagaaagaggaatcaccgaatcatcagtatatatatgatgatgatgggtgtatattaaatattcttacacctacttgtttaataacataataacttattaagcgtataaaggatcaacatcaacccttttaagtgcagctgcaaaacaacatcaaagaaaatttataaaactcactcttgagtgtaggtgcgctttataatttttctatttataggaatccataatataagcatctggtaaataaatcttggctagtgctcatatagaaatattgtcataaaatatcaagtacatggataatggtgatgcatactattatctatttagcccagtccatctcaagacccaatatgaaatgaagtaaatcaaaaaagatcattaaaatagacaaaggtttcaaaatatttaccttgtttcttagaatttcctattgcttccgtggaacctgtccaaaatacataaataaataaattactgcttgatgtaaccccatatatctaaactaccaatttataaataaataaattactgcttgatgtaactccatatatctaaactaccagtatgtcgtaccccaacttcaaactctttttttgtaatttatctctcaggtaaatcagtaaaataacaattcacctaaaaagtaaaatttccagataaattaga

SEQ ID NO: 241658 - DNA, 1739 bp, Cannabis indica
tacagctttcgctctctctctcttcactctgcattttgaggtataagctgattttcttatatatgataaaaaaattataaaagaagttaggtttagattagattaaataccatgcataattttatcatcaatgaaatgttagtgatttaattgaatgcatatgcttaatgttcttatcgtagtccatttagacattatttgcgcataattctactcggtcttatgctttcgtttattctctaaattattgaaatattgaaaaactatatgaaattcgtaatgaaattcatgcttgaattatatttgtgcagttgatctgaaatagatagaaacaaggcaaagttttgagaaaacatgacaagtttgtaacaaatttcataggaacctttttgaacactttcaactacacattgctttgcatttgcattttcacatttgctatattacctgtgttggaggttagtcatatcaaacactggaatttgttttagtaaaatttactcaatgatacttaacaacaattattttctcaattgaactttgtagaaaagagtgattatttttttgttatggctcttgtttttatgtagtctttttgtgatatttttcttttttgtcatgaattataagaagattgatttgttcggttttcattgatttccaacattttaagaaagattgcatcacctaaaacatgcacatcctactagttttatcaaaaaagtagataaaagatcacatgtatgcttttaaattctttagtgggataatgttgtaatagacttggttaatcaaaaaatattttgtagtaaacttgtataaatagaatgagtgatgattgtatataatgattctatttcagactatgttgggaaaatttaactgattttgttgatatttcagcatttggaaatattttagtcaccttaaatgcttactaagagactaataataagattggttggcggtgacatagctaggatggtacataagttttctggtttcatcttcttactctcattctaaatataaaatatctttttaatcaaattttgaaatcctaataatatttctttttcttgtaaattattacagctaaaaaaatggttgtccaacctacttgttggggactttagtgcacttaattaactagattttcaatccaacaacttacctttttctcctctgccaaatactagtgaaattagacagtgggatgtcatgactcaattaatctagctgcacttatgaacctatctatcttgttatagtcactattttattcagttatataaaaacttaattttcctttgatattgaaatgtttaattccaacccaataatggaaagcttgggtcttttgcatcaagaaatggagttggttttctaaacattgagactagaaaagttcatttcacggaaaggtatagataaatccattatttaaattaacatttttatctacttaactagttatttattaaaatttatatttttaatcaggtacagaaggaaaatgttcactatctcagtgttgggcagactaagagaatgattcatggtttgaaatatatacttttaattattatgatattttttttttgatacaatttttgacagttttttgctttcacatgacactcctatgaatgccacaacttatgtaatcttaaaatttgattccaagtagaccctgtgttttaaaactcactctagatattgtcttgaagtcttcaagt

SEQ ID NO: 241659 - DNA, 653 bp, Cannabis indica
ctcgttcgctaaattggtaagataaaataagagatgagtagagtaaatagagagacacacaaaatttatgtagtagttcactcctcatgtcgcaatggtaatggagttacgtctacttcgaatttttactctcacgagaattacaagagaattgactaagtatggaagctcaaaatttttagagagaaaaattggagaaaaatactctgactttatggacacttttctgaatgtgaaaaataagctagatgaactctccttttataaacaaggaggttctatcaaaataataattaaatattcaaaaaatgtctaaaaatagaataatattttttactattaatgatgatctaatggtgaaattgactccggtgatcaatcatcaattctagagcttgaatcacgtccgtaggacttttttcgggtagttgtagttgaaattcgtaattttgttgatgacaaaatttggatttgatatctttagggattgaggtatgagacatgacttgatagataattgaaatagtttcaaaacacaagttcaattgcatcaatcaaatcattattgagtgagttatgactattttactaaaaactgctatgatattaattagtacacaggttgacagtccagctctcaagttaacatataa

SEQ ID NO: 241660 - DNA, 1239 bp, Cannabis indica
ttttttttgttacgtttttttacgaacgtgtgtttttcagagggaaatatgttgtttcatgttgctgtaatgttatattatattttcgcaatatgaaaacgtgtaaacgacatcttttccaaaacaatctaaaaataatgatgtagtaagaaaaaaaaatctgtaaaaaatagtattcttaaaaacataaactttttgttgtttttgagtatttttgtaaataatttttttaaaatctatataattggatctttttttcttaaaaaatattaaatatagtattgtaaacaataaatttggtcttttctttaagaaaataattgtattttttaataaataatagtataaatacaaatataatattttttaaagatcacattaggggagctttttgggctagggtctcgagcgtgagccctagctaccccaagggttgacctgttgagatttatgccctaaaagcaagtaattaatggacattatattatagaatatatgaaatgtaattataaaattaacgaatacattgataataaaagtataattaataaatatctgaaaattctttattaatgtggagatgatataattttgtaaggtcgtacaagagaattaagattatacaatatgaataaaacaaatctgtagtgtattaaagtaaatgggtctttaatatgaaactactaattatagtttactatacactatactccagtgtgtgtgattttgattcagatcacattgtagatagacatgtagtaactgtgttgtgtataatttgattctacatgactagaccatgaactcctgtttgtgttcattaggttctttgattcactcgttaaagtttctcagagaagatgattcttacaacttctattttgggaatctagtaacatgagtgactgggaacatgatatacaaaaatgaaattcaagtttttcctaacggaacaaatattagttcccttatagtgttaattctgggagtgctaacagttggatccatatctataataagttatagattaaccgttgacattgaattaatggtacataaggaatccaagagataattagaagggtaaaataatacttttgacaaactctaattatgaactaataaaggataaactacttatttgattatatcaatggactgctataaagaattctataaatataattatatattttcaaagagtgtacaaattcatatttatagtggagtaataatgaa

SEQ ID NO: 241661 - DNA, 502 bp, Cannabis indica
aatgaagcatatcatctatgtcaggagtctttgtttagcaacaaaacttttcagggcttgattatgtgtcttttttcttctcttgtattatgttctgttatgggactcaaaatgtttgtttactgttctattattgtaagatttgttaggtgaccaagtacaagtttgatacttgtgtaactgtaccaaaactctattcaaacttgtattatataatctgctagaaaacatgtaagagactttaatgataatgacttcatggaaaacaggttttatcttacttcaaattaccaaatgttatcagcataaatttaccctccccacgagatggacttgtctatagagaactcgctgtattgaaggtggctcgcaatattatagtactcgcagtaccgaaagaaagaatctcgcaatattaactaaaagagacctcgctatattaagaaaggcacacctcgcatatttgatgaagttgcagaatcaataggaaaaggcgcaaata

SEQ ID NO: 241662 - DNA, 1224 bp, Cannabis indica
aaaaaaaaaaaaaatgagagataagagagcatttctagagatagcaattcctttaagaagaccagcttcctgcctaaccctaagaagagaagacaaaccttcagcacagagaataaaaaggtaaggggataaaggatccccttgcctaagacccctacaaggtttaagggaacccttaacaacaccattaataagaaaggaaagattagtagtagaaatgcacctcataaccaaagtaacaaaattaatagggaaattaaagtggaacataatgctttccgaacatttccattcaactcgatcaaaagccttagccatatcaagtttaggagcagcccaacccctcttaccattcttccgagagttaatggcatgaataatttcttgagcaataagaatattatcataaataattctagcacaaacaaaagcactttgaaaaggggagataattttatcaagtaccaccttaagacgattagctaaaaccataataactttatacatagtagtacaaagactaataggcctaaagtccttcatagaatttgcatgttgtttcttagggatgagggcaataagagaagtattaatatccgagaaatcaacattattattcaaacagtccaagacagcatgaacaaaatcaggacaaggagtggcccaatttttctagtagaaataagcattgaggccatcaaggcctggagctttatccctagaatgactaaaaatagcttttttcacttcatgagctgtgaaagactggccaagaaaatcaatctcaggatccttgagagagggtcataaacagtctaaaatttgactggtagccttagcagccctcagaatgaattagagattagaaaaaagaaaagaaaaaataagatcatacatagcctcatggtcattaacactattaccaaagtcatccttcaaatacttaatagtattagtctttttcctatgagacgcaaaccggtgaaaaaaaacttagtatttttatcaccagctttaagccaagaatgtgcccaactggcagaccggttcccaaccggaattccagttccctggagaccaatcggtcgaccagttgttacaggtccccctgaaccggaatttcagttcagagctaggaacctcaaaaatgtcccccacaactcaaatcaaacccaaacttcctaaaagcttccaaaacacatgcatacatcatactaagctcaa

SEQ ID NO: 241663 - DNA, 1724 bp, Cannabis indica
cattgatcacacgatctttctgtttatgcgcattgtaacgagagaggaaactcttcctcctcaagtttcccagtcctataaatagtgaggaatgttcattgggcaaaggattgggaaaattataagccgatatgcagttaagctaaggctatattattatctaagaattatatatttagagatactgttgtaagagctataagaaaaggaaacttcttccttgttcttaagtcaatacaaataacgaggattaggctattaccgaactgttagagttgaacctctataaaattcttgcgtcttattattgctttcttatatatattctcattacgacatatcatttatcgcttattaaaaagactcattgtcgttggctaaaagtgaagtcaacattttggtgctttcaatgagagcagaatcgcagatcgctcttttcgacattcgacatgatggtgcaaactcttataggcctgtctgacccagcaaactcacaaatgcgggatccgacattgcaggacccaaggagttcaagggttccaccagatatcaatccttgacagacgggaagcatggtgaatggtgggacaactcctgttactgaaactgcgcctggtgtgcaagagactgggaataacagttctgcattcagctagggcattcataacacgactattcccccaggaatcaatgcccaaatgaccatcgaagacgaaactgaattgcaaaatctctgtgctgcgcttggactcatgcagggtcatagcaatactctgcatcatgatcaggaggaactgcgtgccacagtaaatctcgtgtttgatgaatagaggcatatgttcgttgaatggagagacaaagagatggaggcattaagggctcaccatgcagagatcgaagatcgtagtcagcaagctacggtgctgatacgaagagcataccagactgtaggccaacaaacgtcgagcgtcattcccctgggagaaacgaaggatgacccaaccatgaaggcctcccagacaaccaatggtcagccgtccaatctccagtcacgagttccactcgtgggccaagaggtaggcaggcagaccttgtccgggaattcatcaggaggagccatacctgacaaatccaatcagaataatggagccattccgcctgtcaaccaagagaatcaatcgctaaggcaaccaggctcttctgtgttcgataggctgggaacgacccatgacctaagggacgatctaagcagaagaaggggacagacgagcagaatactacaacaatcgtgcatctcggagcccatactccaattcccgctcaaaaggacgctgacgtaattcaaaactaccaaaacgccaatcaagtcagcccagccgtacaggcccaacttgatgaattgaagaatatgtttcctggcatggtcggacagcgtaacaatgatcttgagttagatcgtcctcgcgaaactcccttctcaccagagatcaatctcctgccactgcctcacaagttcaaaatgccaacatggaagatgtatactgggagagaagatcctgtctcccatctcaagtattttgagatgcaaatggatttacaaggagtgcgaggggacgtatgttgcagaatcgtccctgccactatgttggaagctgcacaacaatggtatttgaagttggctcctgtaaagtttaggtcatggaaaaccttctcttcggaattcc

SEQ ID NO: 241664 - DNA, 706 bp, Cannabis indica
taccctaaatttgccaacacttacaaaataagttagaaggtaactggttacacacaatttgctttttcacatatcttttaaattttcttatgaaaacaaaaatcattttctacacatatataaaaactcataatttatacttaatataagtatgctataccaaacaagatatttttagtacctttttcattataccattgattaaatatataaatagtgatcattagtttattacatatttatttatttatttttgtttgctgcatgtgatttgtgtttctgattcaccttggtaatgtaagttgcctggagtcaaatatatgatagtttattttacctaaacttccaacaacatagtatattggtactaattaaaaataatatatacatatatacatataggcagttcaagtctcaacacacttgttaggtggctcaccctcacctcaccatcccaaatactactagtacattttggtccaacatattaaatgtagaataaaatttttggtagtaaacccgtcaataaatggtcgttctagtaaattttttatttgtttcgacactatttttatagtcacagttgcatgtaactatttaagatcttccgtaaatttttagaaaactctgaataatttacaatactgaaaaataaagtttaaataattacttacacatatagaaaaaatagtcgtccgtgcaacaa

SEQ ID NO: 241665 - DNA, 1141 bp, Cannabis indica
atgtgcagggtatccttagattagttttagattttcattagagttttgctcaattaattgtaagaataattattaaattatctgtttttaagtttcttttaggattacataaaattggcagttcagtctttaagggtttgtttggaactcaatattaggtcgtattgtattgtattatattatattgaattgtattttatgtaatatttttatgtaaaataatatgtggtattaacttttgtggatataactatataatattttaataaaaattaaagtttaacatagtattatataaaaatatgatatatataatttaatataatataatataatataatacaatacgaggttccaaacaagccgaatttaattgtaatctctatatttataataaagtggttgttcaactttggaaactaaaaaatatgatgaacttcatttattgtttgagatttcataagtactgcttatttacctatcgtagctgaagtgggggtagattattagaataccaaagaatgtaaacagtaacaagaaataaataaaaaaaaaataaaaaagatgtaaagatcaggacatatgcatggcagtgatagaatgtaaatgaaaataaaattttggttttagctataatataatgaataaaaataaataacacaaaataactcaaaccggttataattaaaatataactggttctgtaacataataaataaaaacaaataacacaaaataactcaaatcaattagaattaaaataaaattggttctataacagtattataataaataaaatcaaataacacgaaataactcaaatcggttataactaaaatataatcggttatataacataatgaatacaaataagtaacacgcaataactcaaaccgattacaattcaaaaataaaaaggaaatcagttcctaaaacactgaaatataaattaaaaacaaaactagttccgcaacaaaatagaaccgttttataacataatgaataaaaaaaaaacacataataactcaaaccgattataaattaaaatagaatcggttctataacataatgaataaaaataaatagaacacaatagttaaaaccggttataattgaatatagtaccgaaactataacataa

SEQ ID NO: 241666 - DNA, 1303 bp, Cannabis indica
aactttaaataaaaatatatctcgtagataatattcaattttgaaacgagaagataagatgatcttctaagagcagtttgccgttagttgtgctctaaggcagttaagaagtcctttatggttttttttttccttttttcttgcttcatgtatctataaccgctcccttcaatccaaaaacaatcaaaatttttgcctgaaccatgaatcctctcactgacaaaatgaaaggcaagatgaccattgttgaagaagatgaacctcctctaatccttgatgatgtagaggttcaagatggcactctggatactgtgttagttgcaagagttctcaccacaaagtctgtgtttttatccacattccaaaagcaaatgaaagaccattggaatggtagattccaaaccacaattactgaaaaaccacctgatctgtttgtactttcttttggttgtgaaggagataaaaaaagggtccttctcaaggagccctaccactttcaaaaccaccacatagtgttgtacacgccaagtgttctgcaaaaggtcacttctgatgatcttatcttttctccattttgggtccaatgttatagactgcctttcctgagtaagtccaaaactttagccaaagctttgggaaatatcattggtgaatttctggaggttcatgatgattctttagaagaaggatggggtccttttcttcgattcagagtcaaactcaatgtcaccaaaccattgctcagaggtcgcaatatacaacttagacaaacaagggacaaattctgggttgattttcgctatgaaagattaccggagtggtgtatggagtgtggccgacttggacacccttaccaaaaatgtatgatctggatggaaaagattgataatggtattgaacctgagttaccatatggtcctgaacttaaaggggctgctctgcccacttctgggtacgacaggtacagaacggacttctctaagggaaatgcatggcccttacttacccgcttggctagaaattcaattacttctgctgtcccagccatttcaaggaggccattaccacatccatgtcctcttttacagggtgaatcctctgaaaaccagcaaagcacaaatatttcttctgctataactgctacagttactcctccactttcaacttcacacgagaaaccagtaccaactactatggtgtcatcttcatctgtgcaatctacaccagcaaccactgtaaagttcgcaccagcactcttaagtggacttgtcaacaaacaatctgatgctaatcctagcaaaat

SEQ ID NO: 241667 - DNA, 1558 bp, Cannabis indica
ggaggttcaatactcctaatatggtatcagagccgtggcctccattggtggcgaatatggcaactacaggtcctggaacagctgcaacaagagcttcaacatcagacaacaacaacaatggcgtcagtcagattggcaatcgaaatcgaaccagagatacagatgagaactctccagtgtactttaatcattcaatttccataaaacttaacgatcacaactttcttctttggaaacaacaggttctagctgctatacgtggaaatcgactactaaagttcattcaaaatcctcctcctccacaatatctcactgatgcagatcgcaacaatggcattttcaacccggcattcgtcgaatgggatgtacaagaccaactcctcgtttcatggcttctctcgtccatgacagaaagcttactaacaaggatggtaggatgcaatactgctagacagatctggagctcgttggaaaaatatttcacccttcgtgtttcatccaaaatcctggagtttcgtactaagctgcaaaaccttcgaaaaggttccatgtccttgaatgaatatctattgaaggtaaaacaaactgtggatctactggccagtgttggagaaactttgaatgatcgtgatcacatttctgccattttcaaaggtctccccagcgaatacgatacattcataatctccacaaatacaaggatcgaagggtacacagttgctgagatagaagcattactcctagcctctgaatcaagaatcgagaaaactgatcaagaacatgagatcagtgttaatcttgccaaagtcgacactgactatgctcctgatcaggatcttgaagcaaatctggcacatttcaatcgcaatccgaggtattctatgccaaatcgcagcaatttcaacaatagcaggggaggctatggaaacaccagctctcgagaaagtggatctcagtttcaacaaccaaattccagcaatcgtggaacccagtacagtggaagaggaggcaggttcccagctccaccatctcgagtccaatgccaactctgtcttcgacctggacacactgtaattgactgctattacagatttgataagagtttcataggggccaacaataactccaatcatcaatccaaaccacaggccaacatagctcatcaatccataaatcaagactcaaattggtatcccgactcaggcgcaaccaatcattgcactcccgatgctcagaatctcatgacaagaaccagctacaatgggacagacaatctttatgttggagatggcacaggtttgtctattgaatccattggtcaatcttactttctttctaactccaatcatcctttaatcctaaacaacctgcttcatgtaccaaaaattaccaaaaacctactcagtgtctctaagtttggcagagataacaatgtgtattttgtgttttaccctgatgtttgtcatgttaaggatcaggtgacccacaacacactcctgactggtgttcacaagaatggcctgtattcttttgatgaattacaggtccaacttcagcc

SEQ ID NO: 241668 - DNA, 1050 bp, Cannabis indica
gtataaatttatatttttgagtacttgttgtagacccttaaaaaacatattgtatgagagataattttttaaaataataattttttatataaaagtttagatttatataactaatatattatgttatataaatatgtttatacactatatttataaatttgatgaatatatttgtcttgatttatataactaatatattatgttatgcagttagagtagtgagccgatatatgcagcaactaaagaagccatatttggaagtagtgcgataaatactaaggtatgttaaagatatagttgactatggtctcctttataagaaagatgctaagtgcaagattattggatactacgatgcgaattatgctgaagatcatgagacttgatgatcaactactaagtatgtattcaaacttatatctggagtagtgtctttgtgtatcaaaaggcaaccaaacaatgtcattgtcaaccacagaagtagaatacaaagcaacattaattgtcgttgaagagagtacatggttaatgcagttgatgaaggatctacgccaacatatagattttgcagtgccactttgttgtgataatcagtcagttaatcgtttcgctgaaaacccagtgtttcatgcacgaacgaagcatgtggaggtacactatcactactacaaaataagcttttaaaggcacttttttaaccctaatcataaataaccgacaccatagggtaaaaaaattttggaaggaaattttacgctacttatggcgtcggttatttggaaataactgacgccatagggtctgccaaccaccacgaaatagggtgtgccccctatggtgtgtgcccccctatggcgtcggttatttcaaaataaccgacgccaaaagggtttataaccctagcccagcccttcatcttcctcattcgaccagccaacctagaaacccccaaaccagagaaatcccaaaccctctccgccaaccaccacggaaaatcacccccatttcactatttttttttaccattttagctcatttttgtttctaaat

SEQ ID NO: 241669 - DNA, 790 bp, Cannabis indica
aaggataatctttgagttaagtgaattaactttgtctacttaaagtaagaggattggtgagactataaagttacactagaagcgagctggtattgaaagagaattgtgcaaaccaaagacaaatgaaagactatattatcccaaagtgagtttcaaaactttcatattttcattgttagtctttacattaaaatgcacaatgaagaggttagtagatggagatactttatgatttgggaaagaataagtgttcctaagcatagaataatcatttgattagccttacgcgaaaggctgccaactcgagaccgtctttgctgttttggtaagatccagaacattgactgtttgttatgtggagctgcgattgaagaccataagcaccttttctttacttgctactagagcaagaagctggaccaaattaccaactagtgtaggctgatttatggaggaaatgagttaaaaaaataatacagaagttgcaaaaaaggaggctctcgaaaggcaggaacaaggtgttgatttctataatcttagtagtggtttattttgtgtggagtagtaggaacatagatggcatttggttggaggtaatgaaataaaatagaatcaaaagaaaatatttttcattccgtttctttatttggttgcattttaaagtattggaatgcaattccaatggaatgctctttctagggctgagcatcggtcggtttggtcgatttttttctatataaaaattcaaaatttggttttcggtcttggattggtgcaatctgaaaaccga

SEQ ID NO: 241670 - DNA, 1046 bp, Cannabis indica
tcaaacattaatgtccacgtcatcagggttaatttttgtgtaaacattttcccccaaatcaactttacacttatgtgaggttgacttcataatgtgaattatgcccatttcatacgaaactaccaggtggacatcaattttgacaatcttagcaattatgttcttaagtgattccttttaatttgagatactgtgaaatcatgtcaacactaaaatgttaacactaactttgatctttagctattttcttagcattagttctcttgtcacacaacttgtttaactatagatgtagtctttgttccttcccaggttgcatctttggaggtcttttgcattttctaggttgtgcttacaaggaaggtaatcttgatcatctctttgacttttgatgagtccatatttgtcttataaatatgatcaatttatgtattaatattcttaaattgattctttaaattattcattagtgtgcttttaattttttaggctattttaaagactattcatgcatttagagtcttttggagagatttttagcatattttggtagaaaatagtggaagtcggggagctcagttttacaagggagaatttaattgtaaattagaacaatcttagaagcagaactgaacttggagctcaacatgaaagttttagatatcgttcttagctttccggaatatcttgaatcgtccaattccaagcaatatcgagagagttatggccaaaatactatcagtcatcgcaatatgaaatttctaaaaaaaaaaaagataaaaagatagcttttcaagtagagttgttgcgatttttatataaacacattattattagtgttttagtaggttttcagagctaaaaaatctcagaaactcttaattagtagagaacttttaagctacaaaattgagagagaaacttagatagagagcaaggaagagacggagatcgcgacttcgaagtgtttttcatcatatgtaataccctggaattaagaatggattagcaaaaccctaattagataattatgaataattaaggaa

SEQ ID NO: 241671 - DNA, 1127 bp, Cannabis indica
ctcaaaaaattctaagtcttccaatgtattcatatgcctataacatttgatccctaccagaaactattcatcatttttttcagtttgattaattaatttcttaagtaattgaaagcaactcttattatatgtaagaatagactgtaccacaaccttaagtagcaattctttaccatcaattgagaaaagtctttctggccgagaattcaatagcttccaaatctaaaaggggtacattttgttccgtcatcagggagaattttttagtctaatttttttctatggtcgtctatgttgtagttatttaagacatcttacaaaattttgaaaaatacgaaaaaatttaaccatcgaaaacaaaggttaaaatattcttttcacacacgtataaaataaaagtgttacatgtgcaacaggttttttgaacccaattttcagcataaatttttcttgaatttctcaaaattttacaaaatgtcttatataattataacgtcgatgactatagaaaaaagttaagctaaaaattctcttagatgcctgtttactcgaaaagttggcttggtgacatggacactacttttgacacgtgacatgaagaaaacaacattggggcccacatcccaagatagagcagtgttacctgcacactgggagcacctaggtaagcaccaagatccaacaaagtcgtttttgagcgttatcctttaacaaacaggtcaccataaccctaaaaagaaccatgaagctgaggatatcacgtagacatcctggggctcaacttgggtccaacattaatgttgggcgcccatgttgacatcatgtgctccatctcgcatcagttttggttcctatcaacttcgtataggaaatctgcttagccattgtccttagatacatgagagacataccacaaccaagtttcaaactttggagataagtctatgagaaacggtacccagtcaccaagaatccctaatgggcgcccaagttgacatctagttgatctaggcacaccatagttatgatttaggttttggggcacatcggaccctgattcctcaaatccatcaaggaataatgctaggacatgattttcatcaatgacatcccgaagaagcccatcc

SEQ ID NO: 241672 - DNA, 556 bp, Cannabis indica
gagagacttttcaaatggggaggtatttttgagttgaagagtttttggagtattattttcctatgttttctaatgtaaatattgcaacaccatacaccaattttaagcatgaattatcaaattttccttgtcaaaaatagcttggtcaagtttcaataactgttgacctacagaagtgattaaccgatagcagagtcgtatagatctgatgcttgtcacatgttacacgaaaaaaaatgaaaagtaataaacacatagatttgttatagaggttcgacgcccttgtgatagagagtaatgacctactccccttttagttatgttaatactaagggttaatgctatccagatcactatagatgggatcttctatagcacccttaggaatacaatgtgtgaatcaagaatggaagaaatcaagtaatattgcttgtatgggcatgtgagagaggaagtgaagaggagagaagttgttagacttggcttagagcttggaggcaggtttcgtgcttagattttagcttaggttttctaagttagagttaaggcctttata

SEQ ID NO: 241673 - DNA, 871 bp, Cannabis indica
ttctttgtatttccagtttttgtaaagtatttatgttcccagtttgagtacttaccattctaggttgaatactcgcacttattcatcattttattattattattattattatttattttggtgttgtaaaatcccttcaaaaacatttggcgccgtttgtgggatgacgaaatacttcttgctgatttagaaggagaatcataatggctggaaaccaagaaaacggaggtcttaacaacgaattcatcaatatcgggatgatgaacgtcccactattaggaggcagagtgcctcccgtagacgtgatcaacggtgaagtaggacggggcaatgtgacgcctcttaatctattccctgaaactactggccctcacgctgtggaaacatctacaccggaagccacaacgggacattttccaccttttactccaacaatggtatccgagggtattatccagctgattaccgatcagtacactgcaattcaagaccagctacgtgctctgcaggccaaggttgagggaagaaacaggactcaacgtcctccccgagtacccgctgcttgcacaaacaaccctcaggtaactaattctagacgtcgtagtaaccgtactcgcagggaacggagggccaatcaggagggactcgatttgaaccagccaacgtcgagggatcaatccgtgagaaacctcaatcaggaggcgtagacggaggaggatgttgaacgacgtaatcctcgcagcagaccccaatcgcgagacaatgacattgaatccgcctcctcattctcgcatggctgcacgcccagcaggtactagatcaggctcggtggaaacactgcaaggagggcgatatcaggttcacaggggcg

SEQ ID NO: 241674 - DNA, 1134 bp, Cannabis indica
attaatatatttttttttaaaacaaaataattaaatatataaaattataaatattaaatatgattggatagacattggatgatattggattggatcggatcggttatccattggatcagatatctcatccaacatccgatccgatccaattggatttttaaaatttgcatccgatccgatccaattatgattggatatccgattctattggatcagttgggattggatcggtcgggtgagatattggataactttctgcacacccctaacaccgacccataacgcccatcccacagcaccattccgaccgacccccacccaccattcgggccgatcgattaccgcacagagtcaaccgagtattccgaccgactaccgcacggaggagaaccccaaacccgaaatttgttgtaccgggtccgattggggtccgatgggtacccaaaaaacaatttacccaaaaaaaaaaaaagtaaacgtgtacaatgatagggatgaaatagtaaatttaaattcttgtaagaggcaatttggttatttatcaaaatcgatgggtcattttatgaattttcatataaaaaagaactccatactgagtgtatataaagtagtaaattaaatgcaggctaggacaaaccagaccaggccagctagcctctcttctctctttcgtataagatttcatcaaactgagttgctcagatcgttactgtaacaactaacaagtgtctccaatggatacatctcttatgacggagtttctcaggaagtccggtggtgccgccgttatcgacggcggactcgccacagagctcgaacgccatggcgcggacctcaacgatcctctatggagcgccaaatgccttctcacttctcctcaccttattcgcggggtactctttctacctttttattttcctttactttgcttgactatgtgtttgggtgtctgatttttctttctttctttcttcatgtatgaagaatggtacttattaacatgagttatgtttattcataaacttggactcgaaaataaagaaataatgaattttgataactgggttattattgaaaatttttcccattaggaaatcatctattgggattttgaatgtaccaaaagtgatttta

SEQ ID NO: 241675 - DNA, 638 bp, Cannabis indica
tgagtagtagtagagaggttgtttgacctcttcttctacatagttatgatgacgataatggcggtaatggtggacaatggataagggtggaaagagagtttctgttctatctgtttgaaatccaagggagtgttctaaagaggtttggattggacttcttttgtggtaactgataagtaagaaagagactaaaagaagaaaaagtggagaagaggaatattgaatattattataacaacataagttttgagacccatttggcccaagatataacaggccaatgtttgttcaagcccttattgaagggaaatttagtgaaaattacataatgggattttgtaacaaatttacaacaatatggtacttctaagttcattacctttttatggtatttttcatattaatatttggtatgtcatatttttataaacttattttttcacattaatatttggtatgcttctacagttcgtgaattgaagttcatgattcgattgcgcttcccgaattttgttttcctgactgaactaaaagttaaaagctacttctttggtacgtactctcaactccctctatttttattttaatattcatgttccttttgatggtaatgcaggaggaattattttggcttggaa

SEQ ID NO: 241676 - DNA, 627 bp, Cannabis indica
atgaaatacttgaagccatctagagttaaggtattaaaaggcccccatatattaacatgaattaaatcaaatggtgcagtagacatgttgtgatttgaaacaaaaggcagctttttctgtttggcataatgacagacagaacaatggaaataattggaagaatttgggtgaaaatgtaaagctttattcaatgagtgagtattgatacaagaagagtgtccaagtctgtaattccagaccgtgtcatctcttatttttgaatctgaagtaacagaaaaagcataaggaatgacattttttacaccagaaatgaggtaatacaatctgcctattctctcacccatcccaatcattcgcttcttcaaattgtcctgtatttcacaatgattaggatgaaaatgaaaggaataattaccacggttagtcaatgcagaaatagagagaaggttgcaatgaaactttggtacaaaaagaacattagacaaagaaaaatcttgtgaaatgcacactgtaccaatgttagcaaccttagaaaaatttccattaggcaatttgatagaaggtatagattgatcagattgtatatttttgtaataaagaaatagccattacacacatggtgagtag

SEQ ID NO: 241677 - DNA, 735 bp, Cannabis indica
ataaaactaataaaaaatattttgttgagtgatagtataaaaaataaaaaacataattacataacaacatttcataaaaaaatatttctattctatataaaatatgactatgtaacaaaatttttggtttaacaaagtttttggtttctactttaacttaacagaatatcccaagtttttaagtttctacgttaactttaactgaatatcccaattacttaacagaatattctttattaattttataatattattatatgtatttaaaaataaaaattatttacatattttatattaaaaaatttaatttaattatatacatttaaaaataaatattatatctatatataataaaaattatgtacacattttatataaaacaatttaatttaattatatatatttaaaaataaacattatattaaaatatatataaatcttaatttaacttataatttattataactacactcttctaactacaaattaaaaatattgtatctatcactatcattatttttttaaaatatatatttagacataatatataaaatatatttaaaagtaattaattctttaattaaattcaaattttgtcaaactattttctactataatccttatacatggagagattaatataaaatacatataacaaagaaattcattcttttattgtatatataaaatacgtatatatatatatatataattacatctaaagagcacaccaat

SEQ ID NO: 241678 - DNA, 1054 bp, Cannabis indica
aagttcttaaatccaacaatctcaatagttcaaggggcatttttaatgatcttaaaagttcaggggcatgatttggtacatgtcaaagtttagggggcaaaaattctaattagccttattaaatagataaaatcagtatttacaaagttagaatgaaatggtaattttgaaaagaaatataaagtcttataaaatggcaaaattaaaacctatgagcccacatgtaagtttcggcaatatggtttaaattaagccatttttacctttttccattctatttaatttctaaacctatccctaaagttaacatataaataaaatatgatagctcttattttatgacactttttgactcactttgtctgacaaaatagaaaataaaaggagctctcattattttcaaaatctcatcttctttttcttgttaatttcaaattctttgagtgattgagtaattgcccacacatttcaaggcaatactcaagatagtgtagaagatggtatagtctttttgttacctgaagagaattcaaattcagatcttgatcatactctgcaaaagaaaggattaagagttagaaatctgaatggaatgagtcatattatttagatgtcactaatatcaagttttttttttatatatacctgtatgagtttaattcattatttttagaaaaattcatatttaaaatgttaaattttagaattataatccaacatacatgttagtaaatttagatcctaataaaatatttccaacattgacaacaaggcacaagagctaatgtcctcaacactaatcaaatttgtgattaagatttcactgttattttttttatagtagtcattgttatgttcttaataattgtgatgaaattatttttcaagtgtttagatttaatgataattgctacaccatcactatctatgccacttgtcactctgctatcgataacatcattgatttatggtataaaatacttgaacatatcgatcgttacaaaaatctaaaaaaaaaaattatccaatgtaaggattgttcgaggattaccta

SEQ ID NO: 241679 - DNA, 1155 bp, Cannabis indica
agataaaatttcattgtaaacaacattctttgtacaaccatcatgaattgtattatcagaaatttgtttcacaagaattttgatagcatcacttgtttttctctaaataaagcaacatataattgtccgtgtgaaaaatactggttcataaagatatagtccaacaaactataaagtttgtccttgagatttatttattgtcattgttaaacatggtcggatcggaaattaaatttttttaaatggaaatgaacctttgtcattttttagtggcacaaaaggaattctgggtaagaaaacttttttaccactatactctccaataacaatttctgcataaataacattgcgttcaaagcttcaacaaattaatcttgttccattacataatccctcagagggattaatatttctaagcaacataacaggacaattcaattttaatacaagctcatgtggtggtataccatttggtgtcaaagtatttaaaaaatcttcttgaatgttttgttcagttttatctaagagctcatcaaagttaaaatatctaaaactatcacctggaaagcgttcaattagtatattattaatgtggtcaacatgctcatttttagggtttaaaattacacagttaatcatggagtctaaattttcaacataattatttaagtttggaaagacagcattaaataaattattcaatgataaagtgttgtctacaaacggtataatcatgttgggtttaagcttaaccatattacaaaaatgagattttccagttccgttacctattcgaagtaaataatttgaaaaggtttgatctaatatagctctcatattatgaactaattttaattttgtaaaatatggctgttgaccaaggtgttcgacaaccacttaaataatatgtaggaagagctatagaaagtttaatgcatgggatttttacgtggttagggcattaatgagccttagtccacaagtcttttttttttattaatgagagtatttattactgagaatgttcatggtggatttttctcctattttctctctttgatacctttaaacccagaatgttcccaccctttttgagtctgtttgtggggtatttatagtgtttttctggggttgatccctaggaatggatcactt

SEQ ID NO: 241680 - DNA, 1059 bp, Cannabis indica
tcaagtcaacctcacacaagtgtgatgttgacttggggagcatatgtgaacccgacaacttttcctggtgatatggacatcaatgttggatacgtaacaagaaggataacatctttgagttaagtagtcctaagtcatagcagtcaacctaggaggggtccctagccttgtgcccaggtttactctgggaactctgggatggatgttcaaattctgctaagttgtttccatctcacaatcttttagtattatgcaccacgaagacatgaatcatccaagtctagggcacaggagctgaaaacacacgaaacaacacctcagaaatcaacctgggcgcctagggtttaacccagcaccaaagttgataaaccaactagggttttagtttctgggaccaccttagtgtaaatggatcaaaatttacattgggacatgagctagaattaacacatatatatttgaggcatcaaaatcagatctggagaacttttattttttagcactgtcgggcacccagtgcccaggttgataatttgtcaacctgggccatttccaagcattagatcaaaaatttgactcatgcattttcttcatcttcatcaaaatggggaaacaagtgaattcaaagaagaaacaaaccaacctacggtccaaaataagggactagcacaaatgtcaacctgggccaattctgagattttttttaaatgtatttcaggcatattctaggttcaaagattaagattcaactatttccaaggagtaaatggaacttccaagaggccttaaactagaactaacacccaggttgacacccggcactgggcccaatgcctaggttgacacattgtcaacctgggccatttctaaccttttttcaaataaagttttatgagtattttttctgtaattagaaataataaatatacaagcaaacttggagaaaaaacaaaaaaagcaagggctttcaaaactgagccctaacgccaaagttgataatctaacttagtgtagtctggttttgatcacttagatgcaaattttcaattttgagcatcc

SEQ ID NO: 241681 - DNA, 512 bp, Cannabis indica
acgctgtgacctgtcattttcagcattgttcacaccagataacgaggcagcagcaggtaggttctcatttgcagcattcacggattgtgacacatcagtaacaggaccagcaggtatgtcctcagtagcaacagttggaccagtggtaaaggcagtgttagtaaatgtagttgcttgaggacaaaatgaagaattgcaaggaaaaggtgtatgagtgggggataatacctgcgagtgtgctgctgaagtggaggcagaggcagctttttaaggatagaaatcctcattgaacaccacatttctagcaatatatattctcccttcagtattttcacagaggtatcctttatgatgggaagaataccctaggaaaatacattgctgagtcctgaaatcaagcttgtgcttattgtagggcctaaggtgtggaaagcaagcacacccaaaaggctagagaatgttgtaatccggcctgctgtgaaatagagtttcataaggagtagcaaaattca

SEQ ID NO: 241682 - DNA, 1216 bp, Cannabis indica
acttactttaaaaaaaaaaaaattaatttgattgttttattatatcgttatatattaatttgattgttttattatatttttatatattaatttggatagttaaaaaaaaaaaagaaccattatttagaaaattctttattactagataaattatggtcgtagagataataaaagtaaattatatttattaatgtgttagtttatattgaatatttactatatatgaaatcttagaatatgtatgtttaataaataatttgattagtttttaaaatgagatatttgtggcgaaatcatattaatatttgtaattgatggtaaaaaatactttattttattataattttgttgcatgtgtcaattaagtcttttttaagtttaaaaagcacgtggtgacatattttttaacttatttaatatgcggtgtaacaaaattgtaaaataaagtatttttgctactatttttttttattatattatatatgtaaccgttttaaatattaaggagattttgctgcaaatatgccttttaaaaaatattatgaattgaaatttgttgttaattctttaaagagaaatgattaaggactctatagtattacatgtcatacacttaataaaataaggtgataataatttttttaataaaaaaatagatctaaacaacttttttaaaatggtaatatttaataattatgtccgattttttatggacggttgtgagaagtagaaagtgtaattgagacctctaaattatattaaataaaagaaaattaagtaatattcaacaactttttttgatataaaaaaatagaaaaaaaaaaaaaaaaagaaaagactaagagcttgttttggctgtgtttttcatatttttaaaattgtgttttttaaaagtgagaatagaaaacagtttttttgtcattttaaaaatttaatggtgtttggtacaaatttttaaaaattacttttagattttttttcttacaaaaaaaataatattttagcaccataccatgacattaactcatccgggtctaggttcgggtatgatttcgggtctaggatctgagtatgtgagcaaaatataaaaatataatatgttagacaacaaaaattgtttttgaaaattgaaaacaacatttggatgttttctgttttctaattttttaaaactcaatttttaaaaaatagtttttaaaaatttttgtcctaatag

SEQ ID NO: 241683 - DNA, 2868 bp, Cannabis indica
ccttgaaaaaatacttgacgacgcctcctgtcctttcaaagccagagcccgcaaaaaccttgctcctatacctctccttgcctaagtctgccgcaagttcggtactggtaagggaacaagggaagacacagttaccaatttataacaccagtaaaactttctcgggggcggagggaagatacccaataatcgaaaaattagcatgggccttagtcacttcggcgagaaaacttcggccgtacttccaatgccatagaatctcggtcatgacgtctttcccactaaagcgggtcttgtacaagccagaggtatccgaaagactaatgaaatgggttgtagaattaagtgaatttgatatacagtacttgccccggacagccattaaggggcaggcgctggcggatttcttggtcgagataaccccaaagcctatcctacccgagaaggaatccgccggaaaagactagctactgaaggtagatgggtcctcaaatatcagaggaagcggagtgggaatagtattgctatcgctcgacggggaaatgatagaacagtctctaaagttaggcttccgagctaccaacaacgatgctgagtacgaagctctaatccacgggataaaactgctgaaggaaatgggtgccgagagggtgttagtccagtcagattctcagttgatagtccagcaggtcaaaggagattttgaagccaaagaattgaagatggccagatacttatctgaagtaaagaaactgatcgcgactctcgactacttccaaattagtcaaatcccccgtgaagcgaatatgcacgccgacgctttggccggcttgggatcctcttcccccctccacatcacgagaacaataccatttgacttcatcccggaacctagcatttcagcggaggaggaaattaaatgcgcagagatcccggcggatacggtcgaagactggcggcggccaattctcgaatacttgagggacgataaattaccaacggaccccaaggaagcaagaaaaatcacagtaagggcatcaagatacactatacttcggaaccaattatacaaaagatcttaccatgggccatacttaaagtgtataacaaaacaggagggtaaactaatattagcagaagtacatgaaggagaatgtgggagccactctggcggacgagtgaccgcccaaagagtacaaaggcaagggtactactggcccacggtccaggaggattcttcaactcactcacgaacttgtgaaaaatgccagaagcatgctccgtccatcctagcccccccggccgagctaaccaccgtccaaagcccgtggccattcatgaaatggggaatggatatagtgggccccttaccaacagcaccagctcagaaaaaattcatgttggccctcactgactacttctcaaaatggattgaagccgattcattcgctcaaataaaggacagagaagtagaagggtttgtctggaaaaacataatatgcaggttcggactgccccgagaaattgtagcggataatggctcccagttcatcagcaacaaattcagaagtttctgcgaacgatggagaatcaaactcatattctccacgccccgttatccacagagcaatgggcaggcggagtcgtcaaacaaagtcatcataagcaatatcaaaaagtgacttgaaagtgctaagggaagatgggcccaagaattgcccggtgtgctctgggccaaccgaaccacgccacggactagtacgggcgagaccccgttctcacttgtatacgggatggaggcagttatcccgacggaaacgcaagtacctactttacggtcagaattaagtgatgaagacaatacttccctaagactacaagctgtcgacgaaatcgaagaaagaagggagcgcgccctaacccgaatgcagaattactgctccgccgtggcaaaacaatacaataaaaaagtaagcccgaggaatttcctcccgggggaactggtcctgcggaaagtttttcaaaacaccgaagaaacccgagcgggaaaattgtccaccaactgggagggaccgtaccaagtggtaaacccgacgggaaagggggcgtacaggctatccaccatggacggagccgacatcatgagaagctggaatgcaaggtacctcaagaaattctatgtataaattaaaggttgggcacttcaaagtacatggaaactgtcatcaaaatttctcttcaaaataaataaaaatgaggggaattcggaaagtattgtccaagttaaaaacaaaaggaataaagaccttttacggaaggcaacaaaaaagaccttttatgaaaggcaacaaaaaaagaccttttacgaaaggcaatgcaaagacctttcacgaaaggcaacataaaagacctttttacaaaaggcaagggtaagaccattcgatacgataatatacaaggcacaaaaaaattgtaaaaggacaatcaacaagtacaacataaaaaagagacacaacaacaaatccattcaaaattaaagcatatgaacaaacaagaacacgtcgagaaacaacagaatttaaaattatcattaataaagtacagcaagaacacgaaacagaaagtccactaccccacctctaaaaaaaaaaacgagagaaagttttatgaaaagagagtgcttactctattttcaaaaaactagggggagtagtggcccgtacaaaatagggtactgcataaccgccgacggcataaacttacaaaattactgcataaccgccgacgacataaacttacaaaatttacatactgcaatcccaaaacataaaaaggtgccgacataaacctacaaggaaaataaaaaag

SEQ ID NO: 241684 - DNA, 874 bp, Cannabis indica
cattgacaaaggaaaaactattgatgtgtctcctcccagccctcttcctcgcagccgtggaagcaaaggggtggttatcagtgaaccacgccctacagcttctccaggcctttcctctggaaccaggcggcctttcacgcgtcaaactgtccaagttggagattctatccgtagtatgctgaaaagagcacgggcagttgtttctgaagatgctgtggttccttcaatgtcagatgatgagccaacggcgagtgctgctacgcggccccgccgagaaaaatgagtctttgtagttggaattctcgaggtttagggagtccttgagcattccgtaatctctccctacttgtcaagcaacaccagccaatgttgttgtttgtcatggagactaagctgccttcaggccgtggactgcacctcaagcacaaacttcattttgataatgttttagaagtgcctaggcaaggtttagggggaggtcttttacttttttggaacaattgcattgatgtaaatgttacttcttactcccttaatcacatagattgtattataaataattttaatgatatgaactggcacttttcggggtattatggctctccttattcttatcaaaaagttgttacttggactctacttaatcatttatttgatactgctcctcttttgccttggttggttattggtaattttaatgactatctttctgatagtgataggaattcgactaattctccacctccttatgctatgcatcattttcactcgtttctggataagtttaatcacatccctcttcatcattctggtcctaaatttacttggcgacatggccaatctttagagcatcttgactggtgtacttctaatc

SEQ ID NO: 241685 - DNA, 1295 bp, Cannabis indica
aaaaacactggagcaacataccaaagaatggtaaacaaactttttaaagaccagatcgggcaaaatatggaagtgtacatggatgatatgctcgtcaaatccagaaaggttgggaggcagatagacgacctggatgaatgcttcaaagtccttagaaagtacaatctgaaactaaatccctctaagtgttcctttggagtcagctcgagaaagtttctaggcttcatcgtcaatgcccgatgaatcgaagctaatccagagaagattcaagccctcttggatatggactcgccaactagaaccaaagaagtgcaaagtttgactggttggatcgtcgcgctcagcagatttttttcaaaatcaacagataagtctgttccattgttcaatatcgtgcgagaaaacaagcagtttgagtggacggaggaatgtaaaaaatctttccaagagctaaaagcacaacttgcaaaacctcccgtactctcacaacctctggacggagaagaactttgaatatacttagctgtcacagagcatgccatgagggctaggctaattagagaagagaacaacgtatagcacccagtctattacttcagtaaaagactcattgaggccgagggccgatacccgttgatagaaaaactcgctcactgccttattctagcaacaagaaagttaaggccttattttcaagctcattctgttgtagtatacactgaccagccactatgccaaatattgcaaaagccaaatgcttctggatggctactcaagtgggcggtataattaggccagtacgaaatcactttccaaccccgaacagcaataaaaggccaagccttagcagactttgtggtagaatgcacaaccaagaaagaaagcataccagaaagcaaccgcgagctggtacaaacatctcaaccaagtaacaatgaagataagccaacctggaaactatatgtagatgggtcagctacagatcaactatctggtgcaggattttcccttgtcacgcctggggggcaacacctccactccacattcaagtattgattcaaagcatctaacaacgaagccgagtacgaagctctaattgctgggctaaggctagcccaggagatgaaggccaaacacattgaaatctgcagcgattcacagctagtggtgaaccatgtattcagagaatatgaagctcgatgagaaaagatgatagcatatctgagaaaagtacattatctactcgcacaattcaaaagctacggtctccgacaaattccaagggaataaaacac

SEQ ID NO: 241686 - DNA, 561 bp, Cannabis indica
tgacagtattttgtaaaagttaacccaaattccagtacttttgtaaattccccctaaaaatattagatgtgatccaataaacattccaacctccaatctaaagcagttaaataatgagaaataaattaaattgggttatgttaagggtagtgataataataacaattaaataagtaatttgacactttggactagtttcgataattctcaacaaaatagtctccaatactatagacatcctatcattttttttagaatgaaaagattatcaaaattaggttaaagtgcaaaatgatttgataaaaagaaaatctcattttaccaataacaatacatgtttattattattattattattatactcaaaaatcagctatgtaccaaaaactaacacatgtccaatataaataatttgaactaactcaaataatataataacgacattgtatcactaaatgcaatttaaataagttgttccaattaaatacaagtttgatagaaatgttcatacttattgactgcttagtcttatgcgagtcaagaataataactattaaactg

SEQ ID NO: 241687 - DNA, 1154 bp, Cannabis indica
agagctctccttctttcttgttggtgcaagagggaagagaagccttccgcacacagaggaagaggtaaggagaaaggggatcaccctggcgaatgcccctagaaggagtgacactgcctcagactttgccattcaaattaaattggaaggaggcgatggagatgcatgcaaaaatcagttggacaaagctgggacggaattggaattttttgagaatggctactatgaaaggccattccactcggtcgaaggctttggccatatcaagcttgatcgccatccatcccattttcccgcgcgtctttagtttgatagagtgcgcaacttcctgggctataataatattgtccgatatgagcctgcccgggaggaatgcgctttggttaggtgagatcaaattattcagaacaagtttcagcctgttggcgatagtcttcgacatgattttatagatactattacagagactaataggccgaaactcagagatgaacttaggttgcttgactttgcgaatgagcgtgatgagggtgttattcagaggggccacatttgcgtttccattgagaaaactggaagccgcttcgagcacgtctttcctaacagcaggccagttagctttgtagaagtgagaattgaagccatccgggccaggggcttcgtccagaggaagctggaaaaacgcttgcacgatttcatctaaggaaaaatcctcggtcagaagggatttatccgagtctaacagaaaacaactgatgccttccaaagctgtattcatgtttgtatcggtggggtttgaggaggtggagagttggtcaaaatgagactcaatttcccaaataatgctctcctcgtccgagaccatgcctccgtttggcgtatggagttggtgaattttgttgattttttttcctttgggaggcaaatcggtgaaaaaacttcgtgtttttatccccctgagccaaccattgggtacgagcgcgctgtttccagtaagcttcttccttgtagaggaaggcgtcgagccgggattggaggtctttaatagttgcaatagtacgatcgtcccaaatagggggtgggacctggcccgagttccagctctttctcaagcttacagatttgctgtttcaagttgaagtctttttgtgatt

SEQ ID NO: 241688 - DNA, 913 bp, Cannabis indica
taaacatgtaatcacatatgtatatcattatactaatcttaccttgattttgaattcaggtgtgtcggtcaacctgagtggaattactgctcaacgatttacagtcccctaagtcacaatattcatgaaacttatgagtgacatgctaaatcactttttggggacttaaaatcaaaactaaaaatttccctatcgatagataatatggtaataccctaaatattactaaaacagaaaaatttaaggtgccctaaactgtgccaacttgtaaaccagttcccaacgaaaaaactagttttgaagggtttgcctatggaggaatcggtagattgtttttacattacaaaactgaaccagttgaccggttcagtgcaggtacccccaaaaaccttataaacactgcaattcaatcccaattcataacaaaccttccaaattacctaaataaaccataacaaacatatacaaagcaatataactaggcaaaaccctttgaaacacaatccaccattctaaagtaaaatttgaactccaaagctcaaactttgttcaaacacaacacaaaccacaaatcaagcttaaaaccaacttaaatattatcaaattaacaccaaaaaataaacacaaactcaaacaacatctacgacaacctaattcagaaaatgcatggacacatatataaactaagaaattcaaataaatgaaggagagagagatgaacccttagcttcaatctatcaaaatctaaaaattcctagttgaaatcttttgaattgcaatagaaaatttcttaattcctaagcttgggagtggccgaccaaaagagagagaaagaaggacttgaatttcttaattttgtaaaattaaataaatctattattttcctaacattatacaccaaaattagattaat

SEQ ID NO: 241689 - DNA, 1824 bp, Cannabis indica
atttgtatcttcacagaataatacatactaatttttatttagactatactaataacagaataagattgttactcaaacttcaatagaaattatatatataattattaaaactaaacttctacatgttacaatatttttaaattatatatatgtgtatattaatttagaaaaaaaaaaactaatatatatatatagttattgtagtcttaagggaccacatcacataatattactggtgtaaatatttttaaggataacataatacattgatattatttgcctacatttgacttttgttaatattattaccattggattattatttttgttttaagtatatagtactttgtatatatgtcaaaataaaaataaaaaaggtagagttagtatataaatatattcattttatttttatttctagacaagtatacattgtgaaaaacttaattattatattaaaagtaaatggaaaaaataaaatggaaactaacaaaaaatattagaattttagttattttaacttttataaaaatactgtcatattaaatttttttaaaaaaatattatatttttataaaataaaagtgaatcacaaagcataacaactaaaaacaatagtgaaacaattaaaaaacaactgtaaaataataatgaaaacttaacactgtatacataataaaatttacacagtaattttttaaaaaaaccggtccaacaattaaaaaaattaaaaattttatacggtgtaaataatcctaacaattgggaacatagaaacaatatatagataaattaagtattagtaattatattttgactttcaagtcataaaaaataataattaaaacagtagaactctgcaaaataattactattaatcaattattaataaatacataaattcaattcaatcatgtacttgaatattatattattgtgttttaaaattgctaaaagttattaatggtacttatactttattggatatgtatttagtatcaaaatctcatgtaatttaagaaaataaattttaagtaatattagtacaacttataaatggtgcgataaatggtgttggacacctattgtgttttagtgatgtccatataccatatcaattaaaaagcgaatacttttcccttgatctatattaatttatgtacacaaatttttggaccaatcacgtcaataaaacacaattcacccttaactcataattcatacatcaccttcccaccacattcaaaactaaattcataaattctctcatttattattttcaatcgatcctatttgactttaatcaacttcaatatcacgcaaaacaattcccaacgctgacttgacttccgtttcatttgatttattcttattttttccttggaaaaacatataaggatctgtttgaaaagttatttagagaattgaaattaaatataatttgagataattacataatttaatttgtttatataatttgagataattacataatttaatttgtttatttgatcacataattacatagatttcaattacagtctctaatttttataatttccgtgtaactaaatataaaaaataattttaattatttaattaatataataatcatttaatataatttattattttattatattttctcatatatctaatattttttcatgtataatactattttataatatttttttgttttgtttgtaaaaaaaattataaaaatcaatatacgaatatatcatatttgattttttttccttaattaatttatattttgaattctcttttaaattaaatatttaatagatataattgcgaatt

SEQ ID NO: 241690 - DNA, 984 bp, Cannabis indica
cttcttaatagtatcctttaatgctttattaacagcttctacctgtccatttgcctaagacctcaaaatcgacgagaagctcttaataattttgttcctctcacaaaactcagtaaataagtcatcatcggactgagtcccattatcgaatactatcttaatgggtattccaaatctgcaaattattttctttacaacaaaattgagaaccttcttgcaagtaatagaaactagaggttcagcctctgtccactttgtgaagaaatgcacagccaccactgcgtacttttctcctccttgccctgtgggtagtgcctcaatcaaattgattccccatgttgctaatgggtatagtgaggtcatcattcttagttctgttggtggtacgcgaggtatatgtgaaaatctttgacatttatcgcactttttgacaaatttgtgtgtgtctttatttattgttggccagtagtatccttgtcaaattaatttctttgacaagctttgccaaactacatggtctccacaaaagccttcgtggatctctttgattatctcacttgcttatatggggagcacacaccgcaggagaggtattgaataacccctcctgtataatttgccttctattatcgggtagtgatacactgaatacaagaattttcgtgcctcatttttgtctgctggaagttgtccgttgagatgatagttaactatcggtgtcatccatgtaggcaaggcgtcaatcatctcaacttcttccttttcacatatacttggttcgttcaacacttcgactagtactaaattcaagttatcaagttcattttgcgaggaaatttttgctaagccctcgacattagagttttgttctcttagaattttttcaattttaaaataatcaaacttttccaagttcttgcgaaccttctccaagtattttgccatttttaaacccttcgcttggtattcccctagaacttgatt

SEQ ID NO: 241691 - DNA, 753 bp, Cannabis indica
cgacagaaaagaacacagattagagatctgagcgaaatgagtcatattattttgctgcaaccaatgtaaggttttctaaactcttatgtgtttaattttatcatattagagatattcatatttaggatgttaattcaacatacttgttagtaaatctagatccttctaaaataatcccaacaataccttctttgcctcttcttttttcctacattcttcagtaatatgtcccattcctttacaattagcacatatgataggaagccattcatacttcaccttaactttcaatgtcttgatgtagctcattagtgaatgaaattttgtccgaaaaatcccgagacatattaacttctaccaagacccttgcaaaattcagtcgatcttcatttttagtaatttgatctagttggatatgatttccaatctgacctacaatcttaaatagtgatcgttctccctagtatttaatatctagatcatgtagctgaagccaagtaggaacacactcacatcctctttttgaaattcagtatagggatcccatggtttcatcactatcagtttcctattcaaaaacaagaatccaccatttaaaatttcatttctggtttgaacaaagataaattgaactataagaactcctagatttagcactcccactttatccaccccttttccttctaaacacgacgagcaaatccctccaaaaatttcactagcagattagcacctaggacataacaaaccaaa

SEQ ID NO: 241692 - DNA, 1154 bp, Cannabis indica
ccttcttcaagcgtttcacctctagatcatgaagacaaactctcaatcgtatctggttgtgctttgatgaaggtatatatagatcttgggttttctttgtacctgtaattagttagttacataagttagttaggtgtggattataacctaatctattctaactaacttctgctagggattttagaggtcgaaggccaacattagggatttgcatgtatttactggattgtccttgtattaagtccattatcagtgtaagtggaggtttactccaacaatttccacctaaaccttcactgagctgataaactagtggtcgagtcaagtctgagggtcatggctctgtgatcccaaggatcactttatccttgatccaaccctattaagttcagacaatgtctaaacttatatagggcgattactttagtccccatgtctgtaggattttcttctgtaggcaccttgtcaatgtttatgtgtccctatgtcactttatccctgataaagtgatactttatctcaatatgctttgttctatcatggaacatagggttcttacataggtgtacacaactctgactatcagagtaaatcatagttttagtgtctagcaaccttagctcttctaggactccttttacccaaatactttgtttgatagcctttgtagttgcaatatactctgattcagttatggacaatgccacaactggttgtagttgtaccttccaactcacacagtttccccccattagtagtatgtaggcagaggtggatttcctactgtctctgtccccagcatagtctgcatcactgaagcattctatagctgtctttccctgttgttgtttgtatttaagtcctagcttagttgtcccaattaagtacctaagtagccatttcatagctagccaatgtgtcttaccaggatttgtcaaaaatctgctaagtacactaatggcataagcaaggtcaggtcttgtgcttaccattaggtacataacagatccaatggcattaacatagggtattttactcatctcctccttttctgccttgctctcaggacattgtttctttgacaatgtgtattgagtagttataggttgactagtaattttagagcctttcattgagaatttctcaattatttt

SEQ ID NO: 241693 - DNA, 1166 bp, Cannabis indica
ttacttaataactatttcattctcaccaatttagcgagtgggtgtggcttagaagtctagtctagatttttgagtcaatattttagtattttcattgagagtcacaacttaagaaaagctactaacaagatggttacaacatgttctacaagtgttgacagaggaatcctaaaaactggccaatcaactaggagcacgccagttgatggagttggaactgggactactcctgcgccccatgtgctaggagcaggccttaaaactgtcaggttattgcttcacattagttaacgaggaggcttcaggcctatcgttccttaatgcctgaaattgtttttgaaatctcgagacaattgctcccatgaggatataaaatgtcgaggaaacttatcaacacaactttttgatgtcaatgtaacaaaagtccggaataatatacattgtaggttcaaatcgacattacttgctcacacaatagcatgaaattactcgaatgtcctactgggtcagttgttccatcgtatggagtgacatgagaattttttaatcctttcgggaagtgcgagttggttatatcaggatggaacggttcaaactctttgtctgaattgtatccaggaaatttcccatgttctccatctcgatatttctaaaattactcttcaagttgtatgacgctcaattggattgggtcattcgctagtcaattgtttaactattctgacacattttcattcaactgttcacatagatctgacactttacagttcatctgttagtgcagatcaagttgtctccaatttaattagttgatctctaaggccaggatcattctgatgcccacaatgtcgctcttatctcgcattatagttactaatggaccttgttggtgagacactctctgattggtaactttgcaaattactcacactaacttgttcattatgagaattacgacatgtgttaccttccctagctttgacaagaaattccccttgtttgtgacaatgatggttggttgtgttctcgactcctccttaactcactcatcatagtgtttgactcgatcctttgagaagcagtttttcgcactagttgacgtcgcacaaacagatgtgtcatataacttcctccagctctttgtgggtctcgtggtggccgagaat

SEQ ID NO: 241694 - DNA, 2025 bp, Cannabis indica
ggcgcttttcgttcatgggcttgagcttcgatacagggccagcgactgagttgccatgtatacactttctatatcttcagtcagaatagtgaatgtaatgtatttggcatgattctccaggggagcttgttcggatttgccagtaaacttcctttcatcctattcccttgcttatggttgttactagagcgcttaccacctgagcttgaattgtttgggattggggaagttgggcggatgttccagtggaaggagcctttgccttgccaggcttttgttcacccttcgctcgttgaatagctttttcgagcttgatgaagccttcggctcggtcaaggaaatcactcattgagtctactggcccgttcttccgtatatccttccacagttcaccgaggacttcgatgccccccagtattgcggataactttccatactcagttacatgtgaaactttggttgcctccgtcatgaatctgctaatgtatgcccggagtggcttgcctggtcttttcttaacttcgaccaagtctcccaaatgcaatgggagttggcgcgaggaggagaattgtgcatggaattccgaagagaaggttttccatgaactaaactttccaggagccaacttgaaataccattgctgagcggcttctgacagagtggcagggaaaattctgcagcatacatctcctcgtacaccttgcaaatccatttgcatttcaaagtacttgagatttgaaaggggatcttctctccccatgtacatcttccacgtcggcattttgaacttgcgggggagtggcaggagattcatctccggcgagaaaggagtttcgcgtgctcggtctagctcaagatcattatttctttatccagccatgccgtgaaacatatttttcaattcttctagctgggcatgtacgacagggctgacttgctcggcattctggtcaatttgaatcacgtcagcgtctttctgagctgggatttgattacgggctctgggctgcacgattgtcgtaacattctaatcttctgctcccctccttctgtttagatcattccttaggtcatggtttgtccataacctttcgaacacagaagcgtcaggctgccttagcagttgattcgcttggttgataggtggaatggcaccattgatctcattggaaccatcaggtatgacttcgcctgacgaattaccagacaaggtctgctcgcctagtgctgggcccacgagtggaattcgtgacatgggattgctgaccaattgcagtctgggaagtattcatcgttggatcctcgtccgtctctcccaggggaatgacattcgacgattgccgacctacagtttggaaggctcttcgtatcagcacggtagcttgccgactacgatcttcgatctttgcatggtgagcccttaatgcctccatctctctatctctccattcggcgaacatgcgcctttgttcgttgaacccgagatttactgcagcgcggagttcgtcttgatcatgatgtagggtattattatgaccctgcattagtccgagcgcatcacagagattttgtaattcagtggcatcttcgatagtcgtcgggacgttgcttccaggcgaaacaggtctgttatgaatgccctggttgggtacggaactgttattccaagtctcttgcacaccaggcgcaatttcatctataggaactatttcaccatttcccatgctcgccggctgtctaggattaacagcaggcagaaccctcgtgtttcctggggtctgcgatgcaggatccagcatctatgaatttgctggatcagtcaggcctctacgagtttgcaacattgtattggcgattggatgttgaataaagagcgattcgtgatccttctctcaatgaaagcaccaaaatgttgacctcgcttttagccaacgacaacgagtctattttataagcgataaatgatttataataacaaatatatgataaagcaacaaaaagacgcaggaattttatagaggttca

SEQ ID NO: 241695 - DNA, 1434 bp, Cannabis indica
ataccaagtgcctgccagggtcaaggctgcacaccaagtgcctaccagggtcaaggttgcacactaagtgcctgctaggatgtaggctgcacaacaagtgcctgccaggtttcccacgtgttggccaaccttagcatatgttggcctgcctttgtgtaactttccttacaatggtcagacttccttggtcaaataggcccttcttagtctgaaagtcaccatttggttggccaagttgtattgatagattgtgtaaggttataatatattttcaataaactcgacccatacaccgactacgggtcgggtctaggtccgggtcccatgcttaggtcccgaatccaggtcccagtcctggtctgggtctatttcccagttcgggtccgtgccctttctcaatttgggttcgagcccgggtacgggtcctgggtccgtttctcagtttgggttcgggtctaggtccgagtctcgagtctcgagtctcgggttcaggtcagggtcctaaatctgggtccaggcctcgggtttgggtcccaggttcgggtctgggtcccgagtctcgagttcaggttgaagtccgggtcctggttcgggtcagggtcccaagtttggatccgagtttgggtctgagtctgggttcggatttgggtccgactttgggtcccaatcccgggactgagtccgggtctggtttcgggttcgagtctggattccggtcccgattcttgggtctaagttcaaatcccgagtcccgagtgcaagtcctggtttaagtctgtttcttgatccgggtctgggccagggtctgagtcttgggtccgtttcccagtccgagtttgggtctgggtctgagtgttgggtctcgggtcttggtctgggtctaggcctgggtctcaagtccaagatcaggtttgggtctcgagttgcaagtcccagaatacaacttacattgtactacaaattttggtcgtaataattagggaaattaccccatatacagtttttttttttacttttttttttttttcaaaatttacagtttgggattctaaagtagtttctccggtggtttctatgtgtgttgttatacgattttttgttgcgatttaggttgcagctctaattgcaatagggatttctatgtaaaattctgtaaaaatatatatataaaaaattgttttgaagtttaaaaataaaaaagcctctaataattaatacaatatattactttatttaaacataatgtcatttattatttaatacaatacagccttggcttaccaaacaagctctaaatctgatattgtactgtacaatagtttttttttttagggtatgtcatcagacccagcgttctaaggtaagttttctatagatttacgtttctatctatgtgttgtttacaaaaaaattgtaatatttagtattttcatc

SEQ ID NO: 241696 - DNA, 1392 bp, Cannabis indica
cggatattgctcatgcagtgggagacgtaagtgtttccttgcaaatctgggcaaccatcattgggaagctgtaaaatggatctttagacatctcaacgggacataaaaaatgtgcctaagctttaggaaaggagaaccaatcttagaagggtatgcaaatgttgatatggtcggtgatcttgacggtagaaagtctacatctagatatatgttttcttttgcagggggagctgtgtcatggcagtccaagttacaaaaatgtgttgctttatctaccacaaaagcatagtaaattgctctttagttgggaaaaaatgttatggctaaagaattttctccaagaattaggtttgaagcaagaaaggtacgtgattcaatgcgacagtcaaagtacgattgacctaagcaagaatgctacttaccactatagaacgaagcacattgatgttagatatcattggactcatgatgcacttgaaaagaagctattccaagtgtagaaattcatgtaaacaagaatgcaactaatatgctaataaaggtgattcctcagcataagcttgagttattttccaagcttgctgggatgagttctcgatgatgaagacaacatcagttcttcctcatagattcaaaaagggggagaattgataggtaattgttggcttttaaccatgtaaaactgtgattgtatttttcaatcatgtgaaaaattacaattaatttttgacttgaggaatatgcacatattcaattatacatttaatgcaagattgatttttttgtatcttgttcgtacatccaaagaggcctatatatagatttcatcctttttatttgttcatcccatcacaagcgattccaagagtgaagagtgatgctattgagagagaaatagtgaaaatacatcttagtgagagaaatctaagagagaagaaaaagaaagttcctataaaattgtgagaaatattttgtagagagatagtgagattaccacactagtgagtgagagttttgagtgtatttcttaagtatttatcaaaatttgagagtctaatattgtgtacccattattattgttatagtggaaggtttactatgatttttatatgccatgatataatttcttagcgtggatttggtgctttaattattattcgtaaagtactatttacattggaagatatccaaaaattctaaatatactctatgatttgcagatgtgactgttctttcacattagaaaggaatttcggagtccccattgtattttcccacaaatattgatcctgaagaggaattacaatactgtccattatttctaaaaaccaccaatctaccccgacacacacatatatatatatatacagggccggccctaggcataggcgg

SEQ ID NO: 241697 - DNA, 599 bp, Cannabis indica
agacctacatgggaggtctggccaaccatgcactgcaggatatggtttcgccgaccagggtctgctagttgaggtctggccggccatgctcctgccaggacctagcaggtcactatagctttaccaagaggtgaccgtgaggtacaatggtaacctcctattggtactggtataaagttgaatgttgatgcagctatgaattctacagcaaaaattttgggtgtgggtgctattgttcggaaccatcaaggccaagttattgctgcactttcaaagtcggtacaacgatgctttcgttctcatgaaatggaggcaaaagaactttttcatagcttaaattgggctctccaacaacaaataaaattcaccaatattgaaacaaatgcacttagacttttttatgctttaactaccacatctatagatttgtctagtttctcttatttgatcttagatgttcgttgtcttttatcctttttccctgaagcaaataatctcatgttaggaggaatgttaaccataatgcacatggcttgacaaaacatgctttagatttggatcaagacatttgttggttaggagaaataccctatcctatt

SEQ ID NO: 241698 - DNA, 1088 bp, Cannabis indica
attaatattatattgttatggcataaatttatgctttatttaaacaattagtgcttatattcttacctatcgtaagattaagcatggaaaattatttcgaaatgaggagcatgtaaaatattaattttttttaaatattgtgtcttcctccaatattagattaagatccttataagtattaattattctatcaataataattgcttgctaaggatgcttaatatggtgaagaaaagttattaaatattatgaatcataatttatgtatcctttcgatagtaaattaatgtatttgattataatatttaatagattgttcttacctatgtatgagttctactttattaatttggctaagaactctagcatacatgatgttcatttgttattttgcgatcatttatttatgagataaagagcacaaatgacatgattttgttataacatgcatttaattgttattgctcttgtttctcattcagctttaagcattctaagaacctctgccatgttgacactgaatggaaccaaccacaaaaagtgggtagaatctctcatgttgaatttgactcttatgagagtggatttggccttgagaatagatgcactgcctaaacctgctgacgatgccactgaaaaggataagaaattctatgaggattgggagcatttcaatcgctattgtttgatgcttatgaggtatcacatggatgaatccattcgttatagtatacctcaaattgaaaatgcaaagtattttcttgctgccattaaggaaaagtacaagaagttctcaaagaatgagaaaaatgagtgctcaactttgttctatcgcactaattatgccgatacatgtgatattagagcccacattgacaagctcatgggttgttaccaaaatctcaagggcataggattggatcttggtgaggattacatggtataatttgtgatgaaaatcattccttctcaattttatttgattagatcaagctctaatgctcaaaaggagcagtggaccattgaggagatgactgctattcttgccaaagaagaagaggacataaaaaaggggagagcaagaagta

SEQ ID NO: 241699 - DNA, 1217 bp, Cannabis indica
ctatatatatatatagcttttcaaatgtgactaatatgtatatactataacttgatttaaacaccatccatgacatgaagcaaaataataattaatgtatgatatgagcactataatatatatatataagaagtatacatactataacactagaaatgaatttatatagtacttgtaagggtggaagagaatattcttcttccagttaattaataaaaaatatctctccttttccaaaaactttctacgtatacgtaccttgatagtgagattaacaaatatatatactaaaggaacttcaagaaataatacacttggacacaaaattatctgagcattgttactttaatttttaaggtaattcgccacattgatatgaagttgtgagtggttagcgattatttatattattaattatattaatatatgtgagatctaatattaaattgtattaattaataacgatatatcgacactataaaaaatcttatttttagccacagtaaaatttgtgattaaaagtaaaaaagttgtgactaattataaattatcattcttatgttatgactaaaaagtccatgactaaaagtattagtcacaaaaattacaatttattgtgactaaatgtgtttttagtcacaatacttgttatgactaaaactaaatcagtgacaacttgtagctaaatattatattgtagttacaaataactttttgttgtaattaaaattcacatttatactcacaaaaaaattatattgtgactaaaaaattgtcacaaaaaatagctattttttgtagtgcaatgtggcgctaggggtgagaattgctaaaaagtatcactggtacctagcactatccttggtgttataccgctattagtgtaattaagtagcatgtctcaaataacttaagaaaataacttttagggaatatcgctaaccaatcgttactagtacccaatagaaatgctcttcataaaatacccaactcgcacgatccaatgaaatttaatttggatatcgtacttgcgggaattagattggattgaaaaatctaaaaccgcatttgtgtagattggatattgattgaaatataaaagtaattaatccaatctaatccaatccacacatatttatatatatatttttaaaatatatatatatatactaggtagatgttacgtgggcgagccacgtattgttagttttatttaa

SEQ ID NO: 241700 - DNA, 1002 bp, Cannabis indica
ttatctctatagatgtattttacctccaagaccctggctgagcaggctgcgtgggaatatgcaaaaaaacacaacttgaatttcattactatcatcccaacactcgtgattggcccatttctcatgccatctatgcctccaagcctcataacagggctttcactaataacaggtttgaataaatgttttttttatcttttcctatcttaattaaaccattaatttaattgatgttaattaattaaacaattaatcaaaatcaggaaatgaatctcattacttcattataaagcaaggacaattcgttcacttggatgacctatgcaatgctcatattttcttatatgagaacccgaaagctgagggccgctatattgcctcttcacatgatgctactatatatgaacttgctaaattgttaaaagacaagtaccctgaatataacattcccaccaagtaagtctccctatactcttatcactatttcttttaatcaaatttcatggtaatatttaaaatatatcggagaaaattaggctaatgtacctacaaataggtcattatttagatataataatggattgactatacaattcaaatgataccaagatgttggggaacgataccctgtaaaatacaacctagaaagcccaaacgctagcttaaaggccggatggcaatgttcaaacatatataggaaaaaaaaaacagaaaacaagaaataaagcaaattgataaacactaaggcagcgtttggttggcggtaatgaaatcaagtggaaaggaaacaaatttattccattcttttgtttggttgcattttaaaatattgaaatatcattctaatagaacgacagaatgactatttctttttgaaatgaaagaaaaaccaattccaatataaaatttgaaaaaatttaataattttttttattaatttttttacgttattttaaattttattccattcaatttctattctaattcctatctctattttta

SEQ ID NO: 241701 - DNA, 936 bp, Cannabis indica
agcatgatttagtacctgaaacagtaaaattgaatgaaattagacaaaaattcttaaatttaacaatctcaatagttcaagggggaatttttaacggccaaaaaatttcagggggcatgatttggtatatgtcaaagttcggggagaataattactaattagtcttgttttattttattagtatatttaacaatagtattaaattatgaagtatatataatattatttttattcttacatattaaaataataataaaactgataataaagttattagttttatattgggatttttttttaattttatgcttttaaagcagttttttttaatatttacaaaaattgacatacaaatatctatagcaacctaaatcacaatcaaaatccacatagcaattcatatagaaaccaccggagaaactaaaaaggttaaaaaaatagtatatatgataattttccttttattttttaatagaaatattaattagatattaaattttacatcaaaattttaaaatactaaaatttgatgtaaatcttcataaggttatttttttgtgtcaaatataacataatttttacatctctaaggagatggtctttatggatgtaaacgaggcagggcaggtgcggggattgctcccccaccccacccccatacccgctttctaaatttacccccatatacccgccccaatacccatttaaattaaagcgggggcgagatggggattacccgatgggggaacgattctcatcaggtatctgttacatatatatatttttaaaaaatgatgtttcaaagagaattttaaaaaataatcataaaaacccaataaaacaataaacataagtgaaagtgtgtatagtaaatgaagttagtaaatataaaattggtaattaaaaataaatggttaagtgttatttttttaaagc

SEQ ID NO: 241702 - DNA, 867 bp, Cannabis indica
tcgtcgaagatctcggggttgtgatttcggcaaaaccatggcccttatctcaactcttaggggctcttaaggccaaacaaaacttctatcttgagtgctcgccgaataagacaaaggatcatgtgatgaatgaaacattagttaattacatagtcgatgtttaaaaattatggcctatatcactataatcgacaattttaaactgtagtatatactataggcgacggttttacactgtcggctatgttattcctcgactgtttttaacatcgcttattctacccaatatttgcaatgctcgtataggccagcgacaattttatgaaccgacgagaattctccatcgagaattattcttggttttttagtagtgaacccacaaaattatatctaaaataagaaaatatcaaaaaaaaaaaaaaagaaccaaaaatatatatacaaacatagtacatattattcggagtcaacactacaagaaatgtcacttttaccagcacagttcgctactgcgttggtaaaagttattttaccagcgcattttgcaaattgcgctggcaaaaagatcaaagttttaccagcgcacatttgcagtgggtaaaatctaacttttaccagcacatttacgcgctgagaaaagttatttttgccagcgcttttcattttgtgctgaaaaaagttataataccaacattaatttaccaaccccttttgccaacacatcagaagtaaatttcattttaccagcggaataccaaacttttgctagcacatagcaaagtgacatttcttgtaatgtcaccaccacaagtgttgagtcactgccataataatccacaaactcatatcagagagagagagagagag

SEQ ID NO: 241703 - DNA, 841 bp, Cannabis indica
aatgaaactagcaatacgtggcttggcacgtacattcacctagtataagtatatataaatgatgatataaatgatgatatatatatataaatgatgatatcggtatatcaataaaatataaaatttataaaaagtatggcttttttatgaattaatattttagtttgaaatcaattggtcacaaatatatatgttgcagtactaaataaacatatatgttatatgcccattgagagagaattgaaattatatgcatcaaacaaaaattctaaacaaaatacaaaatggctaatgtagtcatgatatttttgacaaaatatcattctcaaatatcattaaaaaaaagcgacacaaaatctacaaaaaaatttaaattttgttttcaaattctcatacagaattataatatagagtgatcttgaattcactaaagtgagactaaagaaaaaaatttaattcaaaataaactcaatgtctctaaagaatacaagatcaaaaatctttgaacatatataaactacatttgatttgatcccattctaggtacgtactcaacctaatttctaagattagctacaatcacaagtcctcaaaatcccaaatgaggtcatttacctcatcaaatctcaaacgaggtcactcacctctattaaaaaaaaaaaaattctaaatgaggtcattcacctcaaaaatcccaaatgaggtcatttaccctaaaatatcaaagtgagctaattatccacaaagttctcaaagatacaaaattttgaacgcctaggaactacatttgacttgattcctataaaaggatatgtgggcaacttagttgctaagactaagt

SEQ ID NO: 241704 - DNA, 512 bp, Cannabis indica
tttattaaaagaatatttagaagatagtgatactcatgtctctgtctagatccaatgatctagaatttgagctttatatgtgtactgtttaagacaataacagaatctgtattgacgaagttagaaaaaatcatagttttacaaacattaagtacttataacgataaaaataaatattaaatttatcacttataaacttaaaattttgagtaattatatcaataaaattatgatatgtgtattagttaattaattttctaaaatttttaaataccttatggcatgaaaatcatgattcaaaatagtttgtttcacacatttgaaaaattaataaattgtaaaaattattaatataattcttttacaaaatattttactagtagtcttttcactttttttatttgtatgaaattttttttggggtaaatattattttaaactatatgttttgcaaaaattgtcaattagaccctctgtgttttgttaaaagacaaaatagaccctatattttc

SEQ ID NO: 241705 - DNA, 1496 bp, Cannabis indica
aacaagtaattacaaagcgtaaaccctttaaaattacttgagcggcatatatgtatgattaatcggaattaatttggaaatacattatacaatgcaaatccatcatatttaaaaaataaaattttttgaaaaccttttaaaagggcctcgaccaaacctttttgatggaagaggggtcgaatcgttataacaccttgatcaaacctttctaacgagaaaggatcaaacgactgtaattttttattgataacctatttgacgagaaaggaaagtcaaaagttatgactagcacaaaaaactgaatacttatggctcgcgctaaggaaaagtattaaacgagacatcaaagtgtcttgaaaaaatatttaaaacaaacacgtgagtagaaaatttaactactcacataaacaatgaaaatatatagaaaatgacaagttcattgaaaatatatttaaatttgcttaaaataagatcatttctgatgatcgcgaggtggaataaatgatggctcgcagattaaggcatgggcagatgaactgctcgcgcataaagtaggaaattaactacttaatgtcggaggaaaatacaagcgatggaaacccctaataaattttatgcatgtaattttttatattagtgaataaaacgcaagtaaacatctgcatattaaagtttaaacttaaaagtacgaggtattaaaaagcaaagttggccatccaaccatgcaaatctgtctttacaaaaaaaagtgccaccagggaaaaaccattgtctcggctgaagggccatttttcaaaagagaatggggagataaataaaaaccaagtctatatcctgggagataaataaaaaccaagtctataaaaacctcgccatcttcttcctccagcctgtcttctcgcaaagagctaaagtttcctcttctttctcctccaagaagctggtgtccatattaggggtccaaattcaggcccgatatacagtgcgaaaacaaactttatcgtaccgttctacggtctcgatttctttttcaacaagattcttctcaaactaagcggcttgggctttgacggtcttctcggcctcctccttcgccttctcggcttcctattttgccttctcggcatccttttttgccttctcggcgtgctcttttgccttctcgacttccttctttgccttctcggcttcctccttcgctttctcgacttcttgcttaacgcgggtattttctcgttgggcgtcttcccaatgcttactcacaaccttgcattgggataataacttgtggaccttgccctccaagtattcaagacgcttagagagtaattgattggaagcaaaagaagcctgaagaattgcaaacagatgaatatgaaagatgtatgaaaaaaataatataattataatgacaaagccaacgtacctcgtaccttgaagtgacagtccaagctccccgaaagcatctctttgggattcctaagattgagaaaatc

SEQ ID NO: 241706 - DNA, 945 bp, Cannabis indica
tttattatatatatataaaactatggaacgttctacttttatgtttgtttttaaagaatcgtaaccgtaaaagcaatatgattttagagtaattagaattttttacatgtatcaaatcatgctttttgaatttttaaagttgttaaaaattctccttgaattattgaaattgttggatttaagaattttcgtccaattttagtaaggaaagtctaacacgagttgaagtctagatgcatgatttactacatgtcaaagtttgagggccataatttagtaaatatcaaagtatgggaagcataatatagtacatgaacaatcatcaaattagtaaaattgaatgaaattagacaaaaatccttataaatcaaacaatcaattcaaggagaatttttaacgactagaaaaagtcaaagggtatcatttggaataaatcaaagttcagagcttaaaaattctaattagccataattttattttaactgttgtttcataacaatgctattttgatgttattattacgggaaagtaattttttttttaaaaaaataagtaaaatatttataattaaaaattaaaattgtaagagtttatttttttatggcatatataaataaataataccatggggttatgggtttttttttttttttttatgtcatatttttgtaaaaaaaatagaaatctcatatttgtaaaacaataataagtttcgccgaaaaagtcgtcggtgttaaaaatgtcactggaaaagttattgtcaccaaaaaagttgttggaaaattcgtcggaaaagtcatcattgccggaaaaattactgttatcggaaaagtcactgaaaaagtcaccagaaatttatataggaaatttataataaatacatatatatattagatatatataaatattctattttattaagaataaagaataaagctaaaaaaa

SEQ ID NO: 241707 - DNA, 1052 bp, Cannabis indica
acagagaatgttctttgtgagtttttctctctctttccatctatcccctttcccatttttctcaggggtatttatagagatttgtggggatagttcaaaagggataacttgtctttgagtgccagcaatgtatgagcacaagttcccaagagatacaaaatagggcatgcctaacctatgttgtaggtatcttagggattaggtgaaattaatctttatccttccttggttgatgtgactcttcataatggagctattgctagccctttcgattatcgtgtaataaccataaacgaggcttacgttgtctaacatgtcctcttatgggtgttcccagacacttttcgcatgctgtattaaatgcgaggtgattgttcgaatgtcctcctcctcccggagatgcgttatcttatttctagctcccaaagaggaaggacatgctttttgtacttctccgagggctcactgcctaaactacttgtttgcttgtatacaactcagctaattcttgggtgaggtgtccttttggtccacgtgtcatatgtagccgtggctacgtattttaggaaaaacctagtgcaacaactttatttcacatgcctttcactacagcaaccacttcaacagggtctattgttagagtacactccgggattagtgttttatcttgatagcctctaaacttttgggatgattgtcccctttcttggtaatcacgtgatcattgggacagagctcttccactaccttgaagttatttggaattgttggtggggtatggttcaacatgataagatgacttacgctctactcgtcttggccctagattctcacgagaacttaagtagttaaagattgattgcatgttcgattcatcttcctcccatttgatttgagcccatgcttttgcaagcacatcctccacgttgcaggctataatggataccttctcggcattaaaccttactacctagtctcttagtgattcgtcccttctctgtctaattctatagtatcatctaatagctcctccaatttcctgctactagcaa

SEQ ID NO: 241708 - DNA, 859 bp, Cannabis indica
attatatgaaaataaattaaatgtaaaaattttagaatatatatttaatgacagattatcaattaattcaatcaataaattatttaattggtaaaaaaatataataattgcacacttaattatagaatattcaaatattcatattcttaaaaatatcacaattattataattgcatataaaaataaatcatgtaagtaatttactaaattaaattttttttataataatttattactaaataacatataatatatgaaattatatgttaattgaaaatggaaaatttaaattaatgtaatttaatttgactaaattaacaaaaataagtaagaaataaaaatcaaatttaaaagtaaataaaaataataaaatttcagaattttcctagattttttcttttttttttccctacaaaatgatgtgtcgtatgaggtcttcatcttcctcagccagctgggtcatatgacccgtttctctgctacatgggctgcgcggatccgacccaaccctagaacaaaaaattacatttatgacgaccaaaatagcatgatttctaattactaaaagaaatactaaatagcaaaaattaaagagatttatatatatatatatatatatatttctcatgcatcgaaaatatggacttaaaattcataaaacacattgggtccgaaacttagttttctagaaattttttttttcaattaatctccatgatttttcaaatccttttcatatataaaatcgatgtaaaatattatatgaatgtagtaatgcatatgagatttaaattgaacatcgaaaaattaaaactaaaaatttttgtatacaaagaacgaagtgttggaaattatttta

SEQ ID NO: 241709 - DNA, 729 bp, Cannabis indica
tttataggatattgacagctaaagcacgtgaactttaaattttttaacacttaaccacaaaaataaattttttgaaggcaaaactacctaaactcctattttgttttaatctgtatccctccgttaaaaagtcacagttaagtgccacaatggactgctcacgtgtacacactagtacatgtggcaaatttttagtggcccacgtaacattaattataaaaaataattagaaatatttaaaaaaattaaaaaaataagacaaaaaattaaatatataaaaatttaaagaatcaaaaaaaaaattaattttttttttacttttacttttcctttttcttttttccttcttcttcttcttcaaattataatctctctctttctctctatcttccagttttccctctccttctctattagccatcaacgaacccctaacccccaatacccaaattaacaaccaatccctatacccaaaaacccctaccccgattctctctcggtctcgtgctcctctctcggcctctctcgctctcactctcatctcttgtctatttatctatttgacaaaaaaggatagtgggcaacaagtccccatctttggtcactaattgttgaagacgttaggcgatgaacctcacccttcctctctcggtattggtatttttttttcaaatctatatttttttgtttaatttagagaaaatacttgtgatggtaataatggtgatt

SEQ ID NO: 241710 - DNA, 867 bp, Cannabis indica
tagttagtttattttattaacttggcatgcttatatatattttgatacttattagctagagttaattagtagtatagcatttcattattattttaagtttaagacatgaatgaaggtaaaagaatattgagtcagattattataggtttctaaattaattttgtagattaaatttttattttgtaaatatctatatatcttaagttctagtttatttattcacggctttctatatttatatatatatatatgtatatttattctacttatatcacatgtaaaattagttttgagcctaattaatagaagaaaagctaaggggcaacttaggtacaaagcactacaccaaaagagaagttgctattaatagaatttaatatcagctcctacgtattataattaaataacataaaaaaaaatcacttaccatcaacgacatagtattaagcaatttaaagtgtctaatagaattgtcaaactgatagtattctaaactgaccgtttataataattacacagaggtatattagtacaatttcaggaatttttcagtatttattactagaaaaatatttatgggaaagttatatttaacatattaatttattattttttataatatttttatcttatgaataatccatatcttattacatactgtaagtgaggactattgaaatatttgacttgatatatactgaaatataatttattatgacatgtatacttattgaaaaaaataggacttgaacaatttgtaatgacaatcttcctaataataaaatagaaattatagtacataaatgtattcgattaggtttccgttactttgattttaccaattttctacagtatttatttcttttt

SEQ ID NO: 241711 - DNA, 617 bp, Cannabis indica
  modified_base (29)..(29): a, c, t, g, unknown or other
ttattattattattattattttgggggtnaatgaatgtcttactctcaaattatatatatacttcaaacaacagaacaactaacaaagcaacacctactgttaaacttcaatattttctgtaaccgaaaaatctatgattcgagaataaaatcaacataatcaaacatttgtctttggaagtacacgtcgttactcaagtctaatcatacacacctcttgtaaccactcttacatatttaaatgttttttcttttttttatgtttaccctttaaaataattttttacttttacatttttataaaattccacataaaaattcgagtggtaaatcaaaccgcatatgagatttttttaatttatcaaactgttattacacctcgagatcttaaaatcataaaaactacaccgcaaaaatacagtgtggcacggtacgatttgagcagtttatattatattattattatcaaacattatactaaaaatttaaagatcaatcgataaagttttaacaatacaaaaaaatcttattaaagtttcacctaataacatacatgctaattattaagtcaattatattaatttgtctctaaaaaaaataatataatatatacatat

SEQ ID NO: 241712 - DNA, 1072 bp, Cannabis indica
gtaaaatcttctaacttgtgctacgagcattttccttttgcttgcgggaacgtgtcatgatttggaacaactagtggctaatttttggtggaagtcgtctacgaattcccatcaaagaatttcgtggatgagttgggagaggatggcacgtagtaaggagtttgggggattggggttcctctctcttcatgatttcaatttagctatgttgggtaaacaagcttggaggttcctgaccaagcctgattcgttggtttttaaagtgtacaaagctcggtacttaaaaatgagaactttcttttgatagaaattggtaataatccaagttatatttggagaagtcttgttgctaaaagggaaatgattcgtcaggggcgcggaagggaattggtaatggagaggagactcttttatttgatgctccgtggcttccgaatgggtcaactctgagtcaaggtagtttggatcttggtttggctaattaaaaggttactagtctttttgtggtgggtgagaaagctcgtgatgttgatgttctcaaagatttgtttgatgaggaagtgacagtcaatattcttggtattcttctttctaattcggttactaaggattactggtattaggggtttgaatcttttggcgagtatacagttaagagtgcgtttaaattattacaggcaaactgtgagggtagtgtggacgaggagattggaagaagttttggcaattatagcttccttcaaaaggcaaaaagttatgtttggagagcggttagtgggtgtcttcctacgagcatttagttgaagactaaacatgtggatgtctctttgttgtgcccgatttgtcatggggcagatgaatcaattttgcactatttagttgcctgtgattttggactgagttgttggcgagtagcaaattcggctttgattccagttgatgtaggggtcatttggggattggtttcttcatttgttctcacaactgggtaaaggacaaagttttcaggcggtggtgtggtttggacaatttggttttcacgaaatcaactcttgtggaagggtggaaaagt

SEQ ID NO: 241713 - DNA, 1489 bp, Cannabis indica
ttttttaaaaaaaaagaaagaagttttatatatttgttttaaattatcaaattttaattaaccacacttttagtataatcttataaaaaaggaaggaaattttataaaagtacacacacacacgtagcgtccctgttggacagggcgttacaattgatgtcactcaaccaactcatctctattgcttaaagaaggccatttatggtctaaaacaagctccaagggcttggaatgaaaagctcaaagcaagcttacttcagtgggaattttatgcttccaaatccgattcatctttgtttgtatatggatatctggatcaacattgatgattctgttggtttatgtggaatatattctcttgacaggtcctaatggcactctaatttgcaaactttttgatgatctgaataaggagttttctcttaagagcttaggggaagttcattatttcttggaagttgaaatttatagagattcttctagaatgtaattgtctcaaaccaagtatattagctagtaaaaatggcatattgaaggagctaagtcttgtcccaatccaactagtgttgccataaaattgtctatgcaagaaggtgaaccttttgaggatcccactgtaaggaaacgaaacaaaacaagaaaacgaataaactgattctcattgattaaagcaatgtgattacattctttatatacaggaaataaacaataaaagggaaaagacaagaatacccttgaaccccaacagacataacagaaaactgttattacagttattacagttattaagtattgttcttaacagtccccctcaaactcaaggtggagagagactcgactttgagtttgtctctgagaagcacaaatctgttgttggatagtgctttggtcagaatgtctgctgtctgatcataagcaggagtgtgtttgacaacaagagtttttgccaaaaccttttctcgcacaaagtgtagatccaattcaatatgtttagttctagcatgtagtatagggttggctgccatctgaactgtactggagttatcacaccagacagttggtgatcgaggaattgaaactttaagttcagaaagcagagactgtatccaggtgatctctgcagtgatgctagctaaactcatgtactcagcttctgtactggatcgagatacagttggctgttttttggatgtccaactcacaagattttgcccaagataacacagaaacctgtagtcgaccttctgtcattgatatcagatgcccagtcagcatcacaaaaacaaacaagatcaagagaggcagattgctgaagtgtgaggccataatcaagtgtccctttcaagtacctaagaattctcttaactattttccagtgtgactcaagaggggaatgcatgaactgagacactttgtttacagagtatgaaatttcaggtcttgttatggtagcatattgaagtgcgccaacaagacttcgatagagatg

SEQ ID NO: 241714 - DNA, 1037 bp, Cannabis indica
aggtttaaaactgaaattgtgtagtttgcctagttggcatgcatcacaaaaagaaatttgtttacatttctgatttggaacgactacagacaagactttatttaaaatagcatgtgaggggtgaccaagtcttgagagccaaatagatgcaatttgagattgatcttgaacggggttactagtagtagtaaaattgtaggccctgggttgtggtttgagtagattggcactggtttgaggtaaagctttggactgtggagaagacacttcaagtttgtataggccttcactgagatggccctgaagaaggacctgcttggtgatcttgtccttgataagacaacacaaattatcaaattcaagaatgacattattgtcttttgtaaattgagagatgctgagtaaattttttgtgacagatgggacatgaagaatatcttgcaagactaaatttttggaaggaaattttgttgagactaaactatgaccaatatggtaaatgggtaaagatgagccattacctacaataaccttggctttccctttgtaatcagcagctgtggacaggttttaagtatcatttgtcatgtggtgcgtggcaccggtatcaagaaaccaagcattgctaaaatctgatgtacttaatgaaggacctgatctgtaagaaaaacttggggagagtcactggtggagggttgagaggttgtgtttgaaatttggggtgggccagtgaaggcaatatcgaacctgtgatagcatttaattgcaacatggccagctcttccacaaagttggcatatgggccgatttcctctgcctcctctgttgttgtagtttcctctgccccctctgtatggcgccccagaaacaacggtggtgtaagagcctcgacctccattgttgatgtttgtggaagctgtgttagcttgaatgttgaaaagagagtcagaagtgagctgctgaatacgcatttcttggctctgaagcatgaactgaacttcttgtagggtgagaggctctgttcgagatgtgagatt

SEQ ID NO: 241715 - DNA, 1360 bp, Cannabis indica
tattttcttagacgtacatcatagtcttttattttttcatgacatgcactatatttatttagaacaatgtattattaattaaaagaataatagttaagtttaattttcagttctagataaatattttgaatttaattttttacggtaataatacttaagtttatatttatgtaactgttaagatcaaattaatgtccacgtagtagtccctaattggtccagatcattaaatttttattttttttatttaaaaaatttaaataatgtcaataagaaaatgatacttaaaatttaatggccagatatttactaaaattttataaatataatttaagtattattattaacgttggaaattaaacttaagtatgttaaatttaaatatttacactataaattactttaattaaaataaaatttaaaaaaagaaattattttctacgatcaaaactacacatacaatagactatttgacatttgtgtacgtatattataattaattacaccaagaaatatctgaaaataataactatatacacgtagaaagactgaaatagaatatatatagttgcagcacaaaatgactcccctatatatagacatgtatgatgtatatatgcacatatatatatacaccaaaatagtcatcaccatcgccatgcagtcattaaattatatgaattttggactgtttaatgatgacaatgaataaaactttatgattcgcatcatcatattatttggacctacatgacgaaatttataatattaatatttctttttggcataattaaaatttgacagtagacagtagtcttgtttagctgagtttaggtgaccaagtggtgtacatgttggtgtgttttatagtagtatgctgcctagtttatatgataagtgatattttcataaatattttcaatattgtccaaattaaaatagaacttggtattagtcatttattttggtctaaaaatacaatcagatttgaagaactataataattagtatgtagtcatagccatatgttttcagagcaaaaattatgtatatttctagtagaatgctaaaagttagaatgctcttttagagggagaactacttgatgttagccatctccaccacccctagtaccttggtgctaagcagcgacggagggatttatgcctatatgtaggcttaagccctcacttaaatatatacatcaaatttttcacatgtagatatatacatatattaattcacttcactcaatttattaaagctcaatccacaaaagccctcactcaatatcttaatcataattcataaacctacgctcattctaatcaagcccattttaaaagtagcccaatacaaa

SEQ ID NO: 241716 - DNA, 709 bp, Cannabis indica
cttctttgacttggcgaagcattctttggggaaaggaactattggtgaagggcctgcgttggagagtgggtaccggtacacaaataaattgcaaattggactcatggcttcctggttatatagacttcactccttactgcttcataggatctgatccttctatccaagttacagacctcatttgtcaagataggacttgggatttggtggctctttcagttaacttcgggcaggctgatattgatcgtataatgtccattcctctcagcatttttcccactgaggatgtactcatttggaatggtactaccacaggcaattatacagtaaagtcaaggtatcaatttgttgaatctgtggctgatcttcaggacacaaatagtagctgtaatcttgaaaactggtggacaaaattctggaaattgaagattccttcgaaacttcgcatctttgtgtggaaagttttccataatgctttacctgttgctgctgaactaaaccataaacacattgcagtcactccattttgtccattgtgcaaagctcatagagaaactataaatcatgcgcttttcttctacactagagctaaagaagtgtggcgtctatcacacctaacttttgatctcaaaatggctgttacatctgcaccagatgaatttttgctctatgtctcagctaacacgtcatcttttgagtttgaaagttt

SEQ ID NO: 241717 - DNA, 1290 bp, Cannabis indica
agcgacatgcaatttgttataaaagcttgctatcatttctctaaaagtttgaatggacaataatgttttaactgcacataaacaaacaatatatttataggaccaaaattaaaataatgagtaattaaatattattacaaatttatattttatttttactacaaataaacaaaataagcattaatagaaaaaaagaattataaaaactactaacaatagtcactataaagaaaatatttcaaaactgaaaaattataaagaaatgagaaataacttatcttgtcaaatgcaattagtgtctgaagtagatctacgagccctaattcaatcattaaaataattattataacttaaaaaacatcaataactttataactcaaataaccaaaatttaaaattaaatcttaaatcatattgtaataatctaatttaactattttatatgaaaagatctaatgataggaaaaaaattgtttcaaaaaaattatatgatagaaatttttaaaatgattgagaaatatgattaatgatttaactaatttattaattagaccttacaaaatatcttaattaataaataaaccctaaaatttatttttctctattaagcccttgtttagtgaaaatttataaataagacataatttaatttagaattctaattggttaattaaaatcaattaactaagtctacaagtcaatatcatctcaactagtgtgaaaaccatgaacctatataatcaagttttcaataagtagttttagaatttactaagtaaattccctatcttattcctcttgatttcgctatagattcagaattgcactcttaattatatagaacaatctatatgttccaaatatagatacgctattaattatccattgttataatctaaataattgaagatcttctatagatgatttacatcaagtagggacaaatttaccgttctacccctcaatgtattttatccttaaaacacttagctttttataaatgacatttcaataaactaatataattttattacttattaattttcagtgctacgatatatcaaatactgctatatatatttaatgatataatatatttattccttgtaattataatatattaatgtgcaataataacaaaaatttatataacttaattggcttattatatatattttaaaaaattgatatgtaataaatatattttgtaatttttattaattaggtacgtttggtaacacttttttatcagtttttttttttgtttttttaattagaaaagtgaaaata

SEQ ID NO: 241718 - DNA, 712 bp, Cannabis indica
attagacttttatttaaataaaattatgtacattgtaaacaacaaatattgacagcttagttggttgtagtgtatgatacattacacaatagtataagttcaagtcctacaacactctttttcaattatttttttgatatatttctcaaaatgagggtcctaaagagataagttgagaaatacctcttttttgtatccattaatcgaaaataatttcaaattatattttatttaaatgtacctactgagtgggttgcctaatacaccctgaccctctacttaagtctaacacataatttgtactaatctatgggtataatagggacatcatctataaaagtaggtatattttaaaaaaatataaatttgaaggtaaaaattaaaacatgtaaaataaagtgggtgatataatttcttcaaatttaaatggcgttaggcccatatattcttagaatcgatcctatgctaaggatgggcaatagacaaatagcgtttctctcatatccgtcctcattaactattttaatatctgtcctcaccccatactcgtttattctctatctgggagagaaattcttgttaggatgggttagggatggatgtagaaaatatttgtaagggagctaaagtgcaaaacaattattttaattagggggcaaaaaataaattttggagggtttgcttgatcccataatttgtgaatgataatgta

SEQ ID NO: 241719 - DNA, 811 bp, Cannabis indica
aaaataatttacaattagttaccgaattcttaaacaaaaaccactagaacttaaataaaactaatatttacgtggctcgccacgtaactttcatctagtatatatagactaggcaatatagccgctcttcgcgcagctattttaattttattttagtataataattataaaaaattacttatgaaaataataaataataacttaaaaattaatctaatatttaatagtattaaaattatattattgaattatttatttaaaataaaacttgaaaaaaattattttatttattagaaagtttaaaatttatataaataatatatataaaattttcaatttaactattaaaatttattaatataaaacaaaataaataaaatagtatagagaaaaattagagtattattattatttaagtaaacctctttctttcaatcaataatttatatctcaattattcaaagttgttgtcaatatctcacctattgccatcaccgtatcccacctgtagtcattgccattgttattcctaataagtttactcgatacataataatataaataaataatataatgaagtgctagtagagatgaaaagatcaaaagttaaaataaaaaaattaaacattgcaatatcatatccatagaagcaagattaataagagatagtgttaaaattttatagagaagaaaagattaaaattgaaaatttatatatacaaaaaaaaaaaccacctaagattaagaaatctaaataaaggaacaaacaaaaaactgagaaatatatatagatacctcaccatataatacc

SEQ ID NO: 241720 - DNA, 875 bp, Cannabis indica
ttaaatttaaggacttttgtctaatttcattcaattttactgtttcatgatgtaaatgatgcgaagatataaaataaaatattgtagatgctctaaatggaacttactccacttttgtcacttgtatcgagaaagaagacaagttttctcaataatatttggtaattaataccagtaaagacctcctctggatctatttataggtaatcatgaaatattttattcctcaaaataactctgttgaaataaaaatataagactatctttgttggatatgtaaaagttgagctatatttttacatttatttttattattatgttctaatatattttgatgtaaaatttaatatattatttaatattcacttaataatttattaaaaaaatataaaataataatactaatataaaatttaataataaaataataataatccaagtcatttaatgtaaaaaaatatattaattaaaatttaataataaaatattaaaaataatataatagtaaatataaaaatatagtatttattgtgatgtaaatttagatcatttttaattatgtaagatttttgtattataatttagcacactattagagtagattttttaataaaaatgaactatattttgtatttatgtcactttatttattatttctattagatagagataataaaaatagggttaatttcaacaaaatgcaacaaaaaccaacaaaaatacggttttacgggaattttaaatatttttacgatttttttgattttatttacataaaatacggtcttttatgtttgaaattttgttctattgttgttaattttttgttgtatgtatgtcttttttttgtttattttgtatgtttattttgtatg

SEQ ID NO: 241721 - DNA, 920 bp, Cannabis indica
ttaattaatctaaaaataaattcaatggggacaaccctgcatatggggtgcctatcactgtgttaggacacaatgatagtggcaccacccttgtctaaacaagacaacagtggtgtctttgtctagaaaattttcatcttttcctcaatttattttattaataagtaaattatttattacaaaataaagaattactattttgacaaatcaaaatagatttttctaaacatcaatatataacttttaaccacacctttgacagtatttcaaggtgacaatctggggaccatggacctataattctaagctccaataaattagattatttattgagtcctattaactaaataatcctatttattaattccttgattattctactataaatatggagttgaactcttagtaattgtagaattatatttactaagttttattatagtgtccattgatataatcaattccaacgattaccccttcttgtatcagttcgtaattaatttgggttaaattgttattttacccttctaattacttatttatcctttagtaccattaattcactagagaaagtataatttagattcaatctaaatttgtgcacaattttttagttccagaattaacacttaaagtgaaccaacatttgatctgttaggaaaatcaggattccataatcgtagatcatgttctcagccatccatactattagattcacaaaacagatgttgcaagaatcatcttctttgagaaacgttaacgagtgaatcaaagaaactaataacatgaacaagatgttcatattactcaggattcaagtcgatctactattgatcatctttatgatatgaattagatttttaatgttggcgacatgtttgataaagatgagttaatttcatatcggtccatgtcatata

SEQ ID NO: 241722 - DNA, 1015 bp, Cannabis indica
aaaaacccagtttttcatgacaggacaaaacacattgagataaaatatcactttatcagggataaagtttcacaaggacagatcgggacagacaaagtgcctactgaagtgaatccaacagacatgggcacgaaggatgtgtccctcaataagtttaagatttgcttaagcttattggggattgacacaggttggtaaaacccttaatgggttcgagctaagaccctcagatagattcagacaacaacaaatacaacagtgtatagttcatatggggatttaggtagaattttttgaaataaatccccatattattgtacactgctcagattacaaatacacagaaattacaagcagtaaaaagacttatgtggccttcagcctctatttacttagacaaagcagttaaagttagttacaaaagtttagtaatactttgtaactaattctcctctctttgtgctctaatacaacaacatatataaaccagtaggaacaaaaacaaggagacaaaacataaataccagatcagtacagtaacaacataaaaaaaaaaatcaaaggcgggaaaatacacaacaaaaatcatatcagttttcaaagaggagaaactgagtgatttatgggttcttggaggaggcttacaatggagtaagctttggaaccaaggttgtggttcggatatccatggccagaggatgttgttcatgcaaaaaaagagaagaaacacaacattgttagtgttgatttagagaggaaaaaaagagagaaaaagaggagaaaatcactgtaaaatatttggattaccaaaataaatacctgtgtgttttggaatccaaacccattgtaatcatttgatcattgaagatccatagtgaacgaggggagctcgaagaagacgtacccagcacgattttggggaacctctataaaatcgatgttatctcttccttttatttttttgcaattttctatattttgtttatttgtgtatgttcatgtgatttctgggttg

SEQ ID NO: 241723 - DNA, 1607 bp, Cannabis indica
acacaataatcgacatattactatatactaggaaaaaatttcgtgcaaggcacgtatacttagttttatgttaggtgttttataatttatttattattatattttaattaaatttttttaataaagtgatttattcaagaaaaacttattttaagttttacattgagtaatttttatgtatattcacataatttaaatgatggcgttgcaacctaaaagtaaatgctgattgcaatatgttagttctaatgatttaatataattgtatgatgcttgaagaaatcatgataaaaaaaaagtgctagaataataaacaaacaccacttaaaattgtgaaaagttttaaaaaatgaaagagtgaggttttgctggaagtatttccaactactgagatagtgacagaaaaagagagttaaaaaaattgtgagtgatacataattaatttagtgcatagattaatttttgtttgtgtaacccaattaaattctaaattcttaaatttaaaataaactgattgaaagaaggaatataaaaaaaaaaaatacactttgaaaaataaaataatattattttctaaaatatagaatttacctggttgataaaatctccaactaaagttcaaaatatttttacaatattttcaactattttttttaaaggaaaaaaagaccaaataccaataagatctaaaataaataaggtacaatgaatttaatgaactataaaagccaaaattaaaaaaatttaatctattcacaaagtagtcaaactttttattattattattttattttattttctatcataaaaataaactaaagaacaataaaaagaagaaatcccaaaaccgatttttagaattacataagtaagtaggcttgaggtaaagtatattgtaccaaacttcaccggaatggacatgctcgcagaaattagtcaactcatcggcatatgcggaatcccaaaatgaagacctaacatgcttctgcttcagaatctggtttgtcagaacttcacacataataaaacaccaaattctaaaaccaattgcctatgtatatttaaacaatctagaataaccaaagcataatgagatgcctattcatacatgtagaaagttctaatcatacatctatttttatttcaatgcattcattaacaaagtaataaataattccaactcaccccatccatgtttgcaaccctaacttgtattcaataatcctagctgtttcctaagatatcttcatagcaacattttctccagagtcaaaccgaaaaataaaatgaaagaaaaacctgtaaccaaaggcagcgcgcggaagttcccgattgaaagggcttcggcggctttggcatggcactggtcgtcatcgagcgtgctactgtactcgctcttgatggaccaagagtcggcgacgatgaagccagaagaatttcaaacacgttttcataaatattgatttcataaatcccaaatacatttttcgaatttcaatccaaaaaataatttgaatgttttcaatcgtagaaaaaaaaattaggattttgggtttaagaatattaggatgttctctttttttttgattcaagcgtttatatattac

SEQ ID NO: 241724 - DNA, 609 bp, Cannabis indica
atcagaactagtcctatgactacgcgagaacaatcctatgaggttagaacctttataactattctaatttgcaaaactcttatacgaagccaattgttttaaccataaaatggaattaaaccttaccttaagcttttccgctaggagaatttgctatcctgctactaccggagcttaaatcgctacgttttagattaaaaatcaaataaaataaatataggaagagaaattttttgacagaatacgaaagtttcattttcgttcgttcttatgtttataaacgtattacatataatagatatatataataaatgtttatcagtaaactgaagttttgtataataaaaataataatacaataataataatattattaataatataataattataataattttattatttataattatcttatcatttcttagccactaagaaatttctatttctaggacactaatccaaatcccatacttttaattactctaatacctatattatcaatttatcacaatattttcaataattcaatcaattaaacctgttatgacatttttggcccccgatcgagtctccaaggtggacaaacctaaaaatatttttatt

SEQ ID NO: 241725 - DNA, 662 bp, Cannabis indica
gctcacatcaaagatataatgtttgatggaagagagtcgatcacactcgatgatgtgcaatcagccttggaatttgaaagagctaaatcagaggagtgagtcaaagaattccgaaagtggtgatggattgtatacaaggggtagaagtgagaaaagagaaagtcacaatggttcaaaagtaaaatcaagatccaaatcacagtctgataactagaagaatcttagatgctggatttgtaagaaaatagggcatctcaaaaaggcgtgtgtggagaggcataagaagggtgattcaagatatctgaaggaggtgcagcagtgagtagtgacagttatgactcagctggtgctttgctagtaacctctgagaatttgaatccaatggatcttagattctgggtgttcattccatatgacaccaaataaatcttggttcgaagaatttacatctggaaactatgggactgtgtatcttagagataacaagtcttgtaagatgatgggaattggaaccataaggttgaaactttatgatggtgttgaaaaggtgctaaaagacgtccgactagtacctgatctcaaaagaaatttgatctatgttggtatgttagatgtgttagactttttatttgggcttacattaagttttattggttttatta

SEQ ID NO: 241726 - DNA, 932 bp, Cannabis indica
acttttgcaaaacacagggtctaaaataatatttactcttagtttttttttttttacttaaaaaaacacaaaatgaaaaagcattattataataaagaataatgtttaagtagaggtattaaaaacgattttacgtaatattattttttttaaaatgtatcattatttcaatttatgttcatgtttaatttaatttttatatgtgattatttatcaaaaatattatattttttcctcttttttattttttattttttccctcttgttctctatctaaaaattcttaaaagttgttcttcaaattaagacctttaatatttttctttaaaataataatgcaaaaaaagcaaaaaaataacttatgtacatctctcttctcttagatcatatccactaaaaaaaaatttgtacatctgtctcctgtcagattatatgtattaaaaaaaaatttgcattgttctttaactttgcaatataaaatttttgaatcttaacctttatttttcttttaaaaacaaatatcaaaaccgttaattttggttataattttgagttctttaagaaacaatttttaagaacttttagagagaaagagagagggagaataagaagagagaagtgacacaaaaattaatagtatttttgacaaataacataattatatataaaaaaaaataagaaaataacattaaatatgaacataaaaaaaataataacacttcttaaaaaaaataactttatatgaaattatttttaatacctctatcaaagtattatcttataataataattggaaactaattaaaattaaaattgattcattaaagcaaagataaagattgtttagtgggcggctgtggtgtgtttccgtggagcttgcattgcactatttcaagccacaattttattcatttatttttattaaaaaaata

SEQ ID NO: 241727 - DNA, 1095 bp, Cannabis indica
agattagtttttgacattttataggatttagaaatttagaaaatatggcatttattagaaaagaaagataaatggttgaaaataaattggcaaaaattgtaactagtgaggcccattaagtggccgaccactaaagcaatttttttgccctattattttatctttttttaatccttataattaaatcctaaccctagttgaaatactataaaaagaacatgatgctctcattctcatccaaccaacctcaaccatactaaacctagttttctaactctgtcagacaactagtagattagagactccttcatagtaatttcgaattcctcttgctgttcttccatcaaattcaagccattagtgatagagtaccatgctcacatataacaagccaagtactcaatcatagtgcggaagacggtggttaaccaaactgaaggagagaaggagatccaagcttgttattactctgagacagaaagaaacaaattaatgttaaagatcttagcgaaaggagacattcatattccgctgccatcaatgtaagattttctaaactttttatgtgtttatttcatcgtattagagaattcatatttagggtgttaatcaagcatacatgttagtaaatctagattctggtaaaataagatccaacaacttcatcccaaagtaaggtttaaacaacttttctcctgaagatatatgctcacatcctcacgaaatgagacttggaaaagtcttctctcgaagacccacgcttgttcaaagcttctcttcaacctatttgaatagtgacatcataacaagaattcaaaacctcaatgaacactctaggttcttacaaatgaaacactcttctcacaaagatagatataaagatatgagactagaagatataagaaacattggactactctctagatcctatatatggaacataaaaatcccagagacaaacacaaatacgttttcaaagctctctaaaactttcctaagaaaatctctaatttgtaccatcaaattcaaattctgttgcagtagattaggaaactttccaaaaaagacaaagatcatgatttgctctttaatacc

SEQ ID NO: 241728 - DNA, 802 bp, Cannabis indica
taaaataatttttttagttgttttggttgttttatagttgatttatagttatcgtgaggttgatttcaagttgtattcgtatattttgctgataaaagtatattttttgaattttaacacttcaaaagactatttttataaataaaaaatttaggtcgtaaaaattgtaaataacatataaataaagagtatttttgaaaattcctcttaaaaaaatatatagcacaatcactttataaaataagtattttggtagatccccatctatttaggcatctaagaaaaataaagtaatccaattttttcataatcatgtacattgtagttatttagaactatttgtaaaaaaatttaaatattttacagagtcgatatagaaaaatatagtcacacttataacaaaatatttaaatcttatttttctaaaaatttataggtagctctaaataactacatcgtatgcaactataaaaattacttagacacttataataaaatgtttaaatcttattcctaactcagaattccgttaacataaatgaggtttttagaataaacatataaaaataattgtcaaggttttgatttcaccctaaattagttatgattttaattattaatgtgcctagattattcaaatattttcaagaacctagagcaatattgtatagctttcgagtaccgcataaaacatgtgtaagtgaataatagcttatatatctataccaccattacacctcacattcatcaagttgttgggttttgtgccctaaataaaaccctttataatctgattagttat

SEQ ID NO: 241729 - DNA, 793 bp, Cannabis indica
aaaaagtttggccggtttgggcgagttaacccgaccaaaccgcccaagccgttggtcggcttacaaattttttttttataaattgggcgggttgcacttaaattttagcaacccgaactttagattgggttagaaaatatataggataaaccgcccaaaccgaccgatgtacaaccctacaacctacaccttcgcaacatactcgaggaaatgagaatggtggtgatgataatgagtcaacatcttagatgtttagtttattacttttgttagtaggaacatttatgaattctttttgtataaactcttttaaatagggaaatttgaatttccatacctacagaactttataattttttccctaaatgcatacctattaaaatttgtaatgtatgaccattttaccaattttccaaaactacccctcccatttgaaatcctaattttctaaagctcagccgactctctcaactcaccacgatcaacccacgcccacgacttcgaccaccctcacccatgatcaacccacggcttggaccaccctcacccacgaaaaccccaacctgaacgaccttcacccacgctcaacccacgacacccacgaaaaccccaacccccgctcaacccacgacacccacgaatcccaaccccaacccaaatgaaggtcgaagccccaagccccctctccaccacgtacgaccgaagccccagccccccgctccaccgcgtacgaccgaagatcggcccgtcatcccctcatcaccgctggtccatcaaatcgaaaacaaaaaaa

SEQ ID NO: 241730 - DNA, 658 bp, Cannabis indica
cctagttttcattctttgtcggataactagaaaaagagagcttcctttctttgtattttcaaattcccttcttttcttcttcataaatttcgagcctatagcgatagagtacatgcgtactcatatcatgtcaagtactcaatcatagtgtggaaaattgtgaagaatccaatacttgaaggagatcaaggctcacatcttgttattactctgtgacagaaaggaacaagggttagggatctgagtggaaggagccataatattctgatgcaaccaatgtaagattttctaaactttttatgtgtttaattattttcattgttttaagaattcatgtttaggttgttggattatagaatagaatctaacatacttattagtaaatctagatcttggtaaaatatattccaaaaacatcttcctacgctaagggaaggggtgaccgttaaatttaacagttgtgaccaatggttctgacttcatgcattcttcattaaatgagtccaaatatcatcgtaccacgtgtcatcatcgttgacacgtcatatatttaaaccccaaaacggaagaatttttcctttgcattctgtgcttcaatcttgttgttgatgacttaatggtgctgtgtcgggagatgtccatgctgttgggttttgtg

SEQ ID NO: 241731 - DNA, 1138 bp, Cannabis indica
tcaatacctttacacaatttgacaggcaaacgaaaacaagccatggcataggctggaatagcttgaatgatagcctttagcaaaacctccttaccagctcttgagaaacatttagtagaccaacccctaagaacagaattaaccttatcttttaaaaaagcaaaagaatgatatttagatcgagctaagcattgaggaagacccaaatatttacagataaaagggctatcttcaagattaaaggtagtgaaaaaagcagtgcgaatatcagactgagtattttgggggagaagagaataaaagacttggaaaaattaatagcctggcacgaagccgtagaataaacatcaaaaatatcctgaagagctaaacagtaagtacgattagcagtacaaaaaataagactatcatccgcaaaaaacagatgggagagagaaggagcagtcctagaaatagtaatacccttaagcaaaccaacatctgttttgccctaagaagagcagagaggccttcagcacaaagaataaaaagataaggagaaagaggatcacccagtctaagacccctggaaggctgaatagagccataaaccgagccattgatcagaaaagaaagagaagtagtagtaatgcatttcataattagagaaacaaatttaaagggaaaattaaaatgaaacatgatactctccaaatagtgccaattaacacgatcaaaagctttagccgtgtctaatttaagagcagcccaacctatcttcccatttttccgagaattaatagcatgaacaacttcttgggcaataagaatattgtcaaaaattactctaccagaaacaaaagcactttgaaaaggagagataattttatccaaaacaacctttaaacgattagctaaaaccttagaagtaaccttataaaaagtagaacaaaggctaattggcctaaaatccttaaagagtgtggtcatgttgcttcttagggataagagaaatgagagtagtatttacaacagaaaagtcaaaccccttattaagacaagaaaggacagccttagcaaagtcaaccccaaaagttgaccaattcttttggtaaaaataagcattcaacctgtcaagacaaggggccttatccccaga

SEQ ID NO: 241732 - DNA, 535 bp, Cannabis indica
taaactatgtctaaaccattcattgccaacatatatactgtattaattatgaataaacctttattttatttttaaataattttagggtgaattagttgatacttaaaaccaagccaaaagaatataagaaatacaagaaatgatcaagaagaagaaaaatgatcaaattggcccatgaattttcaaacatagtacacacaaataaataaatttaaaaagtccattacagaaaacaaatataatacacaaatattcttgcaattttattgttgtgatgactagaaaaactcaaaagccttaagggagaaaagtcacatacaaaaagtttgtgttcttgctgaaatttctacagtgatgattgaactattaattatttctaaatttaaacatatctcacattctggtttaaaaaaatacaaaattaatgaaaacgacataatctccagaaacaaaaacagctagcgatatttttttatgaaaacgacaaggatttaataaaacggcaaagcctctaaagcgacaaaaattgagaata

SEQ ID NO: 241733 - DNA, 926 bp, Cannabis indica
cctggtaaaatatatccaaaaaatgctactacagaaatcaagtggttaacgtctctactttcagagcttcatatcacaactttttcttgtcctatcctatgggtggacagtcaaagtgtacatctattgcagcaaatcttgtgtttcatgctcgatccaaacacattgaaattaacctgcattttgttaggaaacacattctatctaagcaattatctgttcgatatttgccaacactagatcaaattgtagatgtccttgcaaagtcactatctacagagagatttatgtatctcaagtccaaacttaagatgtcagaaatatctttagtttgaggggggatgttaaccatattcttgattctattacgtaaagtcttgtatgttgtaatagttagtagttaagattattgtggttttagttttctgttatgactgtttcctttcagttaagtcttgggcttgtacctctctttatgtatataaataaagatcgagctactctgttgagcaatgctcttcattcatttttcttggtgttactttatttttttgctcttgctttctagctttttatttccagaaggtctttaccttcttcatccttatataaatattgagctctttgaagagcattagaaaatttgataccaatttgggtgcaatccagggtacaaattggtacaattgggttcagtgggaaatctgagagggagagcatttatatatccaaattttgggaaacactttagtgacttttgagaaacacttgggaagggatatattatttgtaggaaatttgtatctgtattttgaatattttctactcagattaataatattagctgcctctcatggagtaggtgaattgccgaactacgtatctgtaaagaccgcttagttaatttggaaattagcagttgttta

SEQ ID NO: 241734 - DNA, 1144 bp, Cannabis indica
ggtccgggtctgggtcttggtcctagtcagattctagttttgggaaagagactgggtcccagtccctcggtcttgttcccaggtcccagtacgcttacagttccgtatcaagttttgggtcacggggtacgggtttaggtctgagtccgggtctgggttcaggtttaggtctgagtcttggtctgggtccgggtttaggtccgagtgtgggtctaggttttagtccgggtatgggtcccagatccaaacatcgactatgggttaggtttaagccccgggtctaaattaggatcccggtctcaggtcccagtctagttccacttcgggtcctaggtcttggtcctagtcttggtttaagatctgggtccggggtcaggtcttgggtctcggtgctagtttctgaagcccgggtcccagatcctaattgccatcctagtccggttcctaggtcccagtccgagtctaggacccggttggggttcaagtcctagtccgagttcgggtgcgagtttccgatctcggtctgggtctagatctaggttcgagtcctgggtttcagtcttgatttaggtccgggtccgagtctcgggttccgatccgggtctgtgttctgaggcccaggtgaaggtcccccatccaggtccgggtcctaggtcctagtccgggtccatgtttgggatcaggtcctagtcccagtttcgatttcgattctgtctctgggttcgggtttgggtctggtctccgtcttggtcggggtttgagtcctagtttgagtccagggttgggtcttggtccaagtccagatcccggtctggatctgggtttgggtcctggtctgagtccaaggcttgggtataggtccaggtttgggtctaggtctcggtccgaatccaactcccaagtttcgatcacaatgggtatagctctaggtctgggtctgggttcaagtctaggttcgtatccagatccatgtctaggtccgagtttgggtctgggatcgggtctcatgttcaactctgacctgatctcggacccgaagctggaatcagactaggactgggactataacccagatattggaccgtaacagggccaaaacctaggtaacgcgttccttgtgtctttgtttctattgcattctatc

SEQ ID NO: 241735 - DNA, 921 bp, Cannabis indica
aatataaaagttttaatttgatacgtttttcgagaaaattctttgattagcaaagattgcactgtaattgaaaaaggactgtagcgtaccttagcattagggcgttacagactaacatcttattccattcttgtcccaacaataaaagactaacatttgtccattttatttattacatgttaacgataattcttccgttagtttaaaaactgttagtcaaaaaaacaataattatcattgcattgagaattgacattgttcttttttttttaaagtttctttattctttatttgcatgtattacaaaattatattaattttgttttaaatttataattttatgaaattcttttataattttttttcataaaattagtatatactcaataataattttttaattatatatatttttatagtgtatttaattattaaaattgaacattttctcttacattttttttcactgatggtataaaaacaaataaaaaacttatgtgataacaaattgatatagcataaatgtttatttaaaatcattgaatatatatatatagtacatatataaaattatataattgaaaagtattataagatgcatataacaaaagaaatacttcttacactaatatgattggagaatgtaaataaataaataaataaataattcatttgaatataaatttcacttgtcccataacttatttttatccaaacttaaaaaaaaattataaagtgtaaatttaaaacaaattaatttatttttttcctctatgcaaaaaaaaaaaaaggaaaaaaaataagagtaacataatttcaataaaataatatacttatatatttgttataaagaaatagtataattaattgttagtgatattataaggtgataattccagtgaaaaagtaaattaggttgct

SEQ ID NO: 241736 - DNA, 1084 bp, Cannabis indica
aagccatatttataatagtaagaaatgattgaatacatgcctattataattataatataaattgtcatataaaaaacttaggctataattttttaattatcaaaatttaagttttactattagccactaatgaatacaattataaagtagaactttgaggatactttgaagacgatggctagctaggcaccactagttttagcttttttcttaccaaaacaaaagtgtccttaatagcaagaataaaaccgctaatatcagtctttaaatggggagcctccactcccatttttgttgaagcccagtcccttataattgctctcgattggtgttcggcgatacatattctcattacatgtattgaattggattgcctgcaacttgtttccaaaatcaagagcacttggaaggataactcacctctttctagcctcgttcaactaattcgcaagtccttgtctcttttccctaacgctctccttctccatacccctcgaagcaagaatctcgatgcacattataatgcaagggatacattaaggcttgacttggatttggtttggagattgtaatatctcctttctctatagttgttttcttgcagttacttaaaaaaaaaaaaaaaccgctataattactcccttgtttatatattgtagtttaaaatatctgttttttttttattggtggaaatagtttcgaatatgttaaattagataatatagccgcccttcgtgcggtaattttaaatattaattatattattttaaaaatatatatttattactttcaaaaaaaaaaaaaaataatatatatttattaattttcttttatatttgttgagctaatattaatgaataaaatattttgaaaattaaaatgaaaaaataaaaacataaattttaaattttaaaatggcaaaattattaaaatatttaaaattaggtataaaattatttgttctataagtaatacaaaataaagtagattagtaatttaaattttaatttatattaggtgtatataaattgtttaaatatttttagtagatatttattatgaattttaaattatatatcataaa

SEQ ID NO: 241737 - DNA, 960 bp, Cannabis indica
gggcaagtaaggttactccgcctatcccgcgatctccgaagtcatgtcacaacaagatcggaggacaacgatctcaatgagtggatccaccaagctgtgcaatctgttcgcgttcgcaaacaagaaggaatacgaaattgctacgcgccgaatttaacttctggatctcctacaacaatagagacggagggtgaatgtgatgaaaagatggaaatggcaatacgggaacacaaacgagcctttgctagactcgacagtttcagcaaacacaaacagcagatagcaatacactcagagttcctaaatgaagacccccggccgactgtggcatcacctgagattttcgatgttgcgaagatcatctccgatggagaagaagataaagagttagagaaaaatcagacccgagattcaccgcctgaaaggaggaaggaagaggtgcggatgttggtggagtcgtctgagcagaaggacttgtcgggatcggcgccggatctggaagttgttccatggaagtcgatcgcacctcggcaacgaatgacatccgagaagaactacaagacagaggtacaagtgggtgcgtcgacggagatcgcgtccctggtgccatcgccggagaagaaggctttgtcggagttggtgcgggacgaggaagggaagtcgaagacgccgttagtgcgagcggcagaggaagacgaacggctgggggcggcgttggaatggatttcatcgccgatcccaaggtcgttcacattgtgggcagtgacggagccgaatccaccacgggagccgtcgccggagtcggagaagacggaggcgtggacgctggaagcttcgccggagattcagcagctgaaggcgaagtcccgaggagcactacgcacaagagggacggctggcaaagaggctgatggtggggaggagcttttttgcactaaaaccctaccaagtaaggcccaa

SEQ ID NO: 241738 - DNA, 734 bp, Cannabis indica
caagtaagatcaaaaaaagggacaaaaaatgatacaaaagaagccctgaaaaactatcagaaatctaataagattgactagtgaactatgcaaaattttaactgcaaaaccacgtaaaaaatcctgtgtgttcatatttttaatttttcaatttttattttttctgcgtgagattgtcactattacgctcaaatttggttaacgaaaatttgcgttaacaagtaccttgtgaatgaattgtttggtgagatgagcttcttgagcagctttatgagatagtcgttctacaagcataatagttttcttaagtgccccattttctggaagctcatctaccacctcaaatgacatcttctcagccaccaaagccaccttttctaccatctttgccacattttcaacctcttccacaaccatctctgcccttcctatacatacatataatttcatttcaaacaaaatcagccacacattatctgggctgatgatggatgaaagaggaggggattaatttctaataatgactatatattatacataatagaaagatgaaaagagagaagaaaaaacaaaccacaaacatcaacccaaatattgtaactcttctgagaagagtaatgccctcctccatcaccaatcacactataacactagatcaccctcaaagcaaaaactgaagaagaagaaaatgattcttagatctctcaactgatatcaaactactcaaatctcct

SEQ ID NO: 241739 - DNA, 752 bp, Cannabis indica
ttctctattgaattttttcacccctttttcagtttaacctgttcctatttataatcacataggagggcagttaattacaaatttgacggatattttacagcaatcatcccctgaaattgtgggatttgattacatcccacgtaaaataaatgtaattattatttaaaaatcgcacagctgtgattggtccgcttttactgggtcaatgcaaacgtgtattaaatacgttgtaacacatattgttctgggacatctcgcttggaacatagaaataataaccctggtagcgagctagagttttttccatgtctttccgaggttgataatgtaaacctcgtcgttttttgcgcttataaacataacgctccacttgacaattgcagttcttggtgacaaggtgaacttcggcagtcaacatcatttgaatgtcagcttctatctaagagagctgactcgacggagctgtggatctcattgaaagatgtcacgagctgattagtaaaggtaccacgagtgtgtcttcctatacctcgctattagttgtttggattcactcgactgttatatttagtttgcataatatgtattatacgctaagtgccttaacagtcatcatgtctcgtctatatctcttcatgtgtggcgaagttgatgcctcgccttacactactgatgtcgtatgatttctcgttaatgcacgaggtgacagtttgtatatctttacctcccttaagaccttacagtcaacaagt

SEQ ID NO: 241740 - DNA, 993 bp, Cannabis indica
cctttgtgtgatcctcgctttttactaatttcactagcatatcatcgacatagacttccatattccgtccaatctacttctcaaacataccatttaccaatcgttggtatgttgctccagcattttttaatccaaatggcatgactttataacaataaaccatgtttgttacaaagattgtatgctcttgatcagagacatacattttaatctggttatatccaaaatatgcatccataaaggtcattaactcgtgtcctgctattgcatccactaactggtcaatcttgagtagtgggaaacaatctttgggatatgctttgtttaaatctgaaaattctatacaagttctccaagtcccatttgattttgggacaaggacttaatttgagatttacgagggataaaattccttgtggataaatacattagtcaacaatttgtcaacttcttctttgagtgaaccttgtctcttagaatttaatggttgtctcatttttctttttgctgggtaattgggatcaatattcagatgatggcagactatctttggatttattcccaccatattcgagtggctccaggcgaactgatcctggtttacctttagaaaataattaattgctattttagttcttcctccaaattcttcctaatgtaaacacattttttgggattctttggatctataataacttcttcaaactcttcaattggtttgagctggttattttcatcttgaattcttgggtccaaatatttttcctccctctcactttcttcagtcaggattacaattagttgatggttggctctcctattctgaagttctattcaataacactcccgagccaacaactggtcacctctgactactcctatacctgtctgtgttggaaagtttaaggacaagtgtttgattgagcttactgcccccagtccaattagtgttgggcgacccatcaatacgttgtaaactgatggaagatcaac

SEQ ID NO: 241741 - DNA, 1199 bp, Cannabis indica
cttctgatgctactggttatactataccggtctcccaagcttttgctactataatggcggatctcaatgcaaaccagccacttcactttgccatgggatcatcatcctcactagccacgacctccacttcagcccgccgttacaagccaaagcgtccccctagcattaacgagattgaattttgtaaaattctcaagcgtactcgtgatcttgctcgttctctggatgaaggatacaatgatgaggcgagtgctgcccagtgcacccgccaagcgccatgatcgtaatcagttggaatgctcgcggattagggagtaaacgagcattccgatctctctccctatttactaagaaatataagtccacacttttgtttgtaatggagtctaaactccctgctggtgctttaagtaggtttaaatctcaacttagttttcctaatggtttagaagtccctagggttggtcttagtggtggccttttgttgttatggactcatgatgttgatataactcttttgtcttataatataagtcattttcattgttaccttaagcccaaacaattttctgctttttatttcactggcttttatggggcaccaaattatcatataaaacacattcttggaaagttctccacagagttggatccactatccataactctccttggttgataatgagtgactttaatgattatttaaattcgaatgacaaaattgggggggacacttctcgtgctccttctacccaattttgcaattttcttgactcgttcattctccatgatatccaatttaatggtcaccccttcacttggacaaataaacaaggccagcaatctcatacccaagaacacattgattgagcgatatctaatactgaatgggattctctgtttccaaaacatcatcttcttcatgaagactatttcggatctgatcatcgtccatcaatcttgaacctccatcacttgccagcatcccaaaatcttagcaaccggttcttttttgataaattgtggctggctgaaccgaactttgaagattgtcttctgcaggcttggagttccaaccatcaaagcaatacaactgatcccatcgtcaacttagctgggaaacttaagcactgttcaaagcacttttctaaatggaaaaagtcacttgggccttccatatcctccaaaattagataaat

SEQ ID NO: 241742 - DNA, 1151 bp, Cannabis indica
aaaattatcagagtattcggttattgatgtatagttaggatcgtattctattgaaaaagtttactttaggaagaataaaagttattatttatgattaaaggttgtgactatttacagtgttgggatttttgacctttcttaaaaattcataaatttatcgacgtgtacgcttacaaatttttttatttgatattgtaggatttttttaaatatcacattcaactatgtgatcttttaaaggttattcgttatactcacattttccacacctaaacgtgatgagagtatattagagttagtctcacattgttaatgtgtagaaataaaataaaggttttacaaaaataatggattttgggcaaaagtataattttactgttgttgccctcattttgtccaaaatacgtggaccaaccagattatgacacgtagactgaaagggcttaacgtttagataattcaactaagtctcttcaaaccgcaaggatcaatcatagatgtgcctccccgagaaggcacgtgagtctcacatactcccggagagcaaagctacaacaaagcatctctgggaggtgtcagatcctatctgaacagtcacctcgcatttaatgccgcatgggagaaggcgtattgaaactgccatatgtcttaaagtctgacggcgtaaccccctttctgcagctactacgctatgattagtaagcctagtgacggctactttatgaggaatcacatcagtcaagaaggataaaggactacgtccattaaacccctacaaagcctagggattagaccatgcatttcctatgatgtatccattgggaatgtgtgcctttactgagaattactaaaagacatgtacctcaattctagggatcaccccacaaaaacactataaataccccccaaactcattaaggcaggggtcgagaattctgggtttcataagaactagagaggaaaaaccaccaagaacattctctgtaataaatactatcataaatacacagactcgtggactaaggctcattaatgccccaaccacgtaaaaatctctctcattaattccttatagctttcttaattattattattatattggttgccgaaaacctcggtcaacaactgttacacgatttttttttacaaaa

SEQ ID NO: 241743 - DNA, 1459 bp, Cannabis indica
atcttttctattatgaacttcgagtagtcccacctttagttagaacatgttgagtattcacgtatatagttatcaaaccatgatctcaaactaaaagagtttgaagtggttgggtgtatcatagtgatttaatatttatttacccatataaaccttaacacactgtgatacactgaaccacttcattctatcttgttgttagtttttctatttttgttcaatctaaatttcttatccgtatgaggacactctttaaattgtaattacagcacgctgaaaagatcttctatctttcagatgagaaatctctcagacaatagccagatgtttgagtctgagggtggagcattcgcagacaaacctcaaaagagggacagttttattcccacgtcactgtcagaagatgaggttccagcaagggtagaccaacaaggctcatggtcttctggcaaaatagatcgcatggtccaagagttagaggcaccagttgctatcgagatacgaaggagcgagttcaccgtatctgctcaagggagcttcatccatccaagggttgtttcaggtgtagaagttaaggaaatggggcaagattttgagttacctgcccactgggacaaaagagatgatgatgaagatgacgtgaactctactgaggacgcacctttggacgaaccattttcctatgaggatttggtttcactagtaaggaagtctgatttgacgacgttttaaaaactgaacttgatcaatactggtgtacgaaacccatgtcgatacaatgtcctcctaaactgtgtactaactcaccgattatcccgaacaatgccactgaatttcagtccccatcgttcactatggtgtcgtggttcctttccacccatttgtcaaagtgattttgacatattatgatgtttctcctttccaactcactccaattataaaatcgtcctcggatggtgtaatattccaaaaatctaactatattttattaaatatggaacattatgtgtgtttagagcataatgaataagattatcctattttattaggaatttccacacagggacttggggacaaatgttatcccaatttttgtcctcgtgatgtggcatgcttacgtggacagaaccagtaccacatggtagtacagctaaataaaaggaaggccaagtcagcactcgagcaaacaaggccccgacactcccaccgggatcaagtgacagaccatctccctctcatgagttggccggccacccttggccgtctctatggccgaccaacttaggacagcaccatggccggccagcctggcaaccacaggggcttgccagccaaggagtgccttacagaccttgatggacactcctacacgtggccaatgataatgagctgcgaattgggccccaaaagcccatcataatggctgaataatatctacaatcaagggcacttggtcttt

SEQ ID NO: 241744 - DNA, 1799 bp, Cannabis indica
agggtgacacactaggtcgtgaaaaccctaggtcaagcaacccctaaagttgaatttcaattccttatgttctggtggagccatcctatatggtgccttagaaaccgattctgctctaggtgccaaatcaataataaactcaatttctctccgcaatggtaaacctggaagttcatcaggaataacatctaaaattcccaaaccaccctgatgtcttctggccgaattgtcttaggccatgtggtatccaatacaacgatcagaaaccctaaaaatccatcttataacaattctctagctgttaatactgaagtcacttggatccgggatccctgaaatgatcccacaaaaacaaacggctcctcaccctgtggttggaagattaccattttccgtttacaatcaatgttgcctaagtacttggataagaaattcattccaagtataatatcaaaatttgctaaacccacttctattaagtcagcactcaactcccgatcctcaattctaataggcatagaccttatccaccttttggagatgactaattctctgccagtcaatagggttctaaaccctttatcataactatcatgtggtctatccaacctactaaaaattctggatgccacataagagtgagtggcctcggagtcaaacaacacagagaaataagagtttttgtcagagagctgatctgttacaactgaggggctagcctctgcatctgcctgagttagagcaaacacccttgctggagcgggttttgtagcaatcttctgttcttcatttttaagctgtgcatagtctctacactcacccaaatgacgctattttataattggggcatttcgggtaagtgtatcaggtttcggatgcaccctcacggttgcctccaccctagttcccttagaacctcttgttctaacttgagccacctgatgcagttggtgcccttctttcatgatcagtggtcgagccattaccacccctactattaccaacggtaggaggaataggagccccaccaacgacctaagtccctcgagactcccgagtgcactccactgcgccctcagctcgtagtgcctttcccaccatatcatcataggtggtgttatcatcagtgatgatcataagatcatgtcttatctttgaattcaatccgtctaggtatttctctttcttactgaattcagttagcactattccggaggctaatcttgccaatcgatcaaagtgagttgtgtattcagtaacactcatattttctttttgggtcagatgagtaaattccttcctttttgtaattctaattgcttcattgtagtactttacgttgaacaactcccgaaacttttcctaggtcatagcagtaacatcacaagtcaaggacaccatgtcccaccaaactagagcatctcttgaaactggaatgtggcagaggccactctgtcattacaggtgacgcccatgaaattcaaaattctagtaataaccattagccactactcgactttcattacatcaggtcctcccaaaaaggctgaaggtgcctgcttgtgaaacctttcatacagtggttccatacggttcactgcaacaactggtcctccctgcacagcaggggtaggagctacctacatttttggagcagggatcgtaggagcaccctgctatctcaagcgtctgatttctttatcttgctcattaattctggcttgcatttctacaaacctatcttcacactcctgtgcagcttgggcagtccacggcgggtttgttggaaattattttac

SEQ ID NO: 241745 - DNA, 1101 bp, Cannabis indica
attcacgtttaagactccaacactagaccaaataatatagctcgaaacgagctttataatgatataaagaacgtcccaattagagtttggagtcaaaagttatggccaaataaattcgagaaaattaggattgctccctgtaaggtttggccgcgacgagtgggtttgaaaaacccaaaaatccaattttaaagcttagaaaatgtacaaacttaacccaaacttcacctaagtcatcaagttgatttcacttagccaaaaatgatgagattgaaaacaaaaaaaaatgacttttcttatttacacttagccaaaaatgatgatatatattcaaattagtaaagagtgggcaaatgactgttttgccctccaagctagtaaatcacatatccaaaatacatggaaaatttagtcatttaatatcacactcgaatttaataatttaaagcatatctcaaatagttatcataaccacataattaaataatttttgaccccgaacccggtttgaacttaaaatacctgattgtgactataccactctaacttatcaaaaatcactcgccataagataaaattaatatactatataataatatagtccttttacacaaaatataataaaattataatgttacccttctctggtcaaaattataaaaatgcccctaactcataaatgaagtcttaaatgcgataatctcaaataatttcacataattgattatataatattataatccctcatttaaacttaattaatttaataagcattcctaatccatttactaaactcaagatattacaaaaatggtggagaaatgagattttggggctgaatcgacgatggtaagtgagggttttggctgggtattttgagaggagatgaatgttggaggagacgaagtgattcatttatgtaacatcctactcagaggaatgccacgtgtcatgatacaagcaacttttctcgttaatcggggtccataagccatgtgattcaaaacaaatataaaacttggttaaataaataacttgcaataaacattgatgttttagtataaactaaaacaatttaaaattacatatatgggatcccat

SEQ ID NO: 241746 - DNA, 1187 bp, Cannabis indica
tcttgccacgtgtcaaatatttaaatccacatcattaaggctgctcttggtgaaaacaataaatcctaaaactttaaacataaaattatcccaatttgctcaataattttagtcatataagatatcaatagaaagacaatttcttgatgaatgaaacccgtaaacttttaatattaaattacaaaacatttaatataaaataataatgaaatttatatgtaataagagaaaattaacacatacatattaattgttacacacattataggtcctaaatcatatacaataggtaatctgataatacatgatagaaaaataaataacaaacccaaaatactaatttgtatataattttaaacacaataaaaatagataataattaggtatgtgtacctaattgatctatatcaattacctcaatttgatagtgaaatactatcaactatgtcttcctctctagatctctaaatcagaagaagctttatttatctaattatcaaaaagtatacaatttggatgagacgatatctatttatagagttagggaggagacttagctacatagccttagtgtgattgagcctgctcatcaaatgcttcaattaactagaaaagtctacacttttgcttcaactagactttacacagatagatgctaagcccattaactattgatcactaacaatatggattagcccaacaaaaaactatccaatcaatctatattttacaccaaatagtttttttttttctaaactttatatttatactttgacaaggaaatttttacattcatattttccctacttaattttttttctttctaattgctttttacttaataaagctgaaaaaaaaaactcttatttatatatttttagtcagctttggttgagtctttttttttctttcctctctctctctctctttattttttttatcttcattgtatatatgtatatatacatataataagtatacattttatatctcgtttttaacactctttctcactcttaacaaaaaaattaagaatactcctcctatattttctatcttttacatgattaatgaaagtagtattattttttttttggtattattttgttagtttattcagtaattaatttatgcatgatttacagattttaacaagattaatgtcttgttattgtttattttttttg

SEQ ID NO: 241747 - DNA, 949 bp, Cannabis indica
ttttaattttatttttattaattcctataaaaaatatattttcttagagtaattaacggcataaatactttagtttaattcttagttgtaaataaatactcaagtttaatttttgacagtaataatacctaagttataattatggaatttttgtagaaacctatctgttaagtgttaagtaaattgccacgtaataatttttaattggtccatgtcattaaatttttatttttttttaaaaaagttaatttaaatataccaataaaaaatgacacatggataataatgacttaatatttaatggttaggtacttatagagttctaaaaatataacttaggtattattaccgtaaaaaattaaacttaaatatgtatttacaactatgagttaaacttaagtattttttaccgtaaattactctattttttatccaaccatttctttagcttctcattaaataaggtaaattctcattaaatatatctttttgagctaagactttagcaacattttgctagcagcatgtgattctttaaaagcacaatggtcctgcttttaaaaaagacaaatattaaaggatatttatggtgcttagcaccttataaagtttaacatcattattagtacaattcaatatcgaatcttatttattttactttaataaattatataaaaaaataaaaagcataatggtcctagctagatctaagaaactcatattccataaaaaaataattaaggtaaaatttagtgttatagtaatagaaaaaaaagacattaaattataaccttttgttgttagttcaacaccaaatttaagcatataattttagattattttattatataataatgttatgtaggattgttttgaaatagcgtgtaagcattcatcgatctaagaacatttattattgtcactacaaaaatcttacttttattcacaa

SEQ ID NO: 241748 - DNA, 779 bp, Cannabis indica
catgtacaatcatcatcaccgatcaactcaactcgtagttcagtaagattttattgctttagtagtttattttattagtatgttataagaaaagcctgataggaagcatgttagtagtctgatagttgaataggcgcatttaatttctaaaataagcggtaatcagtaaattattcttgatcgtgatctgaccaggctagctcttggtgtcgcaggctattctaatagtatggacgccaagcaaaacactagaagccaaggtaactcggtcggatctagtggcggtcagggagctcagattcccctcaatgtatgtggccaaggcagaggctctagagtaagggcacgcggtaggggagatgttaacccgctgcaggctacccaagaatgggaaaataggtttgcagcaatgcaagccagaattaacgaacaagatgaataaatcagatgcctgaggcagcagggtgctcctgcaatgcctgctccagaaatgcaggtggcttctgcccctgctgtgcaggcagggtcaattgttgcaatgaaccgaatggaaccactgtatgagaggttctgcaagcaggcacctcttgtaataccccaagattaaggaatcggattagcgaatcctaactaattaaatgtgtattaatgtaggttattatataatttaagatgtatgagttatattgttaaatgacatgttaagaccccgttggtgagcaggggtattttcgtaattttgacctgagaagggtgaaactgtaattttaatgttatag

SEQ ID NO: 241749 - DNA, 955 bp, Cannabis indica
aatattgttagattaggtcaatttttcattaaacccaagattatccctctattttttcaactcactgttgtctctctctccctccattctcgttcgctttcttcaacagaaccgaaccgccatgaccaccgccaccatccaagaccacagtcgccatccaagactactgccaccatccaacaccaccgccaccatcaaagaccactcaactcgctaaaaaactaattggaccaaccctctcgactccatttaatcggtccgagcccatgtcaatctccttcctcaaccacgaacagagagactaccgacatgaacaaagaccacaaacacaaactacaaacacagaccacgaatggagagaacacgaacgaacacgttctctataattttctagttttttaattttcttgagtcagtctgatagtgtccgatataggtccgacataaatttgataagaggttctaacatttatgtttttgaggttgatggaaaaggttcgatagtggtctgatataagttcgatggtggtctgatgcatagtaattgattagtggacatatttcgtgtccgataagatctgtccgaatagggtccgatgggtgtatatacatatttattatgtatatatatacatgtgccttttcttttctctttcttggtctaatacttgtaatatattattatgtttatttaaatacatattgttgtatatgtatatatatatatatttatatataaatttgtttacattttatatcatagttttaatctcttaagtaattactcgatgctaacgtgggtttcgactaattttttagtttttcttagttttaaggagaggtacagtttaaagaagattttttttttatatttttttatttctttctttctttaaatgggatcactttttttgcttatttgtacgattttgaataccctattagacccttattt

SEQ ID NO: 241750 - DNA, 1167 bp, Cannabis indica
ttttgacagaagaggggtcgaatcgttataacgccttgatcaaacctttctgacgagaaagggatcaaacaactgtaatttttgatttacaacctatctgatgagaaaggaaaatcaaaacttatgattagcgcataaagctgaatactatcggctcacgctaagggaaagtattaaacgagcatccaaatgtcttaaaaaaatacttaaacccaacacgtgggtagaaaatttaactactcatgtaagcaatgaaaatatgtacaagatgacaagttcattaaaaatatatttgaatgtgcttaaaattagatcatttctcatgatcgcgagatggaatcgatgatggctcgtagattaaggaacgagcagataagctactcgaatgtaaagtaggaaattaactacttaacgtcggaggaaaggacaagcaatggaaacccctaataaactttatgcatgagatattttatattgtgaataaaatgcaagcaaacacccgcatattaaaagtgcgaggcattaaaaagcaaagttggtcatccaacattgcaaatctgtctttgcaaaaaaaaaaaaggaacgtactgcttggggcaaactattgtctcggccaaagggccattttctatgctgggagacttggacagatcttcttcttcttcttcctcaacctcgtcatcttcttcctccatcttggtcttctcgcaaagagctaaagtttcctcttcctgctcctccaagaagcaggtatccatattagggttccaaagccaggcccggtatatagtgtgaaaaccaaccttatcgcacctacggtcttgacttctttctcagcaagttttttagcaagtttcttctcaaactcatcagcttgggctttgatggtcttctcggcctcctcctttgccttcttggcttcctcttttgccttctcagtttccttctttgccttctcgacttcctcctttgctttctcggctgcttacttgaggcaggtattttcttgttgggagtcatcctggtaacttaagaacctcgccctccaagtactcaagccgctcagagagtaatcagttggaagcaaaagaagagaaagaagcctggagaattgcaaacagatggatatgcaagaggtgtaaaaaagaataatataattataataac

SEQ ID NO: 241751 - DNA, 1317 bp, Cannabis indica
ctaagactcaaacccaacagcaatgctcaattgctcatattattaggaattggaatccagtagtgcagtgtgaaagcactatgaaaaagtgagagagtgatgaatagaagttaaacagtttacttttgatttgcttttaagtaattagaaagaataaaagagaaaaagagagagaggaggggacccctaccacatagtacagtgcttgctttttccatcataatcagtagtaatatattgtaatagtaacaagagtagtgagttgtgaattggggggtggaagcagccaattaattggttagaatgagtgagtagtctctgttaaatagtccttagctaggctactccctctaatctgaatctgctgccactacccaaacaaagccccaacccaccacagtggctgctacacacctcaaaagtggggtgttgtagctaccaccagtgacggacccaaaattttaactttgtaggggtttatttatcattaaaaaatatttatacctatattataattactcttactagatttatttatttttgtgggggcttttctactattttaatctataattatcaaattaaaaaattacatttaattttttaaaaggcaatatttttgttagtggggctatagcccccatatcaacaatactaggtccgtccctggctaccacaacttatcattgttattgagttttacaaattttaatttaataattttttttttgataatttttctgttttatcttttaaaatattttattattattttttttattttattttacaatatacttttatattaaactatacattaatttttttaaaatgcatcatcaaaatcttaattttttaaaattttattatatttcattcattttaaatatataatattaatatatacatatattcttatacaaaaataattattaaaacccaaaacaattaataaaatatatttagaacaatgaataatattctataaatgtagagcatagatagtgtattttaaataaactttaaaatgaaggagttttgagcatctgatgtagcgtgtttttagtacggttttttaaatttttttaaagcttctttattttagaaaagctgttgtgagtgctctaagtacttaaaattttatgtttgtaagcgatcttaatattttttttagcagcataaatactaaatattagttaacatgtaatttttcatttagtttcgttagtacagactctgttagtgttttaaatttaaatttatcaataagattaattcgttcatacctaatgattcaaaatttaggctttacatata

SEQ ID NO: 241752 - DNA, 585 bp, Cannabis indica
gatgagtatttaggaatacgaataaaatgcaaggaaataataatgaagagtgcaataattatggatgagtgtttaggaatactaatccttttagttcagtttctcaattattaatgttaattatcaattctctccttttggtgatgaaagattatcaatttaaccctaattcttcttagatcattaaggtcctaaatcatttatcatctactcgcatctctgcagtaaattaacctatcacttgcattaaaatcagaatctaaaaaaacacataagctacgtaaatactctctttttacatcaacttatgtttgtcctattagagcattcctaatattcacttctcatatttcatattagaatcataagtcacatttatgatggctagtctaaaatatgtaactaaaataaataagaacaaatcacacaatcagggaggaaaactaacaatcacattaactgaattgaaaaagcgtcatctaacaatcatcatatccctaaattgagagtttagttcatattcatatccataataatactaaaacaaaatttaacataaatgaaatgaaaggagaagaaagaaac

SEQ ID NO: 241753 - DNA, 1823 bp, Cannabis indica
acccatttgcaccctatggcccattttcctaaaggtaaattaaccaagatccaactaccatttgcaactaaagcattcatctcttctatcattacagtaagccaaccgggatgagacattgcttcacgaacatttttagaaatagtgatagaatcaagagaagcaataaaagagcaagaagaataggagagatgattataagaaataaaagaagaaataagaaaagtacattggtgtttacctatacgtagtgcaatgggaagatcatatttaagtttcagatctaatgacgaagatgcaggtgcaagagataaaataggaggtggaggaaggggaagcctggtgtacactataggaggccgagggagtggtggaggtggtggaggtgtagacattgtgggagttatgagtgaggcaagtgaaggaacaagagactcatcagaacatgtatcaggcaaagaagatgtgacaaaatataccaacaaatcatcattcttcccctcatgagttgaagtagttgaagatgaaaaataaggtgtattttctacaaaggtaacatcaatagaaataagatatttattgagatcaggacaataacacctataccctttctgaagacgagaataacaaagaaagatacactttagtgccttagggtctgatttggtgatagatggatggacatcacgagcaatacaaacactgccaaatactcgaggagcaactaaaaatgtaatgaccgcttacttttaatatgaaaattagtagataattaggatttaattaagaattataattttttagtaattatgtaattatggagacatatttaaattctaggtgtgttgataatgttataagtaaaatgtcattattttcatattttatgtccggtaacagtagaatgcgacgtatggcctatagagtcactttttataatttagtatttttaaaatagcggagcattatagatagatatttggtatgtcaggattgtttatggttattaggtttgaccaaaatacccctaagaggcaagttacttctaggtgaagaagaggctaaattggtaattaatccttgttttgtctctagtagaatgtagattagtgataatccttcgatattattatttttgtttctaaaataagctgaataagaaattagatttatttttattgttagaaaaattagaaaattggatttttttttcaaactttctttccctctctcttgggtcggccacacctaaaatcttagaagcttgagtttttcatccattttcttagcaattgaaagggttttctactgggaattcttagggattgaaggcagcatatcttagtaagctagtttcccttcttttcctttgaattttatggttcttgagattaggttttcatgcaattttgagttaggttactataggaattaatttagttcgtatctatttcctgagattgatttgaagttatttaagctgtttaagcttgtgtttgttgtttgtgttgattttggacaaagtttgagctttagagctcatactttgctcttcaatggtgaattctatttctaaggtgtatacctgtgtttattacttggaaaatgttcattgtggcttaattaggtattttgaaagggttgattcgatttgggttagaattaagttgttagtggggtttttagggtttcttgcagggaaccggcaggggatcctgtacaatcgactaaccgttttccaaggtagaatcctaagaaccaattttccattttaggaatctagtttatcggtgcagtgctggtctggaaagtttggttaggtt

SEQ ID NO: 241754 - DNA, 1168 bp, Cannabis indica
ttaggaaggtctagtgtcctcctaagctgcagtctcaagcgtgtcgacctggtcttcacaaatcatgggatcatcttcttcgaggccagtgcattcaacaatgaagtatactaatgcatatcctttgattgctcttcgaggctagtaggtgatctcaaactcacctaattcaacaacccacttgagtaggcgccctgatgattctggcttcatcagaacttgtcgaagtggttagttagttaacaccttgactgtgtgagcttggaagtatgaacttagctttttggaggccaggacaaagcagtaggctagcttctcaatgggggatatcttgactcggccccaatgagacacttgccgatgtagtaaacaaaatgttgtgccccttcttcctcacgcaccaaagcagcactggctgcatgctcagtgactgacaagtggatgtatagttcttcaccatctatttgcttggataggatgggaggtttggctagatgatgtttgagagcttggaagacttgctcgcattattagtccattcaaacgccttgttgcttcctttaagtaaattaaagaagggaacaaacttgtttgttgacttggagacaaacctgctaagtgtagcaattcatcctattaggctttgcacatgatgttgaagcactcctctagatctttgatgtagtcttcaaatcttttcgacttcactagtatatcatcgacgtagacttctatattgttttgaatttggtagtggaacatatagttgactagtctttgataagttgcacctgcattcttgagtcctaagggcattactttgtagtaataatgcccaatgtatatttggaaatagtatgttcttcgtctggttgtagccggaataaatagccatgaatgtgaggagttcatggccggttgtcacgtccacctgttgatcgatttgttttagtgggaaataatctttagggcatgctttgttgaggtcggtgaagtcgatgcaagtactccactttacatttagtttaggcaccagaacaggattgtatacccaaaccaggtagaaagcttccctaatgaagtggttctctcgtagtctttcaacttcttccttgagagctttggagcactctttttcaaggagcctacgtttctattgtacaggctt

SEQ ID NO: 241755 - DNA, 1054 bp, Cannabis indica
ctacataattatcattaaaataagagtaattattaaaagaagccaaaaaaattaattaaaaatcatataaaatcataaattaaattctaataatgttgggaaaaagaatcatcgtagaacgacatcggacggtagtacacgcgcccccacgcgccactgtggagattggcttcgctgggggatggttgtctttaaccttgaaccaggtttgaaagtgggtcgtgtgacccggttctcttcagtcgggtcaagacgaaaaaaccggccaaaagacacgacgaaaataacggtaaaagtagggattttgtccggaattgaaattctattctatttatgggttcaatttgggatgaaacaagtaaaacaatacaacatcttattgaaactaatccgaaaatataagaacaaaaagaacctgatttggctatgtgtgtcctccaattcgaaaaattaaacgtgtagaaacattttaaattaattattgatgagatatgaacaatcaatttcagattataatttatagaattaaaaaacgcaaaattaatttcataaagaaatatttaaaccctaaaagtttaattttaatattcttctaatttagtcaataattttatgcaagtaatatataaaccctaaaagtttaattttaatattctcctaatttactcaataattttatgcaagtaatatatcaaaatgaacaaaacctctgaacttttaagattgaaaaacaaaaaattcaacataaaataataatgaaattattatgtaattgaagaaaattaatatatacatattaattgttatacaaattataggttctaaatcatatacaatagacaatatgataccacatgatagaaaaatcaataataaactcaagatcaatttgtatataacataaaacacaataataatatatataataattaggtatatgtacctaaatgcgtacatgattgattcatagtagttactgcaatttgatagtgcaagactatcaactaagtctttctccctaaattcagaagcagtttatttatctgattatcaa

SEQ ID NO: 241756 - DNA, 798 bp, Cannabis indica
tttttaaagatatttttttttttttttagaatgaacgtctattaatagtaaaagagaattagacctcgtggtcattacacaataagtctcttggaatgtgagaaataggtaagcaaccaaaccgattgtgggtgaaggcccacttagccacattatgggcaacaaaattaatctgggaatacacgaaaacaagcaaccatcaaaaaatccagagagtctaaacaacgatttgagtagttctcaatctcccaacaagacgaaacacggttgagagagttgatcacgactctagagtcactctccacgatgacaaacttgtgatcgttgagctttgcggtttccaggactaagcaaacagctgccgcctcaccacaaagagcatctgcgtagtccagtctagctgaatggacccagaccacctcacccaaatggtttctagcaaccacagcaatacaggaactacccaacccaactcttacatcacagttcagcttcagccaatcttggggaggatggcgccagccttccctcaggaccgggaccacagcgggtaacaaagtatctttcaaattagcaaaagcacaaagggtagagtcaatacaattatctaagttaggagagttgttattgtggatcttatcattcctggcatgccatatagtatccaccacaactgacgcataaataaagaattcctccacatttaagcctttagaaccgagcccccacaagaacttgacccaatcccagatacgaataccagaaccagtaacatgataaatcccccagggcgacgat

SEQ ID NO: 241757 - DNA, 1368 bp, Cannabis indica
ggagttggtggatgcataaacttgggtgaccaattcgaacgtccggtttcccctctaacccggcccacgagctcgtcattacgatcctcaaacaattgtgccttcgccatagagtctgctaaatcaatgggtttagccaatagtaattctctgcgaatttcattcttcaagcaccatacaaaaaaattcaggaaatactgttctgaaattcctgtgatttgagtcatcagtgactcaaattctagccgaaaggatgagatgctcccggtctgaaccagctttgaaattctccctaaaggatcatcataaatagagactctgaaacgcatcctctgtgcccgtataaatgattccctgtttgagaaccctcctcctttctcaatcaactgaaaccaagtcgaaggagcttcctcaaggtgaaatgcgaccatggccaatcgtacttccggtaagaccccgtgtaaatcgaagaatttgttgattttataaatccagtcttccacttttgtaccatcaaagcgatgaaccttcacacgcaacacctccagtagagagttgacctctcgagaatcaagagtagctgttggttgattcctcgacggagatccaattccactgctagcatggccgtgagcgccaggcgatttcgataatggtgactgcaattggtccactcgttcatccaggcgagatacctgctcctctaatctcgctgaaaaccgagcaaattgttcctctcaatttttctgaaaattctgaatcatggcggccagtttttcgttcttcatgctggaggtgaagaaacaatgaaagcaccagtgatagctcagtaataaaatgagtattgttcgagtcaatacaaaactccacaagccaataagcttttacattcagcataaaccttttgaaattcattcttctgctatttatactaaggaataaaaaaatagagaaaataacagattgctagtgctcccgcaagttcctcatctcctctccattctaacaaactcttgcatccatcgaggcttcacgcgctgcgagttccacgcgttcccactctctctgcaatgttggttcgcccaatttctttccctttgttgccttcatcccgttcgttatgttgatggttgtcctcttcggttattccctcctctaaccagccctttatgctgttctgggctttgtttaggtcaattaatattggtcctggcctaataaacacataatgtagtgattggataattgaataattattatagggatctaactcaaagataaaaaatctgaagtcagaagcacatgcccgctactaattatagccaaaattaattaatataaaatctaaagctgaagaagatgtgatgt

SEQ ID NO: 241758 - DNA, 959 bp, Cannabis indica
tagttttttgggggtatttttggggttttgaaaaaaaatgtatagtttttttagggttttaattattggtttataaatcaaattttttgattttctaagcatagaaaatcaaatttccctttctatacaaataaaatacagtgcctgccaatcaaactcggaccttttctttattattattattattagttagtaattaagtatttgagttcacgtcaatgccatacacgtgtaattgtcacataaatttgagctgaagttgtttatttctagtacatattttaaatttttataatagggtgactcaagatggaccatgtagaaggagagttaaattagtgttgaaggtgaaggttttaaatctcaaaaatattttcttttcaagtttttttttactcttgtctaacaaaaaaattatgtcctctctcgttttaaattttgtagtccaatatgactcatacataattgatggaaatagacatttactctatgattattaaagagaaaacaaaattaactactacaaatatcaaaattcgcgacggtcctaaaaataactttttacagagactatcgctcaaaaaattaagtaaccatttaaaattatcaggaaaaatttaatattcctaccggtttataagcgtagtaagcaaaataggcgatgcttttttatttataaaatgtaatttttttaatagacccttatacgcaagggtttaaaatggaccctcataggcgacgattttaaacctataagggtccattaaaaaattattacttattttttgtcacattttctacatgcctacctacttttttttctatttcccacttgctaggggtgttcattggatcacatccaatagatttgaacctaaccgatccaatccaattatttattggatattgaattttatcatccgatccaatctaattgaattgagtcatccgatccgatc

SEQ ID NO: 241759 - DNA, 1377 bp, Cannabis indica
ttaattaattaataatcccttatatataaataaaaaaataaggaataataatgaaacgtacgagtaacctcataaactttataagttaacatagtaagtagattaagactttgcatttatttaatttaaaataataaataataaataagatggtgaccggctattgcaggtgcaggtagccataaagatcacgcctcattttactatatttgcttttgtttctattgatacgattcaaatttgatcatcaccgttcattcttctcttctcatgacacgtggcatacatgcaaggtcggcagtttgtttacactgccaaaacatttacaataataatgccaaaagttttaaaaatttatgtaatagacccaaaagtttcggtatttacaatacgtttatagtttaaatttttttttcataattgcacacttattttaaaacaatctgtaaattttttgaaataatattataatatatactaccatatattaaattagattaaattttttttataaaaactaaagggaaatttacatagtataataacttttcttaattttttataaaaatactgccaggcggtattttttactgtgtttttttataagtttcatattgcagtatattgtgttaagttttcactagtgttttttattttgagttgttctactttgtgttttactggtgttttataaaactacagtatttttgaaaaaaattccgtgtgacaatatttttataaaaattaactcaaatttcagtatttttataagtttctcaaactaaatcagataaaaaatctaccaaaatactttaaggaatatattttagacttacaataacattaataatgccaaaagattagcactttttctatggttttgttaagagtatagttttggaagaatattatgtctatttcatgtaagatgagatacttctttttttttttttttcttttattggattgttagacaaaaaaaaatgaaaataaaaaacaatatttttatattttctgttttttagttttttcaaacttaatttcaaaaaattatttttaaaagatttggccaaacgctcctattagtttttaaaaactgttttttatttttaaaaattaaaaacaattattaagttgtgcagttaatagtttgaaatttttaatgggtaatccttaatttttttttttttttacttttacagggttgtaaatttaaatctttgttacctatctttttgaatgtatatttaatttttgttgcattttaatttactaaatgtacattataaataaaaaaataaagttacacatatgattttaatcaaaaaaagtagcaataaaaatattttataatacgattttattgtagttgtatct

SEQ ID NO: 241760 - DNA, 870 bp, Cannabis indica
ctttactgatgagtacttcatggtggatggcacgggcatcactcgcactcaattccagcagattctgacatatcaccgccttcccctagctcttgctcttagagatagtgctcaaaaacttgcctggctcctgggggaagaccgaaatattatccagttgacctccgaggataatcttgtgaggtatgggctatatcccaaggactttactcctaagtctgtgacggggaagaagaggaaatctggtgctagccggaccgaacgagctcattcggaggatgagtcgattcaattaaagtgcgaggctaagttgaagggtggtgcaagggccaagcagtatgctcaggagcccttgaatcctgaagatgaggcagaggaagagcaggtgactccactgaaaaggaagaagaaactcccggccccgccaaggcttgttgaacatgtgattcgcataagggaccccatttcacctgttcggccctcccctcccgtgttcagaagaggaaagccgttatgtttgaaacaagacctgtgtcaggtgatgatgaacttctgagtcttgttcgggcagtcaccttgcatattacttcatcttgtttatgagcttcttgactttcatgccttatgtttctgatgtctgttttctaaccatgtttttttggttctgtacagacatgtcttggcagatgctcgacgctctatggaagagaataggtagaagctctagcgcctctcctccggccaagaagtctaagggtggtgaggggtcctctactaaggaaaagaggcctactagggaggtcattgatctttccgaggagttgactgctgcaaacccgtctacccaaagctgccaagtctaaggagtct

SEQ ID NO: 241761 - DNA, 878 bp, Cannabis indica
cttgttcgagatctttctcaaggtgagaaatgcgccttttaaactgaaattttttttttgtggttccagtcatttaagtgagcagcacatttagtttgagtagcaaccaggcgggggatgacctcaaggttactggaagggcacttccagttcgaattcagggtgttatcccaattgggctccgagagccaaacattttcaaaaaagaatcgctttttatcttaatcaggggaaggcctggttgtgcctttggtaacaagctcgagagcatgatgatcagaaccgaagaaacccaaatgtgagaggagagcattcgggaaaaggttagaccaaatcggattgacaatgcaccaatcaatacgttgttgaatgttttttggggcggctacgttattgttccaggtgagaagggggccttttggttcgagaggggctaaattaaaagagtcgaggaaacgtctgaaatcaagggaaggacctctgtcggggtttcccccttgcttgtcatccaaattaagaaaagcatcaaaatcccctattataagccaaggatcagtgggattattgtccccaattcggtttaagattctccatgtgtggggcctttgggccacaaagtattgtattagtattatttgatctgggtcctggtccctggtctggatcctgagtcagggttcgagtttaatttcgggttagggtccgggtccggttttgggtctgggtccgggtcggattccaggtcctggtcggggtccgggtctgggtccgggtcggggttcgaatcggggtccgggtctggtaggggtgttcactaagtatccgatccaatctaatccgtacgatccaatccaatccaatctgcaaaatgcgaatat

SEQ ID NO: 241762 - DNA, 1089 bp, Cannabis indica
ctgccaagactcctttttggatgtagtctttgattggctgacgcctgtaattttcatttgcactatctaggaaagttatcaagttggctgtatttttttcaactctttctatggattgggataatacatggcgttctcctatggtaatttggataactctttcttcaggaagtgttagtgatgccactaaattggctaatgcattagctttaccattttttgatctagagatgtgatttagggttatatctcggaattggccaagcaagtatttagccttttcatgataagggactaaattctcatgcttgacttcaaattcaccgctcatttgtttaatatacaaaagagaatcaccaaatacctccaataactgtattttcatttcaagtgcaactttaaggccaataactaacgcttcgtattctgctacattattggtgcatatagctagaatatgaaaagagtaaggtatcaggcctcccgacgatgtcaccaagacaattccaacacctaccccactacttcttgctacccaatcaaaatataattgacatgatgaagtatcaaatgtgaagacttcttcgtcgggaagatcttctcgcaactccatatcatttggaattgggtgtgctgccagaaaatcaggcaaagcttgtccttttattgcttttttgtgggacaaagttaatttcaaattctgataacatcatggaccatttggcaagtcgtccacacaacacgggcttggctaggatatatcttagagggccagcttttgacactaaagtcacaggatgtgagagaaaataatgttgtagttttgtgacggcaaaaattaaagccaggcacactttctcgattggagggtagttttattttgcccctactaaagttctacttagctagtaaagagcaacttttttttcctcctcattgttttgcgctagcattgctcccaaggagcggtcgagtaaagtgatatataatatcaatggctttcctaagattggagctttcaacactggtgggtgcaacaagtacttcttgatgctttcaaaagtgctttggcatgcctcatcccaaata

SEQ ID NO: 241763 - DNA, 798 bp, Cannabis indica
gttctcttgagcagcctacacaaaaatattattcgtttgcaagactttatgcccttcctgattatgattaatgaatatatatgaccacgcttgtttatcacgctttgaccttaagaagaatattataaagttgtaaaataaatactttttttttcttctaaacaggcaatatagttatttttgactaccatgactgtaagaataaaagaattacaaatattttgcgtaaaagcatttgcaagatttatttgatgaaagttctaatcatgccctattatgccattgccctgtataacagggcattgcaagaccaaagtgtggaacaccttttataattttttatagcttaataatgataattcattttaccattatttttaatgcggttgattgtgacatctaaacataagagataagacataattaaaaaaaactaaagtaacataaaatggtttacgattatactaatcttattaaataaatgattatgatgagcttttaattttaatttactcaagatcagcatattttatagtttgtttatggctttgatgacttagccaccatctaataattccgatcaaataatatagaggaggcaatgataaactattttatactaaaatatatatactaattgtgtgtctttaaactaattatgttttattttaaagataagattatactacttttttaagcagtgtttcatatttatggttcttgaaaagagcatatttgacaccattttcatagatagtattttagttgtgtataactatgatgtagccaccactctaa

SEQ ID NO: 241764 - DNA, 1069 bp, Cannabis indica
aaataaaaataaattaaatctttcctatatgtttattttcaaaatttctatacacacattctaacaaaaaaatacaaatttcttccatcaaaaataattttattttaaatactttaatttccacatatttaaaaaaaatgtaaaaccactttggccttctcaaactagaagaaacaaagaatatatataaaattttagtcacacacaatttcattttttgttaactcaaaaaagtaaaagtttcatgtgaattactaataaatgtaaaaaaacatatataataataagggtaaatattattttgaactatgtgttttgcaaaatcaattgggccctatatttttcaaaataataaaaatacggccatgagcttaattttcaataattttatttttttttaatataaccaactttaagataatttttaacaagaacagatacagaaaatgtaactagttttgtcataacatctctagatcaagttattattaagttatatttttgacaaaaaatcagttcatggtcctatttgtacaattttgaaaaatacagggtttcattttgtcatttaacaaaacagatggtctaattagtaacttttgcaaaatacagagtccaaaataatatttaccctaataataaatgtaaaaactaatataatttattaccgaaatgtcatgacccctattgatcaaagtagcttgagcaggtttgtattgggtttgtaaagcccctaaatttggggtaaattggactcttgaaatgttaattggagattgacttgttccattgccacaaaggtaccaactctcattaagattaccccattgagagggtcctctcccactactttcatcataagcatatatgctatcataattatctgctcaaattaattattataccttcaaaatcataatatatatatatataactattttatgtatagaattaattcatttaaatgcagttttatttcataactctaaacttattatttcattttattttgaattgattgtgtgttgttttttatttttattttttttgttcagtaaatgcattatcg

SEQ ID NO: 241765 - DNA, 1124 bp, Cannabis indica
tgtttaaaaaccaaatacttgaaaacagtttagatatcaaaggacaatgcatgcaagacacaaaactaaggccaaaacaaaacgaactaccaccattaaaactgtggtatcctttgataaaactaaatttattaaaatggcataaaaattcaccaaccaaagaaaaactggaaacacattggctacaaagaatgccatcacatattgtaaatacctcaagggaactagaagagccagcaacacttaacgctaatgcactgctaaaaagcttatccagtatggaagtagaagaattctgaatagactcgcccacaattgatggcacaattaccttctcagcattaagctctccaggctcactaattgctgaatcttcaatgactggggtgataatagttttgttgtacaatatgctatcggtgccaaatgatttatctgaaacatctagggtagaagatatgcccagaccctttccactatggttatcaactgagccacgattgcttataatttcatattgctgcttcctcgaataaatttctttagctgattgtttatcctgttggtcattagaagttacatttgcagaggagctgcttttgccacgcaaaagactgtcttcgcgtccagaatttccaacctacacagaagtatatcttaaaatggaaaggtactaaaagacaggaatcaaaaaagaaacattaaattatcaaaatgaaatatgggtgtttgataacagacccaatgccatatacaaggagccagaaagtccaacatgaaactgtcctaatgctattagctcatttaacaatggttgttaacaagccctacaatctttgggaagttggggatcaggaatctctagcatattatgagtaggtaggtttgatgagtaatcaaacccataaaccacaagacagacaactcaatctatcctcataggtgccattccaaatttcttatgatcaacaagattgttggagtcaatatccttgatgacatgtaaaaagatgctcgcacaaacatatttgtgaatgaatcaatcattaaatatctaatgtcgcgaaaatagccacacaaatggttaaaaatctaaaggcctataacagctcacttccaaataa

SEQ ID NO: 241766 - DNA, 828 bp, Cannabis indica
aaagtgagcccattgttactcggatggttggaaggctgatattagcttagagaagtcaaggtaccgcacgggtgttctgttgcctgaaaaggtcagcccgtgacacacagcactgcacatcacattttggtagtacaatttgaggattttttttaggtttatgcagtgcagagtttgaaaattacctaaactgcatgtgcaaacagatttaataaattagggcgaacactctacttttaaggtcaatttttgcaagtcttttaagaaatgtttaggtgttgaatctcacaaatttaataagggaaaagagtattgaaaaatagtttcttacaattttttaatatatatttttttaaatatttatagtattctatattttatgaaattcaaacatagaattatgctgtttggaaagatgtcgatcttgtatgtttttctttctattataaaatcgacctaataacaattttaatattgtaaatggacgttgagttatgcaatatttatttaaaatatgttcgtgtggtttagttggacaactataataacctgcaaattgatttttaaatatctttttttgttttcttaactttgtaatactcatcattttattgccctatagtttatttttcaccatatctattttaattttttaagcaatagcaacagcctccaacatgcaaactaactagattagtataaattaatcagtaattgttaaattttgtctcaccttaaagcctaaaggagctcaaaacgcgtatgaataatataaattattccattttacaaaaataataaagtgaattattagtgtatttcttttct

SEQ ID NO: 241767 - DNA, 667 bp, Cannabis indica
catagatgagtctcactttggttgtaccttaatttgagatgtttcattatccatttaactacatttgagtgttcaacacatttctctcacaatactaatcccataagataggtgtggtctggtgaccattaggtacataatattctccaccacattggtataaggtattttctccatgtactaatcaatttgggtggtgggagcttgagagtttaaaagtttgaaatgaaaacctacaggagtgcagactgatcttacctcagagaaacccaaacctgtttagaatcttcaaaatgtagcttttctaagataatttcagtattctatatattctgtctatctctcatgatttcaattcctagctaggactcgatcttagatctttcatttgaaactctctatctaacagtttttttacttttgcaatttctccaaagtctttgctagctattagcatatcatcaacatacaatagtaggtacaccacgacctttgaatttcttagatagacacaactgtcatatgcacttcttttgaaacctttcttgttgacaaactcatcaaatcttttgtaccactgcggtgaggactgctttaggccatacaaagacctcttcaacaagcacacttgaccttcttttcctttcacttaaaaccatttaggttg

SEQ ID NO: 241768 - DNA, 989 bp, Cannabis indica
taattatttttaattaggttaaactaatataattagcctaatacaattatttaaataaggtaaatgggcatttacaattggggtggttcatataagggaggactgatacgtcgtatcactaccatggtctcctaactctcacagaagactcaaaagagaaaaatttaacctttaattaaataattgatattaattgaataagcacaataccaatgacaatgagcctaaataaactatcaaggtgatattttattggagtttttacaccacatactgttttttttaatttatttcttttatactgtcgtatggcagaatttacttttttactgtattttttatgtactgtatactgtgtacattaccattatatgttattttgtcgccattattttattttctttattttttttattattttttttaaatgttaattaaagttgatgttgacctctaatacacattattatttatgtttttcatttttttaaaaaaaatttgagcaatagcccattacatgatctcctccttcccaagaaaattgtggcagtttttttttaaaaaaaatgatgattaaagttgatgttgacctctcatacacatttttatgtgttttttatttttattttttaatttgagcaacaacgcaccacatgttttccttcccaaaataatatatacgtgtttatatatatatatatatattcttcttgagcaaatcactaaacacacacattatttattttccaatgtatttaagttctttctcccatgttcatcatctttttcattttcttttttaggccaagtctacaacattacccaaataaaagctaaccatctccttttgtagtaggtaactaaaaaaaagaatatgtgaagaaggaagaagaagaagaatagggaaagataagagtgtgattatgtgtgtaagagagatggagagcttgctatgtgatgaacttcttgtagaaatctttcaaaaactc

SEQ ID NO: 241769 - DNA, 830 bp, Cannabis indica
tttaagtccaaattcttgaaagtaaatcaattaccatgactctgagaccagttgttctaatatgttttactaggacctatatttaacaagtatgtttttttaacatcctaaacatgaacttctaaaacgatatgaaataaacacataaaaggtatgagaaaccttacattggttgcagtggaattaaatgactcattccgctcagatctctaaccgttgtatcctttctgtagcagagtatcaccaaatctgagaccaaaactccttttgttgtttggattcttcacagtcttacaactatgattgaggactcacttgctatgtctgggcatgtactcaattactaaggctcgaatttggtttgtgaagaaggctataagatttcgaaattagaagaagaaaggaagaagatgaagtctcataaacctagttgtcaaagagaaagaaactaggttttagtttttgaagcattagttcgataatgagactatagctttccttttataataatttcacttagggttagggttgatttatttagaataaaaaattgataaaaatagagtaaaaatagcacctagtggccgaccatgaagtgggccctacactagttagatttttatcatttttctcaactattttatctatttttcacaaataccatttttttgcacgttcaaccctataaatgccaaaattatttcttttatagttaaaatagttatcaaataaaattgtcaattataatatttattaattagacaccataaagtctcttaatgaacaaacaaaccctaaaatcctatttcttcacaatcaagccatatctt

SEQ ID NO: 241770 - DNA, 1267 bp, Cannabis indica
tgattaactcataatataaatataaactgtaattaattaccattagacttattgggatattacaaccatcccctccttataaaaatttcatcctcgaaatttatttaaacaattcgggatattacccccatatttatgattctaattctcaaattgctgcttctatcttgctgtttttctatagcactttactaactagtgggattgtctcatttcatagtacttcctttttctagtccaaaacctggacaagacgttcttcccatataataagtttgtccgaagtttaatatcatcacagctcataatatgagtcaagtttgatacatattttcttagcatggagacatgaaacacattatatactccggacaacgcagaagttaaggctagctaataggctacctagcctaactactttagtaaacaggtatctaatatttctcttgtaccacacttattaaggtacctaacgtgtggtatatttaattatcacttttgaataagaacctcatcagggaagagattattttaagataatctatcctttattaaatatgctcacaacatgtttctaatattccattgatcttctcaggttacccacctttcaagagtaaaacatcatactatttttgcttgaacctccatagttctcaataacattctttaattcttaacatcatagccaaatatatcaaccttagaatttcacaagattagactattccttcgtataaattccatatctttatttattgtataaattgtctatactgatagacaacatattaactctatacatccaaccgttactactcggtcaaaatcataagatcccatagtacataattcataattatgtctttctagtccttctataagatctcctaagctgatccactgacttaacttagtaacaagttaagtattcatttctgatagatattcaattaaagcatttcttatttccgcctacttacatgtctcaataccttgtaaatttctgcttattaacatatcacttcctcttaataatctctggaatgactatcgattctgcatcctaatacgaatcattctagcctactttgtcctcactcatacacttcccgaggtgactccccgaaggatttcccatcttgagattaccccaagttaagtatgcttaactccaaagtaagctgatggtgggttatcagaaagtagatgcttctttgttgttcctaattgtattcttgctttcattctttcattataaaattca

SEQ ID NO: 241771 - DNA, 1420 bp, Cannabis indica
ttattattttttgaaaaaaaaaataaagatgcatattaggattttataccacttaaaagggaaacaaatttaactggttatcttaattttacatgtaaaaatattttttttctttttcagaagattttttttttctaagagaaaaaaaaaagaagaaaggtgtatttgctatatgttactgaggattttatatttgatttacttttttgaaataatacttcatatattctttttatgtttttaaaatttaaataattacttgttcggtttatctttctttaatgttatagaatttatatactctttttttaggaagaaaagattatatatgttctttggattaagtacttagcataatagttccgtaaaaaaactatatattttaacataataggatttcatacaaatttaaaaattataaattttacggaaaatagcaacataagtccccaaaatttattttgatgtagatttattctcaatcttaaaaaatagtagtaatagttttattttagtttttttttttttgtaagtctgttagtcctcatgtcaaatgattcattaactatttctaaaagtaccaagtgttaatactaagtaatttaacagctttgtttgtaattcttaaaattgccacatgtcaaaaaatttattggtccacatcataaaagtttatttaaaaaatcatttaaataaaatattataaaatatttgaatatttttttttcatttttttgttaaagattaaaatattatatatatataaatatataaattacaaacttttacgattcttcacacccacctttcttggtagtagaggctttacatatagataatcttctaccttttaaaaaaaattattttataaattttcggcttacttagtgggccatataagggtggcactgtattaaataacaaataacattatattttgataaaatgttgtattgtattaatcatcatgactttatattttaatacaatgtgaatcgtattatttcgtacataacaaattatttgtattagcttgtattatgatatttacaaagggtctggggtcaaccctggccccaaacctcggacctcaaccctaaactcgaacctaaagcccgacctgaactcagtacctagagctaggttggaccttagaatcggacacagacccagacccagcctgaacctcgagccaaactcgagaccgagacaagaccccggacctagttcggaccctaaaacctacccaaacccgagaatcggacttagaccccgactcgaacccaaaccctaaccctgacccgaaactcaaagttggaccctggcccaaacccagacccaaacccaggccctagacctcgagtctgactggggtttcaagttcaggtccaaagtttgaggctaggtttgggtctaggtc

SEQ ID NO: 241772 - DNA, 667 bp, Cannabis indica
gctgggtcacatgttcatactctattgcttacatgttaaatatccatcttaacatagtgtagatgggtttgatattagcaagtaattgtaacagtaggtgtactttgataacatgtttcatctttgttgaattttctaattttacccccttttttcccctttatgggggtctggaaattgtgaattaacatagtcttcttacattttagttatgtgcgtgacaatttacatcattattttttttactagagataccatagctatttgctaattgattctttgctcttctattgtagatctaccaattgctaggaaagcttcgcttcaccgattcttggagaagagaaaggacaggtaggcatcgaaacataatctgcaatatatatacatatctttattaggcttcattagctacacccaaccaattttttcgttcataataatagcatcatagcatcatggtggggctttgtatcatgatattcatgagcaaaaatgaaagtagttattttcttcattggacttttgtgtttatgtatggttcatgggattaaccatttgtttgccttttcgtttacagaatcaatgccagagcaccacaccaaatcccagaagtagctgcatcaaagtcaactgaaggcaactcatggctaggcttggctgcaca

SEQ ID NO: 241773 - DNA, 862 bp, Cannabis indica
attttcaatcacatattgtaaacttaacgacctcaaaatccctgaaacaattgtgaaaatctaacatctataaacaaaatcaaagcccttccccccttattatagctaataaccctaataaatcctaaacaagtctatatgatactatacactgttgagttaatacaaataaaagtgcgacgccattcatacagattcaagtgaggaaagaaaaatcacttcttctacaaaactatacaaaagtaataatacccagataccgaaaaacaagtcaaagaagcatatagtagatttagattatacgcaaaacccagaaacaaaacaatattataaacaaagataaacggatacataaacgactgagtaatcaaaatcaaacaatagcatttggggatgtataagatagggatatttaattctacgagaaatctaaagttggattgtaaaccttaaagattcgattaaagagttgcaccagcaatgagtactctcttgtaaagctgaagaaagaggttgaggtcgacaacttatatacagtcagttgaggtctcacgctctgagtctctctccgagacctataaatacgtgcgtgctaggcccgtattatttttttcttaataaaataggattttattaaatcaaattagatgataaaaaaagcatctacaacataaaaggaacctcattctttcaacgcaagtcaaaaataagatgagacacttttgttaaagaataattatgatccagttagtttggtttcttaatgaaaatatattttccttcaaaaagaaaaaataaataaataaataaactatgatccagccccattagcggacctcaaaaaaaaaaaaaaaataaataa

SEQ ID NO: 241774 - DNA, 727 bp, Cannabis indica
ctcgcatctatgactctaactccgaagtcgcttaacaagggtactgaatcattcttctgatatcaaaaattcatggttgaggcaaccaaggtcaaaggcttgacaaaagaaggtcgatgtacgactatacttggatggatcttaccgtcgagtgagttctagaaagatataagaagaatcttaagagcaacatgaaggagttccttgagcaagttgatggctttgtaaagtcaaagaagttctccggcaagcccagacaagagggaaggtcaacgttgaacaggaacaggcatcatactgccctaagtgctgtctaatgtgtcgaccagtgcaggacctctgccaattctccaacaatgagaatattggaggcaagcgcaacaatgatggctctgactaaaataatggcaaaaaaggaaaattcaacgattcccttatgccatgaagtctaagggagaaggaggagaagtgttcatgcttcactctcctaccaaaacttccaaagcaatgcatgccaaccggccatggcgacaggtgtcaccaaaacctgaggcacttagccgaccactcaagtgaaccactgaggctcagtcaatataacgccacctgtcaacctagcatggccataaatggccaagctctcgcaagcctcatggctaaatataacagcatatctccccaaatctctcaagatttgggagaatagcaagtgccagagaagaagcaa

SEQ ID NO: 241775 - DNA, 1364 bp, Cannabis indica
aaataataattgatgaagattctaaaaaaaaaaatataacaatttttatataacatgcataatgttaaagaagaataatgtttaattataaagtaagaaaaaactacactatttgaaaaatattagaaaaattaatgttttaatatacatataatgtttagaatataaataaatatgtgaatttgtaagactatataaataaataaattcagtatataaaaaatttatagcaacataataatagaaaatttaatcggcaatacaatagagtcataaatttttgtaaatgacccttgttattgtataggtgtaacaaaattttgatcctgaacaatctaatattataattgttgggcaagactatggtaggacctaacaaaagtaccttacctgtaggaaacttttttgaccattgattttaaatcatgtggttatcatgatgaaaggtctatactcttacgataggactccttgtatataattaaaacttcatacatattataataatatttaattatattttatattaaaaataaaataatattaataattaaaaaattaatttttaatttgatttattatttttttaagttaatttgaattatttttatatagctatatatttcctttaaaaaaaaaataattttacttacaaattttgcaatcaatttttttatacttatagtaatagttaattatacgaaattgattacttaagtactttttgctaccaatttatttacatacatagttctactataattatcttttaaattaagatgtttaattaatacccacgtgttatgcttgcgaaaagacatataacaaatacaaatagaatcctgaactgattttttattaaaataaaatttaataataacctgatctagaggtgttatgataaaattggttataatttctacagttgttctttcttataaaaattatctttaagttggttatattaaaaaagttatctaaaattgagcccaaggtcgtatttttacaattttagaaaatcaatgtctatttatcatttaataaaataaaaagtctaatcagtaatttttacaaaacacaaaatctaaaacgacatttttcatattattattagaaaaaataattagaataaacttaataaaaagtaaaaattttgacaacaaaaccaatataaaataacattttaactaccaatgcttaaaagctcatgaaccaggcacagcctacaagcccacatgtcttagccaacctttcttccacgttggagtgacacaaaatataatattattaataaagttggaaaatatattaaataacccctaaaaaataatattaaataatattataaacaatatctcatacaa

SEQ ID NO: 241776 - DNA, 724 bp, Cannabis indica
tttttacctattcggataatttttccattgatcagtatgcaaaactgtatgttagagaaatagtctgtattcacagtgtcccaaagtccatttctttttatagggatccaaagttctcatcaagattttaggagagcttacatcgagctatgggtactcaactgaaattcagcacggcattccatcctcagacggatggacagtccgagaggaccgttcagattttagaagacatgcttcagccatgtatgttagattttgaaggatcatgggtaaagtaccttcccctgatcaagttctcatacaacaacagctattgggcaacaattgggatggctccttatgaactactttatggaaggaaatgtagatcacctattcactcagatgaaataggtgaaagaaagttcttaggtcctgaggctatccagagaacaagtgaggcagttgataaaatcaaagtgtgaaatgctcgcaacttagagcaaacagaagagctatgttgatccaaagcgacgggatgttgatttccaaattagagatatggtgcttctttgagtatcccctatgaaaggtattaagcactttggtaagaaaggaaaacttatgccgataatcattggacctttcaagatccccgagaggatagggcatgtagcgtacaggttggctatgcctccagcgctgacagctatacatagtgtgttcaatgttttgatgcttc

SEQ ID NO: 241777 - DNA, 1726 bp, Cannabis indica
agactgcaaatggtcagccgcccaatccccggtcacgagttccacttgtgggcccagcggtaggtgagcagaccttgtttggtaattcattaggaggagtcattgatgatggttccaaccagatcaatggtgccgctaaggcagccaggcgcttctgtgttcgaaaggttagggacaacccatgacctaatgaatgatctaaacagaaggaggggagcagatgatcagaatgttacgacaatcgtgcaacccagagcccgtacttaaatccccgctcagaaagatgctgacgtaatccaagttgaccagaatgccaagcaggtcagcccagtcgtacaagcttagctagacgaactgaaaaatttgtttcacggcatggctggacaaagaaataatgatcttgacctagaccgagcacgcacaattcctttctcgccaaagatcaatctcctgccactgccccacaagttcaaaatgccgacgtggaaaatgtacacggggagagaagatcccctttcccatctcaagtacttcaaaatgcaaatggatttccaaggggtacgaggagatgtatgctgcagaatcttctttgccactctgtcagaagccactcagcaatggtatttcaagttggctctagaaagtttagttcgtggaaaaccttctcttcagaattccatgcacaattctcctcctcgcgccaactcccattgcatttgggagacttggtcgaagttaggtaacgactacgcgagccactccgagcatacatcagcagattcgtgacagaggcgaccaaagtttcacgggtaactgaggatggaaagttatctgcaatactggggggcatcgatgtcctcggtgaactctggaaggatataatgaagaacaggccagtagttattcaacgagcgaaaggtgaacaaaatcctggcaagtcaaaggctccttcaactggaacatccgcccaacttccccaatacccaaacgattcaagctcaggttgtaagcactccagtaacaaccacaagcaaaggaatgggatgaaaggaaagtttactggaaaatccgaacaagctcgccaggagaatcatgccaaatacacttcattcactattctaactgaagatatagaaagtgtatacatggcaactcagtcgctggccccgtataagaagcccgggcccatgaagaaagatgccaacaaaagggacatgacaatgtttagtcggttccacggagactacgacttcgacactaatgaatctacaacttgaagcgggaaattgaattcctaataaggaaaaacaatctgcacctgtaaaagtatgttaagactgaccaaggtgagaggaacgacaacagccaagatttgctacctccactagtagatggacacctgcaagtcattgttggaggccctcacattcctggagattagggtaaagctcaagagaggtgtgcccgaatagtggagcacgagcaagaagaagtcatcctggccatggaagaaaggaagcccaaagttccacgagcaggagagccgaccataacctttaaggatgaagatgctattaaaattagatttttgcacaatgacccgctggtcgtggaagtccagatagccaataaaatggtggcgagaaccatgatcgataatggaacctcttccaacattttgttcaagactgcttacgaaaagatgggactccaactcaaggatcta

SEQ ID NO: 241778 - DNA, 1058 bp, Cannabis indica
tttggtaatgatttctcatgaatttgttattttgaaactgagatccgaatgcatatatatctttaatatgtttaatgttcaattgtaatttactatttgagtacctttatattgttttagagtaataacaatgagatgggtaagaagaaatctacttgaaaagaagattttagttatttaggtaattagtttatgtgtattttatttttattttaattattttacgtaatcgattttttatatcaattttttgctaaattgtttgatgtaacaggtttttgttatttactttataagtaactagagaattaagccgcgcttcgcgcggtctttgtaatttttttttaaaatatttctaattattttttgtttaatgtactaattcaattaaatttaactttttttacatattaatatgatccaatacaagtattaataaaattttaaaaaatattatcacctaatccaatttatttaagtcttataatccaattctattaataatttgattgatttaattttttaactgaatttttagttctagaacatgaaagacataaaaaaaaaacatataggaaatactacataaaaatgaagcagtttcaattatttatgtaatagttgtactacataaagttatcaactttttacttttaatgtatataatttttgctttaaaagtagctaataaattaaaagcaacaattaaaaggtctcaaaatattctacataataactaataagatgcattttttttctaagattttctaattaagtgcgaaatagcaaaaagtaataaataaccaataatattgaaatagaaatagtgtatatataaatataattataatttatgtagttatttgaattcattcttaattgaaatttgaaaatattatttgttatctgatcagatccaatacaaatttaattcacttcaattgtaattaaatatctaattatatataaaattggattagtttgtatgtaacacaatcataaatagtttaatcaaattacaataataattaagattatgtacaactcattgagatatt

SEQ ID NO: 241779 - DNA, 1086 bp, Cannabis indica
ttgtccgcgtactaagaccaacgccgtgttgggttctccgggaacgtgtgttccgtgtactagggcgaccctcaggttgagtcctcttggaatgggtggtccgtcttgactgcgggttggtagaccttctagagcccatgggctctttcccagaatgatgattagtttcctcatgtggagtgttaatgttttctggattttcagccatgatggaggtggtttttctgagccttttcacagaggctctcaacaaaactgttaacgtagattttcgttaaccgaatttgagcctcacaatagtgatttcacacagaaaaataaaagctgaaaaaaataaaagtacgaacacaaggttttttacgtggttttgcagttcaaattctgcatagtccatgagtcaatcttattcagatttctgattgtttttcagggctcctcttgtatgagtttttttcatccccattttcatcttacttgccactatctataattacatagtgaacagttcattacaaagtggactgtaatatgtttacaacaatcatccctaaaatcatgggatttgattacatatcacgtagtgtaaatgcggttatgatttgaaaatcatatagcggtgattttctcgcttttgccaggtcaaaatgatcgtgaattaaacacgtctttaattattgtatctggagttgtcttgacagaagcttggttctagtgatctcaatagcaagttggggccatttttccttcggagatcgacgatgcatgtcttgtgtcgatcgcgattcttgtttacaaagtgttcttcgaagctcatttgaatattagcttcttaacttgcagggttgtgagcctcgctgacgctaacgggatgaagttataggaagtcttccaatagcgagaagggcacctcgcttacttggtctcgagctgatccgactattgcatttagtttgtacattgcacactacggactttcgcgattgatatgtgtattgtccttgatgcctcgctattagcattcagcaacatatggtttctcgctaatatactaagcaccagtttctatattgatttctcgcctaagac

SEQ ID NO: 241780 - DNA, 804 bp, Cannabis indica
tcaaaggatccatgtttaaatcccaagccttcccggagtactcactgcgagaaaaattgtcccggtcctcccttaggacctttttcaaggcctccacctccacgttccccttagtgtattcttccatagcatagttatgcttagcaatctagagttgttgtctttcctcgtcagtaggaacggggtcaggaaaatactgggaggaatagtgtactcctccgcctcaggtgggatccccaaatcaaagctgaggcccggagtgtcgactctcctgggcttcttggcagcctcgacctccaccatcttgcctttgcattttcggtccagaagggtgagaatctcgccctcctcttcctcttcaacctccctgtcctcgtcaatcagaacaatttggcttaaggggaagctagaagaaggattcccaaaagtcacctccaagtcttgtgtttgaggctgggccaagtcgggactgtaagtttgggcaagggtagccaaaagctcgtccattggcctagctgcttcaagaaacaaacaaataattgttagaacggtgacgagaaactgtgcatgcaggaacaaaccagtaaaactaatcctacccagacaatctaattcagccctagcaaagtcctgcactaaaatactggcgttgtcatccccaagaaagctgtccgaggggagaaaccagctagaagacacgtgggctgaatggtccagagggataggtgcaggaggcccgaaccccatccgggaccggcccaaaaaatgacctcagttggaaaagtaaaaacccttggcatgatc

SEQ ID NO: 241781 - DNA, 660 bp, Cannabis indica
gtgacttgtcagagacggatcttcgatttattagctttaccacagggaggagagggtgcattggaggggagctgggaacgaacatgacagtcatgcttttgggaagactattgcaaggttttaaatggacgattcctgaaggaatggagagcatagatttgagtactgaagaaagctcgatgtttaaggctaaaccattgtatgcccatgcaggacctcgcttgaatccttctctctatttgtcattatcatcaacattattggattaggttattttagcttcttgttatataaatattaatgatctcctttcctaagttaaacatacaatattaataattagatgcagctaattaaataattgttgttgtacatacttaattaataataagctaagaggtcatatgttatttttgttgtatattggttaaatataataaaaagataagcataattatggtgctttatacatttgatagttccacattaagagtgtgaattttgatagtgtaaaacataattattaattatgtcttttagttttaaatgatcttataaagtgtataagattactcaaaaagtttggaatcgtttggaaatattgaagaggacatttacatagatactttgtgtccatgtgacatgtgacctagactaggc

SEQ ID NO: 241782 - DNA, 602 bp, Cannabis indica
gtgtcttttgcatttagcggacccaaatcatccttgaggttcgtgccaattaggttcttaatggttccttaatgttttgtgccaatcaggtccttgaggtaatttggtagttgaggagctctttgtgccttagcaactgatggagcaggaagcttagtacgcccaatgtgctccactagtaggaggtgcaatgtgccaatgtgcccctggttggtggtgcaatgtgccaatgtactccactggtaggaggtgcaatgtgacaaagtgttccattggtaggacttacatatctagaacaaaaattcatgcacaattctcttggattttttgagggataatatttgtcccccaagtttatcataatttaataacattatgatgaacttgtagaaaaaataattcccgcgtttttggactccatacctgtaaatactggtactatcgagaataaatatgtagaaaatcactaatatttctaagcatcctggaaaatatttataactatttaggctgtgggcaaaatgaaaataaaaataaaaagttgaaataaataaataaataaataaaggctttttatatatatatatatataaaatatgttt

SEQ ID NO: 241783 - DNA, 626 bp, Cannabis indica
atttataaattttagtttgacttttttaaaggaattccatacaataattattaaaaaaactcaatttacatatataataagcatatatatattgtaggagggccatggcccctataatgtataaggtacgtccgccctagttcttcatttgattgttgccaaaactttgtattcctaactctccaaatttgacatatcattgctgcacatgcagcaaacagcacttgtcttgggaaggctgatactttcttcttctctataattcgaaccagttcagccaagttggttgtactagtcttccaacccagccaagttttaatctgctgcaaacattcactagaaaaagagcattgaaagaacaaatgctcacaagattctgcttcacccgagtatagtaaagaagaaggattagttgctatttgaaatctgagtaaacgaaacctgattatatttatcaactagttaaaaatttaaaacaaaaaaattaattctgtaaaacaactaagataaaaatttatacacaaaaaccagctaaataaaaacaaataaatcaaaacctggtttcttcaattaactaaatcaaaaatcattttccaaaatgattaaattaaaaaccagttccttga

SEQ ID NO: 241784 - DNA, 1342 bp, Cannabis indica
aaaaaaatttgagagagaactagagtaacattatttattctactctactaaaaaaagaagtgttttaatttagtattttatactaaaaaaaaaagaaaaaaaagaaaagaaaagagagaaacattatatttctttatatataaataaataaataaaaaataatatacatacatatttatcgttatacttttctattttagtagttagttctttggctcttattttgtaagtgtttcacataaatcccaaaggttatttgtcatttgaattctaatggtttgatgtgtctatcttgtgatcaattcttattcaaattgtttatcctaaaaaatatttatcctttatcatttgtgcgttaattgctacatatccaactccaaaaaaagagtgtcactctcccaatacaaatactttcaatacccgtgaggaaattagagttgaggtctttacacttttgagatttttcgatactatttgtgttaatgcttaaaaaatagataaaaatttggtgcacacacacacacaactctggaattacaactgaaataacaatgatagaaatttttgactctctaccaatattttgaaaatgcttggatggttttgcttagtttgacttgtttattcaactcgattattatttttcttcgcttgaattgttaggtactagcaataagctagttgaggattgtgattaatagtgaaaaatatacatttagtaagcttaaagtataagataaattaatattttcatgaaattaataagatatatttttatgttgaaaatatttaatttagatttaatttattgcctttttttattgtaggaattaaaattattgggagttttaaaaagaaatgaagaattgaagaaaaaggagtaatttctttaaaaagaaaatcaaatttcggctggaaagagaagccactcgcgcacaagccaaaagcccatcacgagccgtccgatcacacatcaaagggcccagacgggcgcgtgtggttcacggccagacagggcgtgtgaagcgcctgtctcctcctgcccagcctgccagcgccagctgcgtgggacccgcctgtcccctctctctccagcagctcctctcctccagccatcacatgagcgacacttgtccgctcctccttcaatcagagtttcagcagcaaatacatgtgctctttttactatttctcttagccaataaattgcacattgtatattttaccattcgacccttctcatatctcacctaccttatttatgatagaaatttctagaaaaatattaaaataattaatttattaattattttaattcactcactttggctataaataggga

SEQ ID NO: 241785 - DNA, 976 bp, Cannabis indica
agtggctgattttattctacctaatgacagacatgtgcttctgttttttgaatcaaaacatattacacaaacattgaaacgaataaagaaacttataatatcatatagtttaatagagaagtctaactgaacaaaaaaaggttttgttaaattattgagagtagataataaatagtcaaagtgctgttcatattgtacacatgtctcatggactatatttataatgttatatatattaaggtaattagcggcgaaagcgcttacggtttaattttacactgaattttctgatattatttttatagctaatactctcttaatttcacttcaatttataaatttgagtgtctgttaaattttgttattaaatgccagctaacttatacatgtgtacacaatgataatctcaactgttgttaaaaaaaatgataatctcaattgacattcaattgttaaatttaactcatatctcaaatttataatcaaaagtaaagttaattaaaaacaaaaaaagatggagagttttgcctctaaactttgatatgtacgaaatcatgtcccttaaacttttaaggttgttgaaaatgtccctgaactatttagattgttgattaatttaaggatttttatctaattttattcaattttattatttcagtaattgtttatatactaaactattctccccaaactttaatatctaccaaattatatctagctttgacatgtgctaaatcatggtccctgcactactatacatgttagatttttttattaaaattggaaaaaggtccttaaatcagttcaggggtattttaacgaccttaaaagttcaaaaaatacgatttggtacatgttaaaattcatggcaaaaattctaattaactattttttttttatataatatcacaccaaatataatatttatttaattatcaaatctcttaacatgggattaaagcttagtagctactaa

SEQ ID NO: 241786 - DNA, 1132 bp, Cannabis indica
aatctatgacatagggaaataaaatttctctgaatatgtataatttttctaacttttatgctaacaagtaatatttttattccaattgagaaaaagggaacaaatagatttgtcaatggtatgaactacaaatgtaaagcttaatatccttataagaacttttttatgtcataacaaaaaatttagatataattaaacattgatgtgtcttttaatgagaacaaaaaaattgaattgtttttgttgagatattgagaattaagtaattttgtttttgtagatggttttcacaacattatttcttcatattttgtcttttgtctattttgtttttgtttttttgggtccaaatagactgacattgtgcagagatatgttcctaaaactaaatagatactagtcatgaattttattctaaaaaaatggtagaatattaaatcaataatgttggtaatgaaatttaacagattaagtgttataaaagggattaaagtttgttctcactttgaaaagaataagcattgtattctactttttattaacatgtcacattttaatgaatgattagtattaaattgaaggaaagaaaaaagaaagtgcccaaaccatcatataatgatggaaaaagaaggtttctaattaatcacatttatttaaatatttagtttagtcttcaattgaagggtttttatattttatatatatatatataatgaatcctagagatagagacaccataaaatagatgagtggatttagaagtgagttgagtttaaataaaagtaaaagatagttctatagttttcttttacttttcatgctatcttcctttaccctttttctttttaacctaatttcccccacaaacaattattaaccaactgcagacataatatcaaaggagatatcattttttggaaggaaaaaaaaaaggtaaggggggactaatttatatttgttttaagaaaataaaaaaaaattgggtgaggggttaatttatttataaataatgagccatatttaattaaaaaaaaaaacatatcttattttatataataacccttctatatacaagtgccttcatgctttaagagggttgtaaagattaaaaatgagataggtgtaatgtaac

SEQ ID NO: 241787 - DNA, 1109 bp, Cannabis indica
taaaaagaaatgcagatggctcactccaaagactcaaagcgagactcgttgccaaaggatttcatcaaaggccgggacttgactatagtgaaactttcagtccagttgtcaaggcttccaccattcgaattgtactcaccattgctgtctcgaacaactgggaaatccgtcagttggatatcaacaatgccttcttgaatgggcaccttgaagaggatgtgtatatgtatcgacccgaggggttcgaggacccttcaaaaccaaaccatgtgtgcaaattgcacaagtccctctatggtttgaaacaagctcctcgagcttggttcgacaagctgaaaaacactttgctgaattggaatttcaagaactccagagccgacacttcccttttttactataaggatgaaaagttgattatctttgtgcttatttatgtcgatgatatagttgtcacaggaaatgttaactcaaaactccaaagctttatacaacaactcaacaagctttttgctctcaaggatttgggacaactccactactttcttggcattgaggttacacgggatgacacaggattgtatcttacacaaagaaagtacattgaagaactcttggagaaaaatgatatgaccaacctcaagccatgtcctacaccaattgccacgggaaaagctatgtctatcaatgatggagagaaacttagcaatcctactgtctaccatagcttaattggagggctgcaatacttgtgtaataccagacctgatatttgcttcgcggtaaataagctgagtcagtatctcaaggcaccaacaacagttcattggggaacagcaaagaggatcttgagatacctcaaagggacaatagattatggtctccacatctgtcatagtcacaagctaaacattgctggtttttcagatgccgattgagcatgttgcatagatgactggaagtcggttggtggatattgtgtgtatcttggagacacactagtttcatggtcttccaaaaagcaagcggttgtttcaagatcgagtccgagtccgagtatgagctttggctcttgtcactgctgagattacttggatcgaatcattattgaa

SEQ ID NO: 241788 - DNA, 599 bp, Cannabis indica
ttattcaaatttgaatagcaagatttatcaataagataaaaaaattcaattatatgtgttataaatttaaatttgtgtatagtttaaaatataaggtatcatgtaaatattttttaaaaaacagtatatcaatttgtattttgataaaacacaaaatattacatcaatgtattctttttttctattaagaggatattacacttactatgagattttaaaattcttaagataaatatgacacatttaagtttgaccaaattatatgattattttttttaaatttttaggtctttttatggtatttgatatgccatatatatgtaaattagattttcaaatctcatatttaatatttgtatttgtttcagtagttttatttgtcactgatgccgaaaaagtttccggagtttgctacttgtgccggaaaaatcaccggagtagcgctcggtgccaaaaaagttgtcggagttgctgtcgacgctagaaaatttgtcggaattagcattatcgccgaaaaaatcattgaaaaaattaccaagaaactggtttcttgaagaagaaaccagtaaccattcttcaagaaaccagtttcttgatga

SEQ ID NO: 241789 - DNA, 1186 bp, Cannabis indica
gaatttttcccagtaattcaagtaattttcagctagttgttagtgatctcaagccaaggtatagtcttttaaacttctactcttgttttcttgaattttaaaaaatggattttttacatgaaatagagattttagttgttgttgttgctgttgttgtttgatattgttttctgaagctaaattatgtttagatatgttgatttgagcatgttttggtaggtagtttgttgattgagaaagctttgagttttagaactcaagcttggctctttaatggtgtttttcaattttgagcttgggtagttgttctattgcttggaaaatgtttattagggtgtaatatgcaggtctggaatttttggttaagtttggaattgatttggttgagctttgaatttgtttggattttctggggaaccgggtaccggttttacagctacctgtaaaaccggttaaccgattttagcagctggggttcctgaaaaatttaggttgtcaatttgcgttagtttcaggttggttaattccatactagtttaaggtattgatatattaagttgcagtacaaaggtttttagtttaaaacctaagtctcggttgtgatttagcatgttgtttatccatgttgttatcgatgtgatttacgagcctgtaatttgccgagctattgctccactcaggttggccgacacacctgaattcggaagtgaggtaagattagtataatatcatgcatatattattacatgtttagcatacatgttgtttatgcctgttagattacattgatagcagtaatggtataattagagttgtactgattgctgataaatgtatgctggctgaaatactgatcgatgttgtcacattaatatggctagagtatgactggcatattgagtataggctgacattacggtcgatagtattatcgtatgaacgttctagacttagtaccgtgacacggggatagggttatgatcgggtgtataggcgcaaggttataaaccgggatactagtatgttatatgttatgcttttcttacggagtctatcgactcacagtgctatttccatgtgtaggtaaaggcaaggctaaagctgaggagctgtgagagcgagcaggtgaagattgtacatgtcaaggcttttgctgaatagtggctaggcgacaaaacttttgtat

SEQ ID NO: 241790 - DNA, 600 bp, Cannabis indica
gttcattccaataagaagaattaccaaggaagatcttatcagagccaaattatttacaaagtcatatacttcaagaattaattctcctcctacttttcatgtaagcatattttagatttacatagtgttttaacaaattaaatggcatactctataattgaaatataattatattttgaatttgaatataatagcatgcacttgtttacacatccgatccaaccaagaaatacaatggaggtggaacatttgcaagtttttacacactatataatgtcactggctcacaatatacttttggtcgaataaaattgcaaaatggacttgatatcattcaagctggttggggagtaagttttttttctcttcaatattctttagagctaaaaataataacgcttttttgatatactataattttttagaatatttgttcacttattaatttgttgtactatatattattcattaggtaaatcctagtgtatacggggataataagactcggatcttcatatattttcaggttaccctaattttatattattatttaagggtttttcatattcgttgtgtaattatgtgtaactcatgtatcaa

SEQ ID NO: 241791 - DNA, 712 bp, Cannabis indica
ttaatacaaactcacatctgtttttattaaaaaaaataccaaaatatgaaagaaacctagatcaaattatttattcggtgttcatttagaatgaaataatcccaaatcactttcaaaatattacacagtgtacactttgaacaaaataaacctaaacaataaaaaaaaaaactcagatctaaagtgtacactgtcaaccacacactgtcaaacattgctttagaatgaaataatcccaagtccatgtttgaactcaaagtcccacactgtcaaccacgaacatcaaacaccaggcttgtcgaacccaagcccttcaaacacgaacgtcgatcgtgtaccaagaaccacaaaaacattaaaggcaagacccacgaggaccttcaaacatcgtccacctgcatagatcagagacaaagagagggagagagaaagataattaagtggacaaaaaaataaatacaccgattaagccagcattatgggtgaacttagtgggcgtttgggcagcggagacgccaattgtggacataccatggtagagcagagggagatggcctgggctcggcgtttggaagcgaccgttgtccgtcgatggagctctccttggccttgaagctcttcatcttcaatggaggggctactttattacagattttgaaagggagaaaaaaggatgagagaagatagatgtgagaagagagagagagagaga

SEQ ID NO: 241792 - DNA, 2358 bp, Cannabis indica
tgtgtttgagagaagaatgaagaaacgcaatgttaatttcttttcgatggtggagatagtggggagttagaatcgcaataagagtttgagaagaagaaagaagaatcacaatatgattttgatttcttgcgggatggagttcctaggactaaaaatcgcaatatctgttttggtttgaatggaaatatttaacggtaacagaatcaaataataaaaaacgttaaaactaagaattgacgttacatagccacttttaatatataaagatatttacatgaaaatggtcacttttgcttttattatatggatatattttttgtttcggtatatgtagaaattataattaaattatttaataagggacattaattctaataggtatctcttaatattttagacaatttatagtgttgaaaatataatttaaacaattagttttgtgtgtttattattatttttttttctattaaagattacaatatattacattatataaaataaattgggatataatctttaggttaccaaacaaccattacaatagagaactaaaagtaattttcctaaccaataatctctatattaatttatacatatatgaactatgtttataatctaaatatacatgcacaattttttttttcaattaataaattcaaaattctataacctaagaacgacctcgtaatttatttagcaaaataaatggtgagcttttttgtagttcattaacaattatatgaccctcatcaaatacacacataagtctccattctctattgtcatcgctaactattatcaattaccttggcttgcaaaagtcgatttagaaaaaggtgaactaataagatcaaaatacactataaaaaaactaccactttagttgaaaactttttagtcacaatatacttttttttgtgattaattgtgacttttagtcacaacaaaatgttacttgtgactaaaacataatatttagttacaagttgttaaatttacttttagtcacaacaagtattgtgactaaaaatacatttagtcacaataaattgtaatttttgtgactaatatctttagccacggaccttttagtcacaacatataggaaaaataatttataattagtcacaattttcttactcgtaatcacaaattttgttgtgactaaaagtaagattttttgtagtgattcaatataactaaagtagaactagttaaaaagaaacaaactaaattctaaaactagcaacaagtaactagtaaccaaaagttgtaacatataaagttacatccgtccaagtttgactctggcaaatgagtgcagtaaccaaaaactctaagagattctgacaagattcagtatgtcgtatccattattagtgacctcctaactttcacataaacccaacaagtaggaattcaaaccatcatcttgttgattgaactgcaacacatataacatatcatcaacttaaacgatgataactaaaatacattgttcaaacataaaaaatagaatgatgatgagagctagatgttatccctcaaaaaatcgaaggcaattggtgtttaattttctttgaatacgggaaagggccataatatctcaacaccattttcgggaccttactcagaggctagtgcctcaccatcttgacccaatgggtcctcccaatggggtcctcgcaccctcaccaccaatcaggtcctcacaacgggatcctcacgccctcactctcaatgggatcctcgcatcctcaccaccaataggatcctcatgcccttgccatctcagcccaaagggggtctcactctctcaccatcgtctcggaccacatgggggtcctcacatgccatcaccatggcccaaagtgggctcagtctgcttgtcgtcacgacccaagagaaggtcctcacctcaacggcacttgtctctcacgactcatcaacatgacttagaagacatatacatcttttatcattttttttagatatttattttgaaatgtgattttagtattttaaacttaactcgactatagttatgggaaggtgctcctatcgttaagagatttgaaatcctagatgaaaacctatataaggagagtgaagtcacttgtaaagggagcctaaatttgatactcacaaaatcatactcacgagctcctattctctcattctaaaaactcacttgaggattgaactcttggagaactctcatcaagcattgagttcaataacactccaaaatgcactagcctatttaccactataaaaatccccgtgctcatctttattaaattttcttttctacaaactagtttactttgtaaactagtgcttgtgttcatcttgctt

SEQ ID NO: 241793 - DNA, 999 bp, Cannabis indica
ataatatgtagaatcaaaatctacaaaaaaaaatatgaggaaagaacctcagaactatccagatcgtggtcgccggcgtaatcgtcttctccgacgctggcgagctcaaaattctttctacagcccgtttcgatgagtcttttcgattggaaaatgatcccaaggttcccaaaacctcaaagaagccaaataccactgatattttatctcgaaatggccggttttggattgtcatctccaaacacggtacaccggcaaaaatggtgtccaaactgtaatttcgcattctggactacttcgaaccgtttctttacgtccaatctactccttaggttctcttaaactcaaatatgaccttccaagaactcacaacacgaagaaaccttgtcaaatccaaaatccttcaagaacaacaaacttgaacgtgaataatggtggatttcgaaacctactatcttagcgtgtttggtcacgaccattagctttcttagattgtgcagaagctatttaaagtgatcaaacaaacccagaaactctctaagtgttttaaaatcaaaatctctctttctctctctaagtttcacatgagactatcggtccctctctctctctgcgcacaacctcctctcttcaacatctttatgcattttaaaaccctaaaaatatctcataagcaccctatatatactcccaaactctaatattaaccctagatcaacaacttaaaattttaaaaaaaataataatatatttataaaatagtgtaccctatataccatattccataaaaattataataataataatattatgaaataataataaactaaataatatgctacaatatatttacccatattattattattaatatacctataatattattcacttataattaaatattaaattatctccaataatttaattatttatctaacattatatacaccctcaaaataaaaaataaataaaaaaaaaattattgtcactaaaaaa

SEQ ID NO: 241794 - DNA, 644 bp, Cannabis indica
aagtgtaagtaaaccacatcctcaattatcatgtctgtgtaaatcctgtgcactgataaatcttgagactaaatagtttgaagcatataatcataattattttctactatgatgacatcactataattgtgaataactatatgttcaggatgtaataaaacttatatattaaacatataatcatgaaataaacatgtgaacaaaacatatgacaaggtcaagacatgatttttgatctttattgatagtgaataagattatattgatattcagttttcttcagggcataaaaccccaaaaaatccaacttgaactaatataaaactaaaagtgcattttaattaatctcatgttcttaatgtctcgatcaaatgtagtacatggcatgatcttcgtaataggatctgatagattatattcaatattaaccttctccaccattacattctccatagtcacaaaatctatgattttgtggaataacgccaaagtctatattctttacttctcttaggattctagattctttactatttggcaattacatttgtgttgtcatgaagtaacactagtagttaatccatgtacagaataacgccaaagtttgtatataactttcttgagtctaaatatttctctagtag

SEQ ID NO: 241795 - DNA, 1303 bp, Cannabis indica
agagagagagaattgaaaaagaagttgttgtgaaatgggagggaagaatgaagctttgcgtcgaaattcttttggtaatttttctttttttaaatttttggcgggaaattactgattagatgtcgaacagagttagttacgggagagtgttattttctcatcccctcagactcatcagagtacgtgttgtttgtaggcctgtgtgaaattaccgttcccttacatcaataatttactccactccaagaagttgcacgtgaagattactcgcgagtataaaccgccagattaataaagatttcatcaactcaacgaaaagtacttctcgactctttaacgataatttcattgcatgataacacgagtttcattcattaatatgcaataacaggcttttcaacatttaatactagtgtctcatgcacgtaagaaaaatattgaccatgaaacgacgtcgatcgtgccatcaatggatctctccactgcaaattatatcgcaattgcctattggattgtggttatgaaaaataggaaaatattaatgtgaaattttgatcacaaattgtatgtttttggtaataattatttagtgtttttatagcttaaattagattagtgaacatatatttaaactatagagagatttggagagcttgcaaacatgagaggccatgttgagtcgacaaacccttgaggttggtcataaattgacaatctgggttaagtctataaaaacatacaattcaagagaagtacaagcctattagaacacaagtagaaaaagagtataataagcccattatttctgttcaatctgattaggggtgaaattcaagctctaaaagcctatcttatatcactcatcgtgtttcctgtccagctactcaccaacaaaatggtgtagctgaaaggaaacacgacacctaattgagtctgctttaactttacttgctcaggcttcaatgcctctatcctattgggatgaggttgtttgagcctcctgctatataataaacaggcttccaactcctgtgattgccaatgatacccctcttcataaactctttaacaaatagcctgattactccactttaaaagtcttcgaatgtgcttgttttccaaataccaggccttataataaacacaaattagaattcaactctgaaaagtgcacatttcttggctacagtttgaaacagaaaggctataaatgtcttggaatttctggtagaatatatatttcaaggggatgaattgtttgatgaatttacttttccctttgaactgtttccactaaccaatt

SEQ ID NO: 241796 - DNA, 1009 bp, Cannabis indica
ctctaaagggtgtttttgtagtagtgtgtcaaacatacacttactaattcattaattaatggtcggtgttttcttgaaccgcattgtgagttcatctataagctccaccacgaaccactattttggttatatatgcatggctaattaagatttttgtctctgaatttttaaggttgttaaaaatatcttatgaactattgagattatcgatttaattttttttttctaattttagtaaaaaaatctaatatggataaaaattcagggagcatgatttagtacatgtctaagttccatgggcatgatttggtagatatcaaagattgagaagcatggtttagtacatacacaattactgaaatagtaaaattgaatgaaattagataaaagtctttaaattcaacaatttcaatagttcagaagacatttttaacgatctaaaaaatttataaacataatttgatgcatgtcaaaatttaaagaaataaaatccctttattttaatcggttaatgttgatgtctatgtatccattattgtataaatagattgggtttcattgtttctattgaattttgacatttttctgtctagctggccaataatacaaaataattcatttcaataatacatttttctttcatgcaagagcggacacatcaatactataaaaacgaaattggactataattcattagattacagttacacagtacgtagtgcgatatagtgcaatggtatcccataaaaaaaaaattgcatcacatatattgaattttctttatattttctaattataccattagttttagagtgaaaatatcgaagttgtataaaacataaataaccattccaaatttattgagccttaatatagttaacttaataaaactcttgggcactctttattacttttaaatatccttcatcggtccctcatcaaactgaactttatataaaaataatccatatctgaatatagcacagagcctcattctcatgagccgaaa

SEQ ID NO: 241797 - DNA, 944 bp, Cannabis indica
aaaaataaaaacttaataacttagaccaattaagaattatagtaattaatttgatacttaacatccatgtatctacaaaaacttacaaatataatttacacattattactagtaaaaattaaacttatacatttatgtcgcaaattactctattttaaatggaacaaccatttattaaaaggataaaaaaaaatgattttaaaaatattattcatgcaaaaatagtaccattattatgatggaagatgggcatgcatatctttggtactacacaagaaaatatagatctattatttatatgtgttggctcacttttggataataacaagctgtagttcttgattgatagattttactaagcaacaacctagtgaaaaacacaaccttatcttataccctacctcatcatataatctaggttaaatagtgcttttaattaggtattttgtaaaacattttgattaagttttttgttttattaattaaataacaaatttaactgtatttttcaaattaaataaaatatataatattttgaatttaatttttgttaaaatagaacataataattaatagtcgaacccctgaaagtgttgtaaatagatttgttatatctttttcatttgcttgtgttagaaattagtttcaatttggttatatattctttaaaataaaagacgaaaagtaagttaaatataatattttgtgttatttaaaaaaataaaaatttttgaaattgttatttgataaaatataagtaaactaatataggtaatttttatataatataaaactaaaaataatatttaaccaatgcagtaggaattatttattatgcattattgatggtgtattacaaatttacaatatggtaaattatttaaaaatttaaaaaactatataataatattattctaattataatttacactatcaataaaaac

SEQ ID NO: 241798 - DNA, 772 bp, Cannabis indica
ttttagaaagttcatatttagtaagtggtacaacatatttgtgagtagatctaagatcctagtaaaataaattccaacaatatagatttgaagaagatgtataatagtaagtggtaccaataaccacaataaaaattgaaacacaaaaatacatatctctattatttttctaatgaattattatacataattcatacatataatcatatcacaacaacaaaagttaaatacaaagatacatatgtgatcaggtataattactttttttttctttgtactgtctttctatgaattatataaaaatattagattttaaattttatttatgtagtgatctataagtaaaattatcaattctttcttatttttcttatcactattcttctcttttacaaacatgatatgttatgcatgtcatactaattctaatatatatatactcttattttccctttcattgtctatgcactttatttaggaatgtcaatctgggccattttcgcagggcaggccgggctcccggcccgacgggccgactgtggcccgaattattcgggctcttatcgggcttctggcccggcccgacccgacccgatatatattatttcgggtcgggcccggcccggcccagtttcaaatattaaaaaaaacctaaatccctaaaaaaattccaaattctaaacctaaatctcagtttcaacttctctctctccgacgacagagcccaggctgcccaacccaacaatgttatcgctctctctttcttcgcctc

SEQ ID NO: 241799 - DNA, 1191 bp, Cannabis indica
tgacaaatctgtgatgtctttttctccgaacactaccttggctgcccaagttttctttcatcgacacctttacatgccaatctgtgagtgtcatgaacgttaccttggcctaccctcctactcgggtagagacaagaaagagctcttcagcaacattaaggaatgaatttggaaattcatgcactcttggagtgaaaagatattctcagcaggaggtcgtgaagtcctactcaaggttgttgttcaatctatcccaacatatgccataagttgttttcgactaccgggttacttttgcaaccaacttgagagtatgatggctaatttttggttggggatgaatgcaaatgggtctaaaatccattggcgctcgtggaattttctatgcaaaacaaagggtgagggtggaatgggttttcggtccttcatcaactttaatcaagcattactagctaagcaagcgtggcgtcttcttaaaaatccagattcactcctaagccaattactcaaaagcagatactttccacgtaactcgttccttgaagcaagtatgggtcattctccttcgttaacttggcaaggtattaagtggggtcatgatcttttcaccaaagggttgtgatggaaaattggagagggtcgttctgtcaaatgtggttatgacccttggattcctggttatacatctttccttccaacaagatacattggacccccaaataatgtggtatcaaattttataactgatgaaagagagtgggatgttcctttattgcagcaagttttttgccctcttgatgttgacaaaatactcgccatccctttgagctactttagtacaacagacaaacttatatggcatcaccacaatacagacacatacacagttcagagtggctaccaccttgcaacctcccttgaagaagaagatcacatccttgtcatggtggaagttcttttggtccctccaaattcctcaaaaagttaagatttttgcttggcgggtcattcatgatgctctacccgttgctacctcacttgtgcgtagaaagatcattaccgattcaacatgttccatttgtaagtatgctaagacagtttggagagctcaaaatttcaagtttgattagcaaaagtgtacatcaatgcgaaatggtgattacttattacatcttgttgggttttatgccc

SEQ ID NO: 241800 - DNA, 719 bp, Cannabis indica
ttttaatataaagattaaataacataataaaaatagtttagagtcaattttcgccctcaataatcattcaagattaataataataaaaattattctgatttctcaattaaactattaaccccgcagaaaatattgaagcaattatttttttcaatctccctattataattaatcaaggcgaaacactcaataattaaatttttttactaagtaatagatccacgaagtatgttacctatttaacttagaaaaagtattcatttttatggggataagttaatctaagtaacaaatcaatgaatcatataattcatttaatctaggttctatttttcatcacaatcaataataactttgacattactattaattgcaaactatcactctacttagaatcctaaactattaggtgagaagtaattctaagatgataatagaacaatacaaaaacttaattagttatacacctaacaagaattcacaatattcatagcattcaaatagaaaaacaaaaacaatttattacgagagaaatcaagaacaatattcattatcacaaatcaagaattcatgttttaggattttgaaataacccttaactaaaagaaattactccaaactagttattataataaaaacataataaaaagttagagattaagaagaagaaaagaaactataataatgaacaatggatgacttcttcttcttcttcttct

SEQ ID NO: 241801 - DNA, 1236 bp, Cannabis indica
cactgactttctccaggccccaactggccataatccatctttcacttggagaagtctccagtggggttcccagcttcttaaaaaagggctcatttggaaaatctgcactggcagtaatatccctatatctgcatccaattggattccccaaatttctcatccaactcttcttcaccccattgacccttctctagccactgtctctttttttgttaatcaagatcgatcttggaatactgaaaaactataccattttctcccttcttatcaagccaaagctgttctaactattcctctagatcttggtcattctgactctctcatttggggttttcaccactcgggaattcttactgtcaaatctgcctatcaccttgcccagtccattgtcactaattcttccccttcctcctctaatcctagcccttttaaggattggtggaaatttctttggactttgaaaattccccccaaaattaagctcttcacctggaaggctttcaaacttcttctcccatgtgctctcaacctttttcacaagcatgctatacccagtgcttgttgttttcattgcgggggaagcaatgaatcggtttcccatgctcttcttcactgtcccagagttaagaccatctggcatcaatctaattttaaacaattttttgctgacaatcatagggatatcatttttaccttcatagccttgaatcaattcccaaagatcaacttcccgtacttattggaatcatttggcaaatttggaacaccagaaatgctcaccttttccaaagacaaaacttatgcactaatgttcaggactatgtatcaaactttctgcaggattatcaagaggctcaaattcactcctctgtgtatactgtctctaggagcccttccccagcagttctggatcagcttttgaccccttcaaccactgctctcttcgtagacgctgccctcagtctcaatgcttcagccacaggtctaggaatggtctttgtgcagagcatgtcccatattcatcattatgcaagtatcaacaagtcaggggcatcttctcctatttttgctgaagctcaagctcttgctgcaggactgcagtggtgtttatcctccaatttgacaccagaatatattttctccgattgtctcaaccttgtctcaaaggttaaagggaattggcatgaccactcccctttgtcgactcttgttcaccagatcaggaccttcctctcc

SEQ ID NO: 241802 - DNA, 1779 bp, Cannabis indica
aatgagtttgggggggggggggtagtttatagtgtttttgttggggtggatccctagaattgaggtacatgtctttctgtaatattcagtaaaggcacacattcccaatggacacatcataggaaatgcatgatctaatccctaggctttttaggagtttaatggacataatccattatcctttcttgactgatgtgatttctcataaagtagtcgtcactaggctcattaatcatagcgtagtagctgcagaaggggggttacgccgtcagactttaatacttatggcagtttcaatacgccttctcccatgcggcattaaatgcgaggtgactattcagatatgatttgatacctcccggagatgcctcatggtagtcttgctctccgggagtacatggaacttacatgccttctccgggaggcatgttaaatgctgatccatttgataaacaagacttagtcaaattatctcaaagtctcgcttcttcagtccacgtgtcatggtccggttggtccacgtattttggacaaaataaggggcaacattagttaatgatacaaacctagctaattaatgttagagaaaaatgtctcatacgaaaaaatatatggaacacaatacctttaaaaaggaaatagttgattacataatattaatgttgtaagtttatacgtgttgtgttggtttagtccgtatttattcgtgctttttaaaaaataagtcgtgtcgtgccatgtcacagaaaaaaaataggtcgtgacatgtcgtgctaacattttaaaagggcaagcttgacacagcctgcaggaccggtattttcatgtcgtattttgctcgtgtcggcccgtatttcttaaacaagtcagcccgtcttcatattcgggtttaaattcatgctttacatttttcattttttttacaattattaaattatatgtatatttcaaaactttagtttttaacaataatttatcgataatcatataaaaaaattattaacatcattagaattaaaaaaattacttataaatacttaaatttttatatcacaccctataaataaattaatatataatcttagttttttatgttttaattttaattatagaattataatattcagtattatatttaagttttattattattttaactattaataaattcatgtattattattaataataaattaaacgtcttttaatacgtcgtgctgtattttttgggctaatctatttgtgcttacgtgcatttcgtgcttttcgtaccgtaccgtgcttaaagacatatttttcgtgtcgtgtcgtgcccaaatctatattttttcgtgtctagtcgtgttcatgtcagtttcgtatcgtatcaaaaaactcaactcgcatttacaacactacataataccaatttgttttaagatatggaagctcaaccatatatctagtggcatatcttaacccttagaaagtacgaccgaactcatttctcaaatccaatttcctcaagatattatgcaaccacaacattcattgcccgaatcttctcaaattctctatgaaactctatttttgaatacgtgtagggatatgtataaatatgattcgtgaagacatgagtcttaaacttgtggttgacattcatagtaatgtggtggtagtatgcatcatggtgtgcatcaaagaacacaatctccaaagcatgaataatgctttgatgcctatctaacataaaggctaaattctcaacatcaccaatcgcttctttcaattttctcataa

SEQ ID NO: 241803 - DNA, 1017 bp, Cannabis indica
acgttcttctcatcttcctccgagaatatgataggaggttcttcagtttttaccttcttggaaagttctagggcaaataccaactgttcattttcacatatttcacatacctcttttgggcgttgttgctctcccctacgatatgcggccctcccaaaataaccagtatgtcctctccttcaataggaagaggttgtaacccctgattgtttgggttgttgggcagactgggctggttatgtccattgccatgtcccttcacatacttcttgaagtggccccgagcgatgagactttctatctcgtctttcaactaacagcattcgtctgttgtgtgcctaatgtcctcatggtatttgcaatacttggtaggatctcttttgtgcctcacatgcttcatgggctcgggcttgctttgccgaaaacaaccttgtgctcatgcgtgaggtaaatattttcttgagtttcattaagctcgatataaatagtataaattggcacgtacttatcgtgcttcttctgtttctttttatcctttgacgattccttagaatcgtcctttctctttgaccttgaggcctctgagttatcaactctatttgagatagtacttgttgaaacattactgggtttgcctcctgagcctgttttcaacaaattcatctcttttcgagcttcctcttttcgaatgtacacttgagcccttcgttggactcagtgatgttcttcactggacgaccctgtaagtcatcccacagttctccccaagcgattgttggatcagagtgatccccgcctgaagggttgtaagttgtgtacagtcatccagatttctaactcttgcaacagccgtgctaaaatgacttaagtttgccttaagtgtctcgcctggctgttgctttatgttagttagcgaggatgcctttggtcacctatcccttgcggtgtggaattttttttttttgaagtccttggacagctgttcaaaggaagttatggaatgatgagtaaatttgt

SEQ ID NO: 241804 - DNA, 667 bp, Cannabis indica
aacaagtgactcttttctgaacatctgtagtgaaaagctcaagtaaaatgggtgaatgataggaagtcgatatctcaaggttgtaaagtttagcataactaaacatttggaacaaagcaaggttcgctaaacctctgaccaaggaaacttcaatccaattcgaagtacccctacccatctcccaagtaaatggataacaacaaagctccatggcttgtaatccactgtcattcaaagcttgttgaaaaccatttattaagaattcagggtatcgattccctccccttttatcttcatgagcacacacattattcatgtcccccattacgcaccaaggtaagcttgaattagcagccaaagagtgcaacaggttccaagttgttattcgaagtcctctattcggttccccatacagccccgtaaatctccaatccaccataccttcaatcgaaacttttacatcaatgtaattaattgagaagcctaaaaccgaaacctcttcttcaaccttccaaagcaaagcaataactccacttctaccttgcacatccaccaccatcattccttcgaaacccaaggaaacccgcaccctctccagctgagttcggttactgagagtttcacaaaggaaaattaaactgggttgcttttggatcacaagatcctt

SEQ ID NO: 241805 - DNA, 754 bp, Cannabis indica
aaaaacctgttaattaaactcccctcgaagaggaaaatagggaagggccttgatgagaatgagaaggagggttatgacaaaaattatgacaaaaattacatataaaagtactatgaggaagaccctgaggtggtgaggttaaggtaattagtagcaaaccaacaaagacaaatggtggagcaacaagaagctacatgtcatatacaaggtatcctcttatagttgaaaacatggtagcaaaggggaacctcaatgttgaaaacccataagtggaaagtttaaccatctcggggctagactaatccaacaaacgacaaggggaaggccaaaatggactgagcccccaaggaggaattatccttcaaggcccatgaacaatgctccacggaataactaaaatatgatcgacccactcttgtaaaaagataagaacgtttgagccttaaggctagatcctctagtcgatttatggagcaaagtcgaccaaaacaaaaatactgtactcaagtatcggagcgtgtcgcttggggaaagaaaaacagcccaataattatgttaattagagcgttgaaataaagttcttagatctcgaagacaatatgtcaacaatggacctcagggaccagttgaatgctaaaagggaaaaagtaagatatgagaaggccaaccttcgtggtggagacctcaaaaataatgtaaatgacgaaattcgtggatgtgaggttccagatgacaacaccagaaggttgaggat

SEQ ID NO: 241806 - DNA, 804 bp, Cannabis indica
ggaggtttaactactaaaatttttaaaaaaaaaaaaaaactaaaaaattttaaaattgggggttagttgcaaaaacgtagccacttaaggaggttatgccgcaaattaccctcatataaatgggattggcagttgacgcaactgctacatgcatgagactcaatgctgacagacaaacgggagctcgccacgtggctaccttgtcggccaggctggataattgggctcttgtttggtcttttcatttggtttttggcttttaaaagggagttttctcgtaaatatgagaaaaagtagtaaagtttactttttttttatggcataaataaataatgcaaaaaaatatgaaattaaaaaataattaaagttcaacatatggggaaaaaacaataaataaatttgataaaattactgaaaaagtcaccgtcgtcggaaaagttaccgaaaacgtcgcagtcatcggaaaaagtcaatagaaaagtcaccagaagtaaatgtctcagatataaaccaaaaatagaaccggttctataacataatgaataaaaacaaataattcaaaccgattataattgaaatataaccggttctgtaacataatgaataaaaataaataacacaaaataactcaaatcaattataattaaaatagaactggttatataatagtattataatgaataaaaataaataacacaaaataactcaaaccggttatataacataatgaatataaacaagtaacacgtaataactcaaaccgattacaattaacaaaaagaagaggaaatcagttcttaaaac

SEQ ID NO: 241807 - DNA, 1022 bp, Cannabis indica
cctttgttaacttttttcacaccataaataaactatgctcttagcaaaaattcaattgagggtagactacaaataataagtacgcgtttctaatctggaaactaatactataatagtttctatgtaggtgcctagaagtgacttaaacctccagactttgcgagcgaaccatgtatctgtccatttgagcaacctctcttgagtccaataatttaacctgaactttgagttaaattcaaattgtacttatagatgagatctttatagctgttactaccacattagaataatctcatacttttggtgcttgatgcctattcaatttacctactaactcattcaattgtaatcaacgtagtaaggcattctcagtgaaagcattgcatcaacgagtatagaagccttctaagccaagaaatcaagtcagccaataaccacgacagtaacaattaattgttttttagaaaatgaaagcctaagtcaatctcatgcttgaagagttacataaccagaaaattctgacaagttaaaaagcttgaactataccaaacacatctcaaatacaaaaattgcagaaccaagcaatgatagactatgtgaccacaataaagtccttaatgagtatgacgagatttgtgctacatcacacttatcaaagataaatgtgcccacatcaaacaaagacaagactaacaaagaagcaagatcaccgaggtgtagataataaaatgaagaaagtcgtgccaaaataaagatattagtttcaattacacgataacaaataatgcaaacatgcatgcatcccctacctcattgatcgattgaacttgtctgcctaggtcctcagtaaaaggataacgattagcaccaaaagcttcacaaattttaagaattttgttctttgctttttctccagagtagaaaaccaggaaaacatttttctcaacctgtgcattaacaatcacatgtcaaaaaaaaagaggaatgcaaaatttaaatgacaaccaagcaattagcataat

SEQ ID NO: 241808 - DNA, 1418 bp, Cannabis indica
ttaatacaggtttctgagcctcagattctcgatgctagggcacaaggagactgttgtgtctctcctcaatctattattactgctgaggctctcgataggatatgagagagtggactggtgagaggtgaccaatgtgaggtgccaccaagggacgaacgagcgcatcgctggccctcaattgaatgccgtggtcatagcaccatacttagcaggggtagtcctgtctttgcacccatattttggagacatagctgcttacttcgagatgtgttcaacacaaatcaccctaaaaggtatcaaggacatttcgatgatgtttgttctctatgcagagctaggttgacctcagcctactccgtatgagattggataccaatatgacttgatctgctccaaagcagaattggatggggtacttctacttcagtcagatcgactattagtggttggataacaccaacaacacgcctttgtcgaaagtaggggatatgcctggagtactttatttcttgggacatctagcaggttcaacaccgccgttttaagcgagtgcccaactacaagcactccattcctaccctctagatgaggggcagagcgaaccacatcctatccctccctgtagagcggaggaatattttgtggttggaaagtgtagccaacttttagagatacggcctatatccccccttatctggagttacgggggcagagggcccatcgggttgtttaggtggaaccctagctgcttaggaggccagcccaggtggtgggcatgctcctgacatggatgatgatgtacctctatcctggatagctagggattcggagaagagagagagggccctcctccagtgcttggcttttaggggcaccattaggaacactactctgcggattaggcctagaggccagagttttgctgggcctactcgcctattgcctacatctagaggcaagggcaaggcagccgttgaagattatgatgaatcctcttctgggggatgatggtatttgatagtggagtgcaccatcttttatattttttttcttgcattgaatatttgtaacttacattatgactttgttactttcttgtagcagatatatcttccagacttagaggtctagttggtgggcctttagacgagccttctggtcgcctaagggcctaggtggcttagaccacccgttctagtgacgttgtgggatcttcacttcctgcacctcctcttgggcctgtaccaatgtggcagcccatgatagttgaccctctattaaggaggaatcggccttcgggcaaaggcgcctagaagcctaactgagaggaagttatccatggttaagagccatggaggcagttgttggaagtttattctaccaggatcttagatctactcacaagtatgttgattaac

SEQ ID NO: 241809 - DNA, 1080 bp, Cannabis indica
cttcctcatcatcatcttcaatcaaaaaattggcataattctttgttaaattatgaaactgaggttgtctattacttattattctcaaagcaccaggaaaacacacacaggaagcaaacaaaactaaacttttgaaccaaaccgattacaccatgtcaaaacgacaagacaagtattttttttaatttggtccttttatatgtgatttatttgtccgcatattataacttttttggcgctttcttagaattttatacattataaattaacttggttttctttttaaaatctattttgagaaatgtatgagtttttttcttttgtgagcttttactcaaaaaaaaaaaaatgtgtaagtgctaccgtcaatttttttattacaattctactatttaaaaatatatgttggaatattttcttaattttttatggtgatatttattatagttacacaattattcctgtaaattttttaaaaaatttgaataatttaccctatcgaaaataggtttaatattttttaaacaggcgtggtaaattaaaatatcaggagctctgttttcaatgttataaactatttaattttttttagaatttataagaatatgattttgggtgaaggttgactaagagtttttaattataactcatcttaaaaaaaaacaataattacataagctaccattttttgtaaaaaaaaaattatacttttacgtaagaatttttttatatatatattatttacaattttttcattagaaacaagacgaaaacaaaaaaaaaaactaatataaaaaagtaacatttaaataatatcaaaacaacaataaaaaataacatacagatagcaaaaattcaacgacaaattaacaagattacaatataaaatgactatattttctgtaaataaaattaaaaaaatagtaaaaaaatttaaaattttgtgaaactgtatttttgtatttttgtatttttttttttgttgtttttgtaactatagaagccaagccacaagagtatgaagaagtgtttttatgaaattcaaaagcccaaatccataagctgtctaaggcccaccaa

SEQ ID NO: 241810 - DNA, 833 bp, Cannabis indica
accacctcgaatcactctccagaataagaaatttaactcctcgagctttagcttcctccagggcaagacagcacgctgacgcttccccacagagagcattagagaaatccaactttgaagtaacagcccagatcaccttgccgacgtgatcccttgcaaccaccgcagcacacatactatccgtccccactctggtatcgcaattcaatttcaaccagtcctgcggggggagcgccaaccttccgtcggattcggtagggggcaagggagcaagtaagcatgatgatctgcaaaagaaaaacgaacggtgtcaatacatttaagaatatccacaggactattattatgtaccttttcatttcgagtccgccagatcgtgtcaataatcagagaagcatacagaaaaacttccttctcattaatgcctttgttcttcatgtcccataaaaatttaacccagtcccacattcttataccagtgtcacagataggaaagatcccccaaggagaggatcgccataggtggaaggcgagattacaagaaaggaacagatgctccatagattcagcacccgagccacacaggggacagctctcgtcctctaaaggaaatctccttcgaaggaccgagcggattggtagggccttggacaaaatacaccaccaaagaaccttgagccgctcatggattttgctattccaaagtttgttccacatggaaggggccacctctgacccgctagatctattctccgccaggaccctatatgcagatttgcacgagaatcgtccattactttccaaagtccagaaccagctatccttgccaatcc

SEQ ID NO: 241811 - DNA, 521 bp, Cannabis indica
tatcaaaccaaagtcttcgtcaaacacaaaggagcaaaactccaatccacatagcattcgctttagaataacaactacactattaattattttgattaaaaaataataccaatatgacctattctttaaatgaatttacttttaacatgtaagaagcatataattttacaccatcacaaaataagatgtttgaaattaaaaataaccatttagtttatttaataaattttaaaaaaataaccaaattttatactcaaacaaattcatgaatatatatcatactaaaagtatttttcattgtactaatttatcaaaaaaaattataattaagagttattaaatattattaaaaaaaaaaataaggacactaagatatatactaattgatttttatttaataagctcaatttcgaaatcatattatctcatatacatccttgttaaaattacatttttctttttagaattatattatgttgtttgatcaagatgtatttatgttatttatatatatatatata

SEQ ID NO: 241812 - DNA, 1335 bp, Cannabis indica
aagtgttgagatatgcgacgtacgatggcgatggttgaaatctgtcctaaaccctaattctttaaatacgtaaaatcacttagatttctaatcccccatattggaaaccatgccttctaccaaattaattttagaagtggcccgcttgctaaaacagtagaagccattgtcgtggcccacactctttatatcataaaagtaactgaaatcctccatcaagggctccctctgatcatattccatatacatcgcataaaaccctaaggctatgcaataactattcggggttaattggaaggaagagacgtcgtagcgtctcaggatagcttttatgaaagggtgaaaaggtactgaaaccccacatcgaagaatggggactgagataaccacgtcctccgtagggataatcgtagtattggtgaagggaagatgaggcctttgagatgtgcgaggacacatggtaccaagtcgcagcaaattccacctcgtgaatgtatttaggtctgatttggtaactcgcgagactaggtcctcgcatgagaagggttcgttcaattaggtgttgtcaaacgaatccgtctcacttccctcggcattccttcttccccttactcgcgataaggaacctcccaatcttcccccatctcctcgacttcgatgtcaggggcatgcctcgaatgaacatgatgttctcgggcggacaccgtggattcactgtcacgaatctcgattgtccctggttcggtgagttcctcaaccatcctttctatctcattaaaagacagtagacccaaagtcccagcttcagcaacaggtacctcctcctcaaaaattgagactggtatgaagttgttgcttctatcttgctcgttagcgaaagccccacctcctaagtcgagcatttggctgtctaataggtcgctcatctgaaagatagaagatcttttcagcgtggtgaaagtgcgaaaacaacataagtgacctcacccgcataaaaaacactactcaaagtataaaggattgacctggcatctcaagaaatggcttggggtatcccagtaacctaatgaacatgtcgttacatgaaaattaaggtactggggcacacccaccatttcgagaacttaggcaatcctctcagagtacaagtcgcatgtgtggaaccaacagagtgtctcaaaaaatggctgggtgtttcccaatgacccaaggggcacgcgtttgagcatgaccatagagttaatgggaaacacccaccatttcaagaaatctggtcaattacaacacgcgactaaaaaccacatcgcacatgtacaactaacagtgtacctcaag

SEQ ID NO: 241813 - DNA, 1205 bp, Cannabis indica
aaacatgttctcctacctgaaattctatgtctctgcgcttaggatcagcataacttttttgcatgatttgcaaagcaagcattcaagccttgattttctttattgcctcactagtctactatactaactcaggacccaaatatttcctttgttcggtcttatcccaatgaattggagaaagacatttcctaccatacaacatctcatagggagccatccctattatattctgatagctgttgttgtaggaaaattctatgaaaggcaaatatttactccatgaaccctcaaagtccatagcacaggctcgtaacaaatcttatagtatctaaatcatcctctcgaactgtccatcagtctaagtgtgaaaagttatactgaacttcagctttgtacccatggttctctgaagaattttccaaaacttagatgtgaacttcgaatctctatccgaaataatagatttcggagccccatgaaggcaaactatctcttttacatacaactatacatactaatccattgtgtaagttgtaatgccttgatacttaggtgcgccacagtaattttccaattaacgtaccacatttgctaatcaaaggattttcctcaaaaatcgtgctaaattaaaactttaaggaactttaaactttataaatttatatatatttatttacatagaccgggatcccgtcttttaacttttacaaacattttcaaaatacatttttaaacttgtcgcacaacgactacaaaatacaaaccaagatgtcctgagactgaacactctaggtcgggtcgtgacatgtacaatcaccatccaagctcagagctcactcctgttcagcctttgccttttctttacctacacctaaagtggcaattgtaagtcaacagactcagtaagaaaagcatgtaacaaataatatatcaccgacttatatcaaggcgcccatacacctatccaataggcttatcaaataagtaagaatgttctttacacttggtattatcgaccatgatatcatccactgccagtgctatgattgcactgtgggcccagtactatattcgttatgctcgtaccgctatgattgaccataataccactcttaattagtactatactcatacttctgacctagtactatgcttgtaccgctatgatagcgtcaattaatactttctggaattgcatatcagtc

SEQ ID NO: 241814 - DNA, 542 bp, Cannabis indica
aaaaaaaaaatagtataatggataatttttcatttttgttttaatatttacaacttattttaatttatgaattttgtgaagcaaattgcttatgagtatggtagaagaggagcttgtttgaccttagttgacattaaagacaatcttgaagaagtcaaaagaaaagctcataaattaggatctccagatgttatatctattgttgctgatgttaccaaggtggaagattgtaagaggttcatagatgaaacagttcaacattttggccaatgtaattaattattagtgttcaattttatttttggggggcaagatatatatatatatataaatatatatatatatatatcatctcaaaatttgtttgaattttaatgtgttatgaaattaatattgtatagtggatcatctggtgaacaatgctgggacagtaatactgagcaagtttgaaaagattgggcggatctctgatcaccaatcagttatggtataatttcatcatgactacatttatttattcttatttaataaaaattaaaata

SEQ ID NO: 241815 - DNA, 842 bp, Cannabis indica
atgctttggctcaaaaccaattaggcaataaattaaagatcttgcgaactgataggggtggagagtatatggatatgcaactcgaagatcatttaatagtgattctacacattttcagacatgtattcgaagttataacaaccaatttgctttcacattgttgggcattaaatatgatcaaaatctctgccaaaggaataatggaatatacacttttagagcccaaggaaaaatctatcacaacatcatagatttgcttccttctgatgatcatccctctaatctccaattatatttctatgacactattaaatgagttacataatcgactagttgattcacaatacagaatgatcccaacagtcacaagtcaactcatcaatattcttcgcatcaatccctattcttttttcttccgctcacttggtgatatgctagatttggaaagacaaataatgatcctggcctagatcaacgtgtattcaatgcctttacttcctcacaagtagctgcaatatgggttgaaaatgaagacaaaatcaaaatggaagacgtgatatctttctatataaccattccggtagacaattcaaagtttaatattactatgattgttatgactcacagcaatatccattgttatttccatatggtgatattggttggcataaagggattgaaaggattggagaaaaccaatccagatccatcgaacaaactcaaacaacaaaccctcgacaatcatcaactgcagaagaattattagcagcagaagaagaaggtaatcaatccttaattatgtatatatataaatcactctttattcacatctaaattgttac

SEQ ID NO: 241816 - DNA, 1048 bp, Cannabis indica
aaacaattgtttttaatcctagaccagaaggagattttttgtaagccaatggcaaaacaattttggttaaaggaaggagataataacaataaattttttcaccgtgctgccaacaatagacagagtgtaaaccaaatttcaaagttagaagaacattggtaattgccaagatttggatactaatttggaaagaatagtcgtttattatttctcaaacctttttttagcttcgatattgaattgtgaagatgtcctcaattttattcagagtcagctgttgcattagcttaatacagagtttctacaaccaattcttgaagaagaagttaagtgtgttgtctttgatatgcatcccaataaaagccctagttcggacaaaattgctctgactttctttcaaaaatgttggagtattgttaacaaagatgtggtgagtttggtccagtgatttttcagtactggagagtttgaacctagttgtagtaatgttaatgttgttttaattcctaagaagaaattgcttgaaagtatggggtatatgtgacctatagctttatgtaatgtgttgtacaaagttattactaaagttatggcgaaccgaatgaaaccttatatggacaagattgcttacgaaatacaaagtgcttttatttctgataggcttatctccgacaacattttggtctcatatgaaattttgcactatcttaagagaaacagcaaagtaaaagaaggttacatggtgctaaaattagacatgagcaaggcatataaccgaattgaatgagattttttgaaatcaatgttattcaaacttggattcagggaaggctggattccattggttatgagatgtgtttcttctgctaattagatggtgacccatggcggtagagaaatgggaccgatggtgccttctcaaggtatcaaagaaggtgatcaactatcactttatactgtatattcattttatgtgcagaaggactatcgtctttaatcaaaagccatgacgagaaggttttaatccatgggtgcaaagtggcaaatg

SEQ ID NO: 241817 - DNA, 1257 bp, Cannabis indica
aaaaggttgggtgctatactcgcaatagatttgactgccacttaccggtggtatttggttggtgagatgacatgtcagttctcactcgctgtccccaatccatttaataataatatcaaactaaaaattaggtggaaattggtttgaataattatattaagaaaatgttaatggaagtatctctaaaaaagaaatataatattttattttatattattattattatttaatatatataaaataattaaattttttattttaggacaaaataataataaaaagataaaaaagagaaaatatatacattaaaaaatatcaaaaatatattcatgttatcaaatatttttttaaagcatcttcattaggaacgagaattccactaagactaactatttttgttgactcagttaaaatttaattttttaataaattaaaaattaattgatgtatcaaacttaaattagtttaacatgaaaaactattttttgacaagggatgttgatttctccattcaaaatactctaagatattgatatacttcaatatcaattctcacaaagtctcgttttagtatagtattagacactttttaataccaataacaatcttccttataataatatctaccactaatgttgtttgttagactaattaaataataggttgacaaagtattcttattggacttttttttaagaaaaaaagtatccttattggttgatatatttacgactatacatgttatttgtttgaattttataaatatataactttattacaatatactgcacataaaaaatcattattatctactcatatattttaattagtaataaatatattatcagcccttcttcttttttttaaagcttttgctctttatggtggagttttgagattttcttctcaaaaatatatttataacaccaatatataaatcaatgttataataaaacaattacaaacaacttgtctttgtcatttagttttttttttatatatatatactatcttttttatttttatatactattttggtaaatatttttgtacattctattagcactttaaagtattcaatatcataccgatgtggtacttaataattagttagtaatttttttgtcttttgtcttttgtgttttatttttttttatttttattaataagttttgtactatttttataatagttttgtactattattattatgtggcacttttaggtgctcaattccatacaatacacatacaacaa

SEQ ID NO: 241818 - DNA, 977 bp, Cannabis indica
gcacaagttcccaaaagatacaagatagggcatgcattacctacatagtaggtatcgtagaggttaggtgagattagccttcatctttccttaattgatgtgattcttcataatggagtcatcaccaactcttttaattatcgtgtaattgcgctaaatcaggcttacgatgtttgacactttctcttatgggtgttgccagacgctttccccatgctgcattaaatgtgaggtgactattcgcgtagatccctttcgtctcgaaggtgccttacaatattttaactcctggagaagaaggcttgcgttttgcacttgactgggaactaacgccctgaaccatacttgtcgccttttccatacgacctttaacttatctccgggtgagttgtcttctttgtccacgtgtcatacatgataaactggggcaatagaatgataataaatatgctcttgaaatgtgaataataatattgttgtagacactaaattaaaaataaaacataaataaaaatgaatgtaaatacttaaaatatgaaaagaatttaatacaatataatatgaggtaataatttaatttctaaattaataagacaataaatataagatatttgataattgaaaaatatattatctagtggctcaactaaatgttctgctctcggggacggtatttcgttgatgtcgatgccggtggtcggttgccagaaagtcgggaaacttgaggaggcggcgagcatgggtatggttgttagtaagaaaaggaaaagaaacgattattacgatgggattgtgagattgattggggtgatttggtttagctttgtgtttgtggtggagtttgtgaagaagctgatgtgggtttctggccgtaaaatagtgataagcggtggcgatggggttgagctttggccgcggaagctcgctcctgctaggttttgttctgatgagataaagatcgttaagaaagccttcga

SEQ ID NO: 241819 - DNA, 692 bp, Cannabis indica
acccaccacgccagccatttgtcaacttgggtgttgggtaccctactcccgagcttctggaatcttgttttgatacttccaaggttcttgcacttgaggatgaggtcttccacaccattttggaccattccaaattcattggtctaatcagatttggtatttgagcaattgaaggggagtgtcccaagttgattgtcaacttgggccctgggccccatttccaggggctcgggtttgtgattttctccccaatttcgcttaaatattaattattttgtacgacaaaaaaatatccagaacactttttggtgaacttgatttgaaacagcccaagttgacataatgttaacctgggcgacgggtcccagttttggccctctaaaaattctgtttggtccctagaaatagttgaatctcagtcttttttgaaaatggtgaagatgcttggaagagttctcggaaaacgtcattgaaaattgtccaaattgacaaaatatcaatctaggcgtcgggcctcatttttggcatcaggaagtgttatttcttccacgaaaggacctacttccccgtatctgaagacgaagaagattcaaaagttggatcgttgatctgatactaggaaggcacccaaattgatgaattgtcaacctgggcactggggtgctcgggacctcgggaccctcggtgctcaa

SEQ ID NO: 241820 - DNA, 1099 bp, Cannabis indica
atctcaagtgagaaaggagttccgcgtgttcggtctaactcaagatcattattacagtgtccaccaatgccgtgaaacatatttttatgttcgtcaagctgggcctgtacggctgggctaacctcctcggcattctggtcgacttggattacgtcagcatcttttggcgcggggatttgagtacgggctccaggctgcacgatcgttgtaatattctgttcgcctgttcccatccttctatttagatcgttccttaggtcatgggttgctcccaacctttcgaacacagaagagcctggttgccttagcgattaattcgcttggttgacgggtggaatggcaccattaatctggttggagccgtcaggtatgactcctcctgatgaattaccggacaaggtctgctcgcctactgttgggcccacgagcagaactcgtgcatggggattgggctgctgaccattagtagtctgggaagtattcatcgtccggtcgtcttccgtttctcccaggggaatgacgttcggcgattgctgacctacagtttggtaggctcttcatatcagcacggtggcttgccgacgacgatcttcaatctctgtatggtgagcccttaatgcctccatctctttatctctccattcggcgaacatacgcctttgttcgtcgaacgcgagattcaccgcagcacgcagttcgtcctgatcatgatgcagagtgttgttatgaccctgcatgagtctgagcgcgtcacggagattttgtaatttggtggcatctccaatggttgtctgggcgtcggttctaggtggaactgtcgtattatgggtgccctggttgggtgcggaactgttattcccagtctcttgcacaccaggcgcaattccattaataggaactgtttcaccattccccacgcttgccggctgtccaggattaacaacaggcagaacccttgaactccctcggttctacgatgtaggatccaacatctgtgaatttgccggattactcagacctctacgagtttgcaccatcgtattggcggttggatgttgaataagagcaattcgtgaccttgctctcaatgaaagcacca

SEQ ID NO: 241821 - DNA, 1372 bp, Cannabis indica
aaagtgattaaaaaataaaaaaaacaaacccacttaataatactagatctgaccgaatcagatcaagaggtctattaagaccaaacaaatgagccctaaatggtgcttgctattacatatgcatagcatatttggtgttatcacttgtatgtattgattaaaaattaagtgtttatataaagcacacatactgttagagtttacaaagcaaagtactttccaaattctgatttcatttcatctgatctcggacataatccaagctttgtgtggcgtagtatttggggtgctaaggacttggttcggcttggggctgctcgtgttattggtgatggtacaagtactaaaattctgggtgctccttggctaccatcaaatagtaacagatatgtatcttctactcatcctaggcttagcacacatactgttagttctcttttttgccacaaatatgttatgttgggatgctgaagtagtctgtgacctgttttctccccaagaagctgagataattctcaacattcctctaagctctactgctagacctgactgctggtcttggacagctgaacataatggaaattttactgtgaaaagtgcatataaccttctgcagaaccaaaaaccagtcgatccaaggccaaataattctggtttttggcgtaaattctggcatctgaagatacctcccaaagttctgaattttttgtggcgagctatagcaggttctcccaacttgtgtgaaccttgtcactaaacatgtcccaatttcttcaagctgccccgtatgtcaaactacagcagaaacaacatcccattcactgctatcttgcgattttgctgctgcctgctggtagggctgaacatttagacccgcaaactcgaaaatccggcaacccgccccaacccgctgccgaaaaaaaccgaaaaattgaaaacccgtgtggtcgggtcgggtccaactcgaaaatactccacacgggtattgggttcggattttaaaataagtcaaatattttttcgggtggtaatccgaaacccgaagtatttggcaaagcacaaattttcatgctactaaagtcaaaataaaagtacaaattttttatttattataaaataagaaaagaaaatatgagagagagagagagagagaggttgtctttacctctgccacctacaaaagtaggtcatgcttctcatgccacgtgattgacatgactattcaaattgttttacttaacaaacaagcttcattggtttgttttattttttatttttttattttactttcataaaatcaaaatgttattattgtactttctatgtcagtgaaatatacacaactttttgtttacagtgctgtccagaaatt

SEQ ID NO: 241822 - DNA, 595 bp, Cannabis indica
gctcattaattactatcatataagtgatacattaatccattctccaacacctataatatcatagatttaaattgtaacatacactaatcaaatgttacaattttgtatgttacatatttatttatcaaacactaatatgttatttaaatatactagtgtattaattattttataaatatttatggtgttactaatacattgcaaggattatatcaagaactaataatgaagaaactaaattaatacaaacacataaaatttacaagcttcatttgcattgaaaatgcattccagccgactagagcttagtttcctcgaactagagtaaataatctctaataagaatcaatgtcaagatacaaactccaatttttaaatcaaagaaatgtaaaataatacaacaatgatccttaaaacaatttaccttaagatcttgatgactcaatcaagatctaactttaaggttcgaagacaagctccccttgcttcctgtcaactatgaatatgaactcccttcagatgaaacagactccattatcacaaaagcttgaacctttcaacaacgagaattcgcaagaaacaagaagaagaagaa

SEQ ID NO: 241823 - DNA, 598 bp, Cannabis indica
ttatgcatgctttgtgaaatgaacatgtaatcttgataatttgagtatgttaatctttggatttgagttcttgagcatggattttgatcatagggtattttttaatattgaatcatgtgttattgtgatattttcatggctgaaattatttgaattgtagaagattgagctcttgtgcaagagcttgaagttgccatgtttatgcatgaatcttgtgttgtttgagcaatctaaagttttaagtttattgctggaattagttgttgaaacatgaattttaattccttgatgattgctatcatctattcttggtgatttgtgagttgggatgtgaattgggatgaatagggggtgttgtgttgctgaaatttgagtatgttcttggctggtttttgggttctgcaccaagatgccgcggcatgctctggagcatgagcatgccgcggcccgcccctcttggtggaacctgggttttgtccccaggcgtcgcagcatggtctgggcatgccgcggcccgccctcgtgatttttgagcagtttgtgtcgagttttgaaaaatgcataacttttgatttcgaactttgatttgggagttctt

SEQ ID NO: 241824 - DNA, 1505 bp, Cannabis indica
gccagattctggtggggatcatctggaacttctcacaaaatccattggaagtcctggaagtctttgtgtaaatctaaatttttaggaggattgggctttcgatctcttatccattttaaccaagctatgttggctaaacaagcctggagaatttttaagaacccttcttctctccttgcttctgtccttaaggctagatatttccctcgtaatgcgtttcttgaggctaaacctggtcacaacccttcttttacttggagaagtattctctggggtagggacttgctgtagtcgggtcttttatggaaggtgggaaatggtagtcatattaggacgatcgaagatcattggatccctaataacagagtcaagtttttctcttccaaccacaggcctccttccccttttttatcctactttatttctgagaatggggattgggatgtttccaaacttactaactgtttttctgctcctctggttgatgatattcttagtgtccctcttctgggtgattttggagaggatgagcttgtttgggggcaggatagttctggggagtgtactgtcaagtcagcttatcattttgccttctcttctcatgatcttccttcttcttcttcttttgctgactctaaaaaattttggtccaaactctggactttgaaaatccctccaaaagtcaaggtgtttatttggagaatgctttctactgctattcctgtttctttttcccttcataaaagatgtgttattgattcccccctatgtcccctgtgtaaattacatcctgaaacggttaagcatgcattactagattgttccagggcgaggaaagcatggaaatcttcaaggtttgttaatctttataataaatataagtatctaaatatttttgatttcttttacactatgtctcaagagctggacaaggagcattacagtattttttgttgttttctgtgggctttgtggaaccaaaggaataatgtttttcatcatagacaagtgggtcaaccttttgatgtttatgaatgggctgtggcttttttcttcaaatttttggatgctcagcaggtctctgtttttccctctgctgccaatcaggatcaagcagatttgcaaactaccccttctcagggagcttttcagatctttacagatgcagccatttatgttcagaggaaaaagtatagtattggggctgtggttttgaaccattctaaccgagttgtggctggtttggccattcctttttcaggttgtgttgatccgatggttgctgaggctaaagcaattatacatgctcttcagtgggcctcctcaatttttttgccggtggacattctaaaaacagattgcaagtctgttgtggataaattgtactctagtaaccggggttgtaatattatggatgacttaattggttgtattaggaacttattatctccctgcacaaaccttaaaagtggtccatattcgtaggagttttaaatgtacatgct

SEQ ID NO: 241825 - DNA, 802 bp, Cannabis indica
gggggagtaatggtggtggctactttgttcttttttctgtttttgcctgagacaaaaggcaagaccttggaagagatggaaactatttttgaagatagaactatgagtaaatgtaataattataagtcaatggaaatgaggccaatggaatattcaattatttggtgcaatgataaattaaaagaataaaaaggcagaatagtcagcataactaattttttactagtgttttcagctagattagaatctcttctaaaaaagaaagaaaagaatgtcttcaaaataaaagttccatgtagaatattaaaatcttcatgtgttggccgacataattggaatagccaatatactaatagaatattgttaattaaaagctcgagacactaaattaaaccaattttctgtgatgtttataaccatataataaatattatattaattattatgccattctttttattaatagctagctagcttggtaaccattttggttagctttcttaactgtaccaaataatagttttaagataaagattagccaaaatgatgatcttcttattctttcattccaaatactatagaggctggttgacagtttaaaaactgtttttttgttttttaaaactgaaaacaatttttaaaaactattaggaattgtttggcaaaaatttttaaaatctatttttttaaaattgagttttaaaaaattagaaaacagaaaacattaaaagtgctgttttcgattctcaaaaataatttttttggtctaacatattatattttatattttgctcacatactc

SEQ ID NO: 241826 - DNA, 872 bp, Cannabis indica
aatatatgtatatatttatttatgtaaatatttatttatgtatatatatttatttatgtacaaatgtaatgcgtaaaaattcgatgtgttttaaaaaatataatatgttataaagttaggtaaaaaatatttggagaaaaattttttgaataggaaagattttagtttaggcaaaaaaattatttatttaatttagtattgtaaaaattaattagttgttttaatttagtttaagtataattttaaattgttattaagtaaaacaaaaatttagttaaatgtttaattattttctatacaataagtttaagtttaattagtttgatttaaacctttaattaattattaattgataatgttgtgaaggtatttatttgtggtgataccgtttgaaaaattttgggacgctatattaacattggtaagctacttaaacttttttattgaggtgtttaatattattaatttcaattatgtttagacattagtggtgatcttgtttgaatacgttaattggtaactttattagacttggtagattattaaaattatgttattaatatacttagttaagtttatatattatcgataatatatatttgtgtatatttagtttatacatattgatatatatataagttgataatagttataaagattaaagttttatttacttttattttaatttgatgagtttatagaagacagtttttaattatatattttaaatattttataggttttgggttctttctgttgattgaagattgcacaattgtagctatatatattgaagtaaggtataatcactaagatttaaaaaaaaaaaaaacgtaaggtaagttgtaagtatagttagtagtattattctt

SEQ ID NO: 241827 - DNA, 508 bp, Cannabis indica
cataagtgaagaggtcgagaaaggccaagtggctaagggctttctcaacaaaataatgataactcacagaggaggttaagaaagctcaacgagctaacactctctcattgtgatgagtaccaaccacaaaaagggtgaagatagttggtaaagcctacacttacccgtgaaaggtaacacaaaaaaaaagggagagaagaaaaattaagtcataaagacgaagatcaccaaactctttctacaagaacccttaaaataattcttatagactaggggcaagtgttgactccccgaaattggtaagtttaatttttggagatctctagattaataagagggaaaatcctaaagtacactaatagtgtatgggcaataaaatagagggccgactagcaaggtgagacaccacatgagagtaagagttagtttgaggagggagctccccgctctctctctctccccttttgcttcctgttcaaccaagggagctccctactccctccctcta

SEQ ID NO: 241828 - DNA, 1228 bp, Cannabis indica
gggtgctcctgatcaggtgccggtaatcctagtcacacaaattcgggatatttcacacttagggttaactcctgattccatactcataaaattcaatcatggcatttaaaatttagataatcatacagagctcggaacgagctttctaacgatataaagaactcccaaatcggagttcgaaatcaaaagttatgcattttcaaagttcaacacaaaactgcccaaaaatcacgaggacgggccgcggtatgcccaaaccatgccgcggcacctgggacaaaacccaagttccaccaagaggggtgggccgtctgggtgcagaacctagaaaccagcaagttcttcacgaaaattcagcttccaaacccgaccaaactcattcaaaatcataaccaaaacttccaaatcataatcaagttactagcaatcactagggatttaaaacacatactcatgcattaaaatccaacaataaacccccaattcagattgcataaaaatcacaaaattcatgcacaatcatggcaacacaaagctcttgaacaagagttcatttccaacaactcaaaccatttccagccatgaaaatatcccaaaaatacatgattcaatactagaaaataccctataatcagaatccatgctcaacaactcaaaccaagagattaacatgctcaaactaatcaaagaaaccattatcatgcaacctatcatcatcatcatcatcaagaacatactttttaatcataaaattcagcaattaatacaaggttaagatcatagaaagctatctcaaaatcaccacaagggaagaacaaagatttctcccaaaatttagcttccaatcaaaccaagaatcaagcaattccacatgaaactttgaaacttcaagaggttagagagagagagaaagtgtgatcgggtgagagggagacaaatccagaaaattcatcctttatccctcaaaatcaatttaattcaatgaaactcaaatatggtgaaataaccattttgcccctagggcttaaatacacacatacaccctcacaagggtaattttgtcaagtcatactcaaataattccaaataaatttcagattatcacccacaaataaaaatgccaaataaatcaatccaatttgcatttcgggcccgaacccagttcggcccgaaatacctggttgtgactataccgcgcccacctgtcagaacacacctgaaaagacaa

SEQ ID NO: 241829 - DNA, 897 bp, Cannabis indica
tgtaaagatgcaaattaacttcaatatttgaaaaacatcatatcaattccattatttctaacttttcacaatccaatgatcaatatgcttgcatgacttacctctttccactaatgtcaacaatccttactcggaatcaaaaagattttcaaggttgtaatgtattggcttaggtaataggtagatgaaaagttatttaggctatattataccataaatagactacaaaccatcaagcacctacaataaattacatatctcaaattgtgcccaaaaatttcaatgactgagaattttacaactattagttccaacatcactttatttattcaacactttttttcctttcttttttttttcttaattttatttcatcatcatttttttaagaacataaataacattagtgatgttgaaaaatacttttacaattcacacactgtctcattcacacacttaaaataataatttcatccacacacaattcatctctcccaaacttatttctaagcttatggtataattcaagagacaaagaaagagaattgcaagtggattcaaagttaggctcataaaaatacagttgaacaggctaagctcaaacaggcaaaaactaggaataataaagataaaggtaagcttgaaaggtccaaacgatccaaaaaaaattgcctcatcattttccaaataagcattgttaaggatttcacctcaaaaaataattcatgcaagttctatcatatttaatcaatcttaccataaaccaaagtaaaataattatgatacaatccaactattgacaatttacatcaatacaaaatttttacaagcatccaaattaattcaagagtaaaaaaaatcaagcacacggtttaaaattttaatccattccacaaa

SEQ ID NO: 241830 - DNA, 1043 bp, Cannabis indica
atttaatttttattgtctaggtttttcggggacatcttatgtatgttgcaatattaatgttgtggctcataaatcggtttaacacgcccttcaagtagattagttaaattttttttaatggaagaaatctcttctactttgactttttggtattttttctattaactataatggttacccttaacaaaaaaaatatggtaatattgagtgtatgaaaattttctagatatatgaacatttttttttttaagaatgatatagagaagaattataaatttttgtatcatcactgggaaaaattaaaattccaagcgagggaccatctaagaagaaaaagtatgttaatttagattatgaagaatatcacattacctaaataattgacgatgcacaatttgaatccaatgttgatttagtgaaacttcaaactattttagcgaaggctaaaaagtctatttatcgtaattgtaatagatttactaaattatcggtacatgctattttatacattatgaaagctaaaaataggttgagtgatcaaagttttatggaactactagctttcttaggatacaatttggaaagaaatggacgaaaataggatgagcaaaatccattgctaacaaatatcgtcaacaaccttatgaattacaacgtgaatattatgttataaagtatatcaaaaatttattgtcaaaaaaaaagtatatcaaaaatttcattactgtgccaaattcataggattacttagactattcggtaaataatatttatttacaagtttatattttaaatacattttttgtaagaaattaattaatgttttctattttttgttttacaatttacaagtgaattgtcgtacaaaaacaatgagatcaaagaaatacaggataagtgaacaaattttgtgatgtctctcttacatgcttgattatggttattttttttatagttattattgtaattagataacttttattattggagcttttttatttttacacttcaaaataattttttttttgcatttttatgaaatt

SEQ ID NO: 241831 - DNA, 622 bp, Cannabis indica
gttattaatactatcgcagggtccaacctctagaaattttgatattttctttactaattattgtttgcttgctattatttatttaatctaatcgatttaattaagattcactgtcgttggctaaaagcgaggttaatattttggtgcttccattaagagcaaagaaacaagtttttgtcttaagtcttttacagggcacaggatgtttgtgcaaactcgaaggggagttcaaattgatccagtcgatctaatggtgacagatctaaacgtgtagccacctaaaaaggcaagagatgtaccagggacaacccttggacaagtcaatactaaaccaccaacggtaagccatggagtgacttcccctctgcctaggttcaatccaggtgtgcaagaaactgggaataccagtacgaagatcgagcagatcactcctagcactgaaatcttgtccatcacaaacagtcaaaggccaattgaagatgatactaagctttagaacttacgagctactttacggttaatgcaaggccataataacattctgcaccatgagcacacaagatatccaaaaaactatcaatgtcgataatcattattatatgttcaaaagtttaattcccat

SEQ ID NO: 241832 - DNA, 963 bp, Cannabis indica
tgcccccagcctttttggacttaacaagcatgccgtccacatacactttcatgttgcgactgataagatctttgaacattttgttcacaagcctttggtatgtggcccttgtattttttagccaaaagggcatgactttgtagcagtataggcctaagtctgtcatgaagcttgtatgctcctgatctggtagatgcatcattatttggttgtaacctaaatacacatccatgaaactcaagatttcatggccaactgtggcatctataagcaggtcaattctcgggagcataaagcggtcctttggacatgcttttgtttaggttggtaaagttgatgcatactctctactttttgttgggtttgggcaccagcacagggttggataccaaaagtggatagaatgcttctgttatgaagtcatgggcttgtagcctctcgacttcatctttgagcgcttcggcacgttctttgtctgataacctcctcttctattgtatagttttaatgttgagatcatggatcatcacggaggggtcgattccaaccatgtctccatgtgatcatgcaaagaggtccaggttttcccttagaaattttatcagtaatgattttatttctggtgctaaacccttcccgatcttcagtattctagctagagaactaggattaaccaccacttcctccaactcttctacaggtccaaaactgtctgcaggatccccaaagcaaggatctatgtatgtgtccccgctttgggctggacatcattgccatttgctaggctcttcttttgagctcttggcaggcatcttctctttcttggctttggacagggccaagttgtaacaatgacgggcagattgttggtctcaccttaaacatcctaccccatgccttgttgggaacttcaggcagaggtggtagatgaagatcatctccttcaggtcgtatagggctgat

SEQ ID NO: 241833 - DNA, 1327 bp, Cannabis indica
gaagcaggtttctagcttaaaggaaacttatgttttcagtcagaggttaaggcctttatataggaggcctaaaaccctaggtttacaattcaaatcccttagcattcgtatagtttgttagatatttgtaaaagaccaaagtgctcctaattttagatattattcagctattcaactgggcttttggggccaaattcgtcgcccatcattgttgtccacatgtataagtgtccatcaaggcctgtagtgcactccttggttggcctggtccctgtggtagctaggctggcagaccatggtgttgtcccaaggctagctagccatagggcagcccagggatggccgaccagctcttgagagagagctagtctgtcacttgatccccgtttgagtgttggggtatgtgtttgagctagtgagttgtactgccacgtagcactagctctgtccacataagcatgccatgtcatgaggacaaaaattgggataacatttgccccccaagtccctgtgcgaatgtacgtacagatagggactttacctactatattgatgttgtcgggactgttgttacctttgctgaataaattttgatgcacttgttgaagtactatctcttgactatctaatctcattgcaatagagaaacaacttctttagttgcatttatgatgtgttggtgaggtaagtaagaaaaaggagcccacatgtactacataagtgaatttcggggggaaatccttttttcactttcattgttcacttttactttctctcactacaaattttctctacaaaaagcttttccttctctctaggtggccgaacccacaagcattattctcctcaagatttttgcactatttcaacaatccaagcttcccaccttcatcttcattgaaaatcttattgtgggtaagatttctatcatgcatatcaaaataacgaatggactacaatctaacgtaagaatcaaggcatgttcaaaacaagaaataatgttcatgcattcatggctttgtttgaagcctcaccgaccataggtggccttaatggggtctggccggccatggggacaatgtcgctcggctggctagcctatgcctggaactagggctgtacaaaaatatttgtaaactgcccaaaccgaaccgaaaaaaccgataaaaattacaaactgaaataacccaaaaaaattacaaactgcccaatctgttaattaggcgggttgaaaataggaccaacccgcctaattaacccgaccaacccgattttgtaccttaatttttttttcaactttttagtttttattatatataacataaat

SEQ ID NO: 241834 - DNA, 770 bp, Cannabis indica
actagaggttcagcctctgtccatttagtaaagaaatcgacagccacaactgcgtactttgctcctcctcaccctgtgggcagtgccccaatcagatcaatccccgatattgcaaatgggtatggtgaggtcatcattcttagttctgttggtggtacacgaggtatatgtgaaaacctttgacctttatcgcaccttttgacaaattcgtgtgtgtctttatttattgttggccaatagtagccttgtcgaattatctcctttaacaagctttgccaatctgcatggtctccacaaaagccttcatggatttccttgataatctcgcttgcttctgtggggaggacacaccgtaggagaggcattgaatagcctattctgtacaattttccttctactatcgtgtagagaggcaccgtatataagagttttcgtgcctcgtttttgtcagctggaagtttcccattaagaagataattgactatgggtttcatccaggtaggcgagctgactatcatctcaacttcttccctttcatatatacttggctcatttaacatttccaccggtaccaagttcaattcatcaagttcattctgtgaggccagttatgctaaggagtcggcattagagtttttttctcctggaatttgttcgattttaaaataatcaaacttttccaagttcttctgaaccttttctaaatacttttccatttttaaacccttagcctggtatttccctaggacttgattgacaattaattgcga

SEQ ID NO: 241835 - DNA, 735 bp, Cannabis indica
actctcaacaattcttttagatatataaatttattttaggtatacttataggtgaaacatttaatcaaactcactactaactattaaaatattctatcaattaatagaaaaaaagattagggaattaattaaatgacactattcataagtaagccaataataagttcaaactctatccgcccgaatctcatgtcatctttgtccacatgaaaccatacctcgtcttctttttcattgtcaactttcatcttctataagagtaggctgtggaccaacgcccctgagaaaattattcggctttccaaaagtacttgaaagggttagccttaaccgtatcaatcaactcaaactctttaaacttggccttgatatctttaaacttatctgaaccccgataggtaagacgtccgatgaactgttgggaaactgtaagtttaagttcaagagcatctgcaaaaacagtaagcaaacatattaaaaactttaaaatttcatatcgcaaactgcgttgcgaatatgtcgcgaaaaataacaaatagacagtccatgatttaacgatatatagcaataatattgatgacatctaatttcaaatttcaaacaataaaaacataattaaactataagcgatattatattaacgacattttagcgatgagatgaaactacatcaagcctaaagacgtgttgaatagagatgttgcaacatgttgtgaaacatcgacaaaaacacaa

SEQ ID NO: 241836 - DNA, 806 bp, Cannabis indica
attgctctttatcagaactggtaagatttcataacctatcatttttcacaatcatttacgtgacattttttccaattaaaacaatagtaaaataatattacaaaacaatgcataaaaatcattttctagtgttcttttttattatttggttgatccccctaattagcaatgaatttatgtttataagccaaaaacaacttcagaacaactttgatttttgtaatgtatattattaatcgtttgtaagggatgatctatatgaattatttttttttctttttaaaatggcatgtataattaaacaatttcagattatactattttaatttttttaatttccaaatctaaatctgggtgttttttttttattatttaaaattaaaaataatgtggatttaggtgtgtttacctcttttgtttcctttgaatctgctttaaatgttgttgttgggtcttgtttagtcgtgaatttactaatttgtcctctttgctggattttatgggtattttcctagtgtttctatgattccggtattgctttgtccgttcctaacgaggaaggaggcatcatttgtcccttgttaatgttcacagtataaaagaaaaaataatggactcggacagtataaaagaagaaacaaataggcctaaacagtaaaaaagaaatttctgccgtgtgacagtatttttgtaaagttgggaaaaaaaatcaatattttttgtaagtttccccattaataagaaaactagaatgcctgttatcaaaaaaaaaagaaaaaaaagaaaactataatgccgaataagag

SEQ ID NO: 241837 - DNA, 579 bp, Cannabis indica
gtagttgggaaaattctgcaccggacatcaccttttaccgcttgtaagtccatttgcatctcaaagtatttgatgtgagatagaggatcttttttgcccgtgtacatttccatgttagcattttgaacttgggtggtagatcaagagcattgatttttggtgaaaaaggtgatccccttgtcccgtcaagttctaagttcgcgagttttgggtcagtcaggctttgtacaaggttcttgagttgatctatttaggcttgcagcaatgtatcaacttgacctaccagtggactgacttgtgtcacttagaacattatcgggcacataattgtttaaattggtcggttgaacattgggagggatgtattgttcgttgctccccttctgcgattaaggtcatcccttaaatcatgtacgagaccaaatcgattaaagactgattcacttgggggccttcttgtctagttgttatcaacaattggttggtttagtatatctgattgaggacagatgttaaactgatcattccatcccaagtaatgaattggcaaaactttctcgtctaccgtgtggcccatag

SEQ ID NO: 241838 - DNA, 1452 bp, Cannabis indica
tcaataatatgtcattaaatcgaacacacaagaccggtaataaaaaccagatacaataagtataaattcttagtagtttttttttaattgtaagtgggtccgaattatatgacacactgtgaaagaagtacaataataagtatatgactttatagaactataacaataaataacataatatgtagagcataactaaatctactcccatacaaggcgggttggaatcgagcgccatatatatatgagtaatatatatttttattattattattgttagtatatatgttttgatatatatttttttgttatacggtatattattattttttaaataatatttaagttctatcttttattgtacttttgctgacatgatatataattttattagcattttatatattttatttttatttattgttattatatacatatatatttctactgcaaggtatatattttttattatatggtatataataaattttattgtatagcatattattttattttagatcatgaatgtttaggttttatttcattatatataaaaggtgatatataattttattaatatggtatatataatatttttaataatattatattattttgttgttttattttttattgtaggtatatgtgttttgttgtatttttttttttttttttgaaaattaacgttcattaatcataaagttagacctcgcggtcattacataaaatattcatagggatagatgatacatcaaagcacccaaagcggttgtgggaaaacgcccatttggccacattgtgagtcataaaattacaaattctgtcagtaatacatagtaaacaactaggaaaagatgaaatgattctattacaaaataaggaatagttctcaatttcccatctagggtcgaagccattgagccaattgatcactaccttagaatcgctttcaactaggatgaaattatgtcctttgtcctttgccacttcaagcgccaaacaaactacagcagcttcaccacaaagagcgtctgaaaagtccaattttttcgtgtacacccaaatcaccttactcagatctcttgcgatgactgctacatatgaatgctccccacccactttaacatcacagtttagtttaatccagtcctgagggggaggctcccagacaacgagttggtttggtgcaggagatgggatgagagaatctctgtagaccgcataagagtgagaaataaagttaatacattgattcacattatcagtcctctggttatgtaccttatcatttcggacccgccagatcgtgtctatcatagtagaggcataaagaaacacctcatcagtatttatgtttctgctctttaggttccataaaaatttaacccagtcccacatacggatccctgttccagagacaggaaagataccacaaggtgaggactgccaaaggtg

SEQ ID NO: 241839 - DNA, 1164 bp, Cannabis indica
gggggcatgtggagccatatgtttcacttaattattctagagagaaatttgtggtcaaatcttttagggttcgtttagtatacagtgttatatcatattatatagtattatattagattgtattatattatattagtattatttaatacaatgctatatttagtattgtcttgtattaataggttgtgtagaattataatatatttacaataaacttgaccacaatcccaatcccaacctggacttggtcttggactcagaccccatcccagaccccgaaccaaagactcgaaccccgaacacgacctggacctagacccaccccagacccaagactggaaccctagaccccagacccagacctcagacccgacctcgaactttgaaccccaaacccaggcctgaccggacccgaacttggacctagggtcaggggtccggtcccagtatcgtgtccaagtttggtgtccgggttaggggtccaagtttgagttcaaggtctgggtccggggtttgggtctcgaatcccaagtcaggttcagtgttagggtcagggttggggtctgggctttaaggacgagactggctttgggtccgagtttagggttcgggtctgagctctgaggcgaggctgagtttgggtctgggtctacgatttgggtccaagattcggggtcgagggccaaggttgaccccaaatcctttataaatattataatataagttaatacgaatcattttttatgtattaaataatacgattcacatggtattaaaatataagattgtaatgattaatataatacaatattttatccaaacatagtgttatttgggtttggatctagtttcgaagtcagggtctcagaccctttgtaaatattataatacaagctaatacagatcatttgttatgcgttaaataatactattcacattgtattaaaatataaggtcgtaatgattaatacaatatattattttatccaaaaatagtgttatttgttatttaatacaatacgaatcttatacgatctaccaaacaagcccctaatgtattaatttgtatacacttttatatattttttttgtaaaaaatccaccttaaatttacttctgtttgcaaagtcaaaatatcagctaacttaccgttaactgacaact

SEQ ID NO: 241840 - DNA, 929 bp, Cannabis indica
gaagtacgatagccaacaaagtggcccaaactatgatagataatggagcctcagcaaatatactgtttaaaacgtcatatgagaaaatggggctccaacttaaagatttgatcccctatcaccagcccatgtatggtttctctagccagagtgttccacctttagggcaaattttcctaccgctcactattggacaagctccgaagagcataactgtgatgcaacaatttctggtacttaatgttccattagcctttaacgtcatgttgggccaacaagctttatatgacttgaaagctgttacatcaatattccattcgtgcgttaagttcccaacaaagaattgggtagagtgcttgaaatgaaatcaacaagttgcacgagaatattacaaccttgccctaaccaaggccaaaaaggaagaatccttcggtcagagttcggacaaggggaagagaatcgccaaataaggaaccccccaaggtggggacgaagatgtggatcctcgacttggtgagcacaatacaaatgttgggttggtggaagaattagacgaaatcgagattgacctaagtgttccgaccaggaaactcaaaatttgaaaaggattgttgcttgaagtaactctgataaaatttctaagagaaaatcgagacattttggcctggtcacatgaggacatggttggtgtcgatccttctataatttcacacgccctaaacatcaatccaaacttccagcttgtttaataaaaagaagattggtagacaaggaataggcccaatcactaaaagaagaggtagaaaggttgcgcaagtatgtattgatttcaccgaccttaacaaggcgtgccccaaagactgttttccacttccaagaatagatcaacttgtttatgcaacagtcagacacgagatattaagcttcat

SEQ ID NO: 241841 - DNA, 990 bp, Cannabis indica
taatcataacatagatataaacaggattaagattaggtgcccatacccctaaccgtaacccctccctgtgtcctacacggtactgagttaagaacgttcaaacgacaacactattgaccataatatcggtctatactcgatacactagtcatactctagtcgtatcgatgtgatactgtcaagtagtacattactatcgaccataatatcagcctatacttagtacgctagtcgtactctaatcgtaccgatgtgatactgtcgagtagtacataaggcaacatacatttatcgatatctaatataatactaaatatactaataccgctattataatataatctattaggcttaactaacatgtacgctaagcatgtaaacacatatgaatatcattatactaatcttacctcgtttccaaattcaggtgtgccggccaacctgagtggaacagctgctcaacgatttacaggcccccaaatcatattatttgcaaaactaatgagtgatacggtaaatcacttttcggtgacttgaactcgaaaataaaagttttcctatcaataaataacatggcaataccctaaatattgcgaaaacgggaaaaattagggttctctaaaataccccaatcggtagactggttctccaactagaatttcggttcagaagggtttcttagggaccaactggttgaccggttcctataggtcccactgaaccggtcgatcggatcagtgcaagaaacactaaaaaacttcccaaacaactcaattcgaccccaaacttcatacaaacttccaaacctgctataaataccacaaagaacctaaaccaaacaataaaacatctcagcatacccaaaatcaaaatccaccattagagagcaaagcttgagttcataaactcaaaccttactcaatcaccacaacaaccatcaaaaataacttagaacagctcaaataaactcaatatatcatcagaacacaa

SEQ ID NO: 241842 - DNA, 1554 bp, Cannabis indica
aattaattgtttagtttatgaaaatttagtttcaattaattagtttgggattttattccctatttcatattattgtagacaatttattatgacatttttgagattattaataaattttctctttaagaaattttcgttgtgaattgcttttacgaaattaagcttcatatttctttaacttgtatgccaataccaattatatttatatgtttatcatgtttgtgtgtgtttgtgttttattattgatgcaaaatctatggtatattattctccacaaagagatatatcacataaacacttagaatttaaattcaatatttatgaataattgtttattcttaagcaataattaagattttatttaataaaaaaatcttttgatctgataggggtggaagaagttaagaagtaatatatgcagttcaacgatcttttatatcttttgaattctaaattatattcataactccacgggatctctatagcacttaggggtggaaaaagctattgacatatgtagttcattttttttaaactctagactatactcaacacaccacggtatctctatgacacacatattttgattagacatggatgtaatataataaacaaattagtaaactattaaaacttattcttgatcctataattgttccaattaatatgttactatagtaatagaaattaataccaagaaagttcttgggcatagtatcacggtacctaatctgagtgggagaattttaaaattccagcccatctttatttggatgacaccagtgatagattactatgttatgatcatgataggaaatttagaaatataactgagaaagtaaatccaaccattcatatggatataaataacttatcataattataaggataagataggagaattttgcaatgtctattcaaatgactgaggaaaaatccctaatccttatgaaaagttttatggtatctcttttatgattacttaatcttaagcaagtattttacttttatgttaatactagaatgctatgttggtgacttagtctagaagaaacctatagtttccgactaagataaaatgtcacaacaagatgtccttgagaaccaatattaagaggctaagtgtacacttgtgtacaaacttaaccagattcctacttttgagtgggagccatctaagatgtaatcaaacaaggaatattaggagataatcaaggaagaaattctaaaagttacctatatgttagataataggggtgtatattagaatcattttatttacgccaactcataacttattagagatggtggttactctggggttggaggaattattctagaaggatgtaaaaacccatctataataatttagttccactagtaaagctaaataacttagttgttttcgaaaacattggaaagttattcaaactgaagatagttcttaactgtgttatctctattccatgtttggatagaattagagatttatcttctgtacattcagatgcacttaataaatagtatagaattcagtatccgtagatgagtaat

SEQ ID NO: 241843 - DNA, 906 bp, Cannabis indica
aaatttgtgtagaaataaaaaaatttgacagatttagtggtggtgattaatgaatgatttcatggatttgaaaaagagaataagtgagaaaaaaggaaaaacatcaagaaacaatggaaagcttacctgccgtgaccttctagtttcgactgaataaatcgatcctctttcccactgtattttttcacttactgacaatttctctttgctttctcattctatccatcaaccagtatcgtacatactctaacagatttattattgcattatctcttcaatccagaatggttgaattgaaactctcacaaagattattcagcaacatatcacacttactgaaagtcctaaagtgggacttggtccattcagatggtgactttttggacaaccattcaaaagctgctgcattagtctccttcagttcatccattctccttttgaattcttccactgttgtagctctagcacaagcccataattgttgcttcaacaacaatccaaggaactccttcttgaagttggcataaagatgcctaacacaaaaacgtatttcagaaccttcataaattgctgctacagccctttccaaccccttctgcctgcctgaaataaaaatgaagaatcctatgtcttgtacatctaggtcctctttcagtagttgcgcaaaccaagtccaactattagtgttttccttttcaactacagcatatgcaagaggaaacatgttgttgtttccattaataccaatggctgcaagcaacatacccctacaatatcctttcaaaaagcacccatctaacctgatgatgggcttgtggaacttgaaaccatatttacatgctgcaaggcatatgtaaaccctttcgaaaaaccttatatcattcactaaacttgttatgatgaaag

SEQ ID NO: 241844 - DNA, 967 bp, Cannabis indica
ttcttcttccatcttggtcttcttgttgagagctaaagtttcctcttccttctcctccaagaagctggtatccatgttaggtttccaaagccaggcccggtatatagcgcggaaaccaactttaccacaccgttctacggtctcgatttctttctcggtaagtttctcagcaagcttccactcaaactcatcagcttggactttgagggccttctcgacctcctctttttccttctcggcttccttctttgctgtccctgcttcctccttcactttctcagcttcctacttgaggcaggtaatatcttgttgggcgttgtctcattgctcacacacatccttgcattgggatattaatttgtgagtgtcgccctccaaatactcaagtcgctcagagagtagtcaattggaagcaaaagaatcaaaggaagcctggagaattgcaaacatatgagtataaaagaggtataaaagatagtaaaattatattaacaaagccgacgtaccatgaagtgacagtccaaggtccttgaaagcatctcctttgggctcctaagattgagaaaatcccaatctgggggaaggagcgtttgaagtttgtaccaacaagcgaccccgtacgcctgggcaaactcaaagccagcttctccagttgcgaccgacggggtctcgatggcctgactcgaaaaagcggaaacgggattcgcctcgagatgaggggcattggcatgaggaacagctggaggaggagcttactcttgaatctcgttgttcaaaccttgagatcaataggcttggccgataactttttcttttgagcagtggttttcctttgcttcttaggagaaaccacctcggtgctgggctttgtgccctaaataaaactctatttcaatgtaatcactattatttaaattatcaataaagagacagaagtattttcatcacttatttaatgtgtcatttg

SEQ ID NO: 241845 - DNA, 737 bp, Cannabis indica
atatatcttttgggagttggctggaagatcgtttcaacaactgggatttgagggagaggcagatcggggctatgctttgctgggctatttggcaagataggaacaacaaggtgtggaatgggaaaaccaagtcggtcaaaaattttattgcatttgctaatggtgatcttgaacaatggacttttgctcaagggaaaacattcactcccttttctttcttgattcatagtggagaaggggatgagcattggggtgcgccagaggttaataaactcaagatcaatgtggatgcagcaacatttgcggatcgaaataaatttgggtacggttgggttctccgtgattctgggggccacatcttgcagtcgagaagcgggtcttagaatggttgtgttaatccggctcttgctgaggcttttggtgtgaaagaggtactaagttggataaaggagtcaaagctttctcatgtcactgtggaatcggatagcctcataacagttcaagcttttcggagctcggtgaatactaattctcctttcagttgttgcattgcagaatgcaagagaataatttcatatttgaatcatgtttgtttacgttttgttaaacgttctgctaaccgtgtggctcttgatcttgcccgagtctcatggttatatgctgagcagttattcggtggacactgttccgaataacattagtaatgtaattgcgcaagaattgttttaaataaagtt

SEQ ID NO: 241846 - DNA, 948 bp, Cannabis indica
aagttgggacgttgggactacaaactcaagacgttcgggtacccagacctagacttcacggacccgggacccgagtacccagacctgagacccggacccgggactcagacttgggcccaaatccagacccgggacccggatccgaattcggatctagacccggactcgagacttgagtcccaaacccgaacctagactgggacccaaacccggacctcacctatagttggtgttggggtcgtatttattaaaaatatattataattttatataatctattaatagaaatcaataccaaatatagtattgtattaaataatactaatacaaaattaaaatagatataaaagtataagcttagatattaaaaaaagtcaggtcagatcagattcgatctgaataagtcgggtcgaatctgatctgatctaacgggatggggagggacggatccttacagatttagatcaggtcaaatcatagtcgaattagatccgacgtgatccgtttacactcctaattataccttacaagggtgtttgacactatgggtgccctttaacatttctcaatatagaaatgtaaaggggcctcttatgccaagtaccggtggcaatatgtaaattaatattgaatctcatacattttaatttaataaataatataaaaaccctctaaccacttacaagagaccacatcaatatagtgtgttgagtactataaaatatttaataacaatgctcgatataatattatatatataactttattttccaacttaattaatcaaactagcaaaggtctctagggttttattatcctgcatgtgcatgttctgcctgacaacaaagataatattttgagaaatatactaaaaggcacattaattggtgtttaacttatttttaaatattatattgctattagtgtaattaagtatcatgtctcata

SEQ ID NO: 241847 - DNA, 785 bp, Cannabis indica
taggtacaagtgcaacccaaaaaaaatggatacaggatattaaccagaaaccagtattaatctttttttgaaatagagagaaaaaaaaattgtttctggtgagatgaaaaaattccaacagaccatagaagccagattaaacaatcggatgttatcatcaccaatgaaaatgagtaagactgaaagtacacagctttagtggaggattgtgaaggtgatgaagcagctgatgaattagcgaaaattaaggtgcaaggtagtgtgcatgatcaactagtattactgtctgtagatagtagaagctactcacaactttatttctttagaattggttaagaagttgagactggcgatgtgagaaacgagaatatgaaacattcatcggaaatgagttattggtgaggaatagggtacttgtaaaggtgtagctctaattcaagaggattttttacctttggcattggaaagtagaaactatctattcaatgatttgagattttagggaatgtttaatttaattcgcaaaatttcattgtgaagctcgggcttgggtgagaaaaagttgttaagccaagttggagaggttgactacaaggtggaattacctgcgacagctcagattcattccatttttcacgttttatagttgtatttcctttcttcaaccttgaggtcaaggttcaaatagggggaactattgaaaggtttcctgagactaatattgtgatttgttttgtggctgagtgagatggttggttcacgttgttatgctgtgcagtcagtga

SEQ ID NO: 241848 - DNA, 1172 bp, Cannabis indica
ctcctcagtccgagacacttcccaacgacgcctctgctccgattcctccatcttcagctgctcctcgccgatcttcaagacctcgatcttagattggcctagattcctttgttcattcccctattgttgttgatactcattcccaccagctcaagatcgtggaactcttgacgatgtttccaaccccttcttcctcagctccgacgatcaccctggcctcgtcttggtttcctcgatcctaaatggtgcaaattatcagtcatggaagagagacatcaccatggcacttgctgctaaaaacaagacagggccttcatcgatggatctttgcctcgaccaactactagtaacctcctatataaactcttggattcattgcaataatatggtaatgtcttggctcgttcattcagtctcccttgaaattgctcaaagtataatgtactttgatcttgctactgatatgtggcatgatcttactgaaagattcaatgaggcaaatggtcctcgcatctttcaattacaaacacaattaacttgtttgcaacaaggtgatcaatccgtcacctcatattttaccaaactaaaatccttttggaatgaattaaaagaatttcaacccaatacgacatgcacttgtggtgccatgaaggtctttcttgactactacaaccaaaactaggtactgcaatttttgactggtttaaacgaatcatatgcctctattcgtgctcaaatcttactcaaggagccgattcctaacctctccagagtttgctccatgattgttcaagagaacgccaaagaacgcttggcaattctgatattccaccacttgcacattgattaggccatcttcttccaccaatcctcgacgtaaacaaagaaacccagaccttcgtgttccacctgtggaaaactaggccatctggttgaaagatgctacttcattcatggatttcatcctgatatgggaacaaaaaagaaagcaagaaaaaggaaatagccattgctcatcaagcctcggccagtttcaatgcagatgatgcatcttgcacactgatttcagttgatttgttcactcaatgtcagcaactaatttctctactcagtcaataaactcagctaaatcgctcctcgtccagaacttgctgttcctgcgactgcttcca

SEQ ID NO: 241849 - DNA, 1127 bp, Cannabis indica
taattgaatcaaggctctaccaatccctccaaaattcaagaacccattctggcacaccaggaaggaagatccgctatcacacatcgcttacttcgaagttcagattgatctgcgaggagtaagagatgatgtcaggtacagaatctttcttgccacaataacaatcttggatcagcgatggtacctcaaacttccccttggatcgatcgactcatggaaagatcttatgattgcttttggcaatcagattgttcattctcgaaagcactaaatcgagcccaatgatttgctagatgtcaagcaataggaagatgagctcctcaaggactatattcaataatttttagaggcagctgccaagataaaaatacttagcgaggatgtaagggtaatggcgcttacagctggactaaaggcgatgagtcctttgtggtttgacctttgtctcaatgtattctacacaatgaacgaattttttgatagagtaaatggctttatcaagctggaagaagctgtcaacccgagctaatggcttaaaaggcagcaagaaaaagtcactaggctccccatcccctgacattgaagcgcaaggtaatgggaagaaaggaggtttgaacggagaaaaaagagttaacaacagtggaaaataaggaaaccccctggtagaaagaattccaaaacggggggcaagtccttgggagagtataagccttgtttcaccacctactccatcctcttggccgcaagagagtagatctatacggccacacagtcaacaatgtcgtattgcaaacctcttcccttcaaagagtttggaaaatgagacatgaacaaattctattgctatcacaacaattacgttcatgatacaaatgagtgtaatcagttgcgagacaagatagagttcctcatcagacagaaacatgctgctctttagcggtatgtacgacctaaagctccaactggggacaatgcacctctccaacctgccctagttgcaggcaagcttgagattgtgattggaggccctcacctagctgggaatttaagaaaggcctaaaaaataatgcaaggtctttgcgatatgaatcgagagtcgaagtactggaggtggtagagcgtcctcc

SEQ ID NO: 241850 - DNA, 593 bp, Cannabis indica
cttttggttggttgtgtctggtaatgcatttgacactaaagagcttcctccaaattttaaaaagctatacacatacacctcttataacaacatttgcttgtatgattggtatgtatgaaacatgtcaatgcgagttgtatttttgaagagtctttcttaagaattgtgcttgaggtataattggtttactaactactttttctccttatcattctaaacatgtaattaagaaaacctaatgttcactgcttcttctggtttactcctctctttttctataaaaaattttgccatgaatttaatgagtttgggtgcaataattgtttaaacaatactattattaaggaggtgttgaaatgattagaagtgatatactattactggccattgtacaccttattttgagcatgcaattactttgagacattctctgaagcaggcatcaatggtggtgaggtatcctctttacttttagagttctctaattttttatgaagattctctgatttcattaatgttttaattatgtgccatcatagtaacatatatactttaagaaaactacaataggctattttaatttagtatttgat

SEQ ID NO: 241851 - DNA, 867 bp, Cannabis indica
gttgagaagaattctaagtgtggaaaaagagcaagacataaggcactagtggaggactccaagagtattctatcacttcaactctatcttttatatctttagtaaatttcttctctttcaaattatcttgtagtagctaatttttttttaaagattattatgtgaaccacttgagattattttataaattaatgtgattgtttaatttctttttcttctctttattcagaatcataccatttgttataattgtacaaatattgactgaccactcttaattgttatttattaatttaaatcaaaattctaaaaaaaaatctataaatgctataattgttagaaatataaatcaatttaggacaagagtatctaaattatttgtataatttttactggttgttatgcttaattaattaaacttaccctaagaatatagaaagactttatataaattgtgtttataaaaatcttaactaaattataagtttcttaactcaacttatcaattgaataagaagaagaattgaataatttcattatgaagtaaaataaaaaataattgagaatcataataatctttatttttatcattgttattttaaaaaattttaattattgtttattttatttactttatttaacaactattatttatcaaatagaacaaaaaaattaattaattagtaattaataattaatcatcgaaggaacaatactttatttatcaatattacttttttcgtttccctatatttatgtatcaaattttaccgaaacgaaaaattccatacataaattttcaagcaaggaaatagtttctcattgaaaggttatactaatatgtcaacttaaatcccaaaaattgac

SEQ ID NO: 241852 - DNA, 985 bp, Cannabis indica
ctctattattcttctaacacatggtttcaaatcctcttcttctaaatcagatacagccccgctttgattctgggatagacattttgtgagcttagttaatacagttatttgatcttccaactgcctggtattgtcgtccaggaactcacatcctcaaatcctgtcattgatactattcctgagattgcctctgtgaggtcttgctttctcacctttgggtttatctctctttgcatttaatcgtttttgtaggtccgctattgacatactatcttttgcgtaaatctcctctaccccatcactctggttaacaaaatcactagggcaagtttttaatcctcgaggtaggcctttgtacctaagcatcaggcttatcgtttcgcacaacaccgcctcacggatcaatagggcagccttaccctagagcattggcaacctttattttttgcaaaggttggttggctgcgttcttgtttttccttggagcatcaacaacattcttgttcgcaggttcctcaatgatacctttttcattctcccttacaggaacaaaaggtccaacattcataggattaaccttttttgtggtattattttcttctagagtaggctcgtcaggagcatttttctcgggaacttccttttcaggcttgatcatggcatgtattcatgctaaggtttctcacatttggcgtgagaattcttcctgctccaccaatttctttttggtctcagcgagttcttgagccatccgaatcacttctagatcttgttcataataatactcctcatcgttcttgttataaccatcgtaaggatcatcctcctgaaccacccgatcctcctcgtcaatgggatcctcatcaatgtatttctaatgttgttgattcttctttgcggggcagctactcacttctgatgtctctccctccccaacaacacttgtccctacatgtgtagtgggaggaggattaacatcatccat

SEQ ID NO: 241853 - DNA, 521 bp, Cannabis indica
gtgtaccaagtggatatttatgtagcattaaattagaatattcttatgccgtgttttcctttatttcatagcaattctatgtagcggtgctacaaggtggttatgtgggtgttaagcagtttttcataataatttttaaaataaaatatacatagactcaatacttataagttctaacactaatataacaatatgaaacctcacagcttgggagacaccagtaataccctcagcatttttcttaattcatccataaaatgagaaaataacatttttgaagtaaaatggagaaaatgattcaccaaaaaaaatggagaaaacgaactccatacatcgtacactgggcatatacatagcatttcacacttgctaacatcatcttacacagtaaaatggatggatccaataaaggattattatttaagtgtgggggtttattagtaatttgcatagggggtgaatcactataaatatgtaattgtatagctattatgggatatggaatgagtaaatagaacttt

SEQ ID NO: 241854 - DNA, 1015 bp, Cannabis indica
aaattgtttcagtcagatgagtatatatataaatatatatatttagtgtattatgaccttgaaataactcaagaacttcaataaatacttaccttgaagcttgggcaaagactcgtgctgataacgtcttataaaataatatagaataatataatgggctgaactcctatttatacaaaaatatgactaaaagaatggaaaactaaatgaatgtaataaagaaaaatacaaccaagcattaatggtgataattaatttagtgatttggacatcaataaataatatttcataataataatgaatatttaatgttaattaaataatgttttcttgtgtgtatattcgatttcacaactgacctttttcatttagaatagttttcaaaaaaagagaatgaattctttttatggaaaatttgattaaattagttatatttggaaaaattatctgtcccttttgttagttgctcttttcggttttgctatgaatataacagatcatataatctttatatggctagaattaaagttcaaatcgtgatcttggacttatttagaatgtttcccgatttggcctaatctactattgttgagtgcgattttatcgttgcaaatcagggtttagtttaggaaaattttgtacaactgtgtaaacgtgtttgtggctgtctctaggatttctatgttctataaataagacctagccaaacgttctcatctcttctagttttattttgggtttttttcgattatacctttattacatctaaactttacttttttatctccaggtacaaaaataaacaaaaatagaaaagtaaactttcttttttcaaaaatacggtctctacatgagactttcccaaaataatttctcccaaaagttttagatctgaaattaacatgaacatgaatcacctccaaaaaatcctagattttctccataatcgacgtattctccaaacaacaccactaaaaatgtagaagtttttttcgaacaccatgaacgccggcgg

SEQ ID NO: 241855 - DNA, 1016 bp, Cannabis indica
aaaataaaataataaataaatatcatttatccaattttataatttaatataaataaaaataataaatttttaaaattgataaaatatctcgttagtttttcaaaattatctagattattttattgaaatatattatgttttcaaatttcaaataaggtcattttataaaaattgtttaaataatgaaatataaaatatctgaccttaaattcaaaaataagataaaataatcaaaaacaaattaaaaaaaattaaccaattaagccaaaaattgtagatattatcttttcgggttcaaaatctactaatatctaaaattaattaaaaagaatcaaattcaaactaataattagatttaaaatttgaaaaataaaaatctatatacaaattacacgaaaaaaatttgaaattaattcccagaaatagaatgaaaaaaagaaaaaaatgaatttgttttggatttggtgcggatggtatgctgtgcataccatccacactcgtgtgggaagggggactaccgagaaaacttggcattggaggctacatgcaccctctccgcgagtagaattgggcttcagacaggagctgggcgtgttttcttggacagatgttgtcctaacacgcgtgacacccgagtgtcatggggtgtccacgcgcgcacggggtgatgccccttcctattttttttcaacttttcaaaaaattataactaaatcaaataaaatcgaaatccagttctgcaaaaaaataaatttcttaattttttccatactatccaaataaaataattccagattgtaaatccaattattttgcgtaaaatttttgtaaatatcaagcaatcatcaaataaacacatagatcaacatgaatcacagccaaatcacacatacatcgttttaaatccatatttcttgaaagtaaatcattaccatggctatcaggccaattattggaatatattttaccaaggatctagatttactaactaagtatgtttattaatatcctaaata

SEQ ID NO: 241856 - DNA, 1113 bp, Cannabis indica
cttaattaaaagcatatggcataataagttacattgagaatgaaagtaattaaagacaacacattaggctcaattaagtggttaaaattttgaaacaggctaaagctcaactttgcatatactaaggacaaaattttacaggtaagcttgaaaggctcaatcggtccaaagaaaattgcctaaatcattttccaagcaactgtcatcaagaatttcgcttcaagagagtaagttacacaagttccattccatgtcaagcaaacattccacaaactcaagtagaataaaagtgatactattcaaaaatagatacttcacatctatatgaaaaatcctctttcttttacaaggcatccaattcaattcaaaaataattatgaatcaagcacacggtgtaaattttaatccattgcacacataaaccacagcagttcaatcaataattcggctcacttatcaacacatgaaatttaaataaaagctaaactaaactaaacataaactgaaaaatttaaatccctccccccaaactaaagatgcacattgtccccaatgtgagataatattctaggtgagagagacttacctgaacccccttcagaaggggtttggtggaggcggctggtcataaggataaaaacggggtggattcgccaactaattaggctcctcaatcccaacattcatccttgtgatcagcgaattcagttgctgtacttggttttcgtcaaatacactcctctgcaccatataagtttgcatgtgaatgttctgctgaataagataattcagctggtcatgtatgtactgcatggtggggtcaagagagccagcaacatgttgtggtacttgttcaaaattgtaaagaccgcatatgataaataccttgtgttattaaataattaaggtttatgtatgagattaattaataattatggaatgcatattttggaatatatttaatgtatcatatatgttgttatgctattttatgtctaattacccaatttctgtgtttgtgttcgaaagcggtggaaagcggcgttggggcctttagagaattgtattatatggtttagaatattttttggggtatcattgttaagttttagc

SEQ ID NO: 241857 - DNA, 687 bp, Cannabis indica
ttttttttttttttacaatatctcatttttgtgacagccacctccactagcaactcctagagttgcacttagtaacatggcaacctaatttttaagatggttatcaatcaatattagtttcttattaaagttttaactagtgtagcaaaatgtggcatctggtaattttattttttatgttttatttacaaaaaaacaaaaaaatacgcttgtaaaattttaaaattataaaaatacattttgtttagcaaaaagtaagaaaagaactaaaaaaaataggaaaaatcaactttatgattgttataaatcaattataaaacaatgggtaaatataatttcggaccttgtgttttgtaaaaattaccaattggaccctctattttgttaaatgataaaaatgaacctgtatttttcaaaattgtacaaataggactctgaactgattttttgtcaaaataaaacttaataataatctgatctagagattttatgacaaaactaattacattttctgtatttgttcgtgttagaaattgtgttaaagtaagttatattaaaaattaaattgttgaaatttaagcttagggtcttattttaccattttgaaaaatatagggtctattttgtcatttaacaaaatagaaggtccatttagtcatttttataaaacacggagtccaaaataat

SEQ ID NO: 241858 - DNA, 843 bp, Cannabis indica
tctggagaattctaagtgaggcacttcctactaaatctcgcctaatctttctgcaagataaaacatgtagtctctgtgatttagaggaggaatcgactgtccacttattttggaaatgtagctttgcaaaagctatttggttcgggagcagattggctttgaagattgatggcattcccatcgataatgtgtctaacacgttggtttatttaatcaacaattttgatagttttgagagaaaggagttgctgtcttattgtggttgcatcctggaggagatatggcagcagagaaactccttttgctttcgatctcatagagttgatactaaggctgcattgtgtaagattgagcgtaaggcaatggaactcaggatttcttcctctcttgttcaagaagacagtgttaatggtaacaaagatcagtctgacattcgatctgatatgcaacatagagatatcattcctcgattgaatgaaggaattgggaactatattttcactgatgcctcttggcatcaaggggatgcgggcattgctgcaataagagtggattcgactactggtttctggtttgttagtgctcaaaagttgcagacacattcggcgttggaggcagagttaatggctattttgcatgccctcaacatggctattgaggatggatggattgaagtgcagattttctcagattcaaaagtggctgttagtgctttaaccaccagagttatcccggattggagagtagctacagttttttactcaattctgaacttatctaatagttttactagcgtttgtttctgttttattaatcgttattttaatagtgtggctgatggtg

SEQ ID NO: 241859 - DNA, 880 bp, Cannabis indica
caaaactcatcccttatcttagggagagagatcatccgaccccttaagagtagtttagtaatatccattttgactcgaaaatgtaagaaaggtccccatccttcattcaaagaatcatcatggacagccaagaattctcccaagatagaggccaacgatttggccaaagatctagacttgctcaagaaaggtagtctgtaagcctgaacccaaaaaggagagaagatcataatgtcagcggtaatagtttaatgcaaagttggatcaagaaggataatatggttattttgaaaatgccaaggctctttttctaatgcccgaagtcgatcctcctcacaactgaaacagagcaagaacagatcagaatgatgttctttgatattaactttaaaccttccatcccaatgttctgccatttgtcattgaaaagtagtcagccacactttcctagttgaaagaactcgagcaatgagtatatactcctctgaaacttcagcatcagtaccatcctcactaatggttaaaatgctactttcattgtcagataatttcatggtggattgcagtttatccaaaagttgattcatattgattgaacagagatagaaaacagagttatatatagaaatttatggtagtggtcagaaattcaaggataatggtaacatgaacataggaagttaaacatacagaataactgtagaaaaaaactataactgcctcagagcatgaacaagggcagacgctcttttttaagaaagaaagaaaggttataacagcataattttagtaaatatatatattttcattttttttttatgtggagagatttatcaaaataaataatttaaaatatcatttataaatgtttgataagtaa

SEQ ID NO: 241860 - DNA, 1497 bp, Cannabis indica
ccattccctctcctgaattcctagcttctgagagagctaatattgccccaacctttcctcctggtttcaactgtgccactcctgaatttccaatcacccaagctgcttttactactttcaccactgctgtgcattccacagtcgatcctggctctgatgttccccaggccatggctagaaccactgaaaaagcaaaaggaaaagctattgcaggcgccaaacgttctgctttcgttccacaatccgtcatggtgggtgactccttcaggaacatcctcaagagagcccgagctggacctgttattaatgaacctcccagtgctgatgatacctcactccaacaggcgggtgttgctgagcaaccccgcccagaaaaatgatgctgatgagttggaatgcccgtgggttagggagccctagggcattccgtaacctctccctagttgtcaagaatcataggcctagtttcttttttgttatggagtctaagttggtagctggacagtgtgactcttttagaactagactttcttttgattgtgcttttgaagtcccacgaaatggtcttagtggtggacttttgttattttggaacaatgatgtaattgttaatattttgaactactcttctaatcatatagactgtattgttacttttaatgataatgttactactcatgtctcttgtttttatggttctccttatgttagtgataaaatccacacttgggctcttttgaatagactttttgataatgcccctcaacttccttggcttattctaggggattttaatgattatctttcggttgccgatagaagtagtagagcatctttgccccactatgctatggctaacttccaagcttttgttaataagttttctttaactcctatacattttgttggcaataagtttacctggaaacatggtgatacttttgaacgccttgattggggaattgccaatgagaaatggttacaccagtatcctcatgcaattcttcaccaccttggtttttatggttctgatcatagagttttaaaattagtcttagctgataatagtgagtataggactagaaataaaaggttcctttttgagaatcactggctgactgaaccctcctttttcaccactgtaaatagctcttggtcctctcttaattctggggctaacttgtctcccttggccagctttctttataagcaagattcgtgtgttcaggatattcagacctggaataggtcttttaatagtttgtcgttcaggattagggatatagataagaagcttaatagtatctcctcccatcttcctgcttctcctgagcaattagctgaaacttcaaacctgcaatcccaacttgatagcctgttatataagcaagagctttactggaagcaaagatctaaagttcattggcttcgggctggggataaaaatactaaatttttccatcacaaagcctcctctcgaaagaaaactaatttcat

SEQ ID NO: 241861 - DNA, 606 bp, Cannabis indica
aaggattaaaactataaaataaaaaacagtgaaagagtaagcaattaaactaataaggaaattaacagttaataaaaactaaggttttgactagggctgaacatttagaccccaaacccgaaaaacccgaccacccgccccgacccgtcgccaaaagaactgaaaacctgaaaactcgtgtggtcgggtcgggttcaacccgaaaatacctcacacgggtttcaggttcgggtatgagacatattgatcttttcggtcgggttgtaacccgtaacccgagatgtatcttctctaaagtggtgaccgtgactttgatagttgattgattgggctgggcccttgttagttgttactgggctgactttgtttattattttttattttttgtatgtaataggaacgtatcaatgatacggtatcattatcattgattatctcaatacagttatatgattttatatataatttttgttttatatatacattatttaattaaattttatataataaattatttttatataatttttattaaaataatcataatatcatattatcataatcttacctaaacggcccaaacaatatgaaaaataaaaaaaaaat

SEQ ID NO: 241862 - DNA, 1339 bp, Cannabis indica
agatgagtttgtaagggatgccaaatcgacagatgatggagttatagacaaactcgcacagtttggctgctgtaatagttgcaagtgcctttgcctcggcccacttggtgaagtagtcaaccgcgaccacggcgtatttgactccgccttttcctttaggtaactcccctattagatcgatgccccagaccgcgaagggccaaggactcatgatggagtgcaagtagctcagaggttgattgatatatgtcgctatccgctgacacttgtcgcatttctttgcgaagttgaaagcgtcttgtcgcagtgtcgtgccggtaatacccttgccgcatgatttttaaggcaagagaattaccgccagaatggtttctgcagataccactgtgtacttcacggaggatataatcgcattcctctctgtcaatgcatttgagcagcggctggctgaagcttctatgatatagtcttccatcgtagatgacatatcgggtagctcgatgtcgcagttttcttgcttctattttatcttcgagtaaagacctccttttccaagtaattcactattggagtcatccaagtaactcctatgtcaatgtctatctccatcacttcatcttgactcaccgttgggttgggtgagttagcacatcgacatgaatcacatcgagcaattcagcttctcttgttgaggctaagcgggccaaagcgtcagggtgtgaattatgagcacgcggtactcgggagacaatcactttcttgaatttctgcaacaactcgcatgttatggcgaggtacttagccaaacgcccgcccctgtctagatattctccgtttacctggcatacgacgatttgggagttgctaaaagcctgtaagtattcgatcttcatcttaagggtgagctttaatcctgcgatcaaagcctcatactcagcttcattgttagatgcagaaaattcaaatcgtaaagtagcttgtaccttaaaattgctggggctgatgagtattatgccgccgctggagccttcgctattagaggctccatcgatatataaagtccatcattcgccatttggtacatcagtatcaattttttcttctactagtgctacttcagtatcggaaactcaagaatgaaatctgccaaggcctgccccttaatcgcagatcttgggttgtacttgatgtcgaattggcttagttctactgaccatttcaacaaccttctcgatgcttctggctttgctaaacttgtctcaaagggtaattgtaaaacttcaacgctatggaaaacgccaatttttcaatttgagggtacgagtctcaacgtctagcc

SEQ ID NO: 241863 - DNA, 644 bp, Cannabis indica
tcagaaacagagttaaataaatgctatgctgctcaaactgtacattgttgaaacaaattctttttgcacttttccattatatttttatttgatttactctatggctaatataaacgtttaaacttaggtggcgcttatttaagagaaattaaaatataaaaatagaaataaaaaataagaatagaaataacaataaaaataaaatttaaaatacatgcaaaaattgataagaaaattattaaatttttctcatgtcacattggattatctttcgttccgtttgaaaaaagaataattattatacttaaagagtagaaagaccattttattagaataacattctaatattttaaaatacaactaaataaataaataaaataaaaattatatcatttatattttattttattttattacctctaactaaataccaccttaatcttgaggttaggagcttacattcaatggtgaaaagaaccttacctaaggagaaaataggaaaaacataatgaacattgaatgctagttgagctctcaattttggttattctattttgtctttatctggcttctttttcttctgttattttttattttttatttatttatttttttttattgtagaaggatttgcttctttattt

SEQ ID NO: 241864 - DNA, 615 bp, Cannabis indica
gtacgcattaaagagggctatttgagttgacctgccattattaaaacttcttccaagagacatggcccctgcacgcatgtgttatcaacagacgcattaaaggcattgcgtgaatgccagaccaatggtacctttagattttggtcctttaattaatgatagattaaaaagtacatttgtgatccctgtagtcaccacgtgtcgaaattctatctctaagagctagaataagactataacctctcgcacctcaaagagtcacagaagcttggggtaaatgttatctgtgtttctaaatcggtgacacgtggcattaaaagggagagaaagtcttagaatctcaataattaaactccaccactaaaagccagtagtggagaagccttgttgatccgagaacattttaagactaagagataagcaaaagtctacctcgccttatcttggcttccaaaacaaagaagacatattaccactccaggatttggagtagtccaaactcaaagcctacccaaatgataactggatgtttactcaaagggcctatgacagacactgatcacccaagagtattggggacgtctaccttagatgtaacctggatcgcccaatgac

SEQ ID NO: 241865 - DNA, 913 bp, Cannabis indica
accctcattcaaattaaaaaattatcattttacttagttttttttttcattcgtaaaatcaacccaaagatagattgcggctcctcaccctcaatcgtaggagtcttctccatccccgatcacccacgccgccgttcgccaactccatcatcaacaactcctggacaatcaagatttatctcttaactcttcccttcaatgccatgaaaatattttatttttatttttttctcctgtcgaatcaatttttttcttcaatttccttagtctggtgtgtaagagtcaattgggttctatgagaaaccctcctttttttgcttttcgcgcgtttcctgatctccaccactgcaatacaagttttttcctataaatatataagctgggcgcactcactgtccgtacactgttattattgaaaaagaaatttaggttataaatacatattgggattaggggttttatcttgtaaagacatggattagaagtttaattaacttatttttaagttggggattttagttttgtttgtctcagaattatatcaggcattatttatacataaggtgcaagtaacgtttagttgcttgagtttcttggatagaacagttttgggtggagaatcaatgtttaaatcttgtctaaagggctctgcttacatataattatgcgtacaagtggggtcatcatgatatgcaaattatatattacgtatgttgcaaattgtagctaaaaccaacagtgaagctaaattttaatggagtgtgccttttgtaagcttctgtttaaaaaaaaaaatcggcaaaaaaggaataccggtatactggtattggtctcaaaaaaatcagtgtctctggtatactgtattggtattttagtgagtacagtttgtgccaattcaaattgtttagtgtta

SEQ ID NO: 241866 - DNA, 880 bp, Cannabis indica
ctcacattattttatatcaatttcaatatttattgtgattttattttcatgtatatatttttttaaatcatgtataattttttttaagaaaattttatataattttttattttaatttttttatcgtaataattaaaatattatttatttttattttatatgtatatttttttaagaatatatattttttaagaatatagtcaattgaaagaaaaaagttaaaaaatcttgtataattaaagatatatatttatataaaataaaaattattaaaataagataattttataaatttttgaaatgtaaataaaattttcttttaataattaattggggttaaaattaaataagatataattaataaaataatcagatttttttttttttgagaataaataatcagatttaacttaattatttttttttcaaaaaaaaagaaacttaattattttaataaataaatataacctaggtataaaaagaaaaatatgaacccaaaccctatttcccttcatcttcttccttccgcctcttaatcttctctctggttttttttttttttgttgagcagctctgctcgcctaacggaagtgctccggccaccccagggtccgatggacgtcaccacgaagatctccaccttcagaaacccataaacctatccctttcccttttcctcccacttgatctcacctctctctctctctattcactatctcacatggacagctagggccacgatggccatcctctgggcgacgatggtcgaaacggaccacaccacggtgctcgcaaccatcgccaaaacccaaactccaaaagatttttctatttttctctctcgccgaagccatttgtgggtttttctctctcgccgatg

SEQ ID NO: 241867 - DNA, 777 bp, Cannabis indica
gatgctgagaagattaagcaatcggagttattcatcactggtattgttttcaaaatgccacacaatttttatatgttgtagcaaggccctcaattctaataatcaagcagtttctggtactcaatgaaagaattctatcaatcttagttgaggtagaagcatctttgaatttatatgcttgtcatttctttaggtataaaacaaacacttgaaatggataatacttattttcttttctacgaaacttcagattactttttgtatcaatatatgttatgtgatcttgaaccaattctacttttgtttttcaaacaggaaatggatgcaagacaaaaaagagggttatctggatcgcccaatgctactgtttccctacaaagtgacaacaatggtccaaggggttatggtggaagatcatatgggaattttgttccccctattaaatccaatggtggcaatggtggaaagagcgatgatactgcagatgattctacaaagagatggtaagttgtttttgaattatatgtacacacatgacacagattgactgggattaaagctctagaaggccaacaatgacttgatacttatttttgaaaattcttatcctcatatgttccctctcccaacagatttgatactttcaaccacattagtctgtccactaaaaatttactactaatatcacaccctttactgctttatgcaatggttctaagatcaagttctaccagtttataacgcaacgtttacttatttccttgtcctaatgatatg

SEQ ID NO: 241868 - DNA, 967 bp, Cannabis indica
atgtcatcttatgatcctttggatgacaattcaagtgaagatgagaatatagaggaaattgaaaacgagaatgtagaggaaaatgaagatgagaatatagatatagatgaactggaggaccaaaatgacataccagctggtagaggaccatcctggttgccagaaataaatagatgtaggagtgagggacatctaatacccgttgagtataatgaaaaaggtcaactggtcgggaagggcagggtgagttgcatccatgcttgggtctactgttcgtagaattgtataaattcttcatgaaaattggtttaaggtcccaaaagaagataagatccaaatatgggaaacaatgaaggtacatgtgcttcttgattttttttttctaactgctaatatttttatatatatgtttgacaatttcttaatttgcagagtacgtttaaattacaaccccaacataaaaagcaattcttgcaacaagcaagaaaacgatataaggattataagacaactcttacaagggaacatgtgcacaagaaattggagaaaaatccaggtgaatttcctccaagaagaccaaaaggatatgagggtgtcattacacaagaggatttggttaaatttgttaattcaagattgactccggagtggatagcattaagggagaagatgcaagctcttcgtgcaaaaaatgaatataaccaccacctatcaagaggaggataccaacgagctagaaagttgcttggggacgaggaaactaatatggatagagctgatttatgggcattaggtagaaaaaacaagaaaggagagcttgttggtaatgcatcacaagtaaaagaaagaattgtaagtaaaataaacttaaatgcatactgtgatattcatcattgtcaattatttaaattgattaacttatagaaatttttacatcaaaaatccaatttactcaaattattacaaa

SEQ ID NO: 241869 - DNA, 1053 bp, Cannabis indica
gtatatctagttgatgttccaattcactttttgaccctttttcactaagacgatcccaaaaattgaaccctagctgaggatgtcaacatggccatccggtgaaaccctaggcggacaagttggcttccgggttgtaggttcgtgtaatttcagctcccaggccttgattaggttgctccatgtcttcatggtacattatattgaaagatagcaggttggattcaagttattgaagttctaacttccatttcaaggatcctaaagtcaacttaggcacaggactagggacccctcctaggtcgactgctatgacttaggtctacttaactctatgatgtcatccttcatgccacgtgtcaaaaattaatgtccacgtcatcatggaaagtttttaggttaagattttcccctaagtcaactttacacttgtgtggagttgacttaatgacgtgaaacagtcacgtttcgctagaaactacgagatgggcatcaattttgacactcttaggcacttgtatctattcttcaagcattcctgattgaattaggtctttgaacactttttcttagtccttgagaatttcgaaaattaattaacaaagaaaaagagaaaaacgtatctttttttttttttcacttatcttttacctttttctttataaatttgaaattttctcatttttcgttacagaattaggattaattggattggagtcctaattcctatttgtatgtgccattcaaaattagagagaaaaaggaagaagagaaaagacttttggctatttgcttatcatttattgttttcctttagttctctattttttccttaatcctaatagcattaggaattgttgttaccttttaaatttgtattcctattcctatttgtatagtaatttcgaaattggcttaaaaagaagaaggaaaaagacataattgtatcttttaattatcatttacatcttccttaaaaagcattatatttaaaagactcccattagctttatgattaggagattgaactcaactataaataagtgagtcgacaat

SEQ ID NO: 241870 - DNA, 1296 bp, Cannabis indica
tctcactcactctctctctctctctctctctctctctctctaactctcactcactctcactctctccccagggggaatatacacttctttctctcacatcttgaatcaattttcctatagctatctaaataagtaataagtatccacacctaatggaaaactctaaaaagaaagatgtattggttaatgtccacaaacataaatgagagatcttaagtttttaaataccaatgtaaaactatatatcatagtataaatacatgtatcgcattaatggaatttgataatgataactaaaaaattgttacatattttacatctccaagaccattcttttagatttttgaaagaaataacattggctttttctatgactcaagggccgtaaccaatagatcaacgccaatagaaccaattaggaattaaaaatggaaattaaaagagaaaaagatttacaagatttttacaaaaatactaaattttgagcaaaagtttacaattttactgtggggcggaagtttttacaaaaatatatattttttataaaagtactgtaaagaaacaaaacagaacaattaaaataacagtgaaataactaaaaaacaaccgtggagtaagcatgaatacttaacacattatacagtaaatttgaaaaaaattccactccacaataaaaaagtaaaaaaaaagtaaaaaagttgaaaattttggtgtaaaaactccaagatttatagatgcaaaatttgaggatcaatttaccttgagaaagctattaatatttgaaggttagatcaaaaggtaaatgatagaaatttaacatatccatttcgattttgagtcaaatacttcatgcgaggccgatgttgtttccagtactcttggcagaagggcttccagagacatgtcgacataaagaaattagacatgatttgcaagaacaaataattagatttctaggtatatatatatttaacagaactgttagtttaaaggaagaaaaaaaatacttttaaactcacttttaatatatattgtatttaattatgtattattttgtgattattattattagtgatacttttttatttatagtaacagaactgtcattgttttgttgcggctgtgttatttgtttctttctctgtttggtgcgatttttctggtggttttcttcaaggttgtgatcgttcatttggtgttgtgtttggcttgtttgtgactggtttattctcttctctgtttgctgcgattttttaccggtggtagcatggcgtcaagcagtcatgccatggagga

SEQ ID NO: 241871 - DNA, 943 bp, Cannabis indica
tttcctcaagcgctctctctctctcctcctcactcttcgaatgtcgtcattttcgtctctttcgatcaccctgtctctttcgttttatcccttttcctcatgaacaatcattttgaccatgctgatatagattttagtttcgataccgatatattaccagtaacaatttgaagattatgtgcataagtttataatccaatccctatgtcaagctttcatgcaattttttgggtggaagtttttattgtttttagcctctgatttaccattgatttttgagttgtgaggattagatactgtgcatattgattatcaagaatttgtgtgttgatgagttttatatatttacttacaggtgtttatttgcgaacaaaaattatatactagggaacaactaaaacaacatacaagcactggtgactctgaagtggatagaactgatgcagttagacaagttctaagcagatatcaattggctgaatttgaggtaagtaatatgtggtgtggtaattaatttttagttaaggatttaattatcattatgtactgtgaagattaattcttacaaacagttgcattaatgtctccttgatttatgcagctttgtgtgctcggcaatctgctatggtaccatctataaaggtgtagttttatttcacagatagtaaacaatgtcattcttggtgttataaagagttgataatgtaaacaatgctaaagaagtgatcataggattgttatattgtactgttttttattaattcagaaatgttgttgaaaacaatgtactcaggttgttggagcaaacaaaggtggagtggtggctgtggtcgaaggcttaagaggttttgttcctttctcgcagatatcatcggttagtcatttaactcagtttcccaattgtgaggctctttagatcttgaatatttgcataaagatggac

SEQ ID NO: 241872 - DNA, 965 bp, Cannabis indica
cttaattctagcagtcattttttcaaccaaaagttcacaatccttacctgaaatcttcccagagcaaataggtatccccagataagtaaatagcaagacttatctagagaaacccgatactttaatcaatttcttcacacttccttcctccatgttactgcaataaattacagttttgctagcattcgggtgaagaccagaagtgagagaaaaaagtttaagagcttgaagcatataagtgatgctctgtgtgtctccatgacaaaagagaagtacatcatctgcaaaagccagatgattcaattgaagagaggaacacctgtcatgaaatagaaagtcctttttctctcctatcttcttcataagtctagataagtattccattcccaagacaaatagtagaggagacatggggtccccttgcctaagtccccttctagcttgaaagaacccatgtaaggacccattgaacataagagagaacctaggggttgtgatacagttcattatcagcttaatgaactccttaggaaagtttaaaccttctagcatctcttccaaaaattcccactcaatagtatcatatgccttttgaaggtctagcttgatcatacaacttggtttatttgctttcctactataatgtctcaccaagtcctgacaaatcataatattatgccctatgaatcttcctttaataaatcctccttgggaaggagaaattatttcaggaagaatgtctcggattctagcactcaaaagctttgttgcaatcttgtaaataacattacaacacacaattgacctgaaatctttgacagtgttaggacattttatttttggaaccaaggtaataatagttgaattaatttctttgagaatattacctgaatccaaaaaggagattactgcttcacttatgtcatcaccatagcctcccaattgtcttggaagaaactactaga

SEQ ID NO: 241873 - DNA, 625 bp, Cannabis indica
atgtatgtagtgtaatttctttcatgtatgatgctgtaaattttatattataatattttagtcaatttttgtggtcgaaaacacatgctgcaaatgtgtctgaaatacgaaatgtgtttgtaatttttataagaaaaaaaatagaaaagagaaatgctaaggggtcttatgttgtctaacatcttataaagtataatattattattggtgtcataaagcgttaccccatataagttgtgatgtcataaagcgttgccccatataattttcctagaagcattgctattggggatgcccaatactctttataagtagcgcctttcgattgattaatgatttttttaaaaattattttctaaaagaattgttaaaagactttactatcctcctcaatgtcatactaatattggtataattaagtatcggagattatataatttaataaaataatttttaaaaaatatcactaattagtggcgaatgagtaggaatgtcagtcgggccgggcccggcccggcccgccacaaatccggcccggcccgacatcactttggcccggcccgacatcactttggcccggcccggcccgactccttcttttggcctagcgggtcaagcccggccc

SEQ ID NO: 241874 - DNA, 1010 bp, Cannabis indica
acaactattagaaaaatagagactcttcaatacccttggggcaagagaattgggagtacaattgtacgccctacaaacttgtttggcaagaagagctttattgaacacgaagaggttcctaaatcccataccactatcggagttatgctaacaaagtctgattcaagtacaccaatgcatctttcttttatcatcatctccaccccaccagaagcgagcacaaagacaatgtaattcattgaccaagttctcaggcaagcgaaaaagattcatgacataggacaggattgcttgaataactgatttcagtgtacactcatagaattttatgcttgacacttattaatttcatcaagtaatatatatttctatatatatataatattttaggtagagtttggttggaggtaatgaaatggaatagaataaaaagtaaacaattttttttatttcatttctctatttggttgcattttatggcacatttactatctattattcagaatcaaaataaattaatagagaaatataacagaataagtaaataataatcgaaaatagaatgaaaataattttgtttactttatcaggaaacgtaatctgaatgtttaaattaattaaattacccttttaatttaaagtatagtttgtggtagttatttttaaagatattttgaaaaaataaaattgtcattataatttaatattaaaaaataaaataaaaataaataaatgtcatttccctaaataacattctttagaaaattagtaaggaaaattttcctttttttttcttccttaattaattaagttcactatttcttaaatttaataaattaaataaataaatgtaagggaatgagtctcttactattgattctcattgcttaataataaatatgtcattaaagtattgtaatgtcattataataaacaatttttcttttttcatcattttggtaaaatgatcattctattttgaaatggtaagaaagactattctaatataa

SEQ ID NO: 241875 - DNA, 668 bp, Cannabis indica
gattgacgcatagcttgttgtgttacttcaaaactgacgcaaaatactttaattttttttgaactgacgaaaatacttttttgtgtcattttataactgacgcaaataaattagaattaaaatctttattagtcacttgaaaaccgacgaaaatacccctttttgtagtagtgcaaaaaatataatactactccccctttttgtctatcaaggagccaaagataacaaaaaaaatatggacaaggtcataagtttaagcatacatattgtaaagagcgcttagtttaaatttagaaattagcaaataattaggatttaattatgataattatttatggatatttaaataattatttatgttgatttatttgaattcagaatgtatttttatgtcatatagtgaaatctcataattttgcatttttggtgctcggtaacatggaacgcggtgtatgggtcagtagaatcacagtctaatattttagtatagtggggcggtattcttagacattgggaatgtcggggatgatcggaaatttagagttttcccaaaatacccttagtgacttttagtgtttaaaggggcaaaatggtcttttgaatcaagttgtattttgtcttttatggaatatgttaagctgatttttttttttaagattattggctga

SEQ ID NO: 241876 - DNA, 839 bp, Cannabis indica
attgtcaaatcatatagtctacaaaagtgtaataggaaccctgcagtacttgtgtcacacaagatttgacattgtctttgccgtaaacaaattgagccaatttctgcaagttcctactactagtcattggagtgatgctaagagaattctaagatacttaaacgggacaatgaattatggcctccatattggatatagtgaaagattgtctttggttggatactttgatacggactgagcttgttgccctggtgataggatatcagtggcaggctatttcgtttatcttggtgatacattagttgcttggtcctcttagaaacaagtcgtggtgtccagatccagcacaatcagaatatagaattcttgctcatgtgttagttgagataatctggattgaatcaccactcaaataactaaaattcaagctaccaagtgttcctcttacttggtttgacaatcaaagtgcaagtaaactggcatcaaattctgtttaccatgcaaagacaaagcacattgaaattgacattcaatttgtgcaagataaagtatgagagctcgaagtgcactatattccctcatcagattaagtagcagattgtctcactaatagcttaagtcatagtctaattcttaattgacaaactcggtgtgaagcaactaccccttcatttagggggcggtgttacgaaccttaaatgatgtgtacaagggtacacactaagctgcagcaccagcatcacagcaaatctcttctacctacacacacaaaaagcaatcatttttgttaggattattttgctaaatctcctttttcacttgtcaccattttgtgagat

SEQ ID NO: 241877 - DNA, 1123 bp, Cannabis indica
gttccatcacgccacaatggaaaacacttgccttttgcctttcttgtccttgaacttagggctggctttgttcttcttggctttaggtgccttttagtctttcagcttgcgcttgccactgctgttcttatagtcccatttccttttccttatccaaataagaaggaaagttggactttacttcaagttgtttgactaaccttccttggaattatccttcttaaagttttcaaacatagtcaactcgttcaactatatcttgttcatcgcacaacatgtggtgaacactttgaaacaatgagtgagcgactcagaatgatgttcgctggagtcctcttgtctaccatagacactactcattaaggaaaaattgtgtggttctcacaaaccaacatcacattcagattagatttccatttatgtaaatattcaccattcaattttataagtgctagtaaaacattaaaggaatttggcatagtagatatttttaaaataaataaagttacatatgattatgcatgaataataaatatcattttggaattactgtaaatgtgatgcatgagcgcatacaagtaaaacacataaacttatgtttgagttataccacgataaaactctttggcaattgagcgctgcagggtcggtatcgagtcaattttactgagcctatgagacaattttcatctttattattttgaaacctaaatatctcatatttccttttcaaaatataaagtactgctttttgaccaagtaaacaactaaccactatgaagcttagttgcactttgtgagtgtaacccattatttcagatttcatgacttaaattagtgtcaccttaagggtcgatgtcacacaaaaatacatcacttcctcttatattagtcaagagatcaacttcgagcaatagtatagacacatacctttcttacggaatgaaaataaagtcgtcttgaggccagtctatactccctttgtgttgatcaataatgtgttagttttatggtactaaatcaggtatccagcagagtttcgaattatctgattatcacgtaccataacccctaagatctccatatgtgtaaaatgattgaaaaataatcgtgaagtgataag

SEQ ID NO: 241878 - DNA, 971 bp, Cannabis indica
cccaaatatttgatgacaccctccgaagaatcaatccctagagcctccttgatacctcttcttacaccattaggggtatttttgctgaaaaagattgacgttttgagcttattaacttgttgtccggaccaagagcagaatttttcaagacaatcccaataaccttttgcctcatttagattggccctacccaccaggataaggtcatccacaaagaaaatatgggataaaaccgaaccacctctactcaatctaataccctttatagtgcccaaaccaagagcctcttccagaagcttagataaaacttgagcagcataggtaaataggttggtgatagcgggtccccttgccgcagaccgcaggaaggaataattttgccaacctgacccccattaagacatatattgagagtaatgatagttatacactgagacacccaactgtagaaggtctgaggaaaaccataactcgagagaacatgatcaataaatctccagcttaatctatcataggctttaacaagatcaatttttattgcacaaaacccctctttgcctcgtttcctgttaaacgagtggatgatttcttgtacaatgacattgttatcctgaatatttgtactcgggacaaaagcagcttgagtaggacaaatgaggctgggtaaaataggtttaatcctattggccacaattttggatataaccttatacaagacgttacaaagggatataggcctaaagtgattcggtctcttcgggttctggatttttggaatgagaacaatatttgtagcgtttatgaccttatgcatattgccattcacaaagaaatcgaaaactgcttcacaaaaatgatcaccaacctggggcggagccagaatatgaagttaaggggggccaaactattttctaaatttaggtgataaatattttaaaaaaactttattaactttataatttaaattaaaa

SEQ ID NO: 241879 - DNA, 1130 bp, Cannabis indica
agaaaactaacccagtcccacatacgggccccagattccacaacaggcataactccccaaggggaagatctccaaaggtgagacgccagatcgcaatagagaaataaatgctccatagtttcatcaccattaccacaaaaggggcaggtggtttcattaataaccattctcttagaaaggatagccctaacaggtagcgcattcgagaggatactccaccaaaggactttgtgacgctccagaacttttgaactccacagcttgttccaaaggttcggagctacattacacaacggagcccgtctcatagcttggataagataggccgatttggtagagaatcgaccattagagttcttagtccagatccatctatccctaccctgaccactcggtttaccgcccctcaagatactattaactgtttccctgtgaaagagatcattgagcttccggatgtcccaattcccgtcaggtaaaagcagatccgacacaaattcaggtgttccctggtagttgtgcttgggcttagggtaaaaatccctgccatgtataacccatgggtcattccaaatgcttgtatcgctcccattagctatcagtttgcaagccccttcctttagaatctcttttgtacgcaccacattcctccaaaaccaggagtcagaactcttaacatcacaatcaaagaattgtctaccccgcaggtatttcgctctaagcaccttacaacataaagactggtttcatcaataaccattctcttagaaaggatatatggcttaagcattaataagcaaaccttcattgaatttgtaggagttagttgagtagtatttttctcaatgcagtgcccttataatcaaattcagttggaatttgagggaattatttaaggtggtggagcccttatacactaactattaactaaccatatataatgatgtgtatatataatatatcttcattttaaataggaaagctaatctttttttgaaaaaaaaatgaataggaaagctaattttattatagtgtctctgagtcagcccgaatgagaccctatatcaagacaaaaaacactttaataatcggccatgtaaatttgactcactaaatatattcccacccat

SEQ ID NO: 241880 - DNA, 1810 bp, Cannabis indica
gggaataaactttcgaacatataattaagattatattccactgtgttgacaacactataatcattaataaattcatatgttctgggcataaatagaattcatacattatatatataatcatgaaataaatcatgtgaaccgtgcaacataaaatgttatttctgatctttattaataagtaaatctgattatattgaaatgagttttatttagggcgtaaaatccaacagatctttctagtctcaatgattccttgaaaagagcaacgacatctcgctgaggagataagtcggtcaaaggaacaagctagtgtagaaaaattacatgaagttgagagagcgaaagaaacactcaagattcaagaagaagaaatccagagaagactcggcgctttaactttgttgctccagatggactaaagatcttataattttgcttctaaaactttttagctttaatttttaatttttgttaagtcttttttttttttttgtttatttagcctttgaggactaatagtattttgtctatttagtacctttttagaattttagactttccgttttttaggaggaataaataatatatattatatagaaaaatttcttttttattttgtggctgcatccaattttgtttagattgcctacgtacccttttaagggatcaaaccgttcgtagttctttacaatttttttttaggagataaaattttttattttgtgtgtctgggcctagttataaactagattgcctacgtacccgaagtgggatcaagccttacgtagttcattgcacacttgtctcttttttttaagtgcactatctacaccatggctaaataccttttgtttaagtgtagaaatttttgatgaacttcccattaacacacagataaattcatcgaccttctgaatttgaaagttcatatgcccctcttaggaagaccttagtgacaacataaggtccttcccattttgtctcaaattttcctttcatccttctagttatgacaatcagtcttttcacagtaagcactagatctccaaccaaaaaagatcaaaatttaactttcttgttgcatgccccaactacttgggcttggtaaattttgagcttttgctgaatagcaagccacttttcatctaatgcttcaagctcggctagacggacttgtacattttcatctgggtctgttagttgagtaacaattctttatgaaggtatttgaacctccaaaggtagcactgcctcagatctaaacaccaagttataaggtgtgcaaccagtcgcagtcctcatagtggttctataatcccataaagcttctaggaggcgttcatgccaatccctcttattctttgtcgttgtcttcttcatgatttgcataacactttgttaaaatgcttctgcttgaccatttgaagacgggttgtaactagctgagaaactgtgcttgaatttatacttgttcattaacttgaccattgccttacatttgaaataaagggcattatcggagataatttttgaagaaacccttaataaattacgttggtccttataaaatcagcggcatcttctgctcatacttcttttagtggtatggcttcggcccatttggagaagtaatctgtgatggccaaaatatatttatgggctttggaagagggtggcgtaaaaggaccaatgacgtccattcccatgtttcgaaaggccatgagagtatagaaggatggagtggttgagggggttggtggatgaaatctccatataattggcatgacttacaacatttagcaaaattaat

SEQ ID NO: 241881 - DNA, 516 bp, Cannabis indica
caagccaattgaagagttagaaacggtgattttagacccagacaatcccataaagtgtgtttataatgggaaaagtttgggaaaagaactaacatagcaattaatcacttttctgaaggccaatcaagatcactttagttggagccactcagacatggtcgggataaaccagaatgtgatttgccatcacctcaatattgaccctaattatccagcaaaacgtcagaagcaacggtcatttgatcccgagagaaaaaatgcgctaaaaaaagaggttgataaatcgttaaccaataactttatatgagaagccttctctccatcatggatctctaatccagtcctcgttccaaaactaaatggcagaaggagaacttgtatagatctctcagatttgaataaggcatgtcctaaggattgctttacactaccaatgattaaccaatttgtagatacatagtagagcacgaattgatgactttcaaggatgcgcattctggatataacaagattaaa

SEQ ID NO: 241882 - DNA, 772 bp, Cannabis indica
tggtgttttactagtgttctactgttgttttgagttatactgctttgtgttttactggtgttttataaaaacacagtatttttgaaaaaaattccgcgtgacagtatttttgtaaaaattaacccaaattccagtatttttgtaagtttccctattattattgacactttaacataggactcgaatattataaaacctctttttctatttaataaaataaaagcctttctatttttccctttaaaaataagcaaatgtaatttatttatttatttatttagaaataataatgcttcattttcaactataataaattactaaatgtaatttatttatttatccaattacattactaacaccctataataaattactaaatgtaatatgttaattaaatattataatttcacacatgtctttttcttcctaattttgtttactattttattttctaataattaatctgatcaaagaaagagatgaataaaagctttgctgttaaagaaatcagaaagtcccacattggaaagatagaaaaaagagtgaagaaagtgagggtacaaaatggaatgaaagggagtgtttaaggtacttacctggacggggtctacgggcgatcaagaaggctcgtggcctaagctcagtggcctccattgcacttaggaggggtgctggcttatggtctccccaagtgggagagccaacgtcataatttgttgtagcgggggccagcgttcgcgcggcccctacctattcagttcaacttttctta

SEQ ID NO: 241883 - DNA, 856 bp, Cannabis indica
tggtttagtttttctagtttttttgtgttgataagtgagccaatgataattgattgattgaactgatgttgttatttgtggaatggattgaaatcttgaactgtgtgcttaattcataaactctttggactgatttggatgccttgtgaaaaactttttatcgatgtaaattattgatttttggatagtatcactcttttgttctacttgggttcgtggaatgcttgcttgtgatggaatagaacttgcttgacttactttcttgaagcaaaatccttagtgattgttgcttggaaaatgatttaggtaattttatttggaccgattgagcctttcgagcttacccgtaaaattttatccttagtatacccaaattgagcctgagtctatttcgaaactctaaaaacttaattaggcctaatgtgtttccattatctactttaattcccaaatgtaccttattatgccataagcttataaataagtttctcttggtaaatatgtggatttatgtggctgtttgtttgggttaaagtgtgcttatggtataatgtaacctaaatgacagcttacgtacctttcacctaagccatgacatttcaagcgagaaagatcttttgattccgagcaggggttgttgacataagtagagagaggtaggtcatgcattagtaagagtagaatgattgtgatatgtttcaaattgaagtgtaatttgcatccatacacggtttttctaacttgtgcatccaagttaatttttagatttgttgaattgaaattcttgtttaaccagttgattgaagttgcacaagtggcagcggtagtttaaatatttggacgctcggttatctgt

SEQ ID NO: 241884 - DNA, 628 bp, Cannabis indica
atttgagtgattagaagaaggaagaaagctgttattggatttgcagccataatgaacaattgtttgatttgtagagaaactggtttaggctaattatgtatgtgattggcaagaacgtagctcattaatttataggtatattatatttgtaaagaaaattcaagtcaaaagaaaagttggtctgttatattctaaatacatttattatgtttggtttaagtgttatcaaagaatatgtcaaaataacctgcagctgcatttgatagccaatatgagttattggttgaagtacagattgaagagtaaagactgattttggtggtattattttgttgagcagttgagatagagaatttagaagaaagaagaaaagtattgtagccataataataattagttattcattggtaaggctacatatgattccaatcaaggccagctcattcattggtatttgtaacaaaatttgaggccctgcaaaatatagactttgaaagctttattctggttcttcttctagtctaatgtcttagtcgaagaagtttcaggttctacaatctaaaattaaataggaaaatttgtaactaaagtaccaaaatattcaatttttttttttggattgtaaaat

SEQ ID NO: 241885 - DNA, 1492 bp, Cannabis indica
ggggaaagacttcctctccaagcttactagccctataaatagtgatgcatgttcactgggcaaagggtcaaaaacaattcagttgagactataccctaaagatattatccaagaattatatattgagagaaactgttgtaagatctataagaaaaggaacctttctccctgttcttaagtcaatacaagtaacgaggattaggctattaccgaactactcggggctgaacctgtataaaattcttgtgtctttacattgctttatgatatatcgattgctacaaatcacttatcgcttactaaattcgacttgttgtcgtttactaaaagtaaggtcaacatttgagtgctttcattgagagaaggatcacgaatcgctctttattcaacatctaaccacgaaaacaatggtgcaaactcgtagaggcctgactgatccaacaaattcacaaacggtggatcctgcattgcagaacccaggtaatgcaagggttccaccagctgttaatcctcgacaaccattgaacgtggggaatggtgtaacaactcctgtagatgaaatcggacctggtgtgcaagagactaggaataacagttccacaccaaactagggcattcatagcacacctgtttcgcctggaaccaacacccagacgaccatcggagatgccaatgagttcaaaatctctgcgacgctcttggactcatgcacggtcacaacaataccctacatcatgatcaggacgaattccacactgcaataaatctcgcatttgaagaataaagacgtatgtttactgagtagagggatagagagatggaggcattaaaggctcaccatgcagagattgaaaattgtagtcggcaggctaccgtgctaatacaaaaagcccaccaaagtgtaggtcagcaacctccaaatgtcgttcccctaggtgagacagatgaagatctagcgatgaatacttgtcagactgcaaatgttcagccgcccaatccccagtcacgagttccactcgtgggcctagctgtaggcgggcagactttgtctagtaattcatcaggagaagtcatacctgatggtgctaactagatcaatggtgccattccacctgtcaactgagcgaatcaattgctgaggtagccaggcacttctgtattcgaaaggttggggccacccatgacctaaggaatgatctcaacagaaggaggggagtagacgatcaaaatgttatgacaatcttgcagcccggaacccctactcaaattcccgctcagaaagatgctgatgtaattcaaattgactagaatgccgagcaggttagcccagccatacaggcacagctagacgaactgaaaatatatttcacggcatggctggacaaagaaacaatgatcttgagctggaccgagcacgcagaactcctttcttgcttaagatcaatatcctgtcgttgccccacaagtttaaaatgccaacgtggaagatgta

SEQ ID NO: 241886 - DNA, 1088 bp, Cannabis indica
caaatttaaccctagccgcagtcgtgctaaacgaattaagtatgccttaagtgtcttgacgggttactgctttatattggttagcgaggccgcttcgggtcgtctatccctagcagcctggaattgtttcttgaaatccctaggcagctgttcccatgaagtcattgaatggtgagtaaacttgttaaaccagctgcttgctgctacaacaagcgaggtggggaacaagatacaacgtaaattgttcgtcacattactcgctcgcattattgtattaaagtttttcagatccgagaccggatcactggttatgtcatacaacgagacatgcaggtttttgaatctcgaaggaaaaggggtattcatgatatcttggtgatacggctgaagttcctccttcgagtcgtatccagattgtcttcctagttcccccacttaatatctcatgaacttgtcctccaacttgtctattcacaattggatgggatcctcttgctttggaccgagttgttcacggaggtcaggtttctttctattcaagtgctctcgtagatccggttgggagtaattgctgacagatctcatcttactcaaagatcgcgtcctactcacaaacttcatcctgctcatggacttcgtctttgagtgactcgcgaatttactggtttccatgctctctcgagcattagctcgtcgagtactttctcctcttcgagttgatcaactgtgggtgcttgattgccttgaggtcacacttgcttcgtcacgctctgttctttccccctgaatgtggttgtcgtatttcccccattagggtctgtacgaatccttgctctatgggtttgggaagaaagtttgtgattccttgcaggtgaccttcgttctccaggctaattcccaagatcttccttattttcatgaggaatttcttatccgtcagtttttggatgcctcccattgtcatttttcgtgtgagggttctggttgatcattctgattttcaagggatatctcattttccctggtttgttcttcctgggcattttcctatctcctggttcgtgagccaggcctcgtggtcttctcac

SEQ ID NO: 241887 - DNA, 887 bp, Cannabis indica
cttaatttcgtaactggatgtcccaatgtatctccaaaacgtctcttaacatctgccttaagtcggggggccaagtggggaggagttttgccttcttgtggcatctgttagggataccctctatctccttacaaacttatctgggctacggagattctttcgagacttcttaagaactccattagccagaaggagattaaagggattactcttagccgaggaggacagccttatcccacatgttctttgcggatgacctttttttttatgaattagctattgtttcattactccaataaaccaatttacaacctaagagcaccccaattaatgggacctcagatatattcttttactatatgttacacagtactcccaaaagtgaaaaaatttcaaagacccaaaccatttagaatcttttagaccaactttcctaggccatacattatgaattctttgttttaccatttcttttattgtacaaatgactctatccatatctgcagtctttgaattccataacttgtcattcctagtcttccaaacatggtagactaaactagccaaggtagcagaaagtacttgttttttgaatttgctacatttgtttctttcaatgaaatggtaggaatggcttatatcgaggaagctaaggggtactggcagtgtttagacaaattttatgcttgatttggtcaacaagttaaaaaactcaaaacatccatcttctttagcaatataccagcgaaccaaaaagtagcaaacctcttgatgaaaaatagggactgagatatttagaaattgaccctcctgtttgatcaggagactgttgtaaacattcatgaaaggggtaaaccagatggaaggggcaaggattactgggtttg

SEQ ID NO: 241888 - DNA, 818 bp, Cannabis indica
tgggatagtggtttggaccaacttatggtttcttatttcaacgaactttttttatcttcttaaaccgattagagagatgtcacaagcattgtgcaaactcgtgtatcatcgcagaaaaataccgagttgttattaccggtttcagacgaggaggtttgtaaagctttattccagatgcatccggataaatcccaagggcccgacggtatgacccctggcttttttcagaagtgttgggcgattgttaaagatgatattattaatatggtctagcaattttttcataatgggtttcttcctatagatcttaacaaaaccattttggtcttaattcctaagaagaagcagcctatggatatggggaatttaagaccaattgctttatgtaatgtgttgtacaagattgtgtccaaagtggttggtaatagactcaagagtgttatgctgtctgtcatatccgatactcaaagtgcattttgacaaggccgattaatcttagataacatcatgattgcctatgagattatgcatcatttaaagataaaatgaagagggagggatggttatatggcacttaaacttgatgttagcaaagtgtatgataagcttgagtggggttacctctgtgctatgatggtaatgatgggttttaatggtcgttggattaacttagttattcaatgtgtttcttctgtttcctataccatttaacacggagggaaggagttggggcccattgttgctcaaagatgattacgtcaaggtgatcctttatcaccatatttgtttattctttgtgctgaaggtttctctagttt

SEQ ID NO: 241889 - DNA, 549 bp, Cannabis indica
aatttcactctaccccatattcattacactcggggacaatgaagatgtatcataatgttaaagcactatactagtggctgggaatgaaaagtaacatagctgagtatgtttcgaaatgtttgacttgtcaacaaataaaagctgaacattagaggccaacaggtttacttcagccagtgagagtaccctgaatggaagtgggaagacatatggactttgtggtaggtttacgtaacactatagggttatatgattctatatgggtaatagtggaaagatttaccaagtgagctcactctctgcctatacatacaacctatactgtggatcaatacgtttatttgtacatcaatgaaatagttcgaatccatggttccttgaagccaattgttttagatcatgattccaaatttacttctaagtctgggagagtttacaaaaagccatgggagccaagttgaaattaagtacaacctttcatcctcaaatggatgcatagtctgagagaattattcagatactaaaagacattctgcaagcatgtgcgat

SEQ ID NO: 241890 - DNA, 802 bp, Cannabis indica
catgaaacacatcatgtatagcttccagcgctggaggtataaccaatttgtacgctacttgccctatcctctctaggatttttaaaggtccaatgaaccttgtgctaagtttcctttcttaccaaagcgttaatatttttcataggagatattcgaagaaataccatatctcagacctggaaatcaatatcccatcactttggatctgcataacttttctctctactctgagcagcgagcattcacgctttgatcttttcaactgcctcacttgtcctatgaacaactttgagacccaagaactttctctcacctacttcatcccagtgaataggtgatctacactttcttccataaagtagttcataaggagccatttcgattgttgcttgaaagctgttgatgtacgagaacttgatcaagggaaggtacttttcccatgatccttcaaagtataatacacatgccgtagcatatcttctaaaatcttaatggtcctttcgaactgtccatctgtctagggatggaatgatgtaatgaatttcaattgactacccatggctctatgtaagctctcccagaatctagatgtgaacttcgaatccctatcagaaactatggactttgggaaccgtgaagataaactatttctctaacatatagttctacatactgatcaatggagaaatttgtctgaacaggtaaaaagtgcactgactttgtaaacctatctattatgacccacacagagtcgtactgtcccatagtcttaggtaattcaactacaaagtccatagcaatg

SEQ ID NO: 241891 - DNA, 649 bp, Cannabis indica
gtgattgcagcgctagttgcaatacgggtttttatacgaattttttgttacaatttaggttgcaacgctaattgcaataaatgtttctatataaaattgcataaagatacaaaaaaaaaaaaaaaaaaaaactagttttgaggtataaaaaatgaaaaagtgtcttattattttttaaagaaaagtccttaactacctagcaacaagactagcaaaaagtgaagggatcaaggatttattcacgagcactctcaataattttcttattcaattttttaaaatattttattaaaatttttctctattatttaaatattatatctttacatatattttatttttaaaaaaagaaatattaaaattttatatgaataataagaaacatggaaatgtatatataaaatacggaattaatcaaacatatagatactatagctataggatcgaaataccttcagccattgattttttgagctttaatccctcatgagttttggatctgcaaaaaaagaaaaatgaaactgattagtgttgggtaatcgagcttccaagctctttctgttatctttagatggatttactgcttttacagaatgcgtagtgagctcagtgaccgagattctatatttatataggtgagaccttctat

SEQ ID NO: 241892 - DNA, 575 bp, Cannabis indica
catattttttagttcatctaactatgctttcacaaatggggaaactggttcagcctcttggccgacctctgtcacatctggatctcttaaagctaggtcttggatttggatacctagttgaatagctagttaaacgtattgctcatccagacctcttttctgttcaaatcattcctgagatcatgggttgtgtccaatctattcaatactgaagcaccaggtggtcgcagtgattgactggtttggccggttggttagctagaactgtcagtttggatggaattattaggtataactccacctaaaagattgtcagatagggtttgtctgcctaccgctaggcccataggtggaacctgtgaccggggactggacaattaaccattatgagtctgggcggtatgcccagcaggaatctcttctgtgtcgcccagtgagatactggacgtatcagttggttgctgattagcagcttgataggctctctgtatcagtacggtggcctgtcttgttcgaacattgatggttgcttgctgagccttcaatatttccatctccctatccctccactcaat

SEQ ID NO: 241893 - DNA, 607 bp, Cannabis indica
tcaaatttcccaaataaaataaaaaaaaaacagtactatatattggcgtaacgtgcaagtcacgtgattttgacgttgtctaacataaaatgtgaatgcctaatacctatgcaaatttcattcaatattattgtgcgttgctcgataatttgattccctcattcaatcccaatgcattttacaaattaaatttattggctcactatttgttttttaaaatccaaagacatgggcatccatgattccattctgcccaaaacaaaaagtatatgatataatttaatgaaaaaaagttgaggagaattttctagatgctttattaatttttaggatttttttcatcatataatcatatttaatataggctaattagaatttttaccccttaactttgacatatataccaaatcatgtttcttgaactattaagattgttagatttaagggcttttatttaattttagtaaaaaaagtctaacatggatgaaagttcaggagatatgatttagtatataagttcgagagacataattttgttggtatcaaagtctagggagcatgatttagtacataaacaatcactaaaatagtcaaattgaatgaaatt

SEQ ID NO: 241894 - DNA, 990 bp, Cannabis indica
aaaatattttagttccatatatatgtttctgctaagtctgctttacaattttaacatagttggggtgggttccatatatattataactgctattattattatattattaatattattaatactattattataatattattattttagaaaattatcagatttaataaatttaaaatatatatattatgtttaaaacagtaagaacatacgaaaagaaaccctcctctttctatcaaacgaaaaccttatcccttttatctatttttttttttcaattttaacctgaaacatagcaatctaagctatgataatagcgggatagaaaatcttcagagaaaaaaacactaaggtatagtttaattttttttaaagataaaaatgattagtttgatgtaggagtttcgtgaattagaatagttatggaggttcagaccttattgaactattctctagtagtcatgggactagttttgatattttttttattgaatttgaggagattttaagttagaaattgagttcggaacttttttgtagcttaagttcgaacgttagtagtgtttttcaaataagggctcgattttgattttaattatgtaagtatagtcatatgtatggtatatgtgcgccttatgaagttcgtagtggtttggacaggttttggtagcgtttcagtgagtgcataaattgaaaatcgagattttttgcccctacccaactagccaaccggttcttatggaggcagttaactggttctcaaccgatttactgttttggacagtcttgggaaaattggaaaacgtatttttgccgtaacttttcacttgggtgtccggtttggacattctatctaccattttgaagcttgcgacgaggtctaccatatgttttatgttttaaagccaaaatataagttttattttagtgtatttgtactagaggtttcctaggaaaccctaggttattctttgcaactgttaagcagtgttt

SEQ ID NO: 241895 - DNA, 1376 bp, Cannabis indica
ttaaacctattattattattattattattattattattatgcttatttcttactattattctaattatatgcaacttaattgtttcggtgactaactagacgcaagtgaagttgtgaaggaagctgttgaaaaatgtaccaaggcatgttttgctatttgcactaagggttccattactgctactccagttgaaattgctatgaaggagtaataattgtcatctaaggggtgtcgtcttttcttggctttcaataattgtcatatataatgtgacaaaaatatgctagacttgtctaatgctatctagctacttgtatttaaggtgtttccggtttgtatgtgtcgtagaagattgtcgatcctagattgtatattcttctacttgttgttatccaaattaataaagactaattaatatgtgtctttttttaatcttcttctcaattattttggttggtttctatttatattccacacgtcgtataaatttcagtctcatcttatttaatttcaaaatcttttcctgtcacattgttgatcggtttggcctcaaaaatggtaccactgtgtgacccactcttcaaagtgtttattaatatatttacattaattttatcattaagatgaccgaaagcaaaaaaaaattagttagttattttgtagttaatttgttgacaaattagttatcgaaattaaaatttaaacaaaatttaatatactaacaaattttatagattgttattatttttaatttaatatttaaaagttatcatgtaatgttttaaatggtctatttttaatgagaatttttgttagatttcaaaatatatatctatatttatatatataaaaagctaaataatatatcttcaacatcatagaataaattaaattacaaacaaaattgactatactaactaattttttgacaaacaatatggttagttctaatattttattgaaattagtaacataatatggttgctcaaaaaagtaataatgtaaatatattataaataataagacaatataaatataatcttaaataactaaaattatgattttaaaaataaatccaaatcattaaaactatgatttttaggcaaagcagacttgactccaagttaaaaaatacaatttgctacgattacctaactcaccccataaaaaatcacgaaacaatttatcgacttcagcagtaactttttggggtaaaataaagatgctcatccagtaattcctaatccccaacaacacagactaaactaagagagctcttcctgcaaaggataagtggcgactggtccaaccatgtaatttattttgtaccttaaatcaacaattccaccacagttcgaagccttccatttgatag

SEQ ID NO: 241896 - DNA, 1131 bp, Cannabis indica
tgactcttgtgaggtttaaattgtcaaatttgagttgggatctcttgaatttttggacctgaatataacaaaaatgcaattgtgtattttaacaatattatttttgttgtggaggcataacaaaagtgtaaaattaaaaatagcactttttattatggaagcataatagaaagtaaagattagaaaaatactatttttgtattattatattaattttgtatcaagttaagagtagtatgaattgattttaatgtaaatatttattttaagggatattttaagtatccatctattgatttagcatcttttttgtcatcactatttatatgactttactcataatttttttcttttaatttttcagtttataaaatttcattgttgatttaaatcattctcatagattcataattattctactttttattgaaaatgtttgcagctatggatcgatatatgcaatatagattggctgaacaagatgaagatagtgtagaatcatttacagatttgttgacaaataataatgacaaaaagaatggtagaggtcctacacaaatgcgtgacatttggggaaatcgtgatggtaaaaagatacaaatcacatgtaataaatttggacaaccacatgataaaaatgcaagtagacttgcaaacttcattgggacattagtacgagatggaaaaaatgctccaattaactatgaaaattggcataaagtactagacaaatacaaagttacaatgtggagaatcatacaggtaaaaattaatatttttgttttacataatttagcattttagatcactagttaaagtaattttgacattcatattttgtatatttaaaatttctaatatttaatgcatgctttgaatcttctaggaaaaatttgatattccttatctggcagaaaattggactatgagaacttgtggtaaggaacttaaaaattggaaagctcatcttaagaaaacttattattcagaaactttatcttttgaggagcaaaaaaaaatataaggataaaagagtatatgataagcaatgggagcaattaataaaatattgggcaacagatgatgcaaacgtacttcttgttttaacatttaatttactatgttattttt

SEQ ID NO: 241897 - DNA, 991 bp, Cannabis indica
ttctatgatccatataattagcaatgattatgtattgataacgccaaaacaacaccagaacaaccctaattttttgaatgaacaattgtagtagtttctcaagtatagttagcattagcaatcattttgtgttagaaacgccaaatcaacattagaacaaccctgatttatcaatttgcatcttaaattaaacaacatcacattatttttttcgttatttttaacttcagatctaaatctgggtttttttttttttttttgtagttttttaagaattaatttgatttgggttttgttgtgtttacctctgtttttgaaaaaaaaaaaatatctgtaaatcttgttgtttgttcttcgactgtccttagatttagtaggggttactcttcgccggatttaatggttttttcctggttatctccgattccggcccgtctccaaccaggaaggaggtcccgttttttgtgtttttttactgtttacagtataaaagtaaagttattgggcttgggcagtataaaagaaaagaaaacgggcttggacagtaaaaaagttatgttagccgtgtcccagtatatttgaaaacttttggtcaaaaagcagtatttatgtaaatttcccttttaaaaaatgtcatatttttttgtctaaataagaacccaaaaatatatatttttttctatagaatatttgtagaagtgagacgtatgaacttctctcttactcatatacacatggttcaactacttaaaatgccattggcattgtgatcgtattcttgtgtacttgaaagttgaaaccgatttccattatcattttttttaaaaaaaaataatatatgtaaatgttattcttcgtatggtatgtgagctgagatttcaaaatggacaataattttcttttaaaaaaaattacaatgacgttacaagttgacctttttaagttgaagccaatgaaatagtacttcgtaccacgcagcctctaaataaat

SEQ ID NO: 241898 - DNA, 717 bp, Cannabis indica
tttgatttttctcaagtaggccaccattctttcacctcaagttgtgtattcaccaagaacttgatttacaactaattgagaatcgctgaatatgtccaggtggttagcccttacttcatgcaccagcttgaggccaactatcaaagcttcatattcagacctcattattcaaggctttgaagccaaatttgattgctccgtgcattttttaccccttaggtgttgcaagggcaatgcatccaccagacaaattagtcagagcaactttcgtcaacgtggagtttccatattagttgtttgggattttgttgttggtcttactctcacttcttttctggctcttgctaaacttctaagtcctgagggatctcaagagttgagttggtgcactcagccacaaagtctacaagggcttgaccctttatggctgttcttggctggtatgtgatctagagctagccaagcttaatggcccatttgaggagtcggcttgatgcttcaggtttctacaaaacctgtcacaggggttgatcgatgtacacctttatagggtgtgcttggaagtaatgcctcagctttctagaagctaagagcaagctataggttagcttctccatgagtgggcatcgactttctgtgtcgactagccttttgctgatatagtatacaaggtgttgtagaccgtcttcttctattgtgaggacaacactcacaaca

SEQ ID NO: 241899 - DNA, 537 bp, Cannabis indica
aaaactgtaatttttttttaattttctcagtacaaactctattattttcttaaacaggccgcaaataaggtctaaattcttgatcattgggtctagacaaaaatatgtagtataaattactttcaaatgtttttctaataaattcaaaatagaatttgtattgataaaactagagtaaaattacagttttataaataccgctaaaagtaaacattaaatttatgcggctagcttaaaattttgattactatttaacgtatatatataattagaaagaaagagtgatgaggtggtggtggtgggtagggctagctagggcatagtattgcgtgttgtagggtatggccggtctagtggcccactcagcttttaatgtggggccactaattttttgttagtttgtgaacagacaaaagcagagaagcttcttatcctcctcctcagttttcacacacatagaatctctcaaaaaacccaaacccaccatcatcttattatatttaatacaaaatttccttctatatatatatatatatt

SEQ ID NO: 241900 - DNA, 511 bp, Cannabis indica
tgagaattagaataacatacctctacaggtgacgcatcagctctttctaactccttccaaatatgttgatcatagaccttcacaattttttggataggcgaatgaccttccatgtaacaaagtgcaacatgccaccagttgtgtgtgatcctaagatcgtaaaattagtctaaacttatttcacacacacacatacaccccaaaaaaaaaacctcattttgtatacatacataaatgatgacaaagaaccccacgaagatgagcaatcttccatgaattgtacagcttctttaaaacggcattcatactgaagaacatggcagaactgcaaaagatcgaaatattagagaaccagccaaggcttaaaacatgtatttttaatcaggtccatgccctgaaattggtaccaagtgctatatgaaaagatgtgataagcctctttagcatttatctcatttgatgtaacaatttcagaatagtaaaacactacattgagtataattatttaaag

SEQ ID NO: 241901 - DNA, 1834 bp, Cannabis indica
ataactcctttaccaatcattccttggataaaatgtttgaatacttcaaacatgtttaatcatgataaactagattatgtgctacgtcgattgcatacttattgtcacagtacaactctaaaggcccaattcgttgaagctataattattcacatgttcctctaatccataacagttcatactctctaagcaagagccctcagttatgctagcttcaacactattgtgagttaccacagattttttttttgatttgcttctccatgtgactaagctccctcatacgtgagtacaaaatccagttgttgatattcttacaaattattagagttaatcctacattgttaatgtgtggaaataaaaaatcatacataaaattaatagactactcttattgctaattatttttgagatgattgaacactatatcccgtaccatataatcctaaattctaacatggtatcagagccaaaaaaaaaaaacttctgctctctccccttcaaccaccatttgaacttgatttggccttgtgaaattctttcaaatgtcacattcggccttattgtctctttaaagtcgttcgttatactcacacattttaggcctaaacgagaggagtgtgtattagagtttgtcccacatttttcatttaaaaaaataaatgtcatatataagataaatggactactccttttattgttaattggttttgatcagataaaacctcatgcaccttaaccaaacacttctaaatttaatcacactaaacctgcccaataatctgtatctgtaaaagtctcaattcctcttttttctttcttgagaaatatttatccattttaaagtattccctttatgtaatgtactctatacacaaactccaatttttcctctaatgatatatgcatgtaaaactatccatgttgttggcaacaaatgcaatagtcttttgtggaataagtagatcatctctcccactaatagctaatacattcccttgtcaactgtcttttatttagttgatttctgtagttgcccctttggttctattcaaaatgtgctacacatttctacaatactttagtttagaaatttctacacatttaaagaaaaagtttacacaaaaattatttaggtacgtgtaaaaaactttattcaagaatttcctataaacatttctaaaaattaatattgtacaaaattctagtttgtattttagaaataagacatttgtatggataaagttctttttagtagaataaagatctagaattaatatgtgatctactataaatgcccatcaagttaggattcaaaattgtgaccaacatccaaaccaaacaactacaaactcttaataaagcttattattttctacatacaattctgtcttctaagccaaacaattctcatatactaaatcaataactactcatcaacatcaaaactacaacacatcaccacaacaatcattaaacacattatcctacatattcatatattctaaactaattaaactaataaaaattaattctcaaaccatcagtggtatcagacctctgttcgatcattactgggcataatatttgctactcatcatcactatgagttctgactccaaccgcttttctttacctcttctaatttttcatggataagactatgatttttggttaattaaattagtagcttatttttaatcacaaaatctttggaaaactgttgaagagggagtcaaaactctagatgacattacatcctattcgaaagatcagaagaaggcaataaaatatactcaataaaaggattttcatgcattacactgcttgcagc

SEQ ID NO: 241902 - DNA, 1013 bp, Cannabis indica
tcgaatatgatgaagaacaacaaaaaggttcgaaatcactatgaaaaggagtttctcatctactagttgtcagttagaaaactagatttaatttagttgagagaggttgagtgagaataagcatcatgttacttttatagtatttcaactagggtttaggatttaattatatagattaaaaaagataaaataataggcaaaaatacactaagtggtcggccacacatgtggatctcactagttacaattttaccactttatttcaactatttatcttttctttcaataatgtcatatttttcaatttcaatgctgtaaatatcaaaactatttatttaataattataattaattatttaaaaaaattgtcatttatctaatttattaattagactcaacaaagtcaaagatttctagaatttttcgaatatgttggttgggtcgaaaatcgcaaagtggtgaaagtaacccaacaaaggaaatgtgttggcttttataggccagaaggggtacaaggcaactgtgattagataccatcgtacagtgggaatttgtattgattcaaattctgcgatccaatggatagggtgaacaggcgtaacgaggagaaaggacggttaaaacgtttgagtacctctctgacaacggcattaatgaaaaggtctatcaatagacgggaagcgaatcgttgcctgcaaaagaaaataaaaatcaatgatgacaatcataaatacgacctgcgcgcctgggacacatgccactgcatttattagagaccggatgccgcgtacaagcctcatttaccagttactaaatgagacttgggggtaaatgttgcctcagatttttcccaaaatacgtggtcgcggctgtgtatgacatgtggatcacaaggatacctcacccgaaaaattagctaagtcatatatagacaggcaagtgcacttcagggagtgagtccctggagaggcacataaagcatgtctctcatctccgggagctagagatacaac

SEQ ID NO: 241903 - DNA, 1112 bp, Cannabis indica
aagagaagggaacttacctgagctccatgtcagtatggcggtggtggtggtggcgggtagaatccacatcttgcatccatgagagcccttgtgccaaatgaaagaaaattatcctccaacgttgcaattattagagttgtccttagattgagagtcacctttatcattcccacataacagtcttttcatacgtcgtcgaacagttcgaaatcgttctttagacttccctttcatattgttggtagtgacttctcgaccatcccttacaacttgcagtcgacaacaagtagtaatttcagtttcggcaagtaccttgaaagtttattcttctttttgaacatgcaactttaactcccccttctgtagatcaattaatgctcttcccgttgctagaaatggtctcccctagatgataggaatattctcatcttattaaaaaatcagcagggaagatgaactaaccaacctttacaaaaacatcttcaattataccccgaggatgagtcaaagaacgatctgccatctgtaaagtgactgttgtgggcttggcttctcctaattttaatcttttgaacattgataggggcattaagttgatactggctcccaaatcacataaagctttcgtttgtatcgaaccccctatcgagcatggaatgttgaaactacccggatcttttagcttgggtggtagtttcttttacaggaatgcactgcactcttcagtaagtgctaccatctcaaatttttccaacttcctcttcttggataaaatgtctgtcatgaactttaggtaagttgcatctgttcctaaagcctctatgaatggaatgttgatgtgtagtttcttgaatattttaaggaatttcgagaactgcttatccatcttattcttgtgaagtctttgaggataaggaattttgatgtgatggtcaatggtgatgggaggtggagtttctttttgaggaagaccatcaataatcttctcctttgctggtgtaggtgctgtctctacatcatcttcctcctttggcttgtctttgtttggcacaacataggtcttaccacttctcaaggtaattgcattacagttctcctttggattgacttca

SEQ ID NO: 241904 - DNA, 1790 bp, Cannabis indica
gagagaaagtgtgaagagacagaagctgtgaccttgtagagaggatggaaagtgtgaataatgagctaggagagctctccttttatagggaatgatgtccaattaaattaaaataaaatatagaaaaatcgcactaaatttgctaagaaatcttgcacgagatcgcaagtaaatttcgaggtcctaatcgtcagaattgcggtgagggtgtgagacgcactagatccgtcttgaaaagagctttaattggccacttgaatcgcatcatttggacaaaaattgagagaattatggccattttactgagtagtgtgcacaactgaaagaggattgcgagatcaggctaacttttgggcccccacgttgacgtaaacgttaacctatgcacccataacttggtttcttgggctttaggcatattttgagatgcttgaatgatgctatagctatccttttgaccttggggaagttattttggagattatgcacgggtgatgcccgatgaatcactagtgacagctaggtgacacttgggtgatcactagtgcacgtggatgtcgatggacttgcgtatgacatgtgtacatgagatattgacttacaggagcatccaaatcttattttgagggcaaaagaagactaatgcccagagcagaactattgtttgaaggacaaaacactgagccccaggccaatgtcaacttgcgcgcccagtgtgcttgcacactggcgcccggtgatgcctgagggataactctctactcgagcggaattttctcttaattctaagtctcatatcttgtttttagagcaaaacaagaagaatgcccacggcagaattgcaatcggattgacagaaccaccaaaagtgaggctaggtcaacctaggcgccaagtgattggggtgttgtcaccctgggcgcccatcttttcatatggggcctagatggcttcgtttcttttcaaaagcacttgtatcttcctcctgggcgaaaataagggaaatccccaaaacatttctctataaagaagtctaggggtgcccaaggttgagatacgtcaacttggtcacctatagtggtcttaagacatgcattgggtgcccaggtggggggggggggggggaagtctatgaaatcggtctctttgatgctcaatcttcttttttgtgaaaagtgctccacaaatttcaatttcgtcaaatttgcacgggtgttgcctgttgaaacgaaattagtgcccaggttagaatgtcaacttaggtgcccatagtgtggatgggcttcttcgggatgtcattgatgaaatatcatgtcctagcattattccttgatggatttgaggaatcggggtccaaggatgtccccaaaaacctaaatcataactatggtgtgcctagatcaactagatgtcaacttgagcgcccattagggattcttggtgactgggtgtcgtttctcatagacttatctccaaagtctaaaacttggttgtggtatgtctctcatgtatctaaggataatgtctaagcagatttcctatacgaagttgatagggaccaaaactgatgcgagatggcgcacatgatgtcaacatggggcgcccagcattaatgttggacccaagttgagccccgaggatgtctacgtgatatcctcagcttcatggttctttttagggttatggtgacctatttgttaaaggataacactaaaaaactgacttgttggatcttggtgcttcttgggtgctcccagtgtgcaggtaacactgctctatcttggggatgt

SEQ ID NO: 241905 - DNA, 997 bp, Cannabis indica
taaacaactgctaatttccaaattaactaagcgggctttacacatagttaatgattatattctcttgtggaaaaatttacctcactgctcatggcaggtctattaatgtcacaaatgatagaagactacaggcagtggcaaaacgatggacgaaacctactccgtgaattttcgaactaatttgtgatgcttctaatgataatgtttcaaaattctctggggcaggggtggtcattagtgatactaatgggcagttcatgcttcgagtacttggtcgtggagcagtctttttgagcctaatgttgttgaagctttcaagtctattccaacatagtcctctgttctcgcggtttttgaatcttattgtgtgaatgtgatttgagccattaacaaccgccaaattgattcttcatatttgggttatattattagagatggtccaataatggtatactataatttaatgggccaattatagttttgagggtgctctcatgtacctctaacataatatatgattattaaccatcccattatggtagtgaacaaatattaaacacatagttaatgattgtgtttatggtattaagctcatgattatattagtccacaataataattctaccattctcccacttggacaatataatcaaccaccataacattgtctatcacacaattaaaaaatttgaagtggtacttcaaaaagaaaattgaagtagtatgtcttgtaaaaaaaaaatcaatcttactaaaaagaagaagtacatgctttaaagaaaaaaaaaaacatgtttcatataaaataaataaataactaaataaaagttaatacatatcaacaaaggaagttaataattataaattttaatttgactttttcaaaagagtgtcatacaataattagcaaaataaactagtttaaatatataaatctaagaccattttcaatgtaaaatgtaaaatttgtactgaatttggcacaaaaattaagttt

SEQ ID NO: 241906 - DNA, 744 bp, Cannabis indica
atcattgtggagcaaaagtatttccttgcctcacactttacttcaatatgttgaatttttacattagtctagtagatgttatgttagttggttcctaaagcttatgtcaataaagttagttgttatgttcaacatattctcaattattgtcagtactaaaaataaagttcaaaatagtataatgtacacacaaataaaacaatatgcatgtaaatcactgttgaagtactataccaaaatataccaaaatttctaattgaaaaaaaaaagaaagaaaacaattgaaaatataccaaaattagatataaccgtaggagtttaattataattgtttatataattgattaagatttttaagggaaaacaaaaaattgaaagcaaaaaaaaaagagaaacttcaagaataaaatatagaaatatttattaaagtttttaggaaagcgacacaagatatcagataacaacacataagtcgctcatccccagttgatcgtcatcatgacgagctgctccgaatttgagtacttccaccgatacgacgtcgtttcggttgctgctttccaagtcgccactgagttggatatgtagctcagccgcgttgatttctgacttgaagaaaattgacgtagaagagagcaatgacgaggaagaagaagaagaggaggacgagtactctctgtagggaactcaatgtaaagactcggtttgaccgagtcaaatgtgtttatatatatataaaataat

SEQ ID NO: 241907 - DNA, 1637 bp, Cannabis indica
tagggtttcataagggttcattaggattttcttatgggctaaagaccatttagaagttcgcaaccctttagaagcgattatttggaaatgattgcatctgaagaggtttcaagatattttttccttttagctatgtcaatactttttttagtgattaaaaaaattacttttgaaagtactttttgtagtagtgatttgtctacaacgagctaggtatttacccttggtagaggggtggtttcttgggggtctagaaaacacacttgtatttctcattccacgacaaaagttgagttcataactctagctgccaagaggtggaatggttaagagctcttttggttgagattctaataatcaaagaggatgcatctataatatcaatacataatgatagccaagcaaatttggctagaaagtatggagtgtacaatgggaagtctagacacattagcttaagaaatagatatgcaagcgagtttattcaaagaggagtcatctcagtatcctatgtgagatcaagtgaaaactggacggatccatttacgaagccaccagctagagatctaatggaaaatacttttaaagggatgggactaaaactctataaagtggtttacaattgagagtaacctatcttaatactaataactttactagtgttaggtttaattgataaaaacaaatcaatatgtgaacaaatgtgataagtactaatgtcccatcttacaattaccaatttaagagttagacttctaaagtctttagtagaattcagtttggaaaataagtattttgataacaattactgtaagaattctacctacattgacctaagggtagtgttgccctatataagaattggggagtatatatatttccttaaaacctcaatgaatagcactacaaaaaaatcttacttttagtcacaacaatacttgtgactaaaagtaagaaaattgtgaataattataaatcattattcttatggttgtgactaaaaggtccgtggccaaaggtattagtcacaaaaattacaatttgttgtgatctaaatgtattttttaatcacaatgcttgttgtgactaaaactaaattagtgacaacttgtatctaaatactatgttttaatcataagtaatttttttatttgactaaaaatcatatttagtcacaaaaaaattatgttgtgactaaaaagttatcactaaaggtacatgttttttgtagtgtgcaatattaaggcattgggtgaacctagcaaaggtgcatgtcatcaccactttattataaaaaaaagttggtcccaatgctttgtcaaataaatttttaataaaatttgtgatgattacactatggtgaaattcaagttgaaaaacattttatcttatgcacttgagcaagttctctataaagagtgttgatttattcaattaaagtggaggatatatgagatattttgattgattaaataaggggaaatttgatcttctatacttacatatacttaatattttatctctaaactaatacatatcaccattgaaaatatatgaccactttatctaaaacccaaaaatacccctctcataactcaaccccatctctctcgcatttcagcacatgcatcggaccc

SEQ ID NO: 241908 - DNA, 1042 bp, Cannabis indica
tttgttttgtcaaaggaacaatgtcccaactgaaagaaagagaatgaaggatgtaccttatgttgtggttctcggatgcttaatgtacgtgatggctagcacaagactggatatagctcgtgctctaagcatcctaagcaggttcatgtccaatccgggcattgaacattggaagaccctctaaatcaaatggttattaagatatttgtagggaacttgggattatggtctgacctatgaaaattctaaaggaaaattagaattgaaagggttcgtggacgcagactacgcctcgaatagagttactaaaaaatcaaccacttcctacattttactgacaaactgaaactgtataagctggaaggcccaattacagtatgtggttgctctttccaccacgaaaacataatttatggcgaccacagaagcattcaaggagagaggtatagagaaaagagagagattgggtttggattttgtaagaaaaatcttctgtagaaaaataagatttttgggtaagaatgtgagagttgaatcactttgagagaactcaacagagaatcattctcgactatattatacttgttcttgttcaatcaataaagaagatttggtactgtttcagaactagagtagaaccataaattacataaatctattagactttaaccaatataatcttggtattattgatttattattttctgcctttgttgttttctagttttacccactctgttcgtctctatttttcatctaattattgtttatgatttattaattttgtccttgttaattattaattgtttaaaactaatcgatttgattatgcaatgttaaccataattctctcacaaaatataattcaatacaataggatacgatctaataaaacataataaataataatcagttatatattttatattgggtaaattgcggcataaatacctaatgtttctaattttatacacttaaatacctaatgtttatttttggtggcaaaaatacctaatgttacaattctcttacaccgttacta

SEQ ID NO: 241909 - DNA, 1660 bp, Cannabis indica
gccaaaattcaaagcatgcaatttttcaaattaggttaagagaaatgtaccatttgtaatcatttaaaaagtacttcttaaaaaagaactttttaaggggcaattgtaatacccaaaatttggctacacttcagagtatgacacgtgtcaattaagtggatgaactacctgatataataacaactatatcatttaatgcaaaaaggaataactcattaaatatagaattaatagagtatattcataacttaccgactgtatagtcttaggcgagacaatgatataagactattaatgtttgtattgatgagataccaacctacttcggaatacgcaatcccgagaataaaattcgtttataagtaaagttattcgaatcaaactcgaacaatgtatagcgagacatctatctcgctatacattagagaatattggcaaggcgaatcggttgttaaacacttagcatattttccacattataataactaaagtgtattcacttggaaatatgtgggacatgattgtccagtctgcggggccttatggtcaaagagtagttcttaaatttgctcagtacactggtgctcatactattactggaaggcatgtgattagccaagtcatcattaatcatctatggccaagacgagatgccactacccacgttagcatcaaccgccttgaagataagaatgataagcggtgtgcggttatcaattgttatccacacgtgtttatatgaaacgtgatcaaagctcacgtttcatgaaacagttatgtaattcaaatttaaatgtaaataactgccaacctatattcctataaataggggcagattctacagagaaaaggactgaaaatctttgagagaaaaaaatcgcaaattgtaatattgtatcaaatactcagaaatatcttgaataagatagactcgtggagtatgcagatttaactgcaaaaacacgtaaaatacttagcgttattataattattatacttattaattttcctatacatatactgtgtttaatttattacaaaaaaggtttaatttttttgttaacgaaaatctgcgttaataaacaacatcaccgagaactagtaaccaactgccgcgatacaagaactgccgcgatataagaaaataactactataaatttgatatttctattttataattaattaacaactaatatagcaagtgggtatagtttaaaagtccaaatttttgagccaataaaatacactttggttttaccaaaaaaaaaaaaaattaataacaaaaattttacaaaatattatcgaaaactaccattaaaaacacttttagatgtgtagcgtagacactgtagggtaggccgcaacggggagaaagaagagagagcgatgagatgagaggtgtcggaggaccacttctttgcataggcgatctcctaaacgacgtcggagaatcaaatcctgacacttccaaacccgatctccatccttacccttcttcttccatctcaccgcatcccgttgatctcaccacactcttcgaggtttttttctctatcgatcgatttctttcatgtttcataaattgtttcaattttgctcgtactccattattgcttttctatctacatctctctctctatattgcttcaattcaactga

SEQ ID NO: 241910 - DNA, 950 bp, Cannabis indica
aatcttattcgaccaatgaatctgggatggtcaaaaaatgggtaggagacctcgtgctcaagtttataagcgttagaagtatcaaaaatgagatcccaagagcttgggagtaagtacccaatgcccaagttgacaaatggcccggtgcgctaggttttacttatctaattctgattctattttggttgtctgtctagttttttacaatcactaagatccatgaagtcagagaagtcaaattcacaacttcgcatttctcatttccaacatgggaaactcactcggaaatgaagaattttgagcctctcatttatgcaaaacgacaacatatccgagaatcggtgaccaacttcgccagattacagaaataggctaagtgatgtcaaaatatcacttaaacaccttaaagtacatcccttggacatttttacacttacccagcatccaggttgacgtcatatgtcaacttgggcgatgggtcatgaattgtcttcagtaaaacaactataactcactaaatattgatctgattgatgtgattcaacttgcgtttcaaatctaattcaatgctctatcaagttatgtctcacacttcaattacaattctaaagctatcgtcctaaaattttaccccaagggagttacgaaaataagttccgagttacctgcagcgcgattccaaaaaatggctacaccagcaagagatcattttcaccgttagatcatcatcaacggtcaaaaacatccaatttgtacttttcctatttttgtgggcctccttcacctataaaaggagagctccataagctcactttttaagttcagaaaactaccaacaaggtcagagtttctctttctattggagctttttgatttttactttttttttttttctgtaattaccatctcgtgagaaataaaaactcaaagttgacgtagctccattactg

SEQ ID NO: 241911 - DNA, 1049 bp, Cannabis indica
agctatctaaggacttcaagaaatcgttccaggcagcgagaaacaggcgacccgaagcgtcttcccttactaacataaagtagtagacgggcaagatgcttaaggcctacttaagtcgcttcagtacatctgctgcgagggttagaaacttgaatgacaatatccagcttactgctcttcaagcagggatcacgactgttctcacgacaactagaggcgagctgtgggatgatttgtaaggtcgcccagtgaaaaatatcagcgagttcaatgagagggcttaggtgtttgttcgaaaagaggaagcaagaaaagagatgaagttgttaaagactggctcgggaggtaaacccagtactatcttaataagtaacatctcaacaaaggctgacaatccaggaggctctagtacaaaaagaaaagatgactctaaggaatcagccaaagacaagaaaaaatagaagaagcacgacaagtacgtgccaatctacattatttataccgagcttaatgaaactcaggaaaatatctatctcgcacatgagcacagggtcacattccgtaaacctgagcccatgaggcatgagacataaaagagatgcaaaaaaattttgtaagtttcatatggacatacggcacacgacagaataatgtcgtcaattgaaggatgagatagaaagccttatctcgcacagttactttcagcaatatgtgaaacgataaggaaatggacaaaaccagccaaatccgcccaataacccaggtaaccagaggttacgacctcctcctcttgaaggagaggacattctggttatctcgggagtgccacatctcgctagagaaagtaacaatgcccaaaagagatatgccaaggaagttaagaacgagcagtcagtatttgctctgaaatcttctaagaaagctaagactaaggaacatccaattgtgttctcggaggaagatggaaagcatgtgagatatcctcatgtcgacccactagtgattacaatccagctcaccaaaaaaaggataaaaagggtgttggtgga

SEQ ID NO: 241912 - DNA, 850 bp, Cannabis indica
attatgtcttttagccgattatgttcattttttgttccaaattgcatttgtctcttaatgtttcatatttaatggtcaattaatgattatggatagaaatgagaataaacatattaaataagacaaatatggtgaatatatcatagattttggagttgtaaattataatgagggataaattttatgttttggatgctcaacacatttcatctgagctttggaatgcaagtttaaagcatcaatcaattttttcactatgatcctttcactttccagaaaactattctgaataaaatttgtaaagcattcttgaagattttcaaaatatcttaaatcttaaaatttcaagatcgagagatttgtggacaaaaaattatcgaccattgcagtaggatttaagagtcccaaattcataattagtggcatagctcccaaataaagagttgcagcgcagacgtccatacagtacacgaaagctcaatttgaaggggcaaaattgtcttttcacctaaactaaaatcgttatggttattatataaatatctttcagtgtgattttcattattttttcgcctctaaaaacttagaaaagcatttagaggcaacgaataataaagattcaaaatttttaactcctcttttcttatttaatttcttcattgttatgaaatattatttatggatgttcaaatcaccaagttaattatcaccattaattatggatgttatgaaatattatttatggatgttcaaatcacccatccaaatgcaaagacagctcggatgaagtctacacgcaacttcagaagtcccgtactgtcttaggttgcaaatgttatcccaatttttg

SEQ ID NO: 241913 - DNA, 685 bp, Cannabis indica
tttggtcatcatattgagaattttaagtgagggaaatataatttattagtattatgtgataatatataatatgtaaatttaactagactatacctccattaattatattggcaaagactcttctgattgagaaaatctaccgaatttcgacggtcaagagaaaacagtgacataattaataataatatcgtcactgtttatttttttttataatagtattcgttatagttacaatatgattatttctgtaaatttttaaaaactttcaaatagtttacaatattgaaaataagtttatagttttttgaacatgtttggtaaagttgaatattaaaaaatttgttgtcaatactgtaaattatttaaaatttataaagtaactatataactataacgaaaaatattatcatgaaaaaaatatattctaacactcttaagccataaatatctagtcaactatttaatttatatagtcaactaatctattctaattagtggttaatttaatcatccaccacactataaaaaaatacaaggaccatatattttcaacaatgacaacctttgttgggctatatgtgaagacttctatcgcctaataaattacaaaaatatagttgtacgaaatattatatatttttatgatttttataattttattcaaagaaaatacagttttttgatt

SEQ ID NO: 241914 - DNA, 635 bp, Cannabis indica
  modified_base (35)..(35): a, c, t, g, unknown or other
gcagtgggatcaaatggttagagttcccaatgggnggttttccagtgccagttgatgagatcccgaccgtttagatttattgtcggagatgcgattccagtccttgaaaatctctttacgcgcatggttgacctttgggggctggtcccaatcgggtcgcgaatctaatttttcatccgagtagtcacacgattcaggtgaagctgggttggataagctgcttgttttggagaattaaattgatcgatgatgagaatgcgaaggaattaaaatagtgtttcttatggaagagagaaggagaaaaatggagacaaagcagataataaaaacaaaggggagtagaggaaccttcttatggtagagattgaatattataaaatctgtcgtagacatcgtcacagcatcaaaagtaagaactaagaaaattttctaaaacatgcaacaattagctgatttatagaataaatttcaaaatttaacgcattttttggaaagaaaagaaaatgtgtaatagtctagaatatcatagaatgcttacttcttccactgtaattctaataaactaaggactttctcttcctctaattcccattatatcactctaggattgctaccaaatattatcaagtataaaa

SEQ ID NO: 241915 - DNA, 763 bp, Cannabis indica
tatgtcttatttatgaattttcactaagcaaggggcttaattgtgaagaacatgttttggagtttatttgttaattaagagactttgttaagtctaattaataaataaaataggctaattaaaattttttcccctaaactttgacatatactaaataatgccccctgaacttttttggccgttaaaaattctcctggtacatgtcaacacgcaagatgtccttcaatgtgattcaaggtgaacgcagacatccaagcaatagacccattagccatttaacaaatatagacagcacctaaagcctgtgagcttgtgcaggaatatgaacaggcaactcatgctcaacaagttgcatacgttgatgtacttaatacaagaacagattaaactgttcttcatttattcttttacgtttatcttgatttaatactaccatttattgttaaaacgattccaaaactgatcagtcacgtaaaaaattaaaaggacacttgctttctatataaaatagtgatccaaatcatataaactaagcataaattagttgcaatagtggactaaacagaccgagatctgactgaactactatatattttcttgtgtttttatcatttccagttgttcttttgtcttcggtagcttattgttgaatactcgctattctaagtgagtgttcatacttttttgattgacttgtttattatttacacgtattttggtgttgtctaaatttctgtgagaataataatattataaaattaat

SEQ ID NO: 241916 - DNA, 898 bp, Cannabis indica
tatcttaatactgttattacgaattcaaacataaaaagtttcaaaatgtcgtatagcataatgccaacttatgtccatatattctgcaacaattattttcttttttcaattgatcagttcttccatctatcacaaattgtggtgaattggattcacctcattcaagaacacatcagctagaaactcaattaatcacagtaatgttaaatgcaagatcaacaaaatgattaaaacagaaaactcaagagcagaagaagaaaagtaatacaaaatacatacacagtaaagatcaatatcaatgttacactgtactaggaacttagtcctaaaacaatagagaagccacacttatatagtaactaacctaacagaatgacataatcaaaaatgccattgcactctgaaatctacacaaatcaacaaatataaatgcaaccatctttgtgtttcatgataaatataaacaaaatgaaaaaataattcataaacaatttttttttttgtctaaacaacagttaaataagtgattttggcatttctctcattctttttccttccactcttttcatattttcaaaaattcctggctaacataaagtatccaaaatattattacaataacaacgcattgtattatttattgttagtataataaaatatcaaaatcaactcaactatttttatttaataatgtaataaagattgacatgatcgaagtaaatgtaataatgctttccaagaagaacttcatgttgaaaccaacattaataaatagtatcagtattttgataaactgtgtttgaatagatggtagtatgaagcaccaaaagcaacaatcaacacttacattgaaaaatttcaaaccacatgactcaccttccaagctagctccgagtta

SEQ ID NO: 241917 - DNA, 1060 bp, Cannabis indica
cctttcctttacctacacacgaaaataatatttgtgagtcaacagactcaataagaaaagcacataacatacaatatattaccaacttgtatctaggcgaccatacacctatccataaagcttattagataagtaagagcgttttatacaaagatacgaccactgtagcacatgcacacgtaccgctactgtacgagtgttggtagggttcgctccttacctcgagtacctaaagtattgtaccacatacactccatacctatctatactagtgttggtaacatcggattatactatttaaacatcgtacacggtaacaatgcacttaatactgctaccgtactagtgctggcagtatacgaatcacgtatagcatgcatatatcacacatacacataatcacatatattatatgttctacgctagtcttaccttgtttttgaattcaagtgtgatagacgacctgaacgaaaaactacgtgctggatagatgccctatgtcacatttacgtaaatggattaataacatgctaaaatccgaaccggggacctaaactcacaactacaagtttgctatcgacaattaacatgaccatatcccaattatcaaggaaacaacaaactaaggctctgaaaaataacaaaatcgacaaaaaggattttttggggatcctgcctctgacctggttaatcggttctacaggtgctgtagaatcggttaactggtttacaccaaaaaactctaaaagttcaaaacttgcacaattcgtacccaaactttaccaaaccttctagaataactgcactaacttccaataacaaaattcaagcagtaacaccagcaattaatcacagaaaccaaatccaccattaatgagtcgagtttgagttctcaaactcaaacttgctcatttctctcacaaaccaacaaaaccagcgacaaacaatcaattccagcttaaaataaccccaaaaatcacactagagtaaaacctaacctaaacagccaatacttttcagaattgcatggtgaaacccactttaaagcttaaacaacaaa

SEQ ID NO: 241918 - DNA, 1502 bp, Cannabis indica
tttttgtaaatataaaagttcaggggaaattcttaacaagttgtatattttaggaggcaaaataagtattgttaaaagttcaaggagaaaatttgctaattatggttagttttcaaatttctgaatcatttatttctcgatttgatatactgaattaattatcaaattattctgacaattaatgtggcgcaaatactgatggatggagtatctcactaataaatatagggtctcgatcccaagctcctcactcattctgtacaaatagtaaagtccatgtaaaagagtagagagagtttagaagcccgattacccaatccgaagctacactagattgaatctcgaaaatcaatgactggaggtattacgatatctttcgttgttcatctatacactcgacttgtctttataattttgctttgcaaatcgattgtatctactttatttttcatataataatacctaatagttggcatcagagctgtttttatctggcttgatttatttttgagtttttttgcttatgtgttatcctaattttccccacctgacgtggcagtgcttacgtggacaaaatcagtaccacgttgcagtacaactcaccaacaagaaggccaagttagtacctaagcaaatagagatcctgacactcaaacatgcatcaaatgacagaccagcttcctcacagaagctggtcggccacccctggcaggctagcctctagacaagaccatggccaaccagcctgctcccagcaggagtttggtcggccaagagaatgcttgcaggatttcctgtgcaattctacacgtggactgcatggtttgggctgggaatcgggccttaaaagcccaatagaatatctgaataatatctactttcaagggcattttcatcttttgtaattaacaaaatagatatacaaatatctagggtttcaagttgtaaattagagtttagacttctatataaaagccttaactctaacctaaaaaaacttaaagtccaattcaagtctgaaagtcattgagtctgatactagcctccaagttctaagcctaagtctaataactctcttcactctctatctctctctctctcacacacccatacaagctacctctacacttgatatttgccaatcctgattcctactttgtatccttaagggtgctatatcagatcccacctatagtgatctgaatagtttaaccctcggtattaatacaactaaaaggggagtaggtcattacccactatcaaagggggccaaacctctataacaattctgtgtgttctttactttcttattctaattgtgtaacacatggcaagcatcagattcatacgactccactgtcggttgatcactttttgaggtcaacaatttggtgcttccattgagagcgtggatattgtatctgatcaaacaccatggttaacacgagaagaaccctaattgcaccatatgcatcttcgggtctccctcaagacccacagac

SEQ ID NO: 241919 - DNA, 739 bp, Cannabis indica
caattttgaaataatttttttttgggttcgacgactgtggaaacttgatgaattggccaaggatgtcacgacaataatacaatgagttttattgggattttaccagattgttttagtattcttgtgttgtcagattattcgaggtagacaacattcaccaaaatacccctagagtataaactagcttaagtgtttaattgagggcaaactagtcattttattaatatataattgttttgttttatttgtaatctagtaaaccctaggctgaataaacttgatttattaatttagtaattattagtttagataattaagagataaagcaaacctaagaaaatttcacaatacttatcaagtctttctctatccctctttttggctcaagaagaacccaacaaaccaaagctcttaataatctcaatcttagtcaagttattcaaatctaggaactgtacaacatttaggtaagtttctctacttgatcttaatgattctagggttttacgttgatatttttttggtgattttgagtaattttgggtctataggtttggttgagttcaaagcatgattttaactttatttcaaggttgtttaagtgtaaatttcttgtttgtacgaatgctaagctttgagttgggtgagttgagttcaagaactcaaacactcatttaataatactgagtttgtaatcttagtgtatttctgtgttttgaatgtttggtaatgttaattt

SEQ ID NO: 241920 - DNA, 2053 bp, Cannabis indica
ccatccaatccattttagctactttaagttaatttcaaaagaaaatatatataaaaatacataatttaaaacttaataatccaccatatataataaacattagtttaatccaacctaattctcatgatctcataataaaactgttaaaaaataaaagttatttaatacgtattgataattttattagcatttaggaagatgagaattaatattttaaatctaaggtttttttttcttaatctcatgtgttaaatgtatattaaatcaattaatatatatttttaaataaaatatattaaatatattttaaaaacatataaatataattggatgataattggatttgtttggtcgattatccattggatcagatgtcccaattggattttcaaaattttcatccaatcgaatctaattatgattagatatctgattctattggatcggttgggattggaacagttgagattggatcggtcggttgtaattggattggatgactttctacacgctcctagttttcagctttcacttgttgacatgttgaacactttgtaagatactctgctatatcgttcttcattctaggccaccagtacatagacttaaggtcttgatacattttcatcgtttttgggtggacaaagtagggactcatatgagactcattcagaatttccctcttgatatcatcttctaaaggaacaaaaatatggttcataaactgtaacataccattactttccactgtaaaatcattgatcttcagagctgaaatcttatctcgagacatcactaagtctgggtcttggtattgcgcttatttaattcttttccaagagagtggactgcagagtaatgttagctaatcgtcccacaataaactcaatgttagctcaggtcatctcatctgccagtagcttggagatttgtttcattgtattcatctggttctcacccttcctacttagagcataagctacaacattagcctttccaggatgataatggatttcactgtcataatttttaccaactctagccaacgtctttgtctcatgttcaagtctttttgggtgtagaagtattttagactttttatggtcaatgtaaatctcacatttctcgccatataagtaatgctgccaaatctttagcgcaattacaactgcagtgagctctagatcgtgagtagggtacctctgtttatactcttttaattgtcgagaagcataagttattacctttctagtttgcataagtacacaacctagaccttgtcttgaggcatcacaataaatgacaaacttttctttatcagaaggaagagctaatattggggtagtaattaagtgttgcttcaactcctgaaaacttttctcacaccggtccatccaattaaactttaaattctttcgggtcaattctattaaaggtgtcgctatctttgagaaaccttcaacgaaccgatgataataaccagctaaacctaaaaagcatctaacttccatggctgattttggtgttggccaatcccaaacagctttgattttggcgggatcaaccatcgatcccatccttgtccactatgtgccctaaagaaaagagacacgtgataaccagaactcacacttcttgaacttagcctagagcttgtgatccagtagttgctaaaagtctaaatctgagatgtaactcatgttcttcttctgattctgaatatactaaaatgtcatcaatgaaaactatcacatgcttgtccagaaaatccttgaatactcggttcataagatccatgaatgcagccggggaattggcgagtccaaaagacatcaaccaaaaactcgtaatgtccatacctagtacagaatgcagtcttcaaatatcctcttctcgaattcttaactgataggtaaaccaaaacgaggtcaatcttagaaaagactgtcctaccctttaattgctcaaacatgtcataaatcatggataaaggatatttattcttaatagtgagtttattcagttcccaataattgataaacatgcaaagcga

SEQ ID NO: 241921 - DNA, 777 bp, Cannabis indica
atgaaaaagttacctctcatgtaaatttaaggagagcacacccacttcaaattgatgaataatgttgatgcatacaaattaaataatgctcgattggacttgtaaaatgtaaataccaaaatcttagtaatgaatagccaatatacaagagatccatggagtttggagactttgtaaattttttgaaaaaattgttagatatcaatggtggtttggagagaaaaatggtgggtgggttttattttttacttggtagctcatcttaatcttcaaaactaaagaagttacactccactaaaattaatatagaaaatattattttttaattttcttccattattaataaaaacgtactttattttagaagtgttgctattgattttgaatttaattttaaaatattaatgtttaaaatatataagctatttagcaaaattttatatttaagtgcgtctaataaaaaatataaatgaactagcaacacttatttatcaagtgttattaaataagtgttgctagatattaatggtttaaacatataaattttttagcaacactttatatttaagtgtgtctaataacaaaaattaatgaattagcaacacttatttaccaagtgttattgaataagcgctgctaaacatcttatttgtagtagtaagtataaattagggtttcatatttgtctttttaatttgcaaaagctttaattatatatgtaactaacttctaactcaacaataaattcatgtaaaaattacacattttatatatttt

SEQ ID NO: 241922 - DNA, 812 bp, Cannabis indica
acgcctcgccttacaaaaaaaaacgcctcaaggctcatttgcgtttttttaaacattggtccacacaaaatcgcaacgagccatctttctttctgacaagaagaacgaggctactggtggtgggttgaattattcccaccgtaagcatgatagacattaacttttcaatataatctttttgaaaataggcataacggtacggtttaacattgattggggttgtttcgggctgtaggataatggcatgctcgtgggaacggttcggggtagacctttagacatttcaaacacatcagcaaggatttgagaatattctggtacagtttgacccacattatcggtattatggcatgtgtaattgaactctaaaatgatgccttgttgctcaacttgaatcttttccattattttgagagataccaaagaccaatcaaatgaggggtcccctttgattagaaccctttgtttgccaagataaaattctatggtttataacttccagtccacactattcataccaagtgtagctaaccattgcagccctaagatgatatcggcactttccaaaggcaaaggcaagaaatcatcccaaacattaatagcctagaagtgtagattcagattgcaaattccctcacatttcattgagtctccattccccaaagtaactctgtaagccttagttttcgagatgggaatgttcaaattggagactaaagccttagaaataaaattatgagtagctcgtgagtcaatgagaattacctcttctttagtatcgaggtgtcctttgagtttcatggtagaattta

SEQ ID NO: 241923 - DNA, 1202 bp, Cannabis indica
acaagatttgtcaagacaaaagttgttaggacaaagcacaccattcttgtcctaaaagacaagggtatgcgcctactgttgttttgggtttgtcttttcggttaattaatttaattaggtaaatatctaatttgaaaagtggttatacatttttcaaggttgttgagatattttctaaagtggttgagggatttcctcataaatattagtaacccaattcggttatagatatttatttgtttaaaaattagataataatttaattaaagagatttgactactttaaataggagcctaattttataaattaaaaaacttcctttacactacaaatttcaaaatatatagagagaaaaggaaattggtttttctctttaatgatcttgctcatgtgttgagaactcaacaagaataaatgttatatactttatcctaatagcccacactattccttgtgtgtggtggaatgatttggaagactctggtgtgagttcaaattgtactatctggattaaggatacaacatataaaaagtttcgaagataccgtgatagtcatcaagaggtatataatctaaacttgtattttattattttgatttaatgtacacacatcttgagatccaatgggatatggtactatgataataagataatatgaaatctttctgatgcgtacccgatttagtaccataaaactaactattagtatcaagagcaattctataaatgtgtatacattaaatgttgtgtggattttatacatttatatatatatatatgtgatatgtatgtgaatgaatggttatattattgtgaatattatgagaggtgataaattgtcaattatatggtataattgagtgtaggtttcgttttttattttttcttagaaaataatgtaagccattatggggtatatgaatttttatgtaattattatttatgtaaaaataatacaatacaatgttcattgcatgtgagctcgatttctaaactttgaaatccgatcatgcacgtcaaaatcacatgcatgcaagctcgagaatttttcccatgccacccatagccacccgagtggcttcgagtaccgtgcccacaaatccatgaatgcaatgcatgcgagtgggacgtgagtcccttgaggagcaaggtggttcgaccaccattaccgtgactgtaacagtacaggaccttcggtcc

SEQ ID NO: 241924 - DNA, 1128 bp, Cannabis indica
aaagaggctcttagttggatcaaacgaaaaggttgacagaatgtcgttctcgaatctgacagtttagtctctatccaagctattcgtagtcgctcatctctttgttccatttttggaaatcttgctctagactgtcactcttttatgctttctatgcctttaataaaagtttattttgttaaacgatcagcaaaccgcctagcacatactgttgctaggatgtcacggtacttatctggtcgtagtatttctgtgtctgatgctccagctactattctggatgttttgtactcagaatgttaatttaatgaagttgatatttcatcaaaaaataaataaataaatggtacaaattgtgattatatattaagtaagttcacatgtcaaaatttatagttgtcacccagtttagagtaatctaggttatatactaaagagttgacaaagtatagtaatcaataatttataccactaatatactaaaaagtattaatttttccaatttaaggtaatctcagttacatatctttcacgtgtgtcacaattttaaaataaataaataaatcaaatggtacatagatcacgtggcacactctgattgcgtcacaacttttacaataaataaataaatacatatcataacataacaagctcacattacaaattcaatatattctattcgttcaaccattccctatgaaaaattagaagaaaaaaccaagttgaacttacaattcgcaagacaggtgtgaaactatgtccttcagcttgttctcgggcctgtgcatgtttccaaagtctatgtttacttggatgaaccctttggatagcaacatgacaagcttctctaattggtacaattaagaactacattattagtatatttttatactataaataaaatattcttacattcattttaattcgtctaaaaatatatgagtgattgataatttgatattgctcaagtaatcataatttatttttttaattattgttttaggttatcaaattaaatttatatatttatatagttatataatatatctatagggtaatactatggtagtacctagcaaaagttccctaccggtaggaactttttttctaaccgttgattttagatct

SEQ ID NO: 241925 - DNA, 560 bp, Cannabis indica
tctctctttctctcttggttaggttttcaatcagggttttcaaaatccttggacagccaatccactccaccctcactgaaccccaaccccaaaacccatctgttcctctccagacccatttggtccgacagtcggaaaaaaccagtcgagacgaaggttgatccatatccagacgaaggtcgagacgattccaccaccactaaagaagaactgtccaccaaactcatgttcccttggtctttcaccaccagagctgaagttccacccaagaaccctccctgctgcggcgagtacggtccgagttgttggtgctgcaactcaatctcagtggagaagaagaccgagtcggaatttctgggtattttctgttcaaaattttgtatatgggtattgtatcaatttctgggtattttatcaattttgtatatggatatgggtattgtatcaatttctgggtattttgttctattaattttctgggtatttctgggtatttcatttatttttaattatttattttctgggtattgtatacgagatcgagagagaatgatagagag

SEQ ID NO: 241926 - DNA, 592 bp, Cannabis indica
catggacatggaatgaaagtcagagaaagagagattgccattgccaataatggagacaaattatttgtaatttaaaaaaaatcctaaaattaatttaaaatacgccacgtaagcttttaattatttatattatggtgatggctaggcatgatatatgttgctcaacaatgggagtacattgatcgaatttaagattggatatcttttatattttattaagtaaaagctagctgtcaaataccacaattgaatatatagtgcatacaaaatattacattttgaactcatttgctaactcgtgttatattgtttgatatgctgtattgtattgtattgaatttatttagatctcatattttatataatactatatattctcagagatagttttgtttcatgttgctcgttaattttatagtagttcatggtttgacaaagcatgacttttggttagacgatgagctatctaaattcaaggaagtttttgcgttatttgtgaatgtttgcatcataaattcataagtaattctaatcattacgtcaaaaaaaatagttatatatcatatttgatataatattatcttaaatttta

SEQ ID NO: 241927 - DNA, 919 bp, Cannabis indica
atcagattgtaatgagttttatttagggcataaaacccaacatatgtacccaaggcaaagttctgggtcttcgttaggcttgggccggttccaagtctagactggccttctgggagggggaaggcttaggcccatttttaagtggtgattaccttcatattatgcaatgcctctatctttcgaaaacacgaataatattttcccccaagcttctaggacttaagagtgacagaagcttgaaaccttccttctgaacaaccttggtgtcattaggcacgtggacaattctaaaagtagtggaagcttttttctctttcctacactcgaccaattgaagagtcgagaatctgcttggagaacaactgtcatcacatacgtgtcaccacctcttgggttcatgagtgccatgcactttaggaaggcatgttctgtgtgaaacgatggaacggcgaccatttactgtcaatgtgggccccgaggtgagtattaatcatgaaaaaatgcctcgattcctataaaggcatttaatgtcgtcccctcagttccatatccgttaaattgtgattcgtgtttttctagggagatcttggcccttgatttcaaagtacgtggatatccacttttgcatatatataggcacgaggaaaccactttcaccttttttgcactttaaaatttttgaacttttgccttcgaatttgaatgaaagatttttaccagagaacgatccctagaaaaaatcccaaaaaacctaagcttcaccctttggtgaatgagcgatctctttgacgttgttatccacctcctactataaatttgagcaatggagtttccaagagtgccgccactaaatcttgttgtgagccacccctagtcgtctgaaatagttgacattcaagtaggctgtgactgatttttg

SEQ ID NO: 241928 - DNA, 389 bp, Cannabis indica
aataaaaactatttgcgactacaatatatacgtcggtttataaaccaacgtaaattctttaagtgtcacttaaaaacagacgggaatagtgaattttgtagtagtgtagggacgctgaagtccaagaggtggaggatcaaggcaaggtccatcctgatactccttctgaagttgaggaggaaggtgcagctcagaggtttccctttggtggcttgaatgatgatggacaacctatgtctgaggcttgagagatcttagaggccgttgaagactatgtcactgaggaatacaccgaggccattcctctaagaaggcaaggcgtactaggagctcggtgggtttctcccccatccgtggtaaccaggacaaagatgaagaatttgcagaag

SEQ ID NO: 241929 - DNA, 1028 bp, Cannabis indica
tgttattgttattttcacttgttgatgcatgttaatgaaactttatcattcatgatactgtttatgctattgtctatgcagaggacctgcattgtgtgtaattttttttcactgcttatttattgtttttggtagttgaacctgtgaatttctgttttccatctatttatatcagtgctttttactgttcgcttcttaccaagctctggttctattgatcaggttggtgctgggactatgaatcctttgactttcttaagagttcttggtccagaaccgtggaatgttgcgtaagtgtgcgtaagtttataataactagttcattggtaatacaattactaagctgtttagtaataaacctaaaatgaagcaatacacgcttttgcagtgtttgcattttgtcacttataaaccactgctttgaaatttatgtgctaacatttcctgattgttctaagcaaaacaaagttccaagtcgtgtgctgataacgaaagaaaatagaatgataactattgttgttattattattatttatttggaaatttcccttgttcttctgtgtaacatgacatgagcagatcaaagtttaaagctgttgtttcttacaaaaaagaccatacatttataaacatattggaaacgatgcactcaaatcttaattaacatgtttctcttctgacaaattattacatgtgcagtttagtgtcaaataatgcatgtactcaaattatttttattgtggcgatgcatgtactcaaatatgattgccttgcatatgtaaaaaaatattaaaaaaaaatacttccgggcgctgtaaattatttcaaatgaatggatcttagctttttgcttaatatgtccttcttgggttgtttttgtaatcttctgactattaaaacaaaagttaaccttgtacaagcacctcctataaatgacatgaaggtgtttctttctaagtcttggttaatttgttgctttggtctaaattcttcaaacataattgttgagtctaattttagtttgtatt

SEQ ID NO: 241930 - DNA, 553 bp, Cannabis indica
agatatacttttcatctctgttcatcttcttgatattgtataggttggtcaaccacgtggcttcttgcatgtggctggttggccttggaagcttatatggggggttggctgacgatagcagtccaaagagggcactggctggccaaagttttgatgtttgacactgatgttatttttctttattttcaggccctgatgaaactgagctcagctcgtgattgctctaggaggtcttcagattctttttaggagcatgtgaagatcttggaggcttcccttgcagcaaaatacaaagccaactctgagctggaagttcttctaacggagaggtagagaatggtttcaggattggagaccatgcttggtgctaggaatacagagaacaccacctaggctaccctcatctctgggttgcaaactaagcttgaggatcataagaagaagttataggaggctcttgatggctagcagaccattaaggaggattatatcaacttgtcctctaaacttacctatgagtttcattcgcacaacctgttggaaatattttacc

SEQ ID NO: 241931 - DNA, 1199 bp, Cannabis indica
tcattttgaaaagtttttttccgatcaaacattatttttcttcagccatcgtcaaacagtgtttcctttctggtcatacattaattaggtagttacaaatataaaatatcaatttatataattttatcactgatgagaggcaatggaatatccctttgctgcaacaatatttttgtcctctcaacattgaaaagatactcaccttaccattgagcttttccccacaagagataaactgatttggcatcatcactcctccggaaactttacagtccaaagtgcatatcaccttgcaacttcgttggatagcgaagacctttgctccagctccacttcggctgtacagtgttcgaaacttttctggtctctccaaatccctcaaaaggttaaaatctttgcttggcgtgtcattcatgatgttttacctattgctacatcgctcgttcgaaggaaaatcatcactgattccacttgctccatttgcaaacaagcatgggaatccacaggacatgcccttttcgattgcaaatatgctaaggttgtttggcgatctttcaatttcagttttaattggtcagcggctatttcaatgaaaaatgggaattacttgatgtatctttcctcaatttacaacaaagctgaaatggaacaattattttgtataatgtgggcaatctggagtgagaggaacaaagtggttcatggtaagaatgcaagacgtgcgagtgacttggctgtgtttgcatcagtttttttgcagaatttccggcggctcaacacaaatctgttgctacagcagccacatctactgtcccaggtccttcacagcagcctcccacgcctcctactgctgctgctgtcttatccccttggcgtccacctactgctgctggctacaagctcaacacagatgcagcagccgagaattcttctaataccattggtgtaggtgcagtacttcgagatgctacaggatatgtcactgctgctctctctatgtcgattattgggaattttaaatttcatgaaatggaagccaaagctctttttcacagtctcaattggcctcttcaacaataattaccaattacacatattgagatagatgctcttatggtggtcaatgccttgaaagctcccttcaattcaaattcagaattctcaaatttaattagtgatgttcttagtcttttatcctt

SEQ ID NO: 241932 - DNA, 923 bp, Cannabis indica
tattataatattatattattattataaaacgtatctgctatgtttatatatatatatatgttttaagtttatattaaaagatcagtacgaatgaaactcctttctcttagttcaatgaaaccctcatccccttttattattttctttgattttcaactcgaaacctaatgatctaagctctgatagtagcgagatagcaaatctttgaagaggaaaagcttaaggtaaagtttaattttattttatgttagaaataattggttttgtataggagttttgtgaattagaatggttacgaagattctgactttatagaattgttctttggtagctatgagaccaatttcgatgtttagttgttgaatttgaggtgattttgagttagaaatcgagtttggaacttttaaatcttagttcgaacattaatgatatttttcatttaagggctcgattttaatttctattatgtatggatggtaatatttatagtatatatgttctctgtgaagtttggagtgatttggataaattttggtagtgtttcgatgagtgcaaaatttaggattttcgagtttcattatttttagaaattcttaggagatcataaatcgtacttttgtcataacttttcacccaggtgtccatttttgatatcctgtatactgctttgaagctggtgacgagctctataatatggtgtatgttttagacaaaaatataaggtttattttagtgtatttatagcactgtatttggtagaaaatcctagattgtcttatgtgaatattaagaagtgctttgggataaacacttattagtttatcgttgttgggacatagggctgagatcatcagggatagttctccacttgagttggccgacatttatgaacttggattaaaggtaagaaaagtacattgtac

SEQ ID NO: 241933 - DNA, 1279 bp, Cannabis indica
tttttggattgaaattctagttaaattaattgattgaagtttcacaggtggcagcaacagcttgattgtttgaaggcttagttaattatgtgttagtttatgttgttgtcttagtctttagtcttacttgatggcgagtaaagatttagtttgggagaatttgttaggctatttttagcttaagttttggatcactttttacagttgttttcttatttgttattacttttgcgacggttttacgcttatttttcttgattttaggctcccgaggttttaaagtgtaaattatgtcaagtggcgaaaggacgggacgagttgaaagcaaacaaaagtagaaatgaaatttcttaagctggtcgtgactagaccatattctcatcgcgaccaattattgtcacgatgagatgaatgggggtcacgactagctaatttggcagaatcaaggtattttggcttaacaatatagttgcgaccgaacctttcatggtcacgacgagattgctcagtatgccaaatttgggcaattttgtaatttgtccattcagaagtgtaaaattgatttctataaaagagtttgaaatttttatgccaattattcagaaagagaaccctagtaacaaagaaggagattgaggaagtgagcgtggcgatccaaatcaagttcaccatctagttctttcttctccctttttaaatttcttatgttaatttttgtttctactttgaacatggatttgagtttagaagttatgaactaattatccaatttagggatatgatgaatgttgattgatgttattccaattttattaatgtgatttgttagttttcttttttggattcattgtgatttattcttatttgtgttaatacatgttttagattggccaccttaaacatgattcatgatcctaatataaaaatctgagaagtgaatattaggaatgctctaatagaacaaacatagattttgatgtgaaacgagagtattcatatagcttatgtgacccttagattatttcttaaacaaatcatatgttaatttattttagagatgcagtagataatatatgatttatgaccttaataatttgagaagagttaggattatttttacaatctgtcatcatttaaagaaataaaataataaattgcattaacaattgggtaactgaaataacaggattcatattcttaatctcccatccatatttgaacaacggtaaaagctggatttagattttttgaaaaatgattttcctttcaaaaattatct

SEQ ID NO: 241934 - DNA, 518 bp, Cannabis indica
ttgtgctaatgatatataagagaaatttattatatactatttatattatttattaatttaataagaaaataatattcaattcaaaattttattcataataaaacaaaatattaaattttttatacatataattttgaaaagttattaaaacctacgcgaagcgcggtactattccctagttaaaaatatttttttaataagtacactagtctactaccctataaaatgccttggaatcataaaagtgcattttcatttggccaaatgtttgccaaaaaaaatatctattaaataaatacaaaaaaaaaaaatctataaaataaaaatagtacaataagaaagttttacttttttttttcttcataaaatgaatttcttttttcttgaaattgtgctattactatattataaaaaaaaagattgtactattatatatgttaaatgtattttataaaattataaaaataaaatgtaagtggataaggaaaagaaaaattggagtatgattattttttgta

SEQ ID NO: 241935 - DNA, 948 bp, Cannabis indica
agaacaatatcaccttcaataagcctatttcttggtggtgatgggcgatggtctattatttcagtcaataacgtgtattgaatagatgatgaagaagatgacaatttggacaaaagttctccaggatgtttacccattaatgtttctagtaacactacaccaaagctataaacatcacatttctccgttatcgccattgtgtaagcaaattctacatgtcataacaaaaacaattatccttacagataaaaattagagaagaagaaattatacaaaataacatataatttttgatagatattacgatcatggttggttggacttttaaaagttgcttttggacttttgaaggtttaaaaacatttttattactggttgagtaactagtgagttcaatttttatttttgaaaaattcattaacagaagtcaattttaatagttttttcaaaatgagtttcccgaagaactaaaagtagaaaacagaaactaagtcaaacatgatattttttatattttttatgccttctatttatttgtatatatttttatgggattttttcttcataaatatattttaaaaaatttaatagtggtaattagttattactgcatcaatttctaaaatgacagattattactgtcaaataggtttattttttttttatatatatataaaaaaaaaacaatttggttagtaactagtttcaatgataccattaataagagaatttaaaaagtactcatggtacctctgtgaggtgtaatattattattgatgcaattgaatatcgggtcttacttattttatttaaataaaattacataaaaaactagctatatagtagtggtagataccttgacgtcccataataatgatctcctaataaaattaaaattgataataactaattattcattcatcaatttctaaaggaataattacataa

SEQ ID NO: 241936 - DNA, 809 bp, Cannabis indica
tatatatatatatttatgaattggtttaattaaaattctaaatacatatatatatatatgtattgtaaattttgaaaaaaggcttacatcatggacaactttccttagtgcatgaacttgctcccttgaaactgttctaacctgtacattataacactatgttattattattttttttttgaaaatgataacactgttagtatttaaaagtgatgagaaatggattttgttctgttttttaaaataagtttaatttgttctgtagtgaaaatacctttttaactatagtccaaatgacaccttctgtgcatggaggaactgtaagtgaaccaatgtatctatagtactttctgcttccaaatttaatgattcctgggttaataatccccaaatccttctcttcatgatccactgatttaatgtgctcaaacaactgccataaaaagggtacccaacaataaattcatacattatgtatatgacatcgtacatagaaacaaggagggacaatcgcccctgaaaaaaatcgagaaaaagatatatatatatgtattatggttagctataatgtatatttataattaaaggtgataactataaacataatattagctttaacatgaatttgtctttattatatataagaaaagaaaaattattttgttttgtactttgttttaagtatttgattaaggtgaaatgtaatctaagcatggtttaattcactttaaattcctgatatatcaactcaatcttgatctagtaaaattaagtatgattttgacccatttaaacctctaaaattattg

SEQ ID NO: 241937 - DNA, 852 bp, Cannabis indica
attaattaaaaaaattaaaaaaagccatcgggtctgataggtccgattgatccgatcatcggacctacatggaagaccattggacccaacgttcaaaaaattaaaaaaaaataataataaaaaaagagccatcgggttcgatggggtccgattggtctgaccatcggacccacatggaggagcatcggacccacgttcaaaaagttaaaaaaaattataaaaaaaacaaggcatcgggttcgatggggtccgattggtccgaccatcggactcacttggaggagcatcggaccaatcggaccttcacccttgccaacaaattttccccctacatcgggcccgacgaaaaaaatgaagaaaaccagcaaaaatccaattttcacgtgcagcaaacattttaaactgaaaaaacagcaaaataacagcaacaatccacagatcaagcaacaaacacaacattcttaattaaatataacaacaacaaacaagattgaaaaaaaaaaataattacttacccattgatgctatatgggagcttgtagtgttctagcttctaatgtggtggcttagtgtggtggcttgtagtgtggaaggttgtagcttctagtgtattaatgagtgaagagaagaaaaaaaaaattggtggtggtggaatatgggattcgggtgtgagtgtgaaattgatgggaagagagggttggagagggtagatgtaattggggaaggtattatggggaaaacaataaaagtgtcatatataactaattttgttaagtataactataagtttaggagaaaaattttaagataatgtgagcatattaatttaaatttcccatatggtgaaccaac

SEQ ID NO: 241938 - DNA, 1904 bp, Cannabis indica
aacaaacacataactaaaggttggtcccaaaataaaaatagccaaccattacaatactatatcagtacttaagttccaaaattagctaacagagaaataacataataaaattccacaatttaaagtcaatcctaatcggtcaattacaaaatgatattgctagagaccatattcttagaagcatatcagagtcaactttattcttgagatgtagaggcttgttctcttgatttttgtttctttctccgctgatttcttttgactgtctcagctttcggtgagtctgccccttttctttggaactttttgctgtaatagaaatatttagcaaatttaacaaagtatatcaatcacaaatacaaagaacaaaagcacatatataaactagcaacaatatataaatatggagatttttaccttttagctaactcatttttacaagtcagcttagaatgacctgattgcttgcaattgctgcaatgattagcccgcctttccttgattgttttgtaggatcgggtggtggttcatcattacttctatttctttttttcttaggtctaccaggcaaggcttgctcgggtggtggaagaatggggtttaggccagtgttaggccatttgtctggactaggggttcaattatcccagagtatgcagcaatatatgcatcctgtttataccactcatctatgaaattatgataatccaatcctgatgctaaaatagcagaaaatgcatgtggacaagggatgccagttaattgaaaacccctacaagtgcacactttttttcaccaaatcaactacataagtttctaaccctttataactcacttggaacttaccactaccagcaaaggttgagtgacaataattgacaaccttcttgtgttctcaataatgtcgcagatcctcttaccaataggatataaccatttcttaacatcttccctcttggtggtgaatctgcacataagccaaaacctgattttctccaatagagttacaattggcttgtctcttgcaggcaagattgctgaattaaagctttcacaaagattgttaagaagcatatcacatttaacaccaactctaaaatgtgatttactccattcttttggatcttttttgagcagccactggtatgccttttcatccacttctttgagctcattcattctttgagtaaaatcctcaggtgtagttgcccttgcacaagcccaaagcatttgtttaagaagcaaaccagaatgttcttttttgaaatttgagtgtaaatgccgcacacaaaacctaatttcagcatcaataaaaacttcagccaatgctatctccaaacccttttgtctgtcactcatcatagtgaagatgcttggattttgaatgttcagatcctccacaagtagcttcaaaaaccaggtccaactgactttgttttcattctcaacaattgcataagctaccgaaaattgagagttgtttggatctataccaatggcagccaataagatacctctgcagtagccttttaggaagcaaccatccaaacctaataaaggtctgcaacccttattaaagccatccttacaagcttttaaacatatgtagaccctctcaaatactctttcgccttcttgaagtctggtttttagtatagctgcgctacttggatttgttgccatcaactgcctacagtagtcatcaaggattacatattggtccttcactgatccctctaacatctcccttgcttttctcttagttctgtagaaaattgaagctgagacattactatattttgtagtagatgtcatctcttggaagccctggtactccatgtttggatgaattcgaaactgatcaaggaaatgcttggctagccaagcacttgtcacaagcttgt

SEQ ID NO: 241939 - DNA, 1604 bp, Cannabis indica
taaactctcaagggcatgcaaaacgtcgtttggtggaagcagtagaagagcaaaaagtaatagtgatgttcgcgctaaaaagaagaaaaagctaactagtgctccaagatattgcaagatatgtaggggaactgaacatgattctaggaattgtccacagaaaacagtattaagttaaattttaatgttgttgtccgaccgtttacaagtttgctatttttaaataactttggtggtgttgtagttgaatacttgaagaaagttcttatttttaaatattttatacgacgctttttttttaatctaagtagtgtttattcgtttatatatttttactattttcatattcaatatctttgaacaaaaaaatgcatttctttttttaattctaccagtaaacacaacttattatgttaatatgaaactaaaattttaaataaaaagtaatttcaaaattttgagttccaaattccacatctcatgtgaaaatttgatatttttcagaatctctatttcaatataaactgaaaaatgtatagttgtcttgtcatttttgttttttttttctttcccgaaatgttcaaattttttgaaaaatgaattattataataatttattgctcaaaaaattgaaattaatggtagttttaaatatatatagaaaaagtagttttaatttgtaatgattgtgtatatatttgtgagtgccctgttaacatccacactttctatccttatttagagattgaataaagaaaatgagcacttctcctccagttgtaggtgatccgttattccgtatcgaaagggtagataatataaatgccataagcgttagtggtatgagcgattctttttttatcatccatctattcgctaaattttcccgtattccagaaaatgaatcggatgaagatttcagagctctgttgttgaagcacggcgttgaagatgccgtgtgctacgataatgtagtatttattccacgtgagaagttgatgaatagtgacaacactgatgcaaaagaaatcattaatcaaatgctcggtgatacacatctacatacatctgtgtatgttgttactgataagattattgattacgcactacgaatgtggactgatgatttttgttgtaatctctgtgttagagttgatatcagtgttttagtgtatgttctccctgaacataattcagatacggaagacgaccatgtatccgaaaatggttcacttgatttcgttgctgcaagtgaagattctattaataaattagagaaatgtttaaatgaaaatgaactactatgtaatatttgttttgagaatgtccataatgatgtagaagttagaaagctaccttgcaaacactcctatcatggagaatgtattgtgaagtggctaaagactagcaaatattgtccacttttgtaggtatgagataatttaaataaatttaactgtactttttacagtttgtaattcttccaaataagagtaaactatttgttttagtctttgtttttttatattaagtttgtatttgtttttggagggatttttaaatttcaaatatgagtagatatttttataaaatcgggaatattg

SEQ ID NO: 241940 - DNA, 938 bp, Cannabis indica
tgattgtgggctggtttagcatgaaaatatgtgtttttggatgcattttcgtggctgcaaactgggtttactctgtttttaaacccagtagccgcggccattttatggcagcttatggtatttttttcgagtttttgttttggtcataacttttgactcgagagtctgtttgggacgttctttaaatcgttagaaagctcagtccgagctctatgttaatatctatcatttaaatgctaattttataatttgtgaaaatttatttaaggattaaccctatacttgtgtatcctgggattgtgactaagattactagcacttggtcaagagcaccctgggattcaaaatctccatatttgcagggcatcaggtaagatagtagttagcatgtagggatatgtggaatgagccttatatagaagatgatatatatgagaaactagaaaccggaattagagttattactctaaagtgagcggtttattggcttggggttattaccctaataaattgttaatatgtaattgttatgccatgatgtatatagatgtatattgaaattaagggttatgtgttcaaggcataatcgggttggactcggtagttgaaaccgagatgaatcgttctaaggccatattataaatagacgcgtgagtgtaacacgtaggtctatgccatatagacataaataggcgtgtgagtgtaacacgcggatctgtgtcatatagacaaatatgaaatggcactaatatatatgtgatgtgttaattatgattattgataattatactgtcttgttgggcttggctcacgggtgctctactctacaggaaattataaatctgtttcttattagccatgagtgtgggagctgggcaatgtatgtacatgttcaggccacactagaccaagcgggttggggtctgccagtgttgaaa

SEQ ID NO: 241941 - DNA, 606 bp, Cannabis indica
cacttttggaaataactctcgcttccaacactaaaccagcagcagtccttgcatcaaaccccacaccataacgcccctgagtagtaaagagtgcaccatcaacattgactttaacataagggagatcaggagtagtctaatggtaaccactttggacattcaggccatcaacgggtgcagtagtaacattgtgttgttgagcactaaaccagtctatataattcagtttagccaatgtcaccacgtccctagagactggttgcttagagttccaaatcaggtcattacggtgagtccaaattgaccaaaaagtcatagcagcctcaatgacttcggctgtgttcaaatacccaatccaagctcaaaccaaatagagaaaagcatcgcaccaagcgcaaccattggaacattgattatgttctagcaactttgagcaaattgacatctcaccaatacatgcaaggctgtctcaggagcagcacgacaaaagggacaagttgaattaattggtacatgtcttgacgaaagctggaaccgagttgggagactgttagaggacgccctccacagaaaattcaacactttgggaggaagcttaagctgcca

SEQ ID NO: 241942 - DNA, 1019 bp, Cannabis indica
tccaattggtaacttttgtaaaacagagggtccaaaatggtattttaccattttttaagtttttttttcagatttacggttcgttgccgcgctagttgcaataggattttctatacgattttttattgcaatttagatttcaaggctagttacaataagaatttctatacataatttcgtaaaaatataaagaaaattattttgaagtataaaaaataaaaaagcccattatttaaagtaaaccaacaaacctatgattttcctcaattttctattttttttttttgtttttaaaaaaaaatcctatgatttaccttaaaaaaaaatctctaaactttttttttcaatttttttaacaataaatatttattaaaaataatcaaaatttaatacaacatagaaaaaaaaaaaaaacataatctatcaaaattaattcgtcatccacattgaatacacagactactaaaaatacctcataaaaattagacaacaaactaataaagaccctaaaatattactaagaggatataattaaactcaaaataattaatagcagcccaaattacaactagcataataaatagtaagaatatatttttttttttggaataaatagtaagaatataatatcagtaaaataaaataatgtcatacataaaattaaaaaaaaaaaaacttatctcttttgaatactttttttttgaaacggctaacttgaatacttcaatgaagacttattagaactagttaaattttcgttaactccataaaacgaaaatttggaataacaaattataaaacataaacattatagaacaaaagctcgtacaaaacaacataacaatacaaaatatcacaacactaaactagagtgaagaatgttttgaaaaaataatctttatgaaattttttattagtaaaataattttataactttttttttattagatataccgtgagaccataaataactgttacaaaatatcataaatttacattattagaccctagagtaaatt

SEQ ID NO: 241943 - DNA, 1030 bp, Cannabis indica
tgcagattcgttagttgactcttaagttgaaggagtcttgctttagattggctagcaaatttctgctccaaggctcgccagaccaaattcgatgtattgtaacatgccacagtagccaagattccttctgtcatggatgatcaaagccaagacaatagtaattgatctttacgcctccactgcaagaactgcggattttcaccaccattgacgagtttttccggaggagcttcattgctgaaaagaagattgtcgaggtcatgacctataacagtaggaactacttgcgatttccaggagagaaagttcgtgcgattgagtttcagtgtcaaggaagctgtcaaagaatttgaaaatggattccatggtggtgctgtcgaggaggactgagcaggcaccacaccaggatctgaacctccagcttgagacgagtggtcaccggaggaagccattgacgcaagtcaagggctctgataccatgaaggagttgagcagagaaagaaaagagaagaacagagtttgttcaatgcagagagaaaaatgcagaaaagttcaattctattaatgatcaactgagagtttatatacacagcaattacaacagaaccaaactaaaaatatcaagaaaagctaacaaacaaaggaacagaaataactaatacaatactaaccaactgtgagaacagttagttagttaacaaattttacatcaaattttacgatataaatttactggttgaattaaatattatgagttcatatatatttacatttatatatatataaatatatataaatatatataaatatatattaaaccatgtaacaagtcaataaattcaccattcatgtatagcatttttcatattgtgtgtataataattactgaaaaatcaatggaaaatttgattttctatacttaaaaaatcttaatattttatttttaaaccaaatacatttcaaactaagaaaaatatgacacttttatctaaaacctagaaatacccctctcataactctctctctctct

SEQ ID NO: 241944 - DNA, 847 bp, Cannabis indica
ttaattaagattaattttatctttgtttataaataataattagtatttatggcataatagaaaaaagagaaataaaaagttaagaaaatacattgtttttatttaaagaaatacaaattaattatattttgaataaatattttcattagaattattgtgatatgtttcatgttgaaaatattttgtttggatttaattttgtttgtgttttattgagaaaataacatttgtgaaaagagtggaaaagaaataaaaagatgatagaaatgaggtccaaagtattgaaaatggcattttttaaaaaggcacgaattcgacccattttccctctccagttgacagccacaccacgtggcctccttccattcgtctgcatctgccaccgccagcacgagcaggggcttgtcccccactctcccttccacgcgagtgtggggcacggcctcaccctggccgtgcgtgcgcttcctgcccctgcccgagagtgggcttcgtctctctctttttcccttcagccccaaaagtaaaaattgcaccaatttttcagccaatcatatggtgccgcgtgtcaagttgcacaccaaagtcaccaatccgagcttgacacgtggcactccaaattcaactttatatatttacatttctacccacatgcaatttaaaataagtttaattgcacattagtccttttatccttctataaatagaagcttagaattttagaattcagttaccgtttaagagtttcagacagaaaaatccagagaaaacgcttgaggtagtcagtgttagtttatcgcttttgttagttaattttcttatgggtttctaagttcccttattatta

SEQ ID NO: 241945 - DNA, 787 bp, Cannabis indica
ctctctctctctctctccactcattcactactctagtcaccatctaatactacttgctccatacaaaggaacaataatacttagagtatatatgttgcaatggagtgagtaccaaaggggattaaagaggaagtccctactaagtctaaacaacaaaacttacctcttatggacccatcacttagttaaatttctaagtgttacactcacatcatcaacgtaaagagagagatgccaagcagggccaaccctaggtataggcgggctaggcccgtgcgtagggcccacactttttggaggcccaaaataaaaaattaaaaaatttcattaaacttttattaaagtaaaattaagtgtattataaacaacaaatgctcataagttagttggttgacgcgtatgacatattatactcatgggttcaaatcccatagcactttttatttttttttttatatatatttcttagggctatttgttgggaccacttgtattcaggagccattagagctctctataaatacttctctcttccatttaagagggggaggatcattttttgatatgagtttaaagattcaatacaacactaattttctctattaatgttctgaatttctcttatgtttttgatctttacccttttgcattttcttttttaactaaagttcagttgacgaattttatcgtcaacaatttggcgccgtctgtcggaatgacaagttctagctacgttagtttctaaacaattcattatcattttggagatgtcaagacattcccatcg

SEQ ID NO: 241946 - DNA, 1017 bp, Cannabis indica
taaaaacaaaaacaaaacacataaaattactaagataatcttattaaatttgagaaaatataaaaaagaacaaggactataggaaaataaatataaaatttagagttatcataatttaaagaacaaaatatttttatgtatcaatacgtattttgttttaaagataaaattatatttcttcttaagttcttaaaatatttacaagcaatatatatatacagaaaaataaaaaaaatatataaaatttaattttatacataaaaatttcttttatttttttacatttaaataaaaaaaatatcaaaaataaatataaaatatttttaaaaaaatattattatacttaagtattatcatagaggctcccatataaattttactatataaaattacttataattttgaaaaaattttaatatgtaattgtctaactaattaacttacttaattcatttcagcaaaaataatttatttaatttaacatttaataataaagaataatataccatatacatgcatatcgtaaaataaaaacaaactaaataaatttatgtggttataggcgtagcctagtagttccacacttcatctcaagaagaggaggtcccaagtttgaatccttcctcccccaatgtaaaaaaatattaaataaatgtataaaaggaaagtactaataaatataattaattatcgacaatataaataagacaaaaacaagaaataactaaaaaagttaaacttacaatgttatatataattaaacaaaaaggtaaaattcaaattaaagcaaacaaacacatgtacatattaataagtaaaatactaagggaggtgccaagcaccaaaagatgtagcataccgttattggtgcatttcaatatcatatctcatatattttgatttaataaataatatgggaagccgcatttatatatataaaaaaaaacacctaataacaattaactatatagagatagtataaataagtcaaaaaaaaaaaaaactaaaaaacttaac

SEQ ID NO: 241947 - DNA, 696 bp, Cannabis indica
agaagaaagaaagaagacaaatcctatagagatggtgtatgtgtgagttgagtcatccttgtccttcttctcctcggcccctagggtgcattgggtgaccaccctccaccctcgagggtgggtcatccactctagggtgctagcttagttcaagtgattaactctttagtctttacccaatacactcatgtggtattgatatatcataccctcgagggtgggtcatccactctagggtgtcatctcatgtgccctatattcgtccatgatcattattcaaaccctgtaaatctaaaagtatcaagactatatacaagctctaagaacaatataataaggaagaaggggatatgtcgaggatacgaccatggagtaattgctacccaccatagggtcaatcagttaaactgtaccttaggggtattggcacataacccaatgcatttgacacactctcctaacattagtatctgatcttacaagaattagatctcaactactctcaaaaattaagggaacggttaaaattttaagcacttatgttgtgtctcctatatgcaccaattatttccttatataagaggtcaaactaaatttagaggaggatccaaaatttatcattcaaagagcaaaaatactgcctttttttcgtactcaggatcctattcttaaagtgcaacaaagattaataaaata

SEQ ID NO: 241948 - DNA, 650 bp, Cannabis indica
tatactctttctttggattacgttgacatgccacgtcagttgaaaaaaatttgggttaatagtacccaagggtacttgctagataaattgcatcttataaggctgggaattagtgaagtaccgtctctagtataacaacttagataaatggcgagtcttaagtcatacatttaactataatagactcgccattaactctcatatagagtttctacagaaaccaaaaatgagattaaggttgtacatgcctacaaggccttaacaaaacccttgccaaggtcaaaagagaacaaaaacttggttgcccgcttggaacctaaccattggccgaccagggttcccaagctaataaagggtcgaccagcattccatgacctagccaagtgccaacaagggaccccaagcccaagcatgggccgaccggactttagggtaagcccatatggtcggccagctcccatgagagaccacatggctggccacgtcttaaataagagcttcatggccagccagggtgtgttactgatcaaagtttatgtttttcaattattttgcgttccaaattttactttttaaatgttcttggtttgacaacaatgttggagtaaaaactgacgagcttagttttactttggttgatttaagtaaga

SEQ ID NO: 241949 - DNA, 688 bp, Cannabis indica
taaattatatttggcatataattaccaatgatttcgggattatttatttgatttcaggaagcattgttgaatttagtaggagacagtgaacttttcaagacgaggaattcttttcattttatttttatcacgcattcatgtagattgatctataaacttccttatagaagaatttgaatatcttatatattcatccatagtgaagtaagttttaagaaaatttgtgtgctatggtgatataaggatgagaacttgtgtattgttttattgattatagttaaaattaacaaatggttaaggttaataaaataagggaaatactgtccaattttttatagatatattttgtctgcatatgtctagccaaatgaattctaattttgggggtgttgaatttgttacatcagaagaagtagagtctagtgatagaatagatgaaactcagagtggagagacaacaaataagaaaaggagaagatctcctgcatgggattactttactttgcaaacgattgacaatgtattgaaagcagtgttcaatcactgcgggaggcacatggcggcaggaaaaaataaggggactaagcatgtcctgtagatcaatgacattgcaagtcctgtagtcacctacaatcttgatcaagaactaggaagaaaaaagttagctcatatgattattctacatgag

SEQ ID NO: 241950 - DNA, 399 bp, Cannabis indica
ctgggacccgtagtggaactagattaggatctgagacagtgaccctcattcagacctgaggcttggaccagacatgtagtaagtgtttagatttgggaaccattcccggactcaaaaccaaacctagacgctgacctagacccagacctgtacacctaagttgggttcgagttcgagtctaggtttgagtacgggtactggaatctaactaggacccagacccagacccagatcgggacgcagacccgtataaaaactcgaatcgggactcgggacacgaactcgaaccaaaacccagacatggacttggacccagacccagaccaaggacccagaccgggattggagactttgacctggacccaggacctagacatagattacggacccaaagtcaaa

SEQ ID NO: 241951 - DNA, 871 bp, Cannabis indica
catgtcttccagttgtactctccgggatgatgtttcttacaacgtgggcactcagggtaagagtaaccctggcgtccacctctaccttggttcccacgaaatcgcttgctttgtcccgagccaccacatgccgaggtaacttttcttttctgatcagtggtggaatcaccaccatccctactttaaacaggagaaggaagagtgggggtcccaccaacactcggagtgacacggggctcctgaagaaacttaattaaaccctcagctccaagagccttttcagctatctctgcatatgatgttgcctcattcgtagtaatcaccagatcatgtctaatttttacattcaggcctgccagatatttctttttcttgctgaagtccataggcacaatacccgaggctagcttggctagacgaccaaactttgttgtgtactcagttactgacataccctcagtctgcacaaactcagtgaattctttctgcttagcactgcaaactgcttcattataatatttgacattgaatagatctcgaaactcttcccaagtcataacagtgacatctcgggtgagggacactaattcccaccacacgagagcgtctccctggaactgaaaagtggcgcaggttacccgatcatttctaacgactcccatgaatttaggaattctttctatcaaagtgagccattgctcaaccttcattacatctggacctcccaagaacactggaggtacttgcttatgaaacctctcatataacggatgcatacgattgctagcaacaggttattctgctggcaccgcaggaactacaacggtctgagcttgtggtggagacactacaagaggaccctactacctta

SEQ ID NO: 241952 - DNA, 1294 bp, Cannabis indica
caggtcgcactgccatgacatgtacaaccccatcccagctcaggctcaatcctgctaagctcttgactttcctttacctacacatggaagcagaactgtgagtcgacaaactcagtaagaaaagcatataacatatcatataataccgacttgtatctaggcgcccatacacctatttacaaggcttaacagatgagtaagtaacgttccctactagggtacaaccactataccacatacactacgtacctcattgcacgagtgttggtagggtttgtttcgtaccctgagtactactgagtgatagaccacatacaccctgtactattccgtacttgtgctggtaacaccgtaatgtactctttaaaccacataccctataccaatgcactctgtaccatttcctatgcaggtgttggtagtgtactaaccatataatcatgcatatacattatcacatacatacatttgcatattcatatcacatatcatacacagttcttacctcctttttgaatttaagtgagttggccaacctgaacgaaaagtttcgtgctggatggatgctctaatcacatagcataactgggtaaatcacatgtcaaaaccctaatttgggaaacccgaacctaccacttaaggttctattattactaataggaactaaaatatcctaggaggcagagaaacacccagctaaggcactgaaatggacacaaattgaggaaaatgaattgttcggggaatcccccaaaatcggttaaccggttttacaggtactggcaaacctattaaccggtttgcaccacttttccccaaaccattcataaccctctcaaaacttatccaaataccaccaaacctttcagagtacctatattgaccttccacaatataattcaatcaataaaacccagaaaaatgcacaaatacaaaatataccatggatgaaccaaccttgagttttcaaactcaagcttgtgcatccatcgcccaaaacaacgaaacaagttacaaaaagctatttccaactcaaactaaacttagaaatcaaaccacacataaaccgaaccctaacagcccctaaaatctcaaaatcacgtatctaaaccaacatcaaatcttgaaaaacaaagagcaaatgatctaggggttaccttaacttgaattctacttgaatccttgttgaattctagaaataaaagaagaaattgattagctgcttctggtttggtggttcacgagcaaggagagagagagagagagagagagagagagagagagagagagagaa

SEQ ID NO: 241953 - DNA, 1415 bp, Cannabis indica
aattataaaaatatatcaacatgataatttttatattttttcgctttgaaattttttatttacaaaaatatctctttagtaaaaacgataatttttttttgttttatagtttatttatagttttattataattgacatgagatttttttttttgttttataatatatttatagttgatttatagttagaggtgtgtataaattgatcaaatctaatgagaactgaccgattcaattataaccgatcgccaaatattgaatgtccaattatgatcggatcggatttgatgttatttttgaatatccaattggatcaaatcggatgttggatgaggtgtctaaaaatcaaatatatcacatttaatcgaactaattagtattttcatttagtttggatgagtaattagattttatattgttataagtaaaaatatatatgtatatataaaattaagattatggtattattgaaacttaaattttcagtccatatgtgaaggcccagcccaaagcctactaattatggtattgttgtaaatttaatttttttttttcattatttatttttcaactttttatagtattttttgataagtgcttgctcaaactttgttgtatttgtgatagtttaattatttggtgattgtccaaaccatagaaattgcagaaactgcactgcacgacactatttttttgcaatgcaatttttacgactttttagtttcgcgtggcgagtacggtttggaaaattagaaaaactgcatatgcgggttgatttgaaaaaataaataaaaaaattgcactacctgcataattagcttctctatacaaaaatgataaaccaacgacagcagaattaattggagagtaagcttttaatctgttctaacaagccattcacatcccagcagccatcacacatcgtagcaacatcggagtcaaaataatagtgaagcacatcagtttaggaagaaaaattattaattagacaaaaaaaaaaaaaaaaatctattttattttctctttgacaatgacaaagctaacaattagcatggcggcctaaatcactattcaaaggcgttaattccttgtaaagttgacagatctcatcgtcaatatgtttatgaacatgtttaattttccaacatataatataaatataaaaattctttatgaattcactatcaatgtgtgtggcttacaattttactttcctttgatttaaccgcaacaaatctacaaacttttcctaatagaaaattagactacaaaatgtctttcactttaccattttctttaatattattattggatactaatagtataaattagttagcaatattttcttaaattatatgaaactagtaattaattatgttaggcaccaatgggccttttagcaattttttttttttt

SEQ ID NO: 241954 - DNA, 810 bp, Cannabis indica
ccgaactcttgagccatcaatagagcttcaatttcggcaaccgaatatgtatccaatctttgatttaatagaggtgataaagacaatcatactcacttagaagacaattaaaaaatggcttcaatgtgatcttgagctagcattcgatgtccaatagatgcaagagtatcaatagtacgcttgatcttgagcaagaaatcacccaaagaaccttgcattttagtgttgcgaaggagtgttaggtattggcttatattggcacaattgagggctgtatagtattctttcagattaagccagatttgagctgcgatttcacatcccaccattcgagtgaggatcttttcagacatggaggagagaagccatgataccaaaatgctatcttgttgatcccaatcttcaaattctgaattgatgcgattagcagccctgtctttgtcagtgatgaatttaggggggtgagtgtaggatcaagaaatttttgcaacctgcttcctttaatggcagaatacacctgatgcttccatggaaggtaattgtgttcgtctaatcgtactgacagaatgagaaaaagtgactggagaagtttttggaagagaagtaacagttgattcgggttgttgaatgtgagatgaacctccattgttgttatctgaaagagtttccattgatgaacgaaaagaatgctctgataccatgtgaagattattaagaacaaagaaaacagagaaagaagaaagtaaagaaagaagaagaagaaaggaaagaagcttttcatcaattgaataaaagaacagtacaatgttt

SEQ ID NO: 241955 - DNA, 1148 bp, Cannabis indica
ttagaattttttttagctggagatggggacttcaaaccacttctagtggtggtcatttatagaaaaagagaacacaatgggggaggaagaacttacagagattatcgaacaaaatggagatagtggcatagatgggaggttgagaaaaaacttggataagggcttcgactgggttatcgtgggctatggaggttgaagaacggaggaaagagaaacaaagaaaaaaaaatcaaaaaaaaaaaagaagaatagggcagttatggaggaggtggggtgttagaatggataaaatatgacatatgcatagtaaaggtatatttgtaattattgaacttttgaaaaagtaaaattaaaaaataaaaaatgtaaaaaagtttaaataaccgagaataaataaaaatgtaaaaaaaagagtaaaaaatggcatcaagtgtaaaaattcataaaaataaatatacgagtgcaaagttaattaagctttgtcaatgtattgccattgtaacatcattttggcatcattataagttttcatggtatggtatcacaaatgtatcatattaagcataatttttacaacctcaactttgaaactcattattagcttcaaatatatgtaatcgcccattaattaattgaatttcactaaatctaaacaacatgaaaaacacactaaaatcctcactctaaactttttattgtcatagcaaatggacgaagagaagacaaactgaggtgctcctcgtccacaacatctacaaatggaaataaaaatgagatgagaggggttagtgtcttaattaaacataattcaaaattaaatgatttcaatagttggaaatgggcagcttcattcctcaaaagattgaatatttattggtaaaaattcaatataattgagtcgaaatgaattacgatattcccattccccgacccatttccatttccattccccagcccattcccattcccattccctggcccattcccattcctattctcattaccattaccattccttggcccattcccattcccctaatatggttttggcgttttgggattttggggctttggggtttagggaatgggaatgagaacaggctagaaacaggaatgagaatgggaatgggctgttgggttttatgccc

SEQ ID NO: 241956 - DNA, 649 bp, Cannabis indica
atatttttcttactcttagagttaatcattcttagaaagccatgtgactttctgacttcaaaactatcagccagctctaatatggacttaaaagcccaatactacaatgctgcaatcttttgatccaaattctttttcatttatgcaaagtctttattgcaaattttcatcaactcgatgaacgaaatcttcccctacaaatactcaagaagaagttcaatctcacaattttaaaacccacatacataatcaggcccaacatcagaccatatatcagtcccatcgggcctacaaaaacacataaattagacacactatcgagccataaatctgaccatatatcggacctattaggcctaacaaaatagcacaaaaatagacacactatcagacctcatatcagaccatacatcggcccaattgggctttacagaaagcataaacttaggcacactatcgggcccagcaacgggcctacatcgggctattttcttcaacttttatacctttctaacaacaaaaatacattagacctatatcgggcctgcatctgaccaagccaaaaatccaaattttcccactgaacacatacctgacaaatccaaatcctaaatctaacccaaactcaaaaattaaccctaaatcttaa

SEQ ID NO: 241957 - DNA, 499 bp, Cannabis indica
cacagtatctacggtgaaaaatttaaatgaaggcacccatgagttagatattaattggtaacattcatgatcttccttccacaatgcttcataacaaaacctttttcgtttataatggtggtttgaagaagaagttgggcataaacctagatcaatactaagtactcggtgatatgaaccaaaaaaatctaagtgagacatccttgcttcaagaaaattgatactccaagctgaattaacgaaaactcgatccaaacgttcttgaatagaatctaaactagtactatacttctaggtaaaacaaacacctatataatctaaaggattcaaagaactctcctccaaagcttaacaaaattgatccatttgagattcccgacgaggtaccccacccacccgacgaggtactccacccactttgtcacttaatcgtctaagcaatgttaaagagagatgcctattagaagtgaccggttcttccagttcatattcttaaaaa

SEQ ID NO: 241958 - DNA, 872 bp, Cannabis indica
attcaaagtacgagagcttatatatattgatccctcaaagtggaatgattgattgatttggtttgtaactttctactaactaattcagttatagttgttatcctctttgtaatctttacagattgatgtatttgactgtgcttaaaaatatatgcacatatatatggtacttatatatatacactcttaattatacaagggtactagaggcacatgtacggtccactagttcattattagggaccttgtatgatgattttaatctatttattgcttccctatttaatcggccatcaacacaaaagggtttggttgatttccttatttccttgtttatattcattagtcaattaagagtgtgtgatagttgtatatataagaggtgtgagtatttgtttcttttcattcaaggtttttttttgtttactatagttcattgttctagctattgtcaatttgccattgtcttgctttgtgcagtataaattatttctagcagtatggataatgagaaaaatgtggaggagatgattgatgacttgaccactacagaaactaatttgtctagttctgatggggataaaccagtgaaagaaagaagaaaagggaatgtaaggaagaatagaaatgatcgtcaaatgcaagacaagaacaagagcaaagacaatgacaaagacaaggagaaagacaaagaaaaagagggatgtgaaaatgaaaaagggaatggaagaccggaaaagaagcaaagaattggaaagaaaacatctagtgtttgggatcattacactttgttgccagattgtgatcccgggaagccaagggctgcttgatatggtaccgattatgcggcagatacaaagttgaacgggacc

SEQ ID NO: 241959 - DNA, 1390 bp, Cannabis indica
tttggagacaactagaacccctggactgtcataaccttcttcatcagaggctaagtccacactaccagagttactgttattgaatttcttccacaatgggcagtctttcttgagatgtgaagttgagttgcagataaacattttcttttattctttgaagaagaagaatacttacccttattttgattacttccatctttattctccttctttggaaatttccctcgaaccaacaatccttcccctgaactactctcttgaagcttagatttccttttcatttcctttgacatcaaggcattttgtacttcttctaatgtaagggaatctttcccataaattattgtatccacaaaatgctcatagttttcactaggaagtgaatttaggactataattgcttgatcctcatcttcaatcttgatgtcaatgttctcaagatcaagaatgatcttattgaaatcatctaaatgatcttcaatactttttcctgatgccatcttgaaagagtacagtttctgcttcaagaataatcgattagccaaagatttggtcatatgcaagctttccaatttcaactaaagtccagctgcagttgtctcctttgaaacttccctgagaaccttgtccccaagactcaaaataatggcactatgagccttttcaagaatatcagatcgttctttctcagaccaacttgcagatagctctttctcccctgaaatggcaccttgtaatccctgctgcaccagcaatgcccgcatctttactcgccataatccaaaatggttcttccctataaatttctcaagatcgaactttgtgctccccatttcttctcgtacagttcaccaggctcttgttaatcgatccaagatccaacttcgaactcccaagctctgatactagttgttacacaagtccactacggttcagcatcaatcaaccatacaagaatgaacctaaaatgtgttttaatcaaaactagaacacttaagatagcagcaaaagagcaatgctctgttattgtattatttcagtaatggtgtcaattacaacagtttaaagaattgagttacatacccttttatagaacaagggattacaaaaataagagtagtaactaacaataactaccagcaacaaactaacagtaactaacctattagaatgtgacacctaggctaactaactacctataataactgtcatgacattagtttaggcaaaccagaaaataacaccaaagaaactaaagtatcatgataaagaatgatttgatcaattatgatcttgtatagatattgtatatagaggttcttataggccatttgtaattttaggccatttgtaattttgtgtggtactattaggttgtaaagttgtttgt

SEQ ID NO: 241960 - DNA, 758 bp, Cannabis indica
tacaggttctggatacgaaagggtacgggttctggatatgatagaggtgccggatctgataggggtacaggatacgaaagaactggaggaagttacgaaaaagttacaggatatgaaggaggaagaggtggaggaggcagaggcggaggtacaggatacgaacgaggtggaaatggaaattacgaaaaagttgcaggatatgaaggaggaagaggtggaggttacgaaagaggtacaggatatgaaggaggaagaggtggaggttacgaaagaggtacaggaacaggatatgatagaggaaggggtggaggagggggaagagggtatggccgtgggcgaggacggatgggtggccgctcaagggggggcggtgtcgggatccagggttgacagtatggtctgttattttgcttttagctaaatggttgcctgtggcctgtgggggttgaattttatggggtttaactgtttttaataggcgtgaaatgtgagcttttggaaagcagtttctattttctagtttccctcttgcgtttttttatatgaaatgtggggcaaaggttgttttttagtcaagtgcaaagtagttggttttaagctgttgattcatttcatctatattcccgccaatatttgtatctagattttttttttcttaatatcacatatctttattccttgaaaagcaccttcttatatttctctcttacatgttttatatttgctatagaaagaaatgggtaatttttttttttttt

SEQ ID NO: 241961 - DNA, 716 bp, Cannabis indica
tttctctattctcagtccctaagatgaagaaaggtgataattattttttccaatcgtaatttagcaacttaattatatctgtattgaaattctgagaagaatgaaagcttgaatttcactcatggacttgagtgaagtattaattgctctttgtgtttgtgtctaatgctctttgtgctgtttgtttttattattaagcttgtgtttcgtaattggcttacaagctttaggactaatgtttttcagatgatttcaaagttggagcaaatcagaatggctttggagatggaaactggtggaattgtcagcttgagttgctgggcagaagctgctggtattgatgaaaaaatgcttaagcagcaacttttcggttggcatcgtcaggacgaggttgtaaggagtactaagtccttagttctataccttgcaagaaagtataggggtttagcaataaccttggatgatttagttcaggtatgttagatatagcataattttaaaactttacttttatagcagaacttctaagtttctggataacgaatgatattattttcgttttaggttatgaatatcaagtcttacaaccacatgatatcacagaaaatactcacaaaattatagaacttcttagatattctgatgaaggggttgtagttgtagatactctatcgttcatcgccaaggtacttaacctagttctttgttggtttttt

SEQ ID NO: 241962 - DNA, 637 bp, Cannabis indica
agctgacgataatgagaaaatgtctttcttaaagctgctttggtcataggactcataaccatttcagggggtttgcttaagtttttaaactttcttcaatttagggataactatggcagattaataatatataataaatgtattttttttaaaagaaaaaacttttgtgattttagggacagaaacagatagacatttatataatgagtttcagatttattaaacattaatttttgctctttgatgaccatcacctgtattactaattttgcatatatgcaatatatatacatatatgtatatctgataaacgatgtaatattcaataaaaaatcactactattatatatgcatgtagtattttgttttgtgtctttttttttttttggtaccttaattatactaattgaaataacataattgcgtaattggtaaactagagagaattattgcataaactccatttaatctagtgtgtaatataagtaatttacttgactatataagtttgttttttttctctttataaaaaagttatatatttttaatgtctcaattctcaaataaaaaaagttcttttcctagctattagtgagacttcaaccaactagctgtgagtgttaaaatataaaagaac

SEQ ID NO: 241963 - DNA, 664 bp, Cannabis indica
ttatgaaaactaagaagaagatgatagaaatttactttgagttgaacacactctaaacttgctggaaactccttgaattgagcagaaaaaacacaaaaacctagctagttttttaaggagcttgagagagagggacagaaaggtatagtttcttgatttttctatttgaaacaaatgaattaataattagctttcttgatataatctaactaaaatatgggataaaatcagattactaaatctaattaaactcactaaaagacaaaagaaattctttggcaaaaagaccattttgccctcactttaactaaaagtcacaaaactacctaggggtaatttggttaattctaaaatctcaactaatcccgacattcccaatgtctaactaagttgctctgctactactaaaataccaaaatctaattctaatggtcaaacgccgcgttccgatgttgccaagcacaaaacatgcaaaaacataaaatttcatatatgacaaatataatatatcctgaattcaaataaatctccataaaatgataaatcataattattattcaagtttcataaacaaaccttaattatctactaattccaaaacaaagctaagcaatctttacaattatcccccattaaaagaattcttcctcgaaatctaacctga

SEQ ID NO: 241964 - DNA, 2997 bp, Cannabis indica
ccaaaggcggagatatttataacatgcgtgtaatactatataataaaggggttaggtaatgttctacctttttaataattgtatttggtacaatgtttttttttgaacaataattagtataatgttaaatgtgtacatatcatcaattttagtcaacataaattttataagtatttcgaagtttacagtttgaatatgttttctaaaattttggcaaaacagtaccttcaatatggttaaatggaatcctgaccgtacatttttttaatagactaagagctcgatggttgaagaagcaagcatattgatataggtttcgttggaacaaccttcgtactctcagtctccggcttttaacattatcctctaattataaaaacaagatccatattaataccaaaaattaatataatatcttgtatagtaattaattatgtataagcaaactttttaaataatatttttttttacaatattcaattttggaacacgcacctatataattatgtaaattataagcaaatgttccaataacgttacgtaattttagaagagcctgatgagataataatcaaggggatattgagaattcttttttttttttgtataactggtgggtgcagaaacagcacccaaccaaacttcattaacaactcagcaaaacatcagtacaaaagttcgagaatgaaactgaaaaggggatattgagaatgatgtatgttatgaaaggcaaactaaatatactgatagaagttcttaaatttatagctatcagatgttgtcttttttctttagttaggcctgccaggcttctttaggcttaggtacaacttggtcgggggtgtgttctgctactataattcgatttttgctattgcgattagtcttgtctttgtgacattattttgagtatttagtcttgtttctgagacatggttttgagtgtttattcttgtctgtgtgacatgattttgttttggttcttctttgttctttgatgaatcgctgtcaaattattgttagtgtggttagcagggccggccctgaatgaaagtgggccataggagaaaaaaaaaattttggcccttatgttagaaaaaatgtggtatttttcaaaatcggtaaaaaaaatgtataattttaaaagaaaaaaaaaaattttgggcccctaggctgagtgggccctaggcacaggcctagcccgcctatgcccagggccgggcctggtggttagttataacaagttctccgcgactgaaggggttagtagtgcagttacatactatacacaatagttgagagttcaagctatgaggttgagtgaacttgctacaacagtttctactgctgtatcttcttagcagtggacgaaagaaaatataggtgttcttaagattaattgtgatgatgcaatccttttcatatgattttattttatgtttttgtcaaacgatttgggaaatgttgattatttgactcgtttttctaattctaaccctggtcttatctagggaagatgtcctaattggattgtaggctattattttagttgattaccattaataaaattctatgatttatttgaaaaaaaaaacaaaatatattcacagaacatttttttaaaattttatataaataaatagaactaaaatagctatttcagaagtgaaattggataaaggtataaaggtattagtagttggatttgtgttggaagtaggaagagagggttccacattgggctcatcattcggaaggtgagattctgagtcggactctttagcctccttagcagaagaagttttcatcccttaaagttcttggacctaagataattcaccctcttctactcttagaagctttacgatattaagatctttcttccaaataagtgaagagtagctactaatgaacttatcgattctttttctctctgggccacaattgtagttagcttctcttcaacttgttctttggctgccttcaacttttcttctactttcttcttaagttctagcttcgcttaaccttttttcttgccttccagctttgcaactactttcagtttagattccaccaagtcagcttccaccttagtaagcttggaagagatcacttgttgtgcttgaacaacaaaattctgaaagccactcaacaactttacctcttgttctaggttttggattttaagggttttctcagtgatgccctccttcaaactttccattttaggagtagcattttatgccttaaactcagcttcctaaatttttagccttgagcattccacatgagcctccaatacattagcacaagtcttggcttggttgtaatcaactttataatcatcttcatgtttctctagcctctagattttatccttgtaagctgatacaaccttatttgtagccgactctagcctttatttggtttggagctccaccggctccttcgattgggtttggtcactcttcaatttagtcaagacttcttctctcttctagtttgaggcatcttttttagccgtaagagtctctagctccaaggaaatcttagctactgcctcttagcatatttatgctaacaagttcccttggaagaaatgaaataaaatcattcactaatacatgtgttgatcaaaattattattaattgtaagtaagaatacttactctagcaagttggtgacgaaaagactaagcaacgaagactagatcttgactagctgccatggcatacctttctacacctagctggtgataggtgtcactagtttgctccagcaagtcattcacaaatggagccaggtcacttctgaccttgaatttaattgcctcttagactgtcacatgatcaacggtgggaggatggataacaacatccagagttatctcagaaaattcaactttttattcggaactaattacattagttctttgacgaatcatatttaatttggcttcaaattgctttcgaaaaagctaagctgactcctcg

SEQ ID NO: 241965 - DNA, 528 bp, Cannabis indica
aagagaagtaaatagttctaattaattgctagtcaccaattgtttaaatcattttcaatccttcacaaatttttgtatttttgtcattgggcagaacaactgtatgctgggaatgggaagcgcgcagccaaatcgtcgggagagtttaaggatagctttgaagaaagcaggagatgaggtcaagggagcagctttggctagtgatgctttcttcccatttggtaatgacacattcttttcatcaacgtgtttagattgattgggaagatttaagtaatgattgatcttagtgctaaacttaaaaccagatatagttatagtaagtaaatcatgataggacaaaaatgtaagttgccacccttactgagaaaaatgatatttgttgttgttttttggatcagcttggaaagatgttgtggaagaagcgtgtgagaatggaattggtgttattgctgagcctggggggagcatcagagatggggatgccatagactgctgcaacaagtatggtgtatcgcttgtcttcac

SEQ ID NO: 241966 - DNA, 1565 bp, Cannabis indica
caatggctggaggtatttcgatctttcattacatatatatttcgatatgtttatagtttattctgcattacatatcgttcatatatgctatattttcatatactatattatagtctaacatgtaactcttcattgaataaaagtaagtatgtttgtccttaatttgtttaaattgtaattacgatttgacactaaagttagaattttattttcacaagaaaactttttgtatttaacattagaggttatatatttaagaatgcactattaaagtttcagttcgtgatccaagtagtatttttttataatattttttcttagcaatcttatgtaaatatgtcatcatattaatattatttttcacattcccatacatacaatttaaagaaaacaaagacatgtcgttagtagatagagccaattaggaaagaactatatttggtgagggcgaatttattggaaaaaagatcttttgatgttgtagggagagctattgatgaaggttattaactaaattataaataactattctagcatttatgctatataacaaggttgtaacaaaaataaagaaatacactgtaataagcatttctttatgaacaaatgtttaataagtctatgtaatactttaatttaatttagttttatgttaatctaagttcttattcgagattactattttataatttatgaatgatgatttgtaataattttgttttattactgtctcttcgttatatatatatattaataaatatataaataaaaactaatatatctattaattctaatttttagtattataaaaagaaaacaaaaactaaaatatctataactaaattatatactaatcatttttttttaagaaattaataatttcaaacttaaaccttttaattaatttgttatgatcataaatttattaagcaagatgtactaaaatattataaatatcaattaaaatatttacaataataaaattatttatgaattaaatttaaattagacatttactaataactaattaggtatattgacctttaaatacttctatcaatttctttttattatttttcttatttttttattccactttaaattctcatcttattttttttatttttccattttttattcttttttatttaattaaagatcattaattaattattttttattctactttatttaattaaagatcattaattttgttaaaaaatagagattattgattaattaaaaattatacaaaatatattaccgtatatgataactaatgattcgcgttatgtgtaaaaatgaatatttaccgatcattgtttgatttatgcacagagttaatttattggaaaaatattaatgatgactacaagtgatatacaatgatgatatcgatcttaaatgtagtggtgactataaataaaatatgatgatagcagttagtttgaagatattttttgatatgctttctttttatataaaaaattgtatgatgattttctttaagaaatttttagagtattctatatagatttgttattttttaaaaaaattttttaaaa

SEQ ID NO: 241967 - DNA, 632 bp, Cannabis indica
gtgcttggtgcaatcctccattacatgtactggagggatttgttaaaagagtttggaaggataagatagatagggtgaagttgctgtcatatggagtctttatcatcaggtttaattccatgacagacagagatcagattttggagggtggatacatctttctcaatcgaagacctgtcatcatgaaggcatgggatcccaatgtgaacttcaagaaagaagatgtaaaaaaggttcctatatgggttcagcttgaagacttggatctgaaatattggggacaaagatcgttgttcaaaatagtcggtcaagtaggcgagccgattatggtggatagtgttacaaaagagagggaaaggttgaactatcctagaattcttattgaagttaggatagaccaacaatttcctgatatgttagagttcgagaatgagcatggaaacaacactcatgtaggcatcaagtatgaatggaagccaattgcttgtaataattgctttgggttggggcatttgactaatgattgcaagaagaatgctaaagtggaaaagaagtgggttctgaaggaagatcacaggccaaaacaagtattagatgaggatggatttattcaagtttcaagaggttcaaag

SEQ ID NO: 241968 - DNA, 1303 bp, Cannabis indica
ttaagatgatggctaattgataagaatcactaagatgagtggcgtagctaggtgtcatctcctagagttaggaaattaatattaagataaaaaaaaagtcaattaatcaaatctaactaactaatagtatatctaaaagaatatatgtatacataaatccttttttaacaacgggtattaaattatcacttaaataaaagccaattaaactaatcaccaacttctactaactaagaaattctcaaaataattactataaaggattgtaaaaaaatctcaactaataattactacaaattctatcatattttactagcttaattaagcgaaacccaactaaagtgtaccatagcttattcacacaaatagttacttccggtactaataatttctaccaaataagtctaaataccgcactctggtatttttcccactatgagttttcactatgttgctcgaacgaatttgtacccactggtaattgataaatatacaacataataataatgtaatgtccgagcaccacataatcaacttatctcaatcccattgaaatttccaactaaactcattgtaatatttttgacctccgattagtctccaaggttgccaagtctaaaaatattgttatttcatcaataactcacattatacccacatattcaaaataaatctccgtaattaataatttacgcttatttatccacttatagaaaaatttataatttatgctaaattagattagttcattaccacctaattaatctacaatatataataaatcctaattattcaaaattaagtttctaggatattacagttaacttggtgatggcgtctacctcgtgcatacccgtaactttcttagaatggcttctttcagttggccattgttgattattcatagccatttcttcaagaagatcatttgccttatttacactttttctcataaatgccccaccagctgcaacatctataattgttctggtattgcaaatcagcctgttgtggaaattgtgaaccaatatccacttttcgatcccatgatgtggatattttttgataagatccttgaacctctctcaagcctcatcgagagatttgttgtccaattgacaaaaattattaatttctcctcccagcttgacaactttagctagaggaaaaaactttgacaataattttgttgccaagtcagtccaagtagcaatggagttgggtggcaaggacaccaagcaacttttggcatcatcactaactccgttcactttgaatgtttgacataactccacaaaattag

SEQ ID NO: 241969 - DNA, 2075 bp, Cannabis indica
ttaggctattaccgaactgctcgtggctgaacctctataaaattcccgtgtcttattattgctttattatatatatccattacgacatattgtttatcgcttatcaaaaagactcattgtcgttggctaaaagcgaagtcaacacatacagttcagcgtactgatacactgtgtaggtaatcttcactagcaaaaatgagctgactttgtgaatcaatccactatgacccatactgaatcatacattctcgtggttcttggcaaaccaactacaaaatccattgcaatgtcctcccacttccactcaggaagggctaatggttgcaataaccctgccggcctctgatgttcagctttgatttgctggcaggttaagcacttggacacatattctaccacatctctttttatcccataccaccagaggtagggttttaaatcctgatacattttggtggttcccggatgcagtgaataaggtgtggtgtgggcttcgtcgaggattttttttcttgagctcatcaatattaaggacacaaacccgagccctatacaataacatttcgttattcaagattgaaaagtccttaggccgaccagccttaacctcatctcgagtcttgattagctcaggatcttccaactatgcctttctgattctctctagcaaatcagatttgagtgtcaagttatgcaactttccaactacaaactcaattcccgcattaaccatctctgagaccagttgaggagatatcattacagtggtgaaaacctacccgggacctcttctactcagtgcatctgccacaacattggctttcccagggtgatacaaaatctcgcagttataatccttaaccagttctagccaccttctctacctcatatttagatctttctgggtgaaaaagtacttgagactcttatgatcagtgtaaatctctgtcgcttgtcctcagtccgcgtgctacccttagaggatctcttactttgagagctttgctgagctcctgccatactggtggctgtggggtagcagagaactgtattccacgttgcgttggggagtggtaggaggtggagctcctgaaagctgtgctcttggcgcataacctgaccacccggtcgggtaatacccttcgtaagccactatttgggcttcttccaaattgatgtatttttggactctcttttgaaagttcttatggctagctcctccttcttgctgcaactcattccaaaaatgggttcccgtatggattcctacctgaagaagggctagctgttgtccgccgtctaccttcttggtctttgaggcctcctctttgaatctttttatgaagttctttagggtttctccgggaaagtgttttatgttggttagggcgctgacctcaaggttgatctttcttgttgcaacaaacttccgctggaaacttacttgcaacttgttcaaccagtccactgatcctggctccagttttttgaaccattcttcagcagacccgcttagtgttagtggaaagcacaaacactttgtgtcgttactgaccctcatgacggtcattaccctattaaatcaggacagatggtcagtggggtacaaatctcctgtgtaagtttccattacgggcattttgaaatttttggggagcgccgctttaagatattttgagtgcacggttcccagttctcgcaatcaaagtctgaatcatcccctttctgtctttgggaaactctagggatgtctttgcgcaagattcctaactcggccaagattctttcgttcaaggcgcccccagatactggtaatgtgtgctttttcttctcgagatggtttctcaagtcactatgctctcgttgattttttgccttagatcaactgggggatgcctttgacctttcctccctctttccccgggctctcggtgcacagatatgctctgtcggtcctctcgatcttgaaggccaagactctctcgagggagcttgcccctctatggacctttctgttggaaatattttaccaggatttagatttactaccatgtatgttaattaacatcctaaat

SEQ ID NO: 241970 - DNA, 578 bp, Cannabis indica
tactcctattcttattctcattcccattcctatttttatattttcctattcttatattttcattcttcccaattaaacgcgagcttagttcatcaatctcttctacaccaactttatcttgttaatttagaacatgtgtgggtctcttattactctttctatgtatatagttgttgcttgacgttgtgaaccctatatatatatatttatatataaataaattggaaacgtttctatcgtggagactccgatgacatgtttatattattatgaaatttgtatggacggcattatatataacaaaaatatttattttataaaaaattttataactatcattatgattaatttacgttgtttattttttacaatgctcaacaagattgcaatagacagaaaaagcatatcacagcttgctcaaactcaaagatgccaagataccattatcaaggtttagagatttatgactgttatattatttattaaatgatttatgactgttatattatttattaaataatatagtgtttaagattaaaattgtgatatatatatattagggaaaattacatgtgaat

SEQ ID NO: 241971 - DNA, 508 bp, Cannabis indica
aaaaaaatgattacaataaataaataaaaaataaattgtgacacccttgcttaaatatatgtagttataatatatctcaaaatccaactatatgcttctcataaatacacatcattatcagtatatatgaaagcgtatataattttaattaaagcttattttggaaattaggtagtgaaacaggttctccgccgcgtggtggtggtggtagtgcagaaattggaagttcaaatatagataatggtaatcaagcagtaacaccttttggtcttcttcctttattactacctctgttgcaagctggcttacaccgtggaggggtggctgtgccttcccggcccgccgtgtgtcctattccaccaccgccaccaccgccgcctcaagttcgggccccttatagctgtgcccatgtttctggatcaccatctcttcatcgtaagtactatgaagattattgattttagatatagcattactattatcaccaccttaatatgctaaacatggt

SEQ ID NO: 241972 - DNA, 540 bp, Cannabis indica
accgccccctaaaaaaccgcccaacccaaacttttcctccataagagaacaaatctcgcacaaagattggtattgatgagtgcagcttttgcaaacgaaatatcattgaaaatataaatgtcctaagcttgtaaattgtgctctgcagcaacagagatatcaatccaaacatcttcatatgggtaaccaaacacagtttaacaatcaaatttaacctccacaatttagtattggtgcaaccgattgtgacagccatgattcttttcccaagtgaatggatggtccaacaggtccatattagttaaatcacaatccaagagcacttgcaggaagccttcgataaggcctcacagatataaattaccccccctcttatcttcttgacaaataacattgttaagatctccaatgacacaccaaggtaacgaatgcatcgcatgaagatcccaaaaaaggttccaagtttgaattctcaggtttcttcagggttcaccgttcacgccagtaagtctccatgctggactgtccctagaagtaata

SEQ ID NO: 241973 - DNA, 1129 bp, Cannabis indica
ttattcattgtatcttcttcatagaagatatgcatatatacacgatacaaggaaaaagagaaaatcagaaattaattatgtcttaaagagctatgccttaaatagaatatattgacagccatgcaaatcaaacccatatcccatacaaatcactacgttatatagcccctcgtccattgtcagtagttatggtgcaatgtggatgtccccatatacctttgagaatgtcattgtttctatgataaaagtaatgactcgtactatgaaggtgtaggaggtaagtgtatcctctagactaacacttcatgattgacggtcatctcaacagtcatgactttacacattcttcattaatttagtcccggtatttttgtgtcacgtggtgttactcttgacacgtcatcatcttagaatttttggataaacaattattattataaaaactcatattaataattctttatattttatatacttatttgaaattcaaaaagagagaaaagtaatggtaagatctcctcacataaagttttcaagtgcattttcaactatattaatctcaaatatactgtggtgggtggatgaattaaaccttgagaacaaataaaagatttggtatactagtcttcaaacaaatataatatgcaagaaaagtaccttgagctgggatattctcctcctctatggccattaagctcacttttctgctacttggtaagttggaaaggaagaaattgaaatcttacaacaagttgtatttacttctaaagaaattagaaacctctcctctcctctcctctcctctcctctccttcagtgtgaatgtttgttagtgtgaagttgaaacaagactgtatataaagaaacatctcctcttttttgtttttttttttttgatgaaggagaaaccgagtcgaacgtgaagttggacaagggacatgtcttctaacaatgtggtctgccactcttcactgcacagtgttgaggcctagcagctacctctgctattttgcatgatacatcaagacaatgtctgcctctgctatttcttcctctttcgtcttcctccctctttttaattcataatatacatattattaaagtcctgaacatggaaagttagctttcc

SEQ ID NO: 241974 - DNA, 651 bp, Cannabis indica
ttgaattttaggtaaaaattcaagcatgttgaaaatgacaatttttggggattttcggggccctcgccactgccacggctgggctcgtcgtggcgtgggcaacctaaatgtggccgccccagccacagccttgctcgccgcggcgaggccttactttcgtcgataatttttgggtttttgtttttgctataaattttgactcggaactccgtttgggacgttcttagtattgttggaaagctcgtttcgggctctatatgcttatctgtaattgaaatgcaaattatgtgaaattgaatttgggattaatcctatttgtaaaatccggggaacgtgtgactagaactatcggcgcttgctcaggaacacctgaggatttgagatctccacatactttggataccaagtaagatagtagttagcacgtaaagttaagcgctgtggcgctcatgtatgatattatgcttgtgattaagtaaaaaactgggattagggttatcaccctaaagtgagtggttatacgatctagggttactactttaatgtttaaataattttgaatgcaataccatgctatatatgttgagataaagaattatgcgggtaaaatataattaggttagacccggtaatcaaaactgagataaacca

SEQ ID NO: 241975 - DNA, 1293 bp, Cannabis indica
agttatatttcactatgaaatatatataagctcggtagcaaatacattatcacctttctttaatctctccaatcatgtgtcatatttctctattttttttctcagataaattatacgtctctcactattttatttttcaaaaaaaataaaaaataaaaaaatcagccatactattaattattttagctcaaacgtgttattattataacataccttttaaaataatcattttgacaaagtatatgtttttttttttcatctgcaaacacaaatttttagacttaaaagcatcattttagtttttttttagtatttgtattaactaaaatgcttttaaaaaagataaaaaaaccctcaagattaactaaattataaacttaaacacctcacaaagaaaatcttaaagaaaattaactatagccaccaatttcataaattattataaagtatttagttattttataattaaaaattattcaataaggatattatagagcaactttgtaagttactaacaaaagtacttacaaagaaactaaatgacatcttagtcataagtatagtctaatacttttacatctctcctacaaagagaagttttcaagtttcaatcctctctcctccaataataataataataataataataataataatttacacttaataatacattaccatttttttttaatgtctaagatactatttagtgtccttatataagttattttgaatataaattattttgtaagttaaacttatgtagaatattatttattttaaatataaaataataaaatatattttggtaacttgtgaaattggttggtatattttgttttaagtttaaaagttgattacttttttgatagctaaatatatatatatatatatatataataaaaaaaaaaaactaaaatgtcactttttatttcgattttctggtgaaaaaatatattcttcgcacattttaaaagaatcactttaaaaagtggattatgatgattaggcctagtgagacataactcttgaactcaaataattatattgaccataaattttttttaaaatatttgaaagaaaagaaagtaactaaagtatactttctttattaaaaatttagtatataattaatataactaaatttatattaccttcttattttattataagttattttagaaatatatttaaattgcttaattaagtaaacttgtttatactatactatctcatagtttttaaatataaattaacaaaaaaaatttaataatttatgaaattggatggtat

SEQ ID NO: 241976 - DNA, 1034 bp, Cannabis indica
gaccgtttcatagcagaaaaatccaaaacttgacttttctagttcatttttaccccaaaacataccaaactttccagatgacctatttacatcataatgaacataaaccaactaaaaacaacatcatcaaagctcagaaatcaaaagagctattgttgagcaagctttgagttttaaactcaaacttgcttaacaccaactacaacaacaagtaacaacaaccaaaacaactcaaaataagatcccagaagagcttctaaacaatccaaacccttacagaatcaatccttcaaaattacaacacaaaaccaaacttccaacttagaaattcaaagagatgaaagagctaggattaccttttgtttcccccacaattctacttgaaatccttcctacccttgattttggtttgaaagtataatttggttggggttttcctttagatgctcaaaactgagagagagaaagacaggttttggtggagatttgattttctaattttaatattatccttataattctcatattaattctaagttaaaaatcggattataacatttaaaagaatttctagaaatctcacctaaatagctaatatcaatcttaggcaaaattaccatatttccctttatttctctcttaagtaacctttaaagtctaagagtaaaatggtcaaaacatataaccccacccaatcttaatattctaaatttctaaataacttgctacgctaattcaaagatactcaactgtatccatgtgactctaatggccaaatcgtcagatgccactatcattgggcataaagcatgaaaatgttaaaattcataagggtgcgtttggaaagccacaatgtaattggatttgtgtgtaattggaggtaattacacaatttggcgtgtttgtctgaccatgtaatcacactgtaactgtgtaattggaagtaattgaggagttccaatcaattacactctccaattctcatggcccccactgagaattggatgtaattacactgtgtaattactaaaaac

SEQ ID NO: 241977 - DNA, 672 bp, Cannabis indica
tattactctaatatttatttgttgaagttatcatctatcaatctacattctgcaattaataaattatttaattttatatagtcttaattttgttcaattacatttataattatttaagtatattatcttttttatatgtgaaatgattcaagttatatgatggtgggtaataaaagtatgacaaaggtaaagtttgctaatagataaacttaaattcctgtcaagaacatatcgacaactagtcaataatagctaaacttaataactatcaccatatcgacaacctgtcaattatcaatcgatattcaagcgagagtcaataaaaaatgaaattacaattttttggcaatgattcaaccatcgagaacctcttaagaaaatataacaaccagtcgataatagattaacttaatgactatcatcctatcgacaacccgcccataatcaatcgatattcaagtgagaataaagaaaaataaaattacaaaattttttgcaatgcttcaactatcgagaacatgtcgagaacatatcgataacccatcgataatagctaaacttaatgaccatcaccaaaagctaaatcttatcgataacctatcgagaatccattgataaatggttgagagcatatatcgttttcattttttccaaccaccaccacaccggatc

SEQ ID NO: 241978 - DNA, 1120 bp, Cannabis indica
gtcttttggaatcaccaaactctctactcagtcgtatattgcatcacagatattttttgaatgggaatgttcttactgctggtgtgggaacttgtccttctctcacttggagaagcattgtatggggtaaggaacttcttgttaaaggtttacgatggagagttggctctggtactcggatcacttgcaagacagatccctggttacctggacacactatttttactcctttcagctttcaaggcactgatagctctctactagttgctgatctcatagaccaacatcgacaatgggatttgacagcagtttcgtctaactttggacaagcagaaattgatcgaatactttcaatccctctcagcatttttccttcagaagatgcactaatttggaatggtaccacttcgggtaactatatggttaaatctggctattactttgctacttcactcgctgaacatcaagatgcaggcagtacctatgtctatgagaactggtggtctaaattctggaagctaaagttgccctctaagcttcggatttttgtatggaaggtttttcataatgcaatcccagttgctgcagaattacacaggaaacacattgcaaataccccttactgccctttgtgtaaacagcagcaagaaaccatacctcatgcactctttctgtgcaccagagccaaggaagtatggcgactttcatcaataaaactgaatttaagttggctgctacttcttcagctgaggaattcttattctatgcctcggacaacacatcgacttcagattttgagcagtttttaaccatttgctggagtatctggtatgagaggaatgctgagttccatgataaatcccctaaacaacctgctgcagttctggcatttgcaacggactaccttggaaaatatcaatctgctcaagctcagtcagtgtcaaataactctgctgctacttcaattacacatccagcatctcgttcacaagttgcagcatcaacagatcagtggattgctcctcttgctggtaaattcaagttaaatactgatgcggcatgtaataaagctggtaagataattggtttaggtgtcgttttgagggactcgatctggttt

SEQ ID NO: 241979 - DNA, 568 bp, Cannabis indica
accatacaattaattattcaaaaactaattgtaaacacattgttctacatattgtaagtgcaaccatacaaattagaatatatagttaaaaatctaacatttataaaataatttcaattaacaattaatatataatgattgagcaatttgttacctgggataacttgttcacatgtctctaaaccttcaattgcatccatgtattgtcgaagtataataggttcctcatactcataagtataccatttcttagaaaaaattaaagcctccaccatccttggagataaagaactcctaaatgcatctaagattcttgcacctgtagaaaaagctgattcagatgctattgcagacatctgaatagctaagacttcctttgccatacgagcaacaattggatatttgaatcgattatgtttccaccattggacaatatcaaatgcaggatcaagcttctcacgatgatcatttaagtagtattcaagatcatcttcttcaacgtcgtcactaagttgtagttgttcaagaagaaatgattctgtagctgcactaataacaggctcagatg

SEQ ID NO: 241980 - DNA, 439 bp, Cannabis indica
ttctctctctttcggtatcgctcgatagcaccgcctcctcccttaaatttatttctctattttaaaccctaaaaatatcttataagcatcctatatatatcctcaactctaatcttaaccctaaaacaaaatatatatatgtacatatatatatataacaaactaacataaattataataataataatagtaaactagataatatgccacaatatatttacccatattattattaatattatgcctataataatatttataaataattaaatattaaattatatccaataatttaattatttatctagcattatacataaccttaaaatagaataaaaataagaataaacaaaataaaagaaattttattgtcaccaaaaaaatatctcatactccactaaactcataaatattcgaaatgataaatcatctccattag

SEQ ID NO: 241981 - DNA, 559 bp, Cannabis indica
acatattaatataaagaagaaaatatcatatacacgagccattttcagggaaattttttcacataaaaatggatttttaagcgcatacttttctctttgtgtggggtgtatcacgtcacgttgattccattattcacacggattaggtttattcaacaatttccttgaaggtcctctctcataaattcacaattgatgtacctgaattccatagctcggccagtaaaaaaaaaaaatccattatgagtggtggaagtggtttttccacgtacatgtcaatggatagctaagttttgtaccaaatttcacccactgtttttacttaataactttagagtatattttctgtgtctattttgttttttcttttcataaaccgtatgcagaaaattgtagattgattgaactcgttgtatgaactctctaattcactagttaagcacgtgttctctgttatcattttcttcattttttttccttttatgatcaatttaattcttgtatccaactcaataatcttgcaatgcagaacttgagattcatttgcatatctgcatat

SEQ ID NO: 241982 - DNA, 727 bp, Cannabis indica
tttatggagatgtcttcaagttcttcacatttgggaaaaggtgggtttttcaattttcttcctccaaaggtgaatcggccagctgacattttatggtggtgttgggatcattttgagaaggataaactcttaaggtttataggcttttcttggttaatttggctaagaaggaacaacttcatatttaataaaaagcaccctccagaccgtgtgtggattgattgggctttggagtatctagatcagcagctggtgttacaccaccagcaacctcttcttctcccttcaaagccaattgctacctggtctccaactccttcagatgtccttcaaattgacacagatccagctctaaatctgggggtgcttggatgtggcctaagtgctgttattcgagataatacagggcggatggtggtggctgaactaacttacattccgggctgcttgtcagtccaattagcagaagctgctgcaatcaaactaggaatccaattggcttcaaggtggtctattcaaaaggctcggttaggctcggattgtcaaaccattgtcaaagctattaactcaaatttgagagtgcatacggattgggggcaagtggtgatggatataaaccatttgaagactcttttttcaggatttgtcttctattttttttatcctaggatgtgtaatcatgtagctaatagcttagctaagtggagtcttaagactcaaaagtcta

SEQ ID NO: 241983 - DNA, 824 bp, Cannabis indica
caagtaagttgttcaatggacggtaggccctcaactccaaaaagctacgaccagattatcaagaacgcattctcttcaattaatttaatatcctttctctttaagcctttctctcagggtgaaatagtctgaaaatatccaaatcccaaccacagaggttgagggaggataagggttggcaatggcgtgttcgagtctgggtttaggttcatgcccaaaggtgcttgctttttacccagataatactttatttgtatttaatttcatgaatttcagcaaaaattattttaatatttttccattgcagacaccaaaattccatgtttattgcagaaaaaaagagaaaaacagagaatttaggatttgaggtcatgttgtaagttttaaaatttaggattttgataagaatgagaggccattgctacgctttacttatgctaggagagaggtaataaacaatagactttggtaaactggttttgaaagtgagtactggatttatcatcgtaaagacctttatcttttttttgcttctattatcaataataggtattgtctaaatgggtttgaattctaacttttggcttactataaattagtatttcttttgtcattagaaaaaaatgttatccattcctattgaatttaatcaagcccatttgcaggcataactatatttatttgttcatatcataaattataaattatattagacatgttcttttattatttattgattgatttataatttacataaatttacataataatttaaaataaaataaaaataaattaatacatttttaaaataaaattaaaaatac

SEQ ID NO: 241984 - DNA, 1950 bp, Cannabis indica
tatcaagcccaagaccccacctagccacttgatgagcaagaaggttagaatcccttctcacaaaactcaaactaaggggagggcagttagataataagccccttatacaagtgataaaatcatccaggacattacaacccctcttagaggaacttattttatctacaatagatttacaatctgtttttagaacatcaacaggaagatgaatacaagtaacccattgcaaagcttgaagaatcgccttggcctcagctatcaccggcgaaacacaaccttcaaaaggcttcacaaaaccagcaataacctgattcgaagagttcataacaacagccccaatgctatatcttttacgagaagtatcaatggctgcatctgtaaaaagctggagggaagcccctgcaggtaagccatgcaaatctaacaaatccacctgttgagtagaagaaacttgttgcgcatccatatacttgaaaaagaaatcaacactccaatcataaacatcaacaggctgcagtgaaaacttattatggaaaagattatttctttggttccaaagagcccataaaaaacagcaaaaaataccaacattatccttatccagttcttgagtaatattgtggaaaaaatcatataaactaagatgtttaaactgagaataataattaacaaaccttgagtgtttccaagctttcctcgatctggaacaatctagtaaagcatgcttagcagtttcaggctgaattttacacaaaggacacaaaggagaatcaaggatacatttcttatacagagaaaaagcaacaggaattgcctgagaaagcaaacgccaaataaaaattttcacttttggaggaatttttgaggtccaaatttttgaccagaacttcttagagttatcaggagaggaagtagaaggaaggtcttgatgtgaaaaggctaagtgataagcagatttaacagagaaaatccccgaactatcatactcccaaactatttcatccttatcctgtagacccgaaactgagacatttaaaatttcattaaccatgtttgttccaaaacaagtttcaagtttaggaatatcccagtcctcaaatttattaatgaaataagaaagaaaaggagaaggaggtatctgaccagaattaaaagacttaaccttattatggggaagccaatgatcttccagaatccgaatattacttccatcactaaccttccaaatcaatcctgaagttaataagtctttaccccaaagtatacttctccaagtgaaagaaggattgtgaccatgcttagcttcgagaaaagagctacgaggaaaatacctggctttaaaaagtgaagcaagaagagaatttgggtttttaaaaagcctccaagcttgcttagcaagcattgcctggttaaaatgaattagtgatcgaaaacccatccccccaaaaaattttgactgacacatgcgcttccaagatttccaatgaatttttttagaagtacccgcagaaccccaccaaaacctggccatcacagattcaattcccctacaaagcttaacaggcaaacgaaaacaggccatcgcataagcaggaatagcctggataacagccttaagcaacacctctttaccagctctagaaaaacacttgcctgaccagcccctaagtatagaattaactttatccttgagaaaagcaaaagagtgatacttagacctagagaggcattgaggaagacccaaatatttacaaataaaaggtctatcctcaagattaaaagtgttgaagaaaagggcacgaatattagattgggtattgggagaaaaaagaatagaatactttgaaaaattaattacctgccccgaagccctagaataaatatcaaaaaacttcctgcagagcagagcaagaggaacgatagcagcacaaaaagaaagtgtcatcagca

SEQ ID NO: 241985 - DNA, 2850 bp, Cannabis indica
tttgagtttgttttgaaaaaaaagctttaatgggttttgttgtttgaagggtttattcttggttggtgggaaaaattgtttcaaaatcatataaaaggttgagtacgtttttttttttggttttttgttatgggacaaaaagaatccattgatgttgagttttgttctttcaaaagctttcaattcttttactctgtcttctctaaaggtttggaaaagttttgtttttttatttaatttctttgatatgtcatttcattcaaatttcttggaagttttgtaggaatttgtttatgtaattcaagattgtacccattatatttttcttgatcttgaagtaactgggcattgcttggtttacagatacatttcatgaggttaaaagcaggcgtgagaggaaaaaggatgttgtaagattggactaatgattaagaatttcattttgttgaaagtaatttggttttcttttttcaataataatttggtgttgtaatgatttgtagaactttaatactagaggctctgaagagagatcaccaacaggtgtgcagaggagagttaaggggagtgttcaggggaactatggctctaatttttcatcaggtaaatattttctttatcgaaattttaagttaacttcgaagtgggatcttcttccccatttcgagtagattgagatatcttattgttttcagatgtgggtggagggaggaatggcggtcgaagagaaaatgggaatactcatttcaccgatagaggtcctatgtctcctacggggccatactcgcagagaatgaaaaataacgcctcttctcgagtcacaaagtaaattccttttcctgctgttggatttgctgatttagaggtgttttgttagttgcttatatcattcttttttgttttctttctacagggcagtgactggtttgcccaatggcaccgcaaatatgccaaatggggtttcttcggctgatgcaaacaaattggaaccagcagctcctccacctgctgttgcttcttcccctcctaccgttgcttcactggtcgatgagcaaggaaagtcaacaacttcagattctccttctgctcctgactcgggggattcttgtgttgtaagtatagtagaaaatgatgtaggaagcaaacagttggcagctgaaccaaaggaggagattaatgtaaacaacactgttttgggcaataacaatcttgaattaagtgactctgtgagtgaggaagttgttcagggagctgcggattctaagttgaacgagaagagttgtgaaccaagtgaaaacgaaacagtgtgtgtcattgagccttcagaaccccctctttcggtaatccaagaaggtaattttgctctaaatgcgttgcgttcctgacaatgtgtgatctacaatctcaataacttgtgttattgtgctatggattccttaattttctctatgcaaatattgaagttttaattgtattatcaatcgctcgatactgctatgttgggaagccattgaactttttactctgtttctatttgttaagcagttatcacaaccgaagcttcgagtactgtagttaaaggtagttctcaatccgaatctaatgtgactgaattccaacatgttacctttccaagtaattttgaagtcccggaagctttgaagaacgggctgacttttggaagcttcgatacaaaagttgagtcaataagtgaaggtgttgagaatatgggcctttccaaatcttctcaggatactgatgaaacttataaggaacgttcttctagtgtcccgagcgattatcttgaaaattcagagtctctccctcaagtgcttgaaaagctacaacctttatctgagggtacagatttaaagggtaaacagttaaaacaggagacagtcacgcagcttcctctaaatggagctcagttcccagtagtcataaatgcgccaaactatggtgtcggtttaatgcctcctatgctcggtggtcatcatcttgtacgtttggaaggacatgaagttcaagctcatgaaaaccgctcccctaactttgctgtaagtttactgatccaacaaaataggaaatgatttcgttttgtgctaatactcttaatcggttcggtgatctaatgctctttctatattgcattgtagaatgggaattctgtgacttcatctacagcaacttcggttgcaccagtaccgagctccatggccatgacaccacaaccactcccagttttcaggcacgcatatccttcgaatttctatccctaccattgcatccctcctccatattatgtgccaaacatgcaccaccagtatttgagccagaatgggtttccatcttcaaacggaaacatatttctaccaccaccaccaccgctgacagctgctggggtcaaatatgctgtttcacagtacaagtcaccgaacaacggtggaaacccaactcatttagggatgcagcctaccagttcatatcttaccgctccagttggctatgctcaaccgattgtatctgcaagcttgatgggtaatgaagatccagcggcctctcacctgaaagaaaatcaaatctacaccactggacagccggttagttttcgttatttctttaacaaaaaataagaattgtactcgagcgaactctaaccttaacataaacaaagctcgaatcgagctccacaaaatgtgaaactgtgagcttttcgagtaattagagaaagttaaacaaaactcgaatcgagtactacaaaatgtcactaattcttgctcataaacttagtttttgttttctttaacaagataatgagaatagtacccgaatcgagcacaccacaaaatg

SEQ ID NO: 241986 - DNA, 571 bp, Cannabis indica
aaacccaacatcctgggaggggagttgatcatcaaatagagctggtgtcgggtgcaaagcccctaacgaaagtagcataccaattatctccctcaaaacttaaggagttgaaaaggcagctaacggtgatgttagaggcaggattcatcaagtcattaaaggcaatatttggtgtgcctgtgttgttctagaagaagaaggacgggaccttaagactatgcatagactatcgcgccctcaataaagtgactgtgtgtagcagatacctcgttcctttgattgttggtttgtttgaccagctaagtggggcaaaatacttcaagaagttggacttgatatcaggctactatcaagttcagatcgcagaaggggatgaaccaaagacaacttgtgttactcggtatggggcatttgatttttacgtcatgccatttgggttgacaaatgtgccagccacgttctatacactcatgtatgaagtcttccatgaagacttagataagttcgtggtggtgtatctggatgatatcgtggtttacagcaccacattagaagagcatcgggaacactt

SEQ ID NO: 241987 - DNA, 772 bp, Cannabis indica
gtttgaaatcaagtgttgaaaagcactgggtaaaggtcgattgaaacttagtgttgatgatgataagaagttaagggtttatgttggagctgttattagaaatcataaatgtgacatcatagcaggttgtaccattcccataccaagttgatttagctcttcttatgctgaagctatggctttgccacaagctctttcatgggttacaacagtgaagcttccaatcagttatcttcagacaaattcaattaagcacaactaattgatcaattcatagagttttatttgctctttcagattcaaagggcatgagggctagatacatagatatagtatggaataactctgttccatcagaattgtgttgtaagttgactaaattgtttttttttcagaaattacatttaagaaaaaataaaaagaaaaaaaaagtaaggcaaataccatctgctgatgatatttctagtcaacagcctccctttttgagctatttctaaacctacttttcttttggaaaagaaataattaaaaacagaaaattaaagcaaacttcatgcgttcttatcatatatctacagcctgtcaaatatgcaacaagcttcatgcctctcaattgtagtggaaattaccatacatcattttataacaaaccacatttacaattatgtgtgcctcatgcattgtacagatatgcaaaatggaccaaaatatatggggttaaagtataatattcatataatataagatttcaagtcccttattagaaaaaaaa

SEQ ID NO: 241988 - DNA, 1211 bp, Cannabis indica
ataaaattaaaggtaaatttaatcaattaattaataaaagtagtatttttcaactacgattttttgattgatccaggatttggttcttgctgggtcattaatgagggcttggcctttgtttaataatgagttggtgatgaaacaagtaaaactgagtaaggaaaggtatggatcagttgatagagtttttattgtgtgtgatcaagacttaacagccgatgagagttttcaaacgtggatgattgagaggaacccacctcaccaagtcaaactcattaatgggactgatcatatggttatgatctctaaaccacttaatctctttactcaccttttggagattgcagaaacatattattaagttaatttaaatataaatataattgcttgaaaaatttatgtcatactaatactattgttaatacttgaaataattgatagatatctatgttttatgttgttgtgtgtgtttgaaataataataaatagaacaaattatattgtatactcattttattttatatatatatttttattttatttttatattcttaaagatatactcatttttatagatgatgtatttattatactttttaggttaatgtaaattatatgttaaacttactcattcacaaaaatgagtacattttaataaaatatagtatgcaattacttttgattaatagatataaaagagaaatattccttaatttatccctcaaaattttaccaagtctctccacccgaagtaagatgcacaaattaatttattatttatttgattacattattaattaatattaatttaaattaattatgtatagtatatgtaatattggggttaatactaattaattaataaaaaatgtatattattaatctattcacgatttggtgcttggcttgattggtgagagcttatgatacatttagtcacgaagaattgttaaataaataagggtaataatactattttcgaccatgtgtttttgtaaaaattattaattggactgttttgttaaatgataaaatagactctctattttattaaatggtaaaaaaggatcctaagctcaatttttaataattttattttttaatataattaactttaagacaatttctaagatacaaaaaatgtaattagttgtaaagtccttttttggcaagttaggtgacaaaataatttttccatttatggtaagatt

SEQ ID NO: 241989 - DNA, 2482 bp, Cannabis indica
caaggagagaaaaaaaaattaaatactattttaacctggatattacagtcggggagcgctcatcaggtaaaaaaatcaagtagcaactaagaacttttagaaagaaaccctaaaaagaatagagagaaatcatatattattactccttatttagtaattaacaatgagtgaatctatataaacaaaagcataaaaacgagtcgaactttattgccttaatttttttagcatattaattcctcatgactacactatagactcggaattctactcttgattacatagaatgctctctatctccaatatatatgctatgaattatctattattacaataaaatcaatcattgatcccatatagatgatctacattgagtagggtaaaattcatattttatcctttaaatacttaactacatgtaaatgatatttaagcaaagtaatataaaaactgaaatgagtactccactatttagtctttttaagtgaaactcaaaggaaaccatcatttcaacgtttaaaaaagtatagaatctttagatttctatatttatgattaacgttcctagtcaattgacatactaagtttccaaaatttaagtatgagctaatctgaggggtcatcttgtaacaaacaaatcaaagaacactaataatataatttttgacctcacctttagccaattatcctcagccaatttaaattattagagataataaataataattaagcaataagaacacaaatttattgttgaggttcggccccgtgatagtggtaatagcttactcccattttacttatattaacttgtgagaaaagaagcaagaagttcttgattattctcgaaagctttaatagagattttagcagtgttgacctcagaaagtgatcaactgacagcggcgtcgaatgaatctaatgttggtcacgtgttacattaaagtaaataagacaaggatttttatagaggttccgcccccttagttaacggttaatgacctactccccttttggttgtattggtacttaaagattatactattcagattgctattggtgggatctgatatagctttctataaggttacaaagcatggatcaagtatgcagatcaataatgagagagatgtcttgccttagaggcatgagagagacgggaagaaagaagccttttaggcgtgtaaaagagagagaggaagagaggctagggttttagacttagagtgacttagaggctagaattagacttagcgacttaggttttctaggttagagttaaggtctttatataggaagcgtaaaatcctaatattgaaacccttagatatttatatattaacttgattaaatacgaaagactacatttccccttgaaagtagatattttccataagtttattgggctattaagggcacgattcccaggtacttaggcagatgattctactcctagtaagtcgtataagaaatattaattctcaaactcacagatacaagttgtcacatccgagtgcataaacatctgaccaacatccatcaagcaagtagctcgcatgcaccggctaggggacgcaagttagcaatttctgagatatatctcgtatatcttcaagcttccaagtcatggtacaatcgctacattcatgggattggttcatgtcttcaaagaataaagcaattagcctaagttttctattttcttcattgtaatatgaaaataaactagtttctcagtaatttcatgtaattaatccctataaatagtggactcatctcactattcagggacacgaaaagattcagtgagagagagagagagaacactcaagagagaaacctcgatctaagaataaattgctcagagatcattataagagcttctgagagagaataagtcattctttttcaccttctcacaagttaatactacaaaaaaaaaatagtaggctattaccaactataaagggtcgaacctcaataaaatctaatgtttttttgtactttatattattttcattttgtaacattattattctcaatcacaagtcaaatttaatgtataggttggatatgctctaacaaaatatgtaatttgactataaagttgttttttttttagggaaagggagcccattaaagggaaagaaaatcactaagattgcaggggtcatcgccaatccaaattgctacttcgtctagccccgaagcccattttgcaagcttatctgcaaatgtattagcagatcgattaatgtgggagacacggaccacagggaggtgagacaaagcttccttgatttgacttataaggtcaccaaagcatgagatatcctctgtaatgaccgctctagtaatttggattagtaagggcaattagtactaatttttattattttattattatttgtgaatttatttaattgtggaccccaatatctagaaataaatattagagttataatttctcaattccggagat

SEQ ID NO: 241990 - DNA, 664 bp, Cannabis indica
aaaaaataaaaaaaatctaaaatcatagagaaggaagaaaaaatgtatatatagcctcaatcttccacacccacggatagaaccaccacaaaagacattctataattcagacctcatcacaagcatgatacaggccattcaacgaaatattactgtatgctgctctctttttcccttgataggttcttgtcatggatgttctgcttacctactttacatatgtttttttgatttaccctttacacatgcagttgagatctattatttttcaagttacctcgggatatttacttttcttgtgtggattgtacaaaatgtacttatgctcttgactgttggtcagtctgagtgcaagttgatgttaattagaatgtgttagttttctttttagtctctttattattattatttaatttattcagtgttaaattaaacttattatatatattttttttgctataagtgatcaagataatgacgggatggagagaggatgaagagaaatgagtcggtgcaaataataaattgataatcaatgttacaaaatagacttttaactcattagacattacatgagctttgaccatgttattttgtatttggaatacatgtattggatattttgataatatacaaaatatattagattttattaaattgtaat

SEQ ID NO: 241991 - DNA, 845 bp, Cannabis indica
tttgtagacaatcatcaattgctcaaatattgcccatatccgcattaacgaataacaaagtctcatccacgtacatcaaatgggatgtaggcggtccattacaactaacatttatactagaaatcaaaccacttctctccttgttaaggatcaaacaagagaggatatcagcacacataatgaacagatagaaggataaagggccccttgtctcaatccaatcttagaaaaggtcttagttaaacccccatttaataacacttgatagccgactgaagagatacaatgagaaattaacttaaggaatttttcattagaactaaaagaacgaagcactatgtcaatgaatccttattccatgcgatcatatgcttttgacatatcacacttgataccaacgaaggccttactatcttgtttacgtttcatctcatgcataatttcattcgcaatgatcgaattctcaacaatccacatgcctttcatgaaagccgatggatatggcaaaacaagtttatgttgggatttatgccttaaaagtaagtaattaaaggataatatattagagaatatatgaaatatgattataaaataaatgacacaataattagaagagtacacttattaaatatctaaaaatttctttttcatatggataaacgtataatcttgtaaggatgtataagagaattaagattatacgatatgaataaagtaagtcggtaatgtattaaagtattagaaatctttaatatagaaatactaggtacgatttactatacactatacttttggtgtgtgtgattatgatttcagatcacatatgtagatggatatgtagtaaa

SEQ ID NO: 241992 - DNA, 1368 bp, Cannabis indica
tatattttttttttatctattaattaaaaatattctcatattatatttcactgaaatgtacttatttttgtgggtaagttgcccaatatatctttaccttctatttaagtctaccacatcatttatattaacttaagggtataatgaggacatcatctataaaaataggtatatcttaaaaaaaaatatgaaaataaagataaaaattaaaatatataaaataaagttggtataatctattttttttttaaaaaaacatcatacattagttaacgggggccacttttcaaaaaagctaagtcattaacgggcccaagcccaatgtgctccatcctgggccttagagagacacttttgcagcaaggtgaacaagtgagaccacaaatataacaagaacaattttgtttgagttgtatcatctgaattgcctcttagatagtggtaaaattattataaatattcaaattctattcaatataattatttatttatattgattgtatgtaagtaatattgaaaaattacataaaatgtaattaaaactataacaaatatatataatatagtagttagttcactagttataataaaatgtaaaaatatataatacgaattcaaatctgtataaaaaaaaaactagtttatttaaataaaatagaccagttcgaataaattacaacacgaaaatattaagattacaacttgtgttgggcctatactaaagaattcttgacaggtgcaatctatattgggaaatttacgtgctatactaatttttgttattttcttacaaaagtactgtaaggtggtatttttttttttactgtgtttttttacaagtttcatattgcagtatactgtgttaagttttcactggtgttctactggtgtttaactgttgttttgagttgttctgctatgtgttttactggtgttttatagaaatacagtatttttataaagatttttgtgtgacatttttgtaaaagttaacccaaattccaatatttttataagtttgattataagttatagcatatcaacaaaacttatattttttcaaactttataaaattgaaatttggcttagcgattagagtttcatatgcacattatgatattactctcaaacgctttgttacaagatgcatgagtgttacatgctcaccacaaatcacaaaaaatatagcacctatatccaccaactagctcatctcacaatattctataacattgagttaaaaaaaatgttaatttctgttatattattttataatataataagtgtagattaaaatgttgtaatatatattattatgtgaataatatgtattaagtgtttggtaaataaattgtgtaacatataat

SEQ ID NO: 241993 - DNA, 596 bp, Cannabis indica
ctattgtgtaggagcaagactccggtttggatgaagaaaattttaatttttaattgcattaatctctgagcatttgttcaataaagcaataatttttaattgctgtttatcgtggatattgtcccacatggaataagtggtagagaattgagccatatatactctttttattcaattatcacaattcatatatttgcaggtttgttttcctaacttggaggaattgagtatgtgggatatgagtatagaaaagttattggcagaccaacttatggtatcatcatcatcaagtttttacatgcaaaacttaacaaccttagaagtgaaaggatgtgatagtttaaagtatgtattctctttctctcttgctcaaaagtttgtaaacttacagagtatacgagttggatattgtgaggcaatggaagacataataagagtagtggatcaacctggagaagaagaaactactcatcataatcagatgaaaaggattgatttggtccctaagttaggatctgttaagctttgtggcctttcagcccttcaaagattttgtagtagttcagcggattcatgtattatggtatttccactcc

SEQ ID NO: 241994 - DNA, 798 bp, Cannabis indica
tgttcactctctttttgcacgcttaatagaagtaaaaatcattcaaaattacatggaaatataaaaagattttttttccttttgttaaggataaaagggaaaaaaataattaaatatgctatcaggacaaacttttaaaggtgagtcttatttgttgaataagtattcaaaatatttccacatgacaaaattgatatctataggtatacggtgtgtatttagattaccacttattacaaaatttattatgatattattatacatgatatttatttttattttttcttgaagtatactattatgcatgattagagcatacactagttttttatttgtaaagtaaaatattatatcagccaacgaaagagctacacctgtaggaggaaggaactgaccctccttcaaactacaatcagaaaaacaataagagtaagaagctataataaggaaatgaaaatgatctatctcacaaggaaactcaaaacaaatagaaatatcattcaatatatattgacagtaaattcctacaatcattatatgaaatgacaaacaaagacactacatggatttggcttcgaattacctgattgctgaaccacaaccgaactccagtctccaaaatcaacttacttcaatcctgcctctttatttaactcaatgcttccttcactcccactccctcagctaaagtttagtcctcttaaattaaaggttaaaagcagattacaaccaaaagatcaaataaactcacagagtagcacagatctgatgaagaagaaccaagaaaatactaacaaa

SEQ ID NO: 241995 - DNA, 457 bp, Cannabis indica
attgtctcaatcggttcgtgataaagtcttctacagaaatgctccgaatgtccaatcaacccgcatatataacaaaatgtggggactctttcatacttgaatgaaacccagaatactgttccatctgtcttcgtgcattggagtcttcgacgtaaaggtttgtcgatgttgaacgtgactctaacccgaagataatctcaccaaactcctatgaaattcttaggatctgtttcaacaaaagacccaagaatgttacctatattttcgacaaaggtggcagtcatgcatcctggtcgcacatcccagatttggacccacatgtcaagtttgttcagaactagactccttggttctatcccctcatgtaaccgctcaaatattagttgcatccggttgaaagtccaaggacttccttccatcaccctctgtatatctacttcatggtagaattgaaata

SEQ ID NO: 241996 - DNA, 638 bp, Cannabis indica
gtggggttaactgaagtgaatcatacatacctctagagatgaaaattgtcttccattaaaatgcttgtaaaatatatcagcaaaatcttgagaaaaaaaaatattctttaataatgtatacctgttaagtcttaataaaattgcagtctaaaaactgtaagaaaatatttgtatcagaataacagataaccatgaatgagaaagaatcaataaagtaaaggcagaaaacaagctcttgtttcatgaggggatgcgacttctttttcagccattgagaattattattcaaaatcctatgataactagtaccaaagatgctgctatggaaaccattaatgaaccagaatttggaattgaacacagccagaacacatggactaagttagtaaatgaggataggaaattgatcacttttcatacctctagtgttcccacttgaaggaaggattgagacggaaccatagaaattagacacacgttctattgcggtctctgagatagaatgattgagagagactacaaaagaagaaagagagagatggtgaagaaaatttccacttaaaagaagctcaatttgtagccgtgtacatgaaagttccaaaagtaagtaatagtatatttactcaaacaaaactctg

SEQ ID NO: 241997 - DNA, 1219 bp, Cannabis indica
cattaaacaatcatgaaataaattatgtgaaccatgcaacataaaatgcagtttctaacttttattaattagtaaatctaattatattgaaatgggttttatttagggcacaaaacctaacaaaaacagcacaatttttaaggcccaagaaaagtcttttcatagggacatgactccaaagaacaaccaaatgagggaccttatgcaaagcattctagcaaactacaccacacacactacaacaaacaactacttttagtgacaactttttggtcataacataaattttttgtgactaaatgtgacttttggtcacaacaaaaaattacttgtgactaaaatatagtatttatacacaagttgtgactaatttacttttagtcacaacaagtattataactaaaaccacatttagtcacaacaaattgtataatttttgtgactaatacctttagccacgaactttttagtcacaacataagaatgataattaataattactcataacttttttactttttgtcacaaatttagttgtgactaaaagtaagattttttgtagtgacactcggttgtacaaataatcaatcatttaaaagtaataaataagcagtattactattagagatatttgaaaatagaatgaataagatttttaccttctaaagaaactagtaataagaaaagttagggcggtgttagggaaaaacgataaaaaaactagaaagaaaccttcagactctcatcagcttggttcttatatttcgtcacttcagggagggaaatgtttttcagcaacatgaagcttcgatttcttcttaacaagccgatgctcacttgttttttgtacactactacaaaaaccccctttagaggcggtttttaagccctttcagcgtcggtttttgcaaaattcgctaccgacgctgatcagggtgacgctaaacgctttaaatgaaccgacgccatatgtacccctatggcgtcagttattagctaataagctaataaccgacgccatatgtagcgtagcaaccgacgccataggtacgcgaatttcagttttttcaatttttttttaaatttaattatataattttaattacattttaattatatatttattaatttatatattattttatttaatttaaattacacatttactttttaaaatgtaaattaaatattatttaaatttgggtaaaatacataattt

SEQ ID NO: 241998 - DNA, 1493 bp, Cannabis indica
gttgttaatccaacatacttgttagtaaatctagatcttggtaaaataaatttccaactggcctgcctacagtcagccccccatcgactagcaatttgggggttggcactacaacatctgatcctccaacaacgtctcctcttgaaggaatcccaccatcacaggtaactgccacacaggttatgctaaactccaatctgattccatcttctgttgatgcatgtcataccaccattcatactctagcttaggaggatttgattgaatgagcaatcgctcggacgttcgaagggatggaagcaatgatccaacgtatcccaggggttccaacaccaataaagaaaagtttgcctagcagttttgccgactcaccttttgttgatgccattgcattggtcgagatgccaaagaagcttgtcttcccattaatgaggatgtacgacggaacaaccgatccaaatgatcatatagctagttataagcaaaggatgttcactgccgccatccctcgtgagttgcgcgaggcatgcatgtgtaaggggtttgggtctagcttggctagcccagccctccaatggtatatgaatttacccaataatttgatttctttttttgctcaattaacggatgtttttggagaacaatttgcgagcagcaggaaattggagacactgttagatgacctataccgcatcaaacaaaggagaggcgaatccttacgagactatgtggcaagattcaatgctgaaaaagtttccatcacaacatgcaacgtggacacaaccattactgccttccgtaaaggcatgctgatagaatctgacctttacaaagaattaacaaaatatccatgtaggacaatggaggacgtgcttgccaaagcttgggcgcagatcaagtgggaggaagacgaagacatcgaaaacatcctactctttctctcgcgacagtagaataccgaagagggtagagcgacgacagtattaccattattcagaaccttatccaactaaaaatcactgtcatatagagatagcgagaactccacccaatcacacagaccaatggattacattgccaagacaacactacctcgacggatgagggaatcagacaacggaccaattcctgaataaaacctgaacatcagccctgtcgaagtggccagaaaagattaaaaaatgagcagtaatgcgctagatgaaaaagtggtgtgaatttcataatgaccatggacataccactccagagtgcataacattaaggtatgaagtggctggactcttacgcaaggatcaattgcgagattttttatctgacaagggaaagatgaccgtgacggaagcagacaagaggcccaaaacaccacccgagctgtaatgatcgctttagtaatttgaattagtaaagacaattaacactaatatctgttatttttataattatttatgaatttaattatttgtggaccccattattattattgagtatta

SEQ ID NO: 241999 - DNA, 584 bp, Cannabis indica
gtccttaagagtgtttttaatatcaaaaagtatggaattttattgatttgttgcaactgtggtttatgcagtgttgttttaatacctactttcacaggcagggaaaactctaagcccaagaagatggaatgttgctttctctgaagatggtcatctcgatatagccaaagttcttagaaggatccaaagaggggtaccctttttctgaactagcttgtaccagtcatcttgttgtgtcttaagaatcggtacaatcctaaattgtttaacatgactttctatgccagggcgttcatccttcgattaaaggagcggtatgagaattcttgttaggttgttatgatccaaataacacctttgaagagcaaaatatccttagacagcgacagaggtaaggtatttgtttaactgtattttgatcttaaaatatgctccaaacatctgaaggggcttctttgttatcatccaagatagtgttcaagtgggggggttgggttcatgttgtatctgatattatgctgcaatatttcgggtgtagaaagagatcgctacgctttgatggctaaatgcttgctttacttgca

SEQ ID NO: 242000 - DNA, 1168 bp, Cannabis indica
tatataaaaaaaaaaagactaaacaacaaatactagttgtttgttgatgttataaatatatagcttagttaggttacatgaaattattgcccgaaaaaagtacttaggtatgaaagcttacatagtttggtatattaacaacacgaaaaaaataatatatatttttcggtctaagacttttgttgttcccgaccaatactttaacttgcatatcaagttccaaaaaaaaagaggacacaaattattactacagccgatttgtgttgattgaagcaccacaaacactcacataaccttagcaaaactgaagacataaacacctatatcaataatacagaaaatttttcggtctaatagaagtgaagaagatatacgtattaatatagtgagtgtccaaaaaagccaaacttaattatgccatggccagctgctatccaaatataattaagggaattggcagttgacttgactggatcgataaagttcaacgaatgcgtgcattttatgcatggctggcttgaaattaatttttgacataccaaaaacaaagagagtagaaacctgatcatcaataataatggcgaaaatcccccaggccagctgattaagtaagattttatatgaagggcagggcaatgagatgagtattatttctgacttatgatgtgatagctgtactgcatgattgatgatattatcattattacctcatactcatatcattattacactataattattttgtaaatcatcaggttttctcgtaaattgttttctcctgaactggctactgcatgcttacatatttttcttgaggggcgtgtgtgcatctgatccgacctagtttggtgaatggattaaatcaaaaggtatatatcactatcattattgataggtaaaatacacaatcctaccataatagccccttatatatgcgcaataatatatacatatacagtgctgtaaattcgtgtgtagcgcatattttattttaagactttttcatttttaaattttaaaataattttttttgtatttttatggaattaggtatagaaactcctattacaactagcgctggaacctaaattgcaataaaaaattgtacagaaacccctattgcaactagcgctgcaagcactttagaaactcaaatcgtaaatttgaa

SEQ ID NO: 242001 - DNA, 1277 bp, Cannabis indica
attttaattaaataatttttcttgaaagcaaaaaccggtcactagtaagttaataggacacgacgacaccactaacaaatcaattattgtttatttactaagttatgttaatgtcgaacacgtccataaggattaaagaaatctaattacagttatgtcttataaaaatatggaccatttaaaattaaatatgagtaaaaattggagagaagagaaaggccacaccttgttttttagtgtcttttttttaagtgtttttccatacacaagacatagaataatgccaaatggattggtggcttccttaaattgccgacaaaagaaatgatgtttctctttctctcttctcttgtaaataaatatattgtgagatttaattgaatttatttatttccaacacattacaatcttcctatttattattcattgcacatgtcacgtgatatgtgaattccttttatgctacatcacttcctagttatttgtttgagtaatttatagggtaaatagttaaatttaatttttgatattaataattaataatatttaagttttatttgtaaaacttatctaatcattaagtgtgaagttattatttgtgtgttattttattattggtatatttaaattaatttttaaataaaaataaaattttaatgatacagatcaatcaagaattgtcatatagacattgacttgatacttaacgactaagtatttatcgaagttctaaaaatataattttatcattattaccgtcaaaaattaaatttaaatatttatcttcaacgagtgttaaacttaagtatttagagcatatccaataattaaattttgtagaatgctacctgattgaattaatctagcatattcaatgacaaattgatttgaatcaaaatatgacaagcatcgtagagaatggacttttagccaacaagctaattatttgaccaaaaaatatataaagtcaaattatgagtcactacaaacaaaataacttatataaaactaaattaccacaaaaataacttaagaccatataataaagccatctgacctaaaacaaacaatttgagcgaaactaccttaaaagataaagggaagataaatgaagtggattaaaatgagatttcattggttttatggtactaaattaggtacgcaacataataaaaattaatagattatcatcgtatcacatccttaagatcaccatatgtatggtttaatgtaaatatgaggtaaaatatagaaagttggattttgatgaggtattt

SEQ ID NO: 242002 - DNA, 552 bp, Cannabis indica
agggcacaaaacccaacaccagaaacctgaaactgtcacgaatcgcaaagctaaaatttatgggaaacctgttgcagaaacgagttactcggttttctacagaaaacccaaaaatttacaaagcttcaccaaatcgattccaaacttaaccaaaccttccagacctgcatgttatacccatataaacataacccaagcaatagaacaacataacatcctcaaaatcaaatttcaccattagagaccaaagtttgagttctaaaactcaaaccttgtctaaacaccaaattaacccatcaattaacctcaaatcagctcaaacaaccataaaaaatctttataatacaaaatccaactactcaaacaactcagaacccaacatctcaaaagtcatgcaagagaagctatctaaactaaagaaaccatagaaaatgaactaggaagcttacccaagcttgaaacctcaaccatgatgctaaataatctctgaattgctaaagaaaatccatggttccttgctagtttctagggttcacgagagagagagagaga

SEQ ID NO: 242003 - DNA, 1960 bp, Cannabis indica
gaggttgagtatcctctcaaacgcgcttccagtcggttccattttgaccgctagattttgtattgataaccccatgtgccttatatgtggaagcgagaatgaaactatggagcattcttttccttcggtgtaattcagcttatcacttatggcggtcctccccggtggggtatttttcctcttttagactcgagtatccgtatgtgggatagggttaagttcatttagagtctaaaagataggggcattgaagtggaggaggcgtttctatatgcctctattgtggtggacactatctgttgggcgcgaaatgataagatacataatgataatctggataacattaaacataatattgactctatttttttttgttacacagaatatagagatgttatcattccaactcatactcccacccgaatggatgcttggtgtcatcccccgcttaactggctcaaactgaattgtgatgttagagtggggatggctgttgttgctagaaatcataaggggatggtttgttgggcagttacgccacgacttgattttatttatgctctttgcggtgaggcagttgcttattgtttggctttggagaaggcgacagagaaggagtgcaattttgttattgttgaaagtgactctcgtattgtaatcaactctcttactagagtggagtccatatgggaaattgtaaattactcaagtcactatttaagtacttcttattaatttgcgagttgtgtttttcttaatatttttcgatcttgtaattttgtagcccatattgtggctaagtggactttgatccacaatcaatatggctattttgatgttagcgacataccttcgaacttactttgtaatgacctagaggtctaatgttattgtttaatattaacacattctcctaaaaaaaaagtgattgctatacaagccttttttttacatcaaagacttaattggcaaactaacaataatgtttgacactaatattttctaaatacatttttacagctatgacatatatgtaaaattcgaagataatataaaaaatttgaatttttggcggctaaaccttctcaactatcatttcacttttatttaaccctctaagctcaaattttgacgattaaaccttctaaattacgaaactagtagcaaatttaaggtgttatccgattaactaccacaatagactgcttatgtgcatactcttgtacacgtggtatgtttatattagtatactgaatattattatttaaaaattattttcaaaatttatttaaaattaaataaaattataaaaatagaaaaaaaaatattataaaatttgaaatattttttaaataataataatattaggtgtattaatataaacgtatcatgtgtataagagtgtacacataattagtctatgttggcagttaactgtaagaagtggatgacaccttaaatttataaacagttaagtagtttgaaggattttagcataaaaatttaaacttacagggttaaatgcaagtagagtgatagttaagaggatttagccgcaaaaaactcaaaaaacttagacgctattatgttcagagacatgagggagaaaatattctcccattctacaattcagtcagtaaaatatttcataaaaatgcaattttatgtattgtatttgttacatattctatattataatataggttttcaaaaaatatttaaaattatttctgtaagaatatcgccaatttgttcaaaatgtcataaaaaaattattagtaaaaaatgaacaatttaattatatgcgaatctaaaaaaataaagagtgatacaaatcttacactatgctcttcactgtctcaaaacattagaagaatcagttaataacaaccattttctctcaaattttcaaaactttaaacattattttcttttaatttttaaaaatttataattagtt

SEQ ID NO: 242004 - DNA, 971 bp, Cannabis indica
taaaagtaattgaattcaattcgtatcattccctgaatgatgaacaattaggaatggaaattaaggccattttcgagggtcgggccaggcccccggcccgacgggtcgactttaacccaaagtattagggcttttatcgggctctcagcccggcccggcccggtatatattatttcgggtccggcccggcccgatttcaaatattaaaaaaaaacctaaattcctaatacaaacctaaatcgtaaatctgtaaatcgtaaatccctaaatctgaggacggacgagtcaactcgacgacggaatcacagagcctcagccctgccttgctcagtcaacgccagaggcggaaccacatctttgtcttcttcgatttcgttaccgtctttaggggctcacaccagaaaagccaaacaaaacaattgcgatttgggtttttgccaaacaaagccaaaaccttcaggtgcgtttttttggtacatatttctcttgtcttgtatgtgtttaactaatggatttttcgtttctttgaattgggttcactctttcgaatctggttttcttccaatatttttttatttctcaaatttctgtgtctcatcttcttgtggctttgttattatcgtaaggtggtacttctagttctagccttaataattctactactgtgttgtctatgagttccagttataatgaccagatacctattgggaaacggaaaagactccattgaaatcattttaatcttggttcttcttgtaaaaatggaaaaagaaaaccagatctctcaggttgatgttgatgtaaatgggatacttttattcttatggttttgatctttaaatggcgtagcattaagtctttagtagtttatatgtcgtttgagtcatttgtaaatcatattgtttgtcaaatttgttaatgtaaagcccgcttagtttaatttggaaattatcagttaattatgattaatt

SEQ ID NO: 242005 - DNA, 2272 bp, Cannabis indica
ttttcaccacacaccctctcttaactcatactaaacacatattaccctttttatatacaacacttaaccctaaggggttatattaggcttattggggtaatgagtataattaatggtggactataatttaatgggccaattatagttttagggtgctcccatgtgcctctaatacatttattaattattaaccatcccattatggtagtgaataaatattgggcacatagttaatgattgtgattatggtattatattagtccacaaataaataattctaacatcctttacttggtcctctgttatgactatgactttgactccttcctttgccatgccatggctttctttgtgtaggtctacctctctttaggttcagttccccatcagagccaccattcttttctgttttcatctccaagtcttttgactttaaagcagatataacctcatcaagagtgatgaaggttctcccatattttattgatgttttaacttccctgtaagtcaccggtagtgaattcagtatgatgatggcttgatttttatcactaagtgcctcattctcccctgagtttgcaagttcaatatgcatccttaagaactcatcaagatttcgatctaaagttttagattggttcattttgaaaccaaaaatcctttccttaagatagattttatttgttaaagacttctattgaaattgttcctccaatttcttccatatctttgatggtgtctcttctttatctactattctgattattgcatctaatagattgaatattaacattccagtagtagtttctagatattcttcctactgaatctttgtagttccttctggccattcaataggctcttctagtacccttagcaacttttgttgagcgatctgattttcctcctccagatcatgtaatcaccagtgccatcaaatttatcaatatcaacttttatgttacttatattaataaaattgagatcaagtagagttttagaattctcagtttgtgatgtctccacagcctcttctagatcaaatttgatctagaattattctcctccttctcaagatcaaggtcaaattttgagctttgattttcttctaattttgagtgtgttcttgattcttgataattcgtctttcaagatttcttgcccaatttaatcctccatgataatttcttcttggtttctattgatcttcttagacaaatcaggttctgataccactgtacgaattttacttgtttaaccctacaccaacaaaaacctaattatcagtatgtaaggtcagttttgacctttctctttgtctaaatgaactttagattaaccggcaacaacaagaacaatacgaccacaaaacttgtgtcgtttaatccttagactcaaagacctttcaagaagagtctcgaagccctaaaacacaaaaatacaacacacacaaaccctaagctcagatcttcaaaaccctaccaaagcaagttcttgagaagaacttgctcgatcctatgttagaaaccctaggatctttaaccacacacacacatacacaaagatgaagaaaataaaaataaagtgagaaaaggagagaaaataccagaaaattattttagagttcaccccaaaaattagggctacatctctgtcaagctcatctcagagatttggcttgagatccactatcaacaatggtgatgaccgcttgtggagcttcctgtcacaagattcaatcatgtaagactcaatctcttctcttttacagttttcttttcctctatacttctagatgcaactctatatttcttctttgtgcatgtactcttctcttcaaatcctcaccacgagagctttactctttacttggaccttctctctcaggatcttggagctgaagtttggaaccagggttattcctctctttttctttatagttgtacttttcttttgattttgtaacttattgatagagtagtacatgtagttgatggagttggaaattagttaccattcagttgtaactaacttttggttatggtcttgtagaggcaaagtcacttaagttaaatcttgttttttgttgttttaatgttgtacgctaatgtggatatcaaactgagcattggttataagtgaaatttacttaatagttattaatccaatttaatacaatctcatcattctttgcatctataatataatctaattaaataaatgtaataaatataatatagtttaggagttattttatttttacatttcaaaa

SEQ ID NO: 242006 - DNA, 6404 bp, Cannabis indica
gtgtgtgtgtgtgtgtgtttttgggtgctaaagaagcctgccatattttggccttcaagattattcaccagcacccaaagaagaaagaaaatacacatgaaatataaagaaaacaagatagagtagcacttttggcataattatcaggaaaaaaaaacagtaacaataacataacatgtgtaaaataactatttatgtagactggaaggaggtatggtgactaatgctgataaagctatatagttgtgtaaagcatcaagccacattttgttttaaaacaacctagagcaataaatttcatctggcttctatcatcatattctttcagtgaatcacatacaggtttgttgtaccaacctattcataatagatttaaaagattcttataccgtactcaccatattgataaaagaagtcttgcctgcaccgttggggccaagcataccaaaacactcgccacggggcaaagcaagtgataaccctctcacagcaaatttttcaggatttccatcccttcctggatacaccttcttgaggttgtcacaaataatggactgacttgaatctgattctagtagcaactgttcaaccctctctcgctgaaaatgaattcaaagcacggttatctagaatatagggaaaaaaaaaacatgaaatagattccctgaaaaacatatatatctttgcatgtcgcatggtgactgcacataatggtagattgtgtcccaccaagaagtttcacatgatattctgtaatagctagtactaaaagatacttatagtttaaatgaacaagttctggttggattaggaaaatcatgatttgaaattaattaataatgtagcctatccatctaaatgatatatctagaactcctaaccatccattttgatcatggcatagattttctctaaggtgaacaagaactacaatcataagttatgattgagtggaaaataaagaaccgaaaaatctttacctcttgaaggacatcaggtctttccatatcaacaaaaactttggacccctgcttttgtaaactaggacttttaagagatgagccctttttcttcccaaggcttttcaagaaaaataaaggactttttcttcttcctgatgacataatttggtccacgtaatatgcaacaaatagcaccagaaaccattctataatcattataataaatacttctgtcagtccatttttgctgtcacttaaatctccccagcgcatgccatcagtccccaagtagtttccattgaaagcgtattgtgcaaactcatataaaccacgatacaaagcaaaacctggatacaactccataacaataacccagccccctgcaacaaccaataaaaagaatatcattgacatgagctaagctacttttctttctatatataagttagggaaaagaaaatcgaaaataatagcaacaaccaaacgaaaagcaaaataaaaaaattaaataaaagaagaaaaactgaatcttcacaaatatgtatctctcacgatagcctgctggacttgcatgttataatatgaagtgcaaccttgtgaatgcattccataatatatctgacatgctaagcatgagataaaagaatcatacatacttaaattatcatggtggaatgatgaaaagcttcaaattggtcaaaattgcaatcccattcctacatcaccaaagtcttctataataaaagaacatttcttgaatcctgtaaacttttcactctttagtgaatataactacaaggaaggtctatctcattggaaatttaaccttcacaaattttatagccatgtaaataaatgtttccatagttttagcacaggatttatctctatgagacaatcttctgaagtgaccacatatcaattatcattcctgaaacaccacttattccacagtttctaaaacatgctcattcattagaaaatcaaacacaacccatcagacaaacatgtttttgtatggaaagtaatggaaacttttacttaagcctaaaacaaatcagatcaggttccctctgccataagttgtaatccagcctttcctgacaattaatttggtcaagaagcaagtccaagttgaagaggaactgtgatcaagttggtcaaacaatcgaataaccttcattttaaacttatgctcaagtccaaacataagaaaagcattcattgaagtttacacttccaacatgaatatctgttttgagttataaaaaaggaaaacaaagtacagtaatacatacttatttactcaaattccttcacttacttgggaatgatgcatcttccacaaaaaactgaaaaagaaagcctcccaggagtcccgttgcaaagacacatatgtaacctataactgtatcatcaattcagtgatagcatgcttgttagttaactcttcttctgtatttaaatttattgttttacagtggataaagtaaatagctaagatcaaacctgaagcagtcttcacattagaaaacattgcagctgctagaaaagccagtgcaatttgcaaattgataaagatgaaataaaaaacaaattgaatgctgtaatcatttagtgtgaagaactttaatcctgcaaggaaggtaacttcatgtaaggcaactgaaagaaacatttgttctagtgatcagaatgaagtggttaacatattacctactgcagagccaaataccacaaaacacagcatgtagactatcgatacggctaagaagtaagcatatgaaatcatccaataaggcccatcaccaaggccatgcattttcatcatgattctcagtttttgttgcttctcataaaccagtgctgtcaacacaacctattccaaaagaacatactgaggattaagataaaaatataataattataaaatatataaatatatattaaaactagtaccatcatgtattgcaatacactaagaattaaattgttagaaaatcattgataaccttaactttccaagaaaatcattagagcaaaatcaggcaagttcttcgaggtaaggtttacattcaaatatcctagtacaattatattgttgaaactggatttgaattgatgaccatcagtaaatcccaagaaatctcacatcaaataaagttatctcaaaagaaaaatcaggttatttgaaatgagatagacaagttccatttccttatcatcactgccttcgttaacatatagatcatattaataatgcattgttgcataaacaatgaaagaaaatccactaagtcttaaaacttggaacaaaatatttggatgaataatcaaatacttacaggaaatagctgtatgatgacccacgtaaagaagagtgtaccaagaagagatgaaaagtccaatctaagtcggctttcatgtttgggcatttctttgacaaaatcaaattgaattttcgtaccaggccctcgtagaaattgcaggtaggcattggatgcctgttaatatatgaattaagaatattactgatattaaaaacactattcaatactgataatattgaaacaagaagacactataaaaattccacaaattagaacaagaaaacaatatcactgtgaaatttgtgactacataccatattcactgagcgtgggacccgtaacaatccaataggaacattgcctgaatcgttcttatatgtagaattgtaccatatggtcacgttaaagttgttctcatttgagttcaagaaatcataggctgtgagaatacactgtcaatattcaatactaaaattcacaatatgattctgtatacaaccagctaaagttaagacacatcaaggagattaacctgctacaatctcattaatcttcctctctgaatttcccttcctgtaacctttatatagctcatcattgatctcagaagaggtattgcgccacaattgcaaaccttgaacacatttaatctctggaattcgcagggtaattgagttcatagcaatttagcacagaaataaaagaaaaaaattacacattttaaacagattaatatccatttgaagtgtagtatcaatttataagattatcaatgtttacaccaaatgaatttcaattaatgtcttagactacaaacaatgaagatgagacatgcaaaatgtcagattcacaagatttgatcaagcaataaatagattagtcatcaacataagatagctacatgaaaagatattaaaagtgtgtggttgtacaaaccaaaccatagctggaaaaaatctactattcaccctttttttttttgtgataaagtgattggaatctctcaagaattcacaatgaagacatcaacaatcggtgcgggaactcttcaaatcaggatagctcatcgtctaaccgaagggcatgctttgcctaaccatgagctacagagttattttcacgagccctatttggtttaccccataaaggttgtaatatatgaacattgagcaagtcttatcttatgttctgttgcactacacgggatattcttatggtaattttggcacattaataggttaaaacattaatttattattctttctttcttaaataattaataataactatatagcctgaaagcaatttagaaactagtacacatcaaggaaactggtttccatacataatatcaccttcttgttttatttttctctgcattaggtagtttccacccctacctctgtgtgtcacttatttaaaattcacaactcatgcagcataaatggggaccaaactgcaatacaacaaaatcacgaataaaagggtaacagtatctttaccttgttctttcccaaaggacgttatttgaacatcagcataaaaagtagagttcggtgtgcactgacgttgcaaattatatatgggtaagcctgaataaaatgcaggatcaaggaaattggtgaattggggcattgattcagaaccctgcatagagaggaacagagagacatgttaaagcagacagagttatcaatatcataaagataacttacataagcaaggaatttgctagataatgatactgcttataaaaattttgtataaagaagacttgaatacaaagagaacaatatgtcttacgccaacaatattggctaagctatccagggaacgtgaggaatttaaacttgcagaacttgtgaacatactcccagccaaagctaccatagagcacaagataatgttgattttcaaagaaatattaatctcaaattcttcagaaacataatacattaaaaggcatgaaagataaaatcttactttgtccaagagattgattattgccagtaaaaagtagagtaacaggacaggaaccagtccttctgcatgactcatttggcaaatcagaaaatggaataacattagatgccacagcacgatattcaggagccggaacttgcaacaatggaggccattgtggcgggttaggaatgggacaccaggccccttgatccaaagacgagtgttccaaagagcaaacttcctcgcatcgaccatctccatttgtatcaatacaagcacagccacatttgttttcaggtttatcaagttcatgattgaccaaattttggatgagcacaagcaaaaggcagagaataaaaggaaacgaaatcaaccgaatatttgtcctgacatttcttttctacaaaacgaacaaaagatattgtcatcacgtatttgttttgatactatttttaatgattcagaactacagaatgcttgtaattttcaaaccagatcctacagttctaacaaccaagtaagacattcgttataaaaatatagatttaatttcttgtcacagtaaaaagactcaactttcacatttctcttcatccctagttgtctttcattttgtaaaaagaaaagttcgtaaaactatataagctagaaataataactaaaatgtgtcagagatattaaatggcaaattaaatccatgcgttctgttgaaccatatcttaatataaaggataatcacaacaccttgaattaaacaaatattaacacattcctacaatatagtccaaaatcatctgacaaacttaaagaaaaaaatcaatgaataaaacaaatgtaaaggctaaaaattagaagaagtgggagtacctttaccaaattgattatttctaataaagcttacacatgcatcaaaatgtaaaatgaagagaaaaaaaaaaaggaaatacaagtatataatctggaacttagttcttgtgtgtattgtatatacatcgatattaaacttatagagagagagagacctgaaaagttaggttctttcgcagtagagcatcggcttgagtccaaaagctagcagggccatgagatgtttccgccattgaaaattgaaagagctcaaaacaaaatcgtgatagttaaattcaaa

SEQ ID NO: 242007 - DNA, 2192 bp, Cannabis indica
tactgtgtttaagtttgggataattatatgtcttggggtgatgaagtgtttgatgacatagagatacttctctccaaatataatctaatttatggtatttctaggaaatttgaattttaatgattttaattactcgtagtacaaaaaaaatacttggaacagtgttctgttgttgattggagagataatttgtagcttcaaaatttatccggtattttaataggagaagcaaaattggcaatggttaattgaatagttaccaattaattacgtgtttagagaagttttgaaccaagatggacaatacttcattgaactaataacctgtttagagaagtttagaacaattacggtttattcatttgcatctcttcagcattcctgttagaatttgacatgcgggttaacctgagaaacccaatgcagcggttcaataagaagagataaaaagtgaagcttttgtgtgatcatatgcgtctgtaaaaaccccttttgatgttggggcttaggttgctagattagtaaaccataattgagattaaatcataaaagattgtttattcaaatcatagagagcgaatttgttgccattttcaaatttggtggtaagtgatgataatttccaagatgaaagacattaatattgtgaaacataaaatgttaattgcatgcgtgtttatatgattattcattcctgtgtaatccatattccaattcatttctttatctgaggccttttggatttccttatgttcatgttttacttcactcttcttccctttcttctgtatactgatttgattgtttggctcctaagaaaaggttgggcctagaaatttgattaaacatggtaggcatcaagaacttgacagatagatggcagcgattctgttttatttctggataatgaattgacattgctttattatatttttaaaagcattgaggaagattaaatttcagttcaaacatgaccatgtataattcttagtaatatataaatttatatatatatatttatatcttttcttaattgacttagattgagaattgtttatgagaagaacaaactttgtgtgttaccaaaatctagtgcctatttagagcctttagctcagttttgtgatgttgcaggagcagaattatggcaatgaatcatgctaggttgtttaggagtcgaatagttggcaatgacgaagtgagttcagttttccggcgaacgtttgcagcaggagccaaaaagaagggagccaaaggtggtgcggctggagatgcgccaaaagcatccattcttagtaaagaagtgaaatcttcaactgtagttggggcaaatattctcaaagaaggagctgatccaaaagtattggcagattctgaatatccggattggctattccatctgattgataagcgccctgctttgagtgaattgcgcaggaggaatgttgaaactctcccttacgaagatctcaaacgttttgtgaagctggacaaccgagcaaggatcaaggaaaacaactctattaaggccaagaactgattcaccttttttttagtaataatagaacgaactatcagagctaaagttaagtataaatatcagtacgataagtctgctggtaaattcattgtatgaatcctatagtttggctgtttagtggggcgttactataaaataacacaatttcttgtgaagttattctgggaatttcttttcgacttccaatgccaggatgcttgttcatagaatgggcagaatacatgaagttccctgtattgtagcttaaatttattactctagagagaaacatttgtttttctccatgttggtttactagtgcagattttaacttgctggacatggtttttgatagtttttttggagataaaaagtcagttttctgagtgaatctttagaaatattacgattgttaataaaaataagattttttttacatcaacattctgttagcattggaaggaataggcactcacaccagcttcccaactcatggaaacaaaccattcgtcacctgaggttgcataaaagttgccaaaaaaaattaagatattgttataaatattaataattatgtggatgtctaaattttttatttattaccattaattgtaattaacattcctctttttctttccctttttcttagtttcttaatatctcactcttgtat

SEQ ID NO: 242008 - DNA, 1307 bp, Cannabis indica
attcctagatcaatctcagcctacagatcaaataactccctcatttaacggctgtcgtacatcacgaaacacattccgtgaaagtacaattacggaacaaaatcatgtccctatatatatatggaaaacccatttatttacaatgttcaagccatacaattaaatttaaaaaaatatctatataagttattctttcttctcatattgttaacataatattattattattattattattgtaatgtacatgtacattatataaatttttagagacaattcaacccaatggcttaattcatgtatatgttatgatgttaaaaatttaaaaaaaatatagctatttgggtgttgtgtggcgtttgcttgttgattaataaaaatcattttctttgataaaaacagttctttgattcaataattatatatattaatctaacgaataccttactataaatatgagactgcactcttgatataataataaaacattcattgatctaatcattacatacatgttaaccctctattaatgattcataattagagagaataaaagttaattattattttacccttttagttatttcttgttccaaaagtaccattgactttactaataaaaattgtatcatagattccatatctgctaagttatgttcccaaccatatatactacaaagtctccaaaataatttttcgatcaacttgacaaaccctaacacacgaatcaaaggattgtgtagcatatataaaaattcatagtaatctcaagcttaaaactatcgtgtatatatgatcatttaataatacatttaaatgatgttcaacaattattatcttttttccaattttacatattttctagtatgtataatactttcactaaagtgtcctactacactagtgacttggatctaagtcacatgtattcataatactagtggactatagtagtaagtaatctgaagagagtccatataacttcattttattacagacgatcttccaattgcaatgatattgagaactacatagatgaacttgaattttttttttgatatttacttaatgttatcttcataatatcaacatatatatatttaatatcattcaattatttattttatttaaagctttgaaaaactatccataaaaatctctaaaattattttcctaaatttatacctattaaaattgcccatatatgactccatttgatttttctccataatacccctcccatttgaaaaacaaaatcaaaaatcaatctctctccctctcggtgaccacgcaacaccacgccgccc

SEQ ID NO: 242009 - DNA, 843 bp, Cannabis indica
tttttaggctaatttgaatttttactccctgaactttgacatgtaccaaatcatgccccctaaacttttcaggtcgttaacaatttcccccgaactactgagattgttagattcccaagttgacattctaactagggttttggtttatgggtctgtcttagagcaaatggctcaaacatttgtactaagacaaattagacatgtcacaaacatatttgagcaaacaaaatcaaaatcggagcactttcagttttaagcactcgaggccccaggttccttaggcacccaatgcctaagttaacatattttcaacctggggcgcttccaacaataacgtcgaagaagtatttcgatctttttcttcgtcttcatcttaaacgaggaaataagtgcttttggaggaaaaatagatcgacttggaggctaaaatagggacctagcgcccagattgaactaggcactaggccgagcgcccaggttggcactttgtcaacctgggcgacttcaatcagcattttagataaagtcttgaatcagcattaatgtagcccaagtgagagaatgttaaacttttatttgggcttactttgacttttattattttattaaaatttaggttgtatttaatagttctttgcctgtgttagctcatattgttggtgatcaatagttgatgggcttaacatatgtgtgtgtaaagtctacgtgaagcagaagtgtgggtttttctagttaactgaaacctttgatgagcaggcccaatccaagtagggttatgtagataagtctcctccctaactctatatatacatattgtctcatcacaattgtatatttttgata

SEQ ID NO: 242010 - DNA, 737 bp, Cannabis indica
attaatattaattatgatttgattgaaatttgccaatttttgctgttttctatattttaatttgattctctaaaaatcatctagcggcatcagatgttatcgacattctttctaaaaaaagttgaagaactttagttctttggtggaggatttggtatcgtctcgtaacacttttgtgcatgataataagttgatctccgttaatatggtgagaaattgggctcttaactacttgaaatgctatcaagaagctcaacatcattccatttcgctggccccacaagttcttctctgaacaattttagccaaagagatggcaactattgatctgaatttgagtacttttttgatttgtttgtggatattggtaccagtattgagccagaactaaatagttgggggggccaatatcggacaacgcagtatacaacaaatttaaattttggtgactaaaatatcttttaaggatgtatgtcaattgtggaaaatattatgatttttaaattttataaatattttatacaatattttaaaaaataatcaaataattaaattaaaaataaaatacgagtgatactttaaaatttgacggagttcaatttaatattaccaaaattaataatgatatgtagtttcttcagaaaaaaaaaatcatattgattttaagaataatataattggttaattttattactattaattaaacaatttattaaatatatttttaaaattaatac

SEQ ID NO: 242011 - DNA, 817 bp, Cannabis indica
attttactaataaaaaatttcatgatgacttattttacaaaacacacagtcggatagccaatatttaatagagtaaatgtctgttgttgttttgattttctgcagaaagttgcagctagttgtgtgtggcttgctgcaaaactggaggagtgcccaagaaaagccagacaggttataattgttttccacagaatggaatgtaggagggagaatttacccatagagcatttggaccctttttctaaggtaagaagcttatacagttagtttactggttttattttactggaaattatgaaaaaaagttattgtttctatggtcttcaagggtgaatatatgcatatcaatatatactttatgtcctccctgtaaagttgtttcacttttttttgccagaaatactccgatttaaagatggagctgagtagaacagaaagacatatcttgaaagagatgggcttcatttgccatgttgaacatcctcataagttcatatcaaattacctagctacgcttgaaacacctccagagttgacacaagaagcatggaatctggcaaatgacaggtatgcaaaaagttttctgtagatgtaaatatttgataggaataatatttaatgattggatatgaggtttctgaatatgaagtattttaaattttgttattgataacattagatctaacactcaggcctttgctgtgcttttgtccttctgtctatttatttttgttttattttgatgctcctatggtttgtggcgttttactattacactctctatcatgacaatagctcatctcactttttaatggca

SEQ ID NO: 242012 - DNA, 786 bp, Cannabis indica
ttatatgttgatttaacagagaataggtcggttctttccttagaccaaaaccacgatcgttggccattttcactagtcagtacatgccaaatcaactccttatctcggtcagagagaacatctgttaacgcaaattttctttaacactcagagtaacgatttcacaaagaaaaaataaaagctataaaaataaaagtatgaacacacaaggttttttacgtggatttgtagttaaaattctgcatagtctacgagtcaatcttattcagatttttgattgtttttcagggcctcctttgtatgagtttttttgtcccccttttcatcttgcttgccacgatttataataatatattgagcagttaatcacaaagtttactgtaatctttacagcaattattccctcaaatcatgggatttgattacatatcacgtagtgtaaatgtggttataatttgaaaatcatatagctgtgagtttcccgctttttttgggtaaaaaatgatcgtgttttaaacatgtctataattaatgtatttggagatgtgtccatagaagcttagttccagtgatctccatagcgtgttggggccatttttccttccaaggacaacgttgcatgtctcttgacgattatagttcttatttactaagagttgttcgaagctcatttgaatgttagcttcgctgacgtaactggatgaagttatagaaagtcttcccatagtgagacggtcacctcgcttatttggcttcgagctgatccgattgttacacttagtttgt

SEQ ID NO: 242013 - DNA, 733 bp, Cannabis indica
aatatccataattttattattttatcatttaaagttaaaataaaaaaaaaaaaaaaaaggaagatcatggggattacaatatataatgtaatggtcattacattgtaaagtcatgacaatacttaaggtaattaatattaaattatgagtataataaaacttctcttatatatgactaaatattagtattttaaagtatccagatttaaaggaaactagaaatctgtcaaatatggggttcctggtgcatgatcaccagtaactatgtctaatatacatgacttcaggggaattatattcaacatccactactccatctcaaggttcaacatcaaatattgatcgagcttggatgatctcatcatcagattcctattaaaatggcaaccataagttaacattcaagaaagcaataaaaaaactgaaaaaaaacagacatacacaactacaacgcttacatttccacccagatcttcaagccgttctagaaatgcattgtattcttcctcaatttcccaatcagggttctgatctttgccttcagtttgattcagtattggctattgaggtggctcagatatgtgttctgcatttgtctctgcatcaaaagatgatgttgatgaaatttcaattggttcttgaatttcatctgacaaaacctcatcactgcacctgtaaagcccgcttagttaatttggaaattagcagtgtttatgattaattatgaaaatta

SEQ ID NO: 242014 - DNA, 2356 bp, Cannabis indica
aaaaaagttaaaaataccgcctgacagtatttttgtaaaaaaataacaaaaattagtataccatgtaaattatttctctacctttctctctctttcgaaaaatgttaattaaatatttctaaagtcacttttcacaaaattatcagtcgaatggaaatttagatttttttcaaatatggtaagtcaagatatttcctaaatctattatatttcttaaatctattcctaagcgttggcatccatttttatatgaaaaagttcgaggacacttcttcctcttgtcaattctctgtcttttctcacctaattaattaagggacagattttttttatttgacactgatggagaaatccattaacatacaataattggactaaacaagaacttgaattggttggtagttgattttaaaaaatggactgaagctgaaccattagccactataacttctaagaaggtcttagattttgttgttaaaaacattatttatcgatacaatctcccataaaaaattatatcagacaatggtaagcaatttgatagcgatatgttcactgacttttataatcgacatgatattattaaaagcttctccgcagttgctcacccacaagaaaataggcaagtgaaagctataaataaaatcctcaaagacacactaaaaaagtatcttgaagaagcaaagaaaaactggcccgaacaaattccagaagtactttggtcttataggaccatcgagaggacagccaccaggcagaagatacctttttccattagcttatgactatgaagtaatgctgcccgtcgaattagaaccaccgtctcacagaaggatatcctatgaccaagaagtacgtaaaccacaccgtgctaatagaatcccttgacgaaatcgaaggaaaaagagattagaccaacttgaagttacaagcctacaaacacaagatagccagatactttaacaagttatcaaggatagaaatttttttatggaagatatggtacttctaagagtatttcttaacaccaaagatcctgtagtaggagtacttggcccaaactgcgaaggaccgtaccaagttacagatatcacaagtttaggtgcgtataaacttggttagtagattaagaaaacggaactaattctgttaccaaaatattggaacggagaacatctcagaaagtactactagtaagcctttttttgaaaaaacgctgctcttaaatagtggttcttgggcggtatgccgtctaggaattcgataacttcttgtaacacatcactcttaagtgatggcttctacacggtatgtcgtgcagaagtgattcaatattgatgatctaaaatcaatctttcaacatttaagcttttatttaatatatttatgtttccagcgacacacatttgtaagactaataaatgaataaaagtgatttttttcactcaaattgtgtcaaataacttactaataattgactcattaaaattaatattatgtctaaacatgcatggaaataggttcgctcaggaaactggatagacaggcaaagagcttggttaattgtaagtgaccaaaagaccataagtctgctcgatcacttgggaggcacctacatgtgcacaacattagacaaagacagtgaaaatacttaagataacaaatttaaagcaaagttaatggaaaaaagctaagtatgtgcaaataagtagctttgttaagcataaaaggaaataagtctggggttaaaggttgtccgaccagccatatatcttaacagagaataaagccaggtttaaaagccacctccctggctatatgtcttgaacttaatggcctttaaggatgtgcagaaaataaaagaagagcttcaaagctctggaatgtcaaaaggagtaggtgggttcaaattttcaccagtagcaaacagttgagttcaacaatgttaatatggggattgattgaaggcaatgcacgataagtttattttgtcctggccaagtttggatcctggccggtataccgtacaacagtgacaacaacctcagcttgagatggttttttcactaaggacggtctacgtccctctcgtagggtgtccaggacacctttccagacaatatatgtaaagaagttggaagaaatttcctccaaccttgatttagtttccaaatgaaccgaccatagatctctcctttgaccagtttagaattgtggtggtgttgtatttatggttcaagaaaaccactattgacttccaagtcagaataactacctgatgatatggccggagaatcactagatgatgaactacttgcccggagtatgggctaatccttgtagagaaggctgagga

SEQ ID NO: 242015 - DNA, 589 bp, Cannabis indica
tagtgaggaagatcgtgaagaaagactttcagcaaaaggagtttcagcaatatttagggtgttaataaaacacacttgtgagtagatctaagatcctggtaaactaaattccaacagatattcacaaatacaaccctagaaacaaagaggaagacttctagagcaagtgtggcaatccgaacaatttttctactagtttctttcttctccctttttaatttcttatgtcaatttctgtttttattttaattgtagatttgaacatggagattatgaactaaattcctaatatagggatatgatgaatgttggttgattttataccatgagttaatattaatgctatttcttcttttttaattgtgtatttattcatatttgtgtttaatacatgttggagattgatcaccttaggcatggtttatgatctcaatataaaatttaaaaagtgagtattgagaatgctttaattggataaatttaggttttgatgtaaaacgatagtatttgcatagcctttgtcgtgacttataaattattacttaatgcaaattgtatgttagtctgatgcaatagataacatatgatt

SEQ ID NO: 242016 - DNA, 979 bp, Cannabis indica
gtgggattggtagtcgggttcattattttcgaactagtcaattcaggtctagccattgatgaagatcctactgcaatattttgtccccccatatcagccattgaattacatgagtaggattttttctcataaaaaccagggggaatgggaggtgttctttgaggaggaggcctctgaattggcgaagcaaagatgccctttccttcttcaacttttaaccaagctccatatcccggagtgcgatttcccattccatcttcaatcattgtgattggctctgcacaaatccgagtatcatgtcccacaaaaccacatttaaaacacataaagggaagacaatcatacctgaacgggagccaaacttttcgaccttcgctcggaaataggaagcctgcgcagagtgggatattgatatcacaccacaccttgaatgtgaaaaaacccttagttacaatcttggttaaatcagccttttgaacttcaatggtgtctccagcaaaccccgccaatcgatttaagtttccttgagttattgagctagtgggtaaattaagtattcgaccacttagtggaaatttggtaaggactttatcccaattaataggcatttcagtcatcctttccacaattagaagcccattattcagaaaccaagggttcttggtcaatattttgtccaaatcttgggaagatttgaaagaaaagaccaagaaacttgcttctttaatggtgtgtttgatctccacaccccaattcctgtccgcaatgccccaaactcttccaaggatcgttctcaacagagaacgactgattggtcgattggaacaaaacctccccatcgcacataatgaagctacctcagtccctccagccatgttaatttcccagccatcttcgtctagaacagttaggttggtagttttagcaagtaggtcttccatggtagcatcagttgtatccatagttgcaggcatattca

SEQ ID NO: 242017 - DNA, 1136 bp, Cannabis indica
tggtttgatatttttaaaattaatatttatagttaaatttgtttagtaatcattcatgggtaatacccattaagaagtgttcaaatatttgacatataatatacatttaataacctacatcctcaactttatttcaatagcctttttataagtatttttcatgaatttcaagagcctattattaaaaaaaattaaccatatctacatcaaataatttatgctaataaacaaatcatgaataatttgaagttatcgacggtcgtgaagttgtcgacataaaaaaagtatgtaggtctccaaattatcaagaaatattttgatgagtgagagaaagatttagaatatatattatatatataaaataaagtagatagaatattgacaataattagtaatctactaagaaatatattataaaatatagagagaaaataaataccaataaaaaatttgaggctaatgaataaatcatagataatttgaagttattgacaatggtaaaattgcagacataaataaaaaagttttatatgttgtcaaattatcgagaaatattttgataagtgagagattacgaataaatagatcatattaacaataattagtaatctagtaaaaaaaatattataaaatataaaaaaaaaaaaaaaaagaaaaagaaaaagaaaagaaaaaccaatagaaaattgagatcttgatgtcattgctattactcattattctttaaggtactctaaattaacaaaagaaaaaagattaaaaaaaaacatatagaattaaagaaagattgtgcaactcaaaaaaaaaaaaaaaataagaaaaaaaataaaagaaaagaaagagcatgagagagggagagaatgataatacatatatataaatagattaattatatagatttaagtttaacattagatatttatttttttttaaaaaaaatatatagaatatatatatagatatttaattaattaattaatctattaatatttataaactgaaataaaaaaaataaaaaaaaaaagtgagataattaaggagagaataaataggctaatggtatttagtagattaaaaatattagaaaaataagagattaaaatgtgaataaatagaaatatttgaagaaattaaag

SEQ ID NO: 242018 - DNA, 919 bp, Cannabis indica
acaaataagaatgttgttttttaagtaaaatactatcaatttatcaaactaaaactaaaaaacgtattagatgctatgtcaagtaaacaaaaacaattttaaacaatcaaaagtctattgcacaaaccttgggctcaaggactccgtccagaaagaatgatgtaaggacaaccagtgaaaaaagaaatgccaatcccatagttgatgacagcagccagttcctttcatctgatagctcatttgttttgaagagattcatacactgatactgcggctttgctgtatattttagtaaaatcaaagttgcagtgaactctagactttgagccagaaacaatgataccgcctgcgctagaaagaagaattgagcagattccaatcatcaatagacatgttgatcgattatcaagctacagctttgtcagctaacattttacataccatcgtccattttatggaaacttaaatgataaacaaatgcctgaatgctggagaagaatgctactaaaggtgagagtcacaaacttgtaaatgataccacagagctaaaaatttgaagttaatccttacataatttacatataatatcttacaattatacaagttactagatttaagattatcctgtaagtgactaacaaaaaaaaaaaaaaaaagaattatcctgtaagtaacagtgttcatttatgtttcttagtctttgccccctctctttattgaattttggttcctcgacactctgaatcaacccactctttatataaatatatatatatatatctgagttcaacactccctcccatatgtatttaattttaagtttagttctaaatctgtatcatatagagatataaaaaggcaataaagtttctctcgataatccttcactatgtcttctctcttctaactctccttcctt

SEQ ID NO: 242019 - DNA, 339 bp, Cannabis indica
aataatttccaacaatatattcattacgacatatcgtttatcgcttataaaaaatactcaatgtcgttagctaaaagcgaaatcaacacatacattaaaaatgagttacataattgcatttaaaaatttaggtaaatctatatataatacaccccataaagaaatatttgggtagatctcctattcaagagagttaaacttgtttagaactacctttgtttagaactacctgtaaattttttaaaaaattattaatattttacaatgctaaaaatacggtttaaatattttgttgtacgtatgactcactttttttttatgtgtggtaagctatgtgaa

SEQ ID NO: 242020 - DNA, 1344 bp, Cannabis indica
ttggaatcaaagaggcctttggttggatcaaaaggaagaaagggtggcttgatgttcaacttgagacaaattacttagtggttgttcaagttgtgcatagtgtcattcacataccatctttgtttggtcaggtggttcaggagtgtaggggtttgttagattctttgaagtctgttaatttattttttgttaaatgttatgtaaacaagctaactcactgtgttactcacgactcttgtatctattcaggtcgtattttcaatgaaagctctgctcctattaatgttttatctattattatgattaaagctaattgattcataaaattgtcaattttttttctttaaaatcattaagtaaatattagttaataaaaaaaggaaacaaaatattaaatatttaaataattttttaaatataataatcccagtaaatataaatttaaaatgaaattaaggcgagtactacaaaatagtataagaataagaaaaggcaaagacagacagagagaagaaaggagaagaaaatgtcgatggtgtggttagaagccgttttgccactgggaatcattgcaggaatgctttatgtcatgggaaatgctcaatctcttaattaacaaataaaccctaaaattttatttcttcacaatcaagccatatcttagtgaaaaattcataaacaagacatagtctaattaaattctctaacttattaatccctccatgcaccactatagatttgaaattgcactatcaattatatagagcgctctatatgttccatgatatggatacgttatgaagtatccattgttataatcctaataatcaatgatcatttatagatgatctacattgagtagggacaaatttaccgttacacccttcaatgtattttgtccttaaaacacttagctacctatgaataatatttcagtgaactaatataatcactgaaatgagtactcaaccatttatctctagtaagccaagctcgaaggaaatcatcgtttcacttatatgtccagataaaagctatagattctgtatctttgattagcgctcccactcaattgaactaccatgtccttaatctatatcccacgagaagatctattggtcgattttaacgaacagattgaagaacataaataataaaactgaactagaacctaaccatctcaggattgtgagcatttgatctaagatcaactaagtgatattgaattgaataaatattacggtaagtttattgcatctgatccaagttcaatatcggtcccttccgatgcatattccatacatccaacccaagattactttaaccaatgccctggaaaagaca

SEQ ID NO: 242021 - DNA, 637 bp, Cannabis indica
aacttcagccttccttcatggaagccaaagtttgctatatagttcaaaatagttctcacaagcacgtgtgtttctactgtgcgtggaagatcactggggttcgtcttcaaccttcatttctagaggaaaggattgcttgaagtctattgaacgcccatcgtggttttcaccttcagtccatgaaagtaaaaactaattgacttgaatttaagtcgcaaacttcatccttccttcactggaagccaaacttcgactatatagttcaaaataggctcacacaagtcacgtgtgtttcagctactgcgtggaagatcagtgggggtttgatacgtcttcaaccttcattctcagagggaagggttgcttgaagtctattgaatgcccagcttggttctcaccttcagtccttgaaagtgaaactgttgcttgaaattaagcacaacttcagccttccgtcatggaagccaaagtttgttgtatagttcaaaacggttctcacgagcacacgtgtttcttccatgtggatgattattggaggttcgatacatcttcaaccttcattcctgaagggaaggattgcttgaagtctattgaacgcccatcttggctctcaccttcagtgcttgaaagtgaaatc

SEQ ID NO: 242022 - DNA, 590 bp, Cannabis indica
aatggaacagactccatatcgaagatacaaccaagataaaatatagaagctcttgcacagttatgagctaccatattagctgatcgcttaacaaataaaacagagacagttttcaagtcggataacaactttttacaattaagaataacttggccaaatagagaaatcatgtccatcgagcttcttagcgcttgaaccactgtaagacaatcagtttcaagtgtaacatcctaccacccatgcgtttttatccaactcaacgcttcccgtacgcctatagattcagctagttcaagagatgtcgtacttgtgaacaggagtgtttttccttcaactagcataccatgatgatctctggcaatgaaaccacaaccatacttgttaccaccatcaaagaaagcagcatcaacgttaaccatgattttattttcacttggaaccacccattgctcagctccgtcacctgtcgtataacccgaccaagacgtctcgataagagatttttgagcattactccactgatcaaggaatctcgttgctgacactacaatagcagcagcagtaacatttttttttctgccaaacgaatt

SEQ ID NO: 242023 - DNA, 613 bp, Cannabis indica
ttagacaccccatccaccatccaatccgatccaattggatatttaaaattaagatccaatccgatccgatcacaattggatatccaatgtttgacggtcggttgtaattggatcagtcggttctcattgaattagatcgatttatgcacactcgtcttgcacataagcctaaacaataaaaaatcttacttaatttgatcactaacgtataaagtagtttatagtaaaaaatggataaaaatcacatcataattagtttccaagttagaaaaataaaaacagagtatcatcatatgattaaactaattaattgatgataatacatatttctttaaagttcacaagtttaagttatattgagtttgggtccctagataaatggttacatatataattcaacgttatatttttgtgaaattattattgcatgtcatttcccatgcttcaacattttctttttatacaaatataaaagttctatgaatatatcttctctctaattaatgaacaattattgtaacacattaattttgatgagctttttgtggaaaactactacactacaaacaattactatttttagtgatagttttttactcacaacataaatttt

SEQ ID NO: 242024 - DNA, 789 bp, Cannabis indica
tgggcaaaatggtacaatgtttaaaaaaagaggtaaaaatgatagacttttaaaaaaagggtaaaaatgaaagaggacaatataaaaatggtatagagtgtaattttctctttaattttgttagaaaaaaattcaaacccgtgcattatgggtggcctgggcaaattatagcccaacaaacccaacctgatgggccgactaacccggccctgttagtatgggctttatgatattgggctgctactttcactctttctcaccctagcaaacaacgggactctcgctctctaaccctaaccctaaccctaaccctaacacgactgccttcctctcaccacaccagacgaggtcaccgccctcttagccgggaaaaactcatgcaagggcgcgaagaaggtaactcatctaaaccttttttattctttttctggattccttctttcaaaacattgtgagttgtggtgttttgtttctttgattttgagtttactagttcatagtttgtaactttatatttatattttcttttcaatcatgttttatataattttattttagttttctatgattttagatttaactcttgagtgtattgtttttgctagttttatttttcttttttaatgatttgggatttgagtgtgttatcagtgtcatttgtttttttaatttacaacaatttcttgttcatttgccttttcactgtaactatcttctaccaataacaaaactagtgtatattatttatatcttgaatttatatttatatatacattaatgtgttatgga

SEQ ID NO: 242025 - DNA, 1023 bp, Cannabis indica
tttttttttattttaatttttgaaagcatagtgtaatttaatacttctgttttaattcaaacaaataagacagcgaactatacttttatttctccatctcgtgatattttgaacctctcaaatggcttttcttgtttggtgaaatgggagtgctgtgaagagcaacaaaatattatatgaatgcttagataactttgaaccgattagaaagtcgagtagctaagtgtccttggtaccctttgtggtctacttttatcgcaaggtcagtgatattatctcaaaatacccagtgatagaatagcataacaattctacatgaagcttaaatgcaagtttgcagtaactataaagatattctttcctcacaatttgtagagcaacagacgaatctttggtgatggtaaaagtgaacaatggacgtcattgtcgtcaaccaagcaaaattcatatatgaaaactctcatgtacaaaaatatggcgtaccagttttacacatttatgtaagtaacaacaacaatgcaatcaaccaatcaatgatataagtataacaggaagatcgattagcctcactctttatttatttacacaatcacaagtaatctaacaacgcaaactttacatgcaaacccattttaccaccatctttcacaagcttagcagctgttactaaccaatgccctggagcatcatggggccctcgcaccacctcagctgtctccacaaatctacgtagctttgcagatcgactcgatagggggggtccatccggataaactccagagttaagtacagcctgtgcctgtctctgttgatcaccagtagtggttttctgagtaaatgtaaatgttgtgctcaaattagtgagaaaatttgatttgtgagaagtatctggtgctgcagaccactctgtcttccggatggaacaattaggtaaatgggtaaagagtaaacgaaggtgaagtatggtcttaggccaactccctttactaattagctgtgctccagtcacaatatagactccag

SEQ ID NO: 242026 - DNA, 660 bp, Cannabis indica
ttatatgttaagccattatatccacgtgttcattttttttattagtatatttgaactaatttgtttaaataataaaaatttaatgacttggaccaattagggacacgtagcaatttatttaaccagatacctacagaagttccaaaattataacctaagtattacaaaaaaaaaaaaattaaacttaagtatttatttgcaactgagaattaaatttaagtatttatatatgccgcaaattactttctaaaataacatggagtatattttgatgtgtatatatataaatttagaaaaacacataataatatacgtacccctatatatctaagaattttttttaatgatattgtttagtaaatttttaaaaatgtaaaaaatgtttacagtgttggtataagcttcaaatattgaactaactatgcgtgcaactattttcttgtataaattaaacagtcttataaactcttctaaatgtcaaatatgtaaccttttaagggttatgtagactatatatattattctataaatttatgtatcaatatattactcataatatatatatatatatatatatacatgctagaaataatgaagattaataataataataataataataatatattaaaatggtgtgatcaggctggaactgtgaaa

SEQ ID NO: 242027 - DNA, 779 bp, Cannabis indica
gcttctcagttttctcatctcctattgttgtatattaccagatacataaatcagagcattccaacacaacaaaattccaattccaacaaggttcaagtactagtattaaaaatccatccttgtggacttgtgtataaccaactaatcccccattataatgccgggggttcagaaagaccaaaatttgataaaaactaccactcaaatgcaaggtgtgatgatcatatttgccattgcaccaagtggtaatttgtgtaactggataaaaggtaatgataaaatacccttcatgttattattaataaagatataactgtaaagggggaaaaaatacctgtagttggtgtctcctcacgatttctttttctactgatttgatttgcctgaacacaacacaaattaaaattattgtcaaaaaattcaatccatcaccaaattatatatgttctacaataattgatagagtcaaacagagatgttaataaaaagggaaatccctcaccccagaagtattcccatcactgccatcacttgaaccttctgtctccgtgctgtaaattattcatataatttcaaattagcagacgaagaaagaagaaaaacatcctacaaagtgccatttaaaaaagaaagaactcctggacacatgaagtcttccagtttattgaacaccaccagactagccgacaacaaatcatttatgatatcaaaattgggaagatatactttttgaacaaacctttgtgacagcatctgttcagccctactctcgacattac

SEQ ID NO: 242028 - DNA, 909 bp, Cannabis indica
acacaatgaaatatcaattgtgagaaatttgttttaatctagaggtaggtttttaaagcttgcatatgttcaccactattgtcggaggaatttagacaacaccaaaaagtaaacaaacaataaatattcaaaagaaaaacaacgagcactctgcttagaacagcgactattcaaaagagactacccaaacgaaagaagaaatggaaaaataaatgaacacaagggagtatagtggttcagtcagatcacggtcttcttagtccactgttaaaaatgatttctacttagtttattcatgttggatcactcttttacatataaaacaagtgtccttttagttacacataactaaccggttatagaaccattttataattaataataatattaaattaaaataaacgtaaaggaattaatgaagaatagcttaaatatgttctaataagtgcagcaacgtatgcgacctatagggtgcgagttgtctgttcatattctcgcacaagcccgcatgttttgggtgcgttctatttttctaaggagggttgaagagcctcgtgctagggtgtctgcgttttatttgagtcgcatatatgacaccccatatgcatcgacaacatgagacacgtgagtctctatcaagttatcgcacacgcattgttgtttagactagtcgttatgtaaagaaattatctttacttagtcgtaggagaaggctacctagtcatcgcatatgtctcgttatatgcgcgacttgtataaacccttcttggtcctgcttatcttattctatgctaagcatagtatgcgactagactttgtcaaggccgcatcatcttgcaagtttggttcaaacgaggttaattctcggagagtcattaattaacagctcttccatcccttgaggattgg

SEQ ID NO: 242029 - DNA, 518 bp, Cannabis indica
tgataaaccttctccttcacatgctttttcaggatagtggaagaaattttggcgccttaacaatctccccaaagttaaaatgtttcgttggcaaatttcaaacaattggatctcattcaagtttaatttgagcaagcatggtatgcttactgatggcgtttgtcctttgtgagatgtctaggaggagaccactcatcatgctttgtggggatgatctactctttcagagtgccgaaaactttgtgagtttaatctcggagaccctttggttacttgtactgattttattaattttatctaccttttcgtagacatgttaccaatttctcaagtggttatagctcttgtcattatgtggagagtttggtataggagaaataaaatggtgcataataactctctgatgtctccatagttggttgtcaattagacctataattttttgtgtgattatcaaaagcctccttagagtccaaaagggtttgatcaagatcgctcgtgtcttcttcttctcctct

SEQ ID NO: 242030 - DNA, 706 bp, Cannabis indica
gtaattattacaagacggttatttctggtgcgatgtttagaaatatgggcctcaaaacattgaatggaacaactcgtattaattctgttctatgagggacatcttcaatattagtctggtaaaagatgccaaagctaatttctgggtagaacgtgaacttggagacctccatcgatgtgaagattgatcattgttctataatgggcaattttcttctcgtcactcaatttaaattcgaagtagcttaacaaaacggctgcaaagatcttcaattgcctataagcaaactcctttccgagacaaatgcgtggtcctgcctgtggatggatcaagagattttattttagattctttcaaatttgttgcaactaaatgaaaattgaaatgtgagctacctgaaaagctgtgaacttgaaagggctttgcggttgaaaaactccattctcattcagccatctctctggtctgaactgctctgcatcatcaccccacaagcacttcatccttcccattgcatacggttggtatgcgacgaaatctcctttccttaccgagtagccatctggcaatgtatcatcggctaagcaaatctttccgtcctgtttaacatgagtgagatttggtatgaaataacataagaattattatctgattacattaatatttgtttatgttttgcactctaccactggaactgcagggtaga

SEQ ID NO: 242031 - DNA, 997 bp, Cannabis indica
gtttttatattttcttatatacaacagacatttgcaaaaacacggtttttcatgttagataagtcactcaaaagccaaatatatcaagggttagaaaaatgtccctatactataatgacaaaataggtgtacctatagactatagtagaaattttctatataaatatacatatattattaattatgaggaaattacactctataccctttttatattatcatcttttattcttaccctcttttttaaagtctatcatttttaccttttttttttaaacattgtactaattttgtccctatcacttcaagattttctccatgtgactctcttatattagggtatttttggtacaatacatatgaaaagaagtatgtttcaattaaatttaaaattagagataaatttaattaattgattaataaaagtagtatttttcaatttatagtaatgactaggtaaacacacatgcttggatttttcaacttgataattattaacgaactagcataattaattgactactttcatcaagtgcctctctttgatatgtacacaatatgtttaatccttcactattgagatttggtacatgtagtacataatattctttcaaattgacatgtagtgtttaattaattatggtcaatctgtacatgtacagtactagtacttatatttagtcaaaataagcattcaaaaaaaacatatatagtcaaaataaaataaaaactatatatatttatgaacgatgaatgataatctatatccacataaatgaatttcaaggaaatgaggaatttatttatttcattacttatatgtggtcgatatgttatattggcgttgattttcgatgctattccctttgtagaacattgcctcatgttgaacatgtgtggacctcgaccgcttagcttgttggtcatcagctagctacgtacgtaagaatttaatagcgaaattttaaaaaaaatttagtttaatttttttgtatag

SEQ ID NO: 242032 - DNA, 602 bp, Cannabis indica
aagaagagagactaataataatttttttttaggctaatactctacaaacggaccaggagaattaaaaagaaaatctattattaagtaaaaaaacacaaatatataaatgagtgaagcaaatataaagttccatcatgtgtctacctttattagtattcctttgattactgcaaaaatgtcaaaagaataaatcatgaaattattcattaacaaatttaaattaatcacacccataaaacacattcaaagataaataaataaatcaaactcataattgtacaaactcatcgccaattttatgcatttcggtacattattatagtggagagtgaaaatagcaattgtttatcgcttctataagagggtgagatggtttctttgaggtatgaatgggagattgaagatggttattatatggagatgttcacctatgtgatctacttttaattaataaaattaaaaaagaagaagaagaagatagtgggtattgagggttacttggggttgaaattttctttgactgatggaaatggttagggaattaagctatttacaaatgtatatattattttattttttaaaaaaattatttattaatactt

SEQ ID NO: 242033 - DNA, 556 bp, Cannabis indica
ggaagattcaaacgtaaatttcttctgggcgctacgaaaatcagagccagaggagaacaagttctttgaagagttcgaaaacagagtgaaaaacagaggaatagtggtgagagattgggttgaccaaatggagatattgaaccacaaaagcgttaaagggtttttcagtcactgtggttggaactcagtgatagagagtttaagtgctggagtgccaattctaggttttccaatgatggcggagcagcctataaatgcaaaaatggtggcggaagagattaaggttggggtgagagttaagagttgtgatggatcattgaatgggattgtgaagagtgaagaagtgagtaaaatggtgaaggagttaatggaaggagaggtggggaaagaggtgaggaagaaggcagaagaatttgcagttatggcacataaggcggtggaaaaaggtgggtcatcgtgggaaaccttagatttgctactctcatcaacaaaacaaaacaaacaacatcatcattaatgacttgagttgactaatgttcatgttttcatgaagttg

SEQ ID NO: 242034 - DNA, 1099 bp, Cannabis indica
tagtgtccatcctcatatacccataatcattctcacttctagccaatgtgagactttacttgcattcccaacacaacccctacgggcccgtttagtacgcatgattggactagattatccaggctaatttgtccagtctagtgtttggacatgttagaagtctggataactaatccagctaatctcatttgtctaggattatttattacatccagcagggtgggataaataatcccatgcaggtgagattttttcttatcattttttttttaattttaattttattaatatattttaaattttataagaatttaaatgaaagaattattactcatttatttataatttttttatcaagaacttatttatttaaattagtgaaaatgtataattttgaattatcatacataaactttcaaaatttaaaatattattaattaaataatagttacttaaattgtttctaagagaaacaatatgacaatgaaattatatattatttttaaattactagaaaatttatataaatatttttaaaaattaatatttatattaaattagtgtttgacataaataattttatattattcaagtatttttattttactactttaaatttggaataaataaaaaataatgataaattattttattatatatttatgaatatatacttaattatatacgatatattattttattttataatttaatcatttttattatttatttttatttttttgctgtgaattatttaattttatttattattatatattttttattttaatttaaggttttttttttttttctaaaaggaaattaataaaatagtctaatttattcttaaaccaaacacatgattactttcagcataatccaatcttgtccagtccaatcctttctagtagggctgaacatcgggcagatttaccgagttttaggttggcgggtttcgggttcatggattttgggttcaaaaaaatgaaaccgaactcagacccgaatagggcacgggttggcgagttggcgggttgcggttggccgggttgaccggaatggcgggttgacccggtcaactcttaaaaaattaattttt

SEQ ID NO: 242035 - DNA, 2014 bp, Cannabis indica
ttacattttatatgaaacccatacacataagtgtatcctactttcaccaacttcatatgagaaaagagaaaacagaggagaaaatagcaaagcaaaaactctgtaaacagaaaattgtattgattgaattaaagatttgatacaagagaagccttatataggcagtacaagagataggacccagctcacaatgtcaaccaacttaactaacctctaactgtattgaactaacagaataacataaataccaaactaatgatctaagtctaatagccccctcaagatggagtgtaaatgttgagtacacccatcttggagactaaggtagaaaactgatttagtagtaatggcttggtgaatatatctgctaagttatgttgggaaggtacatgtagaagtttgagagatccttgctgaactttctcccttatgaagtggcaatctatttccacatgtttcgtccgttcatggtacaccgaattttcactgatgtgtattgcagcagtgttttatctcaatacatgttggctagtgtgttgtgggagacgctagtaaagcaaggagccatgtgagttcagaggttgcattcgccatagcgcgatactcggcttcagcaaaagagcgggaaactacctgttgtttttttgatttctatgaaacaagagatttgccaaggaaaatacaatatcctgagattgatcaacaagtatcttggtagctaccccagtcagcatcagcaaagaaagaaactttaatgtttgctggggagtaaactagtttcttgcataatcagtaagttttgggggcgtgcatcaggcggaaaaaataaatccctgaccaggagtctttttgtagatattgcaaaattcaatttgtgacatgtaaatgaggaagccgaggacaagccaaaaattaggctagtgtggtttacggcataagaaatatcgagtctagtaatggtaagatatataagcttgccaattagactacgataaacagtcgagtctggtaaaggagttcctttatctttgctgagttttaaattgatgtccattggggtagaggcaggtttagtgcctatgtacccagtgtcatttagcagctgtaaagtaaagtgtctttgagaaatgaaaattccctctttagttcgaccaacttcaagaccaaggaaaaaacgaaggtgtccaagatcttttaatttgaacttgatgtctacattgtgtttgaagtttgatattgcagtagcattgcttctagtaataatcatgtcatcaacgtagacaagaatagccaaaaaaaatggaggaagtgcgtttgataaagagagaattatttgattgagattggtggaagccatccttgatgagggtagtactaagtttggcgtaccattatcgggaggcttgtttaaggtcgtaaatgctcttatttaacttgcaaacagtgttgggaggagcattgtatccaggaggtaacttcatgtacacttcttcatgaagatctccatagagaaaggcattgttgatgtctaattggttaatggtccaattgttgatagcagccgaggcaaggaaaatttttaaagtgttaaacttagcaactggtgcatatgtttgggaaaaatcaattccttctctttgattaaagcccttggcgactaatcgggctttaaacctaacaacttcactagcttcattgtatttaactttatacacccacttgcatctgatggctttgtggccagggggtaacttggtgatgatccaagttttatttttttcttcaagagcttatgtctcacagtccatggcttggagccaatgtttgaactaggatgcctcttcatatttttttggttcactatgtgtgtatgcggctaagacagcagcaagaaactgaggatccaattttatatatgataaaaaggttcaattggatgtgtcgtggaagacactgacacacatagtcctttaaatgggagggttgagtgagtattcgtccttttttgttgttt

SEQ ID NO: 242036 - DNA, 809 bp, Cannabis indica
gattgaaaatcaaggattataaatatgcccttattcataacagcaaaagtggtgctctcgcttaagaaatactctaataatttacctacaatgaaggagcaagctgtccatttgccagtgtttgatcttagaactggtctccctttaagatcaactgtcccatcttctgtgtaattttcatcactttgacccttttcatcatcatctaccttccttgccataataataactaaaactatatgatctttaattaattataattacctccatgtatgtatatatatatacaatacctaggcaaactttctttctttggtttagtttaatttagtttattagtttgatactttatttcttcttagttattattgagtggattctttacatgtctttttctcttgtttttgtggacctagctagctacctacaaaatttgaacctatctataaatctgcatatattattttaaataatttgcgacataaatatataagtttaatttttaattgtaaataaatacttaagtttaatttttatagtaataatacttaagttttatttctaaaactttgtaaacacccgattgttaaatgttaagtaaattaccatatgacaattcttaattggtcaaagtcatgaatttttattttttaaaataaattaatttaaatatacgaatataaaaatgatatgtggatatataacatttaacagtcaggtacctacagagttctaaaaatataatttaagtattattaccattttggaccctctgttttacaaaaattaccaattggaccctgtatttt

SEQ ID NO: 242037 - DNA, 2911 bp, Cannabis indica
ttatttttaaaactcgagaacaatgtttccaattagttgcgaagtaaaaagtaaaaaagggggctaaggtgtaacaaaatcattagtgcaacattgttttcgtcctaaattgcacaacaactaacaaagaaccagagaaacaaagtgcataaacttcaataaaaataaaagaacacgagaatttatactggttcggaccagattgtcctgcatccagttttagagcttccccactatcaaaaatcagtcactgtacagcaagtataatacaaaaagaaatatacaggattaccctcaacacagctctgagattcactcttcaattacaccataaaccccttggattttagatcatcttatgccatagcaattgagggaagggacattccaaaactaaattggaatcagtctcccatttttcgtgcaataaacacaccactctggagacaacacctgataaaggcctctacttctcatgaacattcagcttctctaatgctaatgggcatccaaacactttgactttagttggtacacaacttttcgaaactgaatgttttctcttgacttttacttaaaaaaatgtatacaggtatggaaatcaagctgctgctgatgaattaaactctctatatggggattcccgagccaagggatttggtaatgaggtaaaaagtagttaattggctagtctgaatcttttttgcaatttgtttgtttggttacgagtgttctgtgaatggagataatctgtcagttatttatctagagtttggtggtgacttgagtaacttgataaataatttgcaggtcaaaatgaggattttaatgggaacatatgcactttctgctggttattatgatgcatattacaagcgtgcccagcaggtagcctgatcattatgccaagttttgcaatatttgaaaccttaactaatttattgacatgtgaaagcatgatttggtaggagtcccctaaattagtacatgcattccaacaccatagtactgaaatagatttgtatcaacagcttgttaccactcaccagaagataaattgttcttgatacatatgacctgcttatgctctcattgccttgattataaatttaggggtagttttattagtgctatggcggcagtgtgtaatttaattgaacatgttattgataaacatgaaaattagtactaaatttcaaaacttatagtcttgcttgtttcttttttggttatcatattttactgggtgactctttacatatcctttgttggcttaagaggaagttaatgcttgtattagtgttgcaggtaagaaccattatacggaaaagctttaagactgctctcgatgaacacgacattttgatttcacctgcttccccatctgctgcttataagattggtatgctgcttagaaagttttgcttttggattaatcttaaaagttgttctatctctcaatctttcaaatgcttgttatttctacaggtgaaaagaaaaacgacccgttggcaatgtatgcaggcgatataatgacagtgagcatctgagtcctacttatgctccaatttgatatttgtatttgttttcggcttaaaaaggaagcaacttgcctctaatttgtttgaatttgaggaagagatgaagtgagtacatgtgatactaacatatcgtatatggcaggtcaatgttaacttagctggtctaccggcattggttttgccttgtggatttgtggaaggaggatcagcaggccttcctgttggtcttcaaatgattggtgctgcatttgatgaggtattacacttatgctgtttctttctacacattccttctggtaattggtgtcaattatgacttgggatattttaattttacctttcacagggaaaattgctgaaagtgggtcatattttcgagcagacccttaaaaatagcagattcgttcctccgctaatagcagatgaatgatgttgcaagctaaagttaaaccaccattgatcttttctttgctcaagataattagaaagcacggctaatttgtcattgcatagtcatgagaaacttttctaaattaaaatttgtataattgtttcgtttaatcttttctaaaaataaaattcattttacctgtgaatcaatgttaattttctcattaatttgattcgatttctttttctaacagaatgttaaagtttgatagaaaattatgcataatactttaaaaaaatagaagaaataaaaattgaaacatttattactataaaggttcgtttggtacataggatttgactagactatatggataatatgacaagattagattggataggaattatgctgcttattagtagacctaatccagctccttttccaaacggcccatagaactaattagattacaaagttgatgctgcatatacaaaagcaaaactaggcagatgtatattttttgtggggatactaaaggcatttgctaaaacatgccttatcatcgaatgagtatttgactatttgtttatttgaattccaagcaattatagtccttcatacatccttccaattttaacgagggatgcaattatcatgctacaacttattataataaatattaattttttttatcttccactaataaaatatatattaagatttttccctaaactatgaagaaaataatcaaatttatatattatataaaaaatattgaaaaatatatattttgacttcgtcatctactttaagtgcatgaactcttaacttatgtgtaagatgaagttaaaggacgtagaaattaaatctacaatcaaactcaaaaaaagttaggagctttttcatttttacattttaaaatagtttttttttgcatttttacgaaattctaaatagaaatttctattgcaactagcgc

SEQ ID NO: 242038 - DNA, 909 bp, Cannabis indica
ctgatttagagatctagggaggaagatttagttgatagtattgcactatcgaattgaagtaattgctatggatcgaattgaagtaattgctatggatcaatcaggtacgcatacctaattattatatattattgttgtgttctatgttatatacaaatagattttgggtttattataaatttatctaacattattcccatcacctgcccatccaaatgctctcccacgaccacctctagtagcctaaataattcattacgaaccaatgaaccactacaaacaaaatagcgtagcacaatagtaaaatctagtagtattgaaaaagtattataaattaataacatatgggataagaaaatgatagtcacttaaaattacattttggggaccatttatttttactgttcctttttttctctttttgtttgtgcaagtaattcaatggtgataaagctaatctaaagcactctctttctctcatagcaaagagaaaaaacttctctggtttcttatatgcactctctttccaaatagtagaaaacctatggtatttattaagatttaaagtcttaatatgccttacatcaaatttatatacaaactccaatttgagaacaacactatatgggtgcgtgggaaggaaaattattattaatttatcatataatctttaaattaatttttgaatgataccaagaatttcttttctatttaaatatggaatttgatattgttcgtacatattacatctatatatacatacctatatatttataggtatattaatttgtaagagccaaaagctgatgagagcttaagacgtcattattattagaataattatcaattgatcaaaaaatttgtatagttcaatttatttttggttaacattttatttcagttcaattc

SEQ ID NO: 242039 - DNA, 992 bp, Cannabis indica
ggtaataaataaaagatttggacatccacataattattaatatttataacaatattagatatattagtgggtggactcataatatcactgttagaaattttatgtaaaacatgaatgtatgaagtgcgaaatttataaatcgaacatagaagcactatgaataagagatcgagatatacctttagtcattgattttttgagcttcaatcccacatgagctttgaatctgcaaaagaaaaagaacctggttaagtgtgagtaatcagacttctaaactctctctactttctttagataaatttaatgtatgtcacagaatgagtgaggagctcagggactgagaccctatatttataggtgagaaactctattagtatctacactacattaattattagaatattttgataaataatcttaaaaattaaatcagaaaataaataaattagttaatcaaaaactaatcatatataaaatatttatatttattaaataattgatttgaaatcaaatatgaaatattcatacacatataagtcaattaaaatgattttatacttaatataaaaaatattataatattcacccacttggtcagcatttagatttaccacgtaaactcaatatttcttattatacaataaacttatgaattataacaataggttctcattatatgtcaagtattattccatatattacgatatattcattatataacaatgtactttatgtggcaatatacttaagcgagtaaacttgaaatcttatgtttattatggtcctctgaagataattttctcagatgaaattaaggtgcacatgaatatgagaaaatatcgaaattagagtttcattgaataattttagttgtacagcaaaaaactgcataaagggtaactgaatcccacatttactttacgatcatgttctaaagctattattgaagattcagactctgattttgagcttaaagatgaagatttcgagat

SEQ ID NO: 242040 - DNA, 542 bp, Cannabis indica
actcactaactctcctttcgagtatgattttatctccttatagatatgagataacctgtttactaatacgacatcactgtaactaatcaagcgacatcagggcctatattaaaataattaagcttgtgaaattacatgtgtcctctttttaaaaacacaaaaataacaaggtacaagaattaatagattaagaaatgcatctcaataattttataggagatttgcacaagatagatagttacatcaagcaatagtctttaattagttaattaacaagcccaattgtatcactacacacatagatctcataccaaacatattattaatcatatataggctaatttttgtgtttaaattcatgctcaaagtttagctattaatgatgctgatgagatagcttctatggcacttcctagtgtccattgtgcttcaacccatccatcttgatagttgatttgcttcatcaaagtaatctcttgtgttgggtctaagcctataattacaacacaaaatcaataactcatctcacttattaagctata

SEQ ID NO: 242041 - DNA, 745 bp, Cannabis indica
tttaaaaaaaataaataagtagaattagcggcgaattctggttccgccgctaatgctaccactattaggggcgaattttgcccatcgctaataatattgtggctattgataaattttattgtagtgatagcatataataagacgatgtctagcttaactataaaatatcagcacatgagtatataatattttctctggatattaattattactcactgtgtgaatatattgctccacatacatataagttagtttccgaaagtctaaatttactaaataaatgagttatattaagtgagtgaccggtttgaaaagaagtggtgagggattgaatccatggccatatttatatatatatgctagtaaaaagctacatgcgagacacatatactaaattttatgctaggtattttctattttattaaaaggtgatacacttaaaaatattcatctcatcttggttcgacccaactttctgtcatgttgttcccataggattgtgtgttagattcgggcttagaagaatagtattcgttaaaaggagtgccagcaatggcggtgctgatgtcagttttatcttctgggaatagtctagctactccgaagttagttatttatcttgtcaaatcttcatcaagcataatgttgtttagttttatatctcgacgaatgattctcaaattcgattcttcatgaagatacgcaagaccctcagccacactcaatatgatcttatacctcgact

SEQ ID NO: 242042 - DNA, 682 bp, Cannabis indica
attgcaatgaatccaagagtttaggaggttactagtagctggtcgatcgatgaaggccctatcttgtttttagcaacaagcgccatggtgatgtctctcttccatgactgataatttgcaccatttaggatcgaggaaaccaagacgaggctagggtgatcgtcggaggtgaggaagaaggggttggaaacatcgtcaagagttccacgatcttgagctgggcgggaatgagtatcaacaacagtaggaaaatgaacaaaggaatctaggccaatctaggatcgaggtcttgaagatcggggaggagcagctgaagatggaggaatctgagcagaggcgtcgtcgatcgggaagtgtctcggactgaggaggcttagactcagatggaggaaaaccatcttgggatcttgttgaaggtttggccatggaagaagtgtgagatgtgtgctctgatacaatgagagaattcgagagagataaagacaatattttattattaattgaattaaaatagtttgtacagagcatatgcctatatataggcagcgaatgagaacaaagttagttggcgtttaactaacttgagttagctccataaccaaaaataacaaacctcgaacagaaaactataaactgaactaaagcttataactaagagcatctccaatggtaaaaaattaag

SEQ ID NO: 242043 - DNA, 750 bp, Cannabis indica
taaattagagtgtgattagcactcatacttttatacaatttgtcagccccaatccgttgattgaaaaaagtccacaaaaacacgggttgtgtcttaccggactaaaatttttcatttgaatttttcataagtaactaaaaaaaaaggcaaaaaacaaattgttgatgctgaaaattaactcaacaacacatttatatttacacttcaaattctttacactaggatgatctcaatccaaaatgtctcgggtcaaaagatggttgttcaacgcaatgaaacagtgtttgggaacacaaattctacgccaaatattattagcataatccactttattagcaataattagggaagtagagaaaattttagttttaagcttacccttctgaacaacagcataaacatcctctttgtcaattttgtctctaagtttcaagagttttcagaagtaccaacaagcgtccaattttaacggagcctaccagaaatcttttcccttcaaatagattgaattgatccacttaacccacaaaatatcttgtttacttgaggcagcccaaataaacttagccatcaacgaagtgttccagcttctcccttcatagaatccaatcctgccataactcttggggagacaaactttttctcaagaaatgagataaagtttgctacgattccccttcataccccaaagaaagtccctgcagtatttatcaatggttgaaacaattttttgagggagaaaaaatatac

SEQ ID NO: 242044 - DNA, 654 bp, Cannabis indica
taattctaaaaaaatatgaaaaaaaaattattaattttttatgtgacaaaagataatataaataataaatagtctaaaatcgtcatttctctataatttttaaaataaggacatttcctaagataatgctatgattcggggccatttattataacttttcctttttaaaagggtaaatcaataaaaaaaaatgtgtgtatttttaaagagaaatttttttggaagactctgaactaggtggtccatagtcacaggcctaataccctatgtcaaggccatgcttaatttaagctccataaaaaaaattaaaattagtgtaaaaatcaatatatatatatatacatataaaaggaaggtttaaacagagatgatgtggcattctatgtgacttttctttgctttttttcttctcattttttaatatttttcatgttttttataatatgagagtatattaaaaaagtctcacatggtttaaaaattattgtgggtggtatacttttacattatatagatcattattctgttgttttggtttgttccaaagttagtattatttattttttatgtgggtgattgataaacttaatcttgtctaattagtaataattttttttaatagtaaatgcaaaatattttttttgttgttttttt

SEQ ID NO: 242045 - DNA, 708 bp, Cannabis indica
tgataatattattagtcaatccaatatccttgacaaaagtcttaatacaaagttgaagtttcaaccattatactcctctctttgtccttattatcatgataaatataggttatatatgatcacaaattagatagaattctaatttgccaaagtggttggttcacaactgtcgtggacacaagctaaaacatccttgtactctctgtaaacagtaaaagagtcatatacctcaccatcacgacttttcttgtattcaaagagtagtgatgagtgattaaaggcagtaagcttgacaaatccccaatcataatctctgtagacactccacacaggagacaagctactaaacttagccaaactttttcctcctcctccagtaaccacatgaattgttccatttacaacaccactgaaatgtgatttttcatcgttcacacattggttctgcaaaaaaattcacacacaaacataccaagattatcatttatttttgcccaattagcatggactttaggtacccttaaataatgtgttaaatacatatagatcaatggctatatatacctggtaaatggggcatattctttcatagttgtgaacatgaccaaagaaagctatgtccaccttgtatttttgccaaagcttttggaggtcttctcttccttcaggctctgaaaatgagccctcttggccataccaatagttaga

SEQ ID NO: 242046 - DNA, 3217 bp, Cannabis indica
ataaactcaatgaaaaacttgcaatctcacaataaaaccatacaataatcatccgaagaataagataaacacattctaaaacatttaatatccattaaaatcatattggtccgaaaataaaaaaaaataattcagatttgaaaaaataaataaataaataaatgggttaacttcaaatattatggagctctaaaatcaaatatactagctcttgataccaattgttaaactatctcatagattatgagctatccaaacacacattaaacataatcatcattgcttataaccattaaatccaagatcaatactttatttagaacatctaaaataatacacacatacctcccattgagccatctatatgtgagccatttgaatccaagagtcaccaacaaaacaatcacaaactcaagattgaaaaagagcacaatgtgtagctatcccctcttctcttcctattaccattaaccacatttcacttaagacacacacacacacacacacatatatatatatatatgtcacacacccctctaactctaataagttatttactaattgggcttaagtggttcaataatggtatactataatttaatgggacaattatagttatgagggtgctctcatgtgcttctaacatagtaaataattattaaccatcccattatggtagtggacaaaaattaggcacataattaatgattgcgtgtatgatattaagcttatgattatattagtccacaataataattctaacagtaagttctcagctaatcataaattgaaagcttgtgtaactctctactctctatcttcctttgtctttgaacttcgacttcatttttgtgctcgatcaccgctggagacgacatcttctcgaatagaaaaatggggactgttctctttcctgtgcctcatctagttattttgctatttattttttttatctaatttctctttgttgcttagttttattggaaacaaaatggtggatagttaattatgtagtcaatttacttttagtatatgagttaaatttacgtatttatgcagcaaattgctatattattattattattattattattattattattattattattatttctttaaaaaaagtaactattttttttattttatctttttgattattttaagtattttatattttttattcaaatttttagttggttgaattaggtaactaatttctgtatttaactgctagttttatttaatgtaatcgctgtaatttaatttgtaagtcgtattgttaaaaattcttctatattatgttattttttttttttaagtaaattagtttttgtgtttcaatttatcttttaattattttaggttgtacctaggttttcatgtttaattattatttttattgttttacgtaactggttctaagttatagtttttaatttggttgatttaaataattggttttttagtcatagttttaactagttgattaatgtaatcagtttacatgtgttacattccatcaacacggatgacaactccaacgtctaattctagtgacttttcggtaatgacgacaactcctacgaccattctaatatttttttttgacaacgataacaactccaacgaatattttcattttgttttctacttattttgctgctaatatattattttcatatatagtgattgtctatgtcataggttgatgattgagtcttgaagcttttgagaagtttataacttgttttagttttagttttagttttggtattgtgttagatatgttcattatttcatacaataactagaatacaagaatgtaaaatttatacatggattcacaaatgaagatatccattttgattatatgaaaaattggtttcgtgtttattggcctaacaaaattatttttagtattgttttaacttttgttgtttgattttgttcataaaaaaagaaataataaaaaaaaaaatctgctttttatagttacagtgcctcgtgtaagtaatggttattttaactagtttctttaagtaggtttttttttcttctttaattattttgcctattttttatgatctcatttatattttcttaaacagtgcttcgtgatgcaacttagtttctttattcatattttctaacttcttgtaattgtttattgtaattattatttagttttcttatgcaattttttatcattagttttttatgatatttatattatattttataatactgattgttttatttagttttatttatatacgttttttatcataatttttggaaaattttcagttatatagaaatttatagtgtttcattttttttttcacaaaaaaagaattacaattttaaatttttttatggcattcttctttatctataatggtttttcttatatttttaagtttttttcaaaaaaatgtcatgtacaattaaatttagatgccaagtatatcaacttttattttttttcccttgaaccctttgccttgagcccatatgaagattcttgcaactaccactgattaagcccaaaaagcaaaggcccgacattttcatctctattttatagaccagtttgaaaacgacgtcataccagacctctgctaggaatttatgagggaaatttagatgcacaaaaatactgccaggcggtatcttttacttttttactgtgtttttttataagtttcatactgcagtatactgtgttaagttttaactggtattctactggtgttttactggtgttctactgttgttttgagctgttctgctttgtgttttactggtgttttacaaaaatacagtatttttgtaaagatttccgtgtgatagtatttttgtaaaaattaacccaaattccaatattttcgtaaatttccaatttatgaagctcctttttattcattttttttcatctctttatttgttaattaattattaaaagttaatttttttaatatggaagtgaaaaccgagaaagtgcttcagatttttctgtgtattgggagtagagccgttacacgctttttgggacccaattattattattattattattgtgttttgccatacagcttacatattattttcattttttattttttttcctaacttgaaaatcacctttcggcggttgaattttgtagcaaaataagtgattaattagaattatgttaattaagatttttttttt

SEQ ID NO: 242047 - DNA, 654 bp, Cannabis indica
ttctggtaaaattgtaaacattttgggagccgagcagtctaaacttctttatggaaagttattgcaactttatttagcataccagccaaaatatatatatatataataatttgagaaatttacaaaaaatactataatttgggttaacttttacaaaaatactattacacggaaaagttttcaaaaatactatatttttataaaataccagtaaaatacaaagcagaacaactcaaaacaacagtagaacaactacaaaatatcagtagaacaccagtgaaaacttaacacagtatactgcagtatgaaactttaaaaaaatacagtaaaaaaataaaaaataccgcatagcagtatttttataaaaaattaataaaaattagtataccatataaatttccctaataattttctgagtcacattaaatgacatcagataacgtttatagtgggcttaggcccaatattctatcacaagcccaacactatgatgttcattccacataacatcaaataaacttttttttttttttaattttattggttatggttaccaattttattttctcaatcgatctccgattttaattttctaatcactccctcgaattttggtgaacggagagactcactgtactaattcttcttcttctt

SEQ ID NO: 242048 - DNA, 867 bp, Cannabis indica
ttctatttgtccaaaaatccgtaacataataaaaaaaaatattgaattcttgtctatgaccaaaaaaaataaaataatgcatgtctatagaatttaaccccaccatgatgaagcatttaaagaatacctcattttttaaatgatcaagcatggtaaaaaatactcgtaataaatcatgctttgtggccaacaaattagtagtgtttaccgaattttttcaaaaatcaattaagaaatagattgagcttaaagaaaataagtaaatataaaatagataaagatttttacgtggttaggatattaataagtcttacaatatttaatgcccaaatatgacttctactagcggtggttgtagtatatatcgggcggccgattccacaagaaggtgattatggataaaaacgttagtagaaaaataaacacaaaatattaataagaagtaacaaataagtaaccaaatgagtttgaagatttttattttggtaattaatattaaaataaagcaaataaaagtgtaatcaatagtaaaagagagaaagacttcaagaatcatccatatctttgtttaactagtttgtacctttaattcataaagttgacataaataatgtaacattaaaaatcattatattttgagtatacaagttcttaaaagaaatgatttaattttacgtagaacttaagaatgacattatacatcaagcaataatacaataaaagattaaacacaaaactaaacatcaatattatttttactaaatagtaacacatagaaagagcatgactaatcatatagaaaaaataataataacaaagagatagagatagagatggtggtgatagtgaaggaaatgaatattaata

SEQ ID NO: 242049 - DNA, 620 bp, Cannabis indica
cgtataaccttgagcaacaagtcgagccttaaacctttcaaccgaaccatcactattgagcttaattttataaacccaacgacaaccaataacccttcgattaggaggaagaggcaccacactccaagttttattgttcctaagagccgtgagttcagaattcatggcatcaagccattgcttgaattggatggcttgttggtatgtctgtggttccttcaaagaagtgactgcaagtataaaagccttgtaagattcagtcaatcttgcatatgaaagatatttatttaaagcatggggagtagaagaagtgtcatgtattgttgaaaaacattcaaagtcgcgtaaataggcagggggccttgaaactctagtagttctgcgaggaatgttgtctgcattttcaggtgtagtctcttgtatgtcagggacacttgctggtgtgttatcttcaggaagggcatcatcttcgtgatgattatctgcactagaacttgagttagtgggagtaatagtaagtggttgatattctccaatatgagtctgggatatatgtggggaaggtataacagttgtgataaaggggtctacagcagtattggttttatttaatttaaaga

SEQ ID NO: 242050 - DNA, 1181 bp, Cannabis indica
aacacattgaacttgatgttcattttgtgcgagacaaagttttagaaaagaagttggagatcagatacgttccctctcatgatcaagttgcggattgtttgacaaaaggcctcagttccaccagattcaagtttctaattgacaaactcaatgtgactgcatcaccatatcgtttgaggggtggtgtgaaagaaatcaattatactggtgtgatgtcacaagggtataatggacattgtgaatgagagaatccctaggctgattgtgcaatcattgtaatcatttatttttctaacaaactttccgttatgcctaaatctttgtgcaccacgtgtactgctgtcataggctcattttattccctctgtattcctctgtattggtcgtgtgcctatttaatgaaaagtttcatcactcactcatgggagctgagttttcataatcaaccattgttaaatctcactgaaagttgttcatattataatctttttatattttatttttatataaatgaataaaatatattaaaattattatgatagaaacttggagaaattgatggaacagacgttaaggtggctggctataagatttcttatcctcatttctaaacacactacatatatcttatatttcaatttccaaggcaactcaatatagttccaaaacttatttatttatttttctgaaatctagttccgaaacttgcttattaaaataaataaataaaatcaagctccgaaacagctaatggatcaactttcgtcgcttctcgcaacacaaaggtaggtaggtagcaacatttatttttagtttgtaatcttcatcattataatcatgaactttacattcttcttttttataaatatttatatatgtaacttcaaaaaagataaaaaatcattaatagtttggggttcagatatgctgtagttaccggtgcaaacaagggaattggatatgaaatatgtagacaattagctacaaaaggagtgactgtggtgttaactgcaagagatgagaagagaggtgttgaagctgttgagaagttactgaaggagtctaacctctctcatcacaatgtcgttttccatcagcttgatgtcgtcaatcatgccagtattgcttcccttgcagatttcatcaatagccactttgggaaacttgatattttagtaaga

SEQ ID NO: 242051 - DNA, 696 bp, Cannabis indica
aagagaacacagctctgcatcactcgaggaaaataccagagaaacagtctcagtttctcaactcctacctgagtacaccctctgttcttgaccccttcaagaacatggtttcacagcttagaaaactaagcactcactctctaaactctctcttaattctcttcttacaaaagtggaaagagtagcctatttataggtacaactcacagctagaaaatacgtgcgaaatcggcactaactaactaactaacataatataaagttagataagttagttaagtgtagatgagttagttttaggtttgtttagaggatcaacttcaacaattatagtgctatataaaagtttaaatttgagccagaactatctgatgtttgttgacataattatttttgaataatacaattcgtataatgtgagaaagtagagtgtttaaagaagaatagagaggaaaattaagaaagagagatagatcaagctccttcttctcctcttcgcaaacgtaaaccatccacattattttttattagattttcccttctaccaaacaccccacttttctcttcttttctctttcagtccactttgagtgaggagaggaatattaaaaaatataatagaaattagggtaaataaaattttagaccctgtattttacaaatgttactaatttgaccatctgttttgttaaatga

SEQ ID NO: 242052 - DNA, 670 bp, Cannabis indica
aaataaaattcaaataaatattaaaattaacataaaaaaaaattagaaaaaaatcttaaaaaaaatattaaccctttgcttagttttatttagttgggaggaaggaaaggagggaaatgaaagaaatatctatggatgtcaatttattttttaataattaacttgtctatttttttaattaggtttttttttatatttttttatttttttattttttacattttacacattaaaatatatatttttttatttatatttttacagaattttacacagaaattcttattgcaattaatggaacaacttaattcgcaactcaaattcatattgcaatccacatagaaactaccaaagtaacctaaactgtaaatttaaaaaaaaaaaaaatagtatataagataattcctctttttaatatatatttttctttagataataaaataaactagttatttcctttcctcctattataccaaccaattttgaggtacacacctcataaacttttcattcctaccaaacaaagtgtaagagtggtttttaaaaagggtaaatactattttggaccctctgttttgtaaaagttaccaattgaaccatgtgttttgttaaatgacaaaatggaccctgtattttctaaaatagtacaaataggaccctgaattgattt

SEQ ID NO: 242053 - DNA, 743 bp, Cannabis indica
tctgtgttcaatttgagccttccgcgggtggtgctgtccattttggggcatgtatgaattctgatgaaggcctaggatcaggagcagcagctgaagatgttgttggctgtgaacgtttagctctggcacgctgaaactcagtcaaataggtaggggcatatgcagcaactgcttgtggtgatcggacagtattaccatggtaaatggcatttctttcatgccaattacaccagcaaagaaccaagaattgctcaaattcagatgtggttagaactgtcgataggtgtaataatatatcagcacttgcactttgtctcaaggtggtaaaatcaatattcagaggagacaaatcccatactgttttggcccgtggacaagagaacaacgcatgagtgattgattcatcagcagaattacaaatagtgcagtagggagaagttgctatatgccttcgatggagttcagcagctacaggaagtgttgagtggaaaactttccacacaaagattcgcactttaggaggaattttcatcttccaaaaagttgaccaccaatgctccattgaagaactactggcagtatcatcttgttcagcaagtgaaactgctagttgatatccagattttacattgtaaatacctgtgaaagagtggctccaaatcaagacatcatcatggggaaataggctgagagggatggagagtatacgatcaacatctgcttggctgaaattggcttgcaaa

SEQ ID NO: 242054 - DNA, 2371 bp, Cannabis indica
gaccttatatcgttgatgtcaaaaatgggattaaaaattgagggctccctcatatatttatcaacagtccccagcccagttaatgtgttgaagcccatcttccatagttgctttgaaggccaagataaaatttgggcctgactgcccagaagagttgtgtacgggttgaatttacttgggcccgaagatgaggagcccatgcccaaagttgacttagaatccttctcgtttgactcctttgataaattgggggtgccgttaccctttgaagcattctttccaggttggtcttgagcagaagaggaagtaaactgaccgttgtagctggtatcattctgaattactgcatccgacccaggttcctgtccctctcctttgtctgctgcctgtaccgtaaccgaaggcacgccggaggaggagtcattttcaggttccacagctgttgacgctggaatgggcaaatttgcaggcagttttttcaccaccagattggctgtatcctcaaacgggcaaatttcacctatcccgggcagtgtctttttattatttagttgttattgtaatacttcattcatgaggtgtaagagtgtaatgagaattcataacattagtgtaatgcccattacaataaaattccactacgaaagttagaaagacaaactaaacattgtaatagtgactttgattccattcaaccaaacatgttacagacttgaagtattagctggtaacaaactaccaaacaataaatttgttaggacagttacaaacagtgaggttgaaagtgtcattaagctgattaagcccatactaaccatagaattaagaacgggaaattttaattttttttccaaatatttatcaggtcaaaacagggtattgtatccataacctagtaaataattatataatgtagtgtaatttcttatttaattatttatattaatatgtgaaaaataaatcgataagaagaaaacaccaacttaaattcaatggacatagagaaagccagagatgggacccatgtcactagctatgtttcacgcgatacgataatcaagtatataaataggtaggatgaacgggggtcaaagcaatatagtcaaacacatcattgtacagagttaaaacatcgtattccattctacaacatctcataacactagatttttatttaaataattttaaattaaaaaagtggataaataggcagataatttattttactcattccaatggagcatcgtctcaattcagacctggttcattctaatcaggataaggtttcatttcaccttatttattctctctcttccctttttatatataatataaatattttttttattatccttatagatataaattattcaatcctccacaaaaaggtatttctttctttctttctctcctgagcaaaagaatatcacaacaatggcgtaaatatcgcctcccccatgtgctcttcaatcctctctatatctctatctgattttcttttccctaatttctatctctctctctcacacacacactcaacagactcttccttctgattcagtgttcgaactttgaatcatgtcgcttgctctgcagagcaatagaggagacacgatccgacggtcgagattcatccacggtatgccctgtctctcgatctacgactcatcggaccccaaaaacttctccggggatcggcgattagagccggatatggaatcttgtagctcatcttctcttgggaggaattccgacgtgtctgatgagtcttccaacggcgaagattcagccgatgatgaggctcagagctcgtttaaaggacccttagacaccatggaggggcttgaggaagttcttcccatcaagtatgtttctttttgatacccttttgattacttctctcggctcttgcttcagttttttgagtaccctttgggttactatttttgttcttgtttaagttgattgttgtttcactttcaactaattagaccttgggagtttggaaatttagctgcggtaactctttatcatatttatttgatctgggagtgctttaaatatggggaagttgccaaattaacaacatgagaaagtgtaaaagttgccaaaatagccactttgatttttcatatgttcggttagtgtaaatttagaaggtcgttttatggttccctactaaatgtttttataaaatctattttttacaaaatgggctttaatttacttggagttttaggactcttatgagtgggtttaaggcttttctttggctacatttatgtgttaattaacgtttgagccttgtttgttgtgactgatcttcttgacattgagaaaggctaatcaaacaagagagagagagagagag

SEQ ID NO: 242055 - DNA, 709 bp, Cannabis indica
aactcataaataaaacaaattgtaactctttaaaaagttacaaaaaaacattaactaataatataaataacatttcataatcagaacagttgaagtcgttttttaaacaatacgatttggaaaattgatcaggccctcgcaatgatgttttttcttggacgatgctatcgtatgtccccctcgcaatgatcaagatgttttctcttggacgatgctatcgtctgccacctaaacccagtgtcacactacaaactctttaatcctacgcacccatctacaaacttgaattttctcagatttttgtctttttaattttatttgattagggtgtgatgacggcgaaccattttatggaagggaaaagaggatgtggggaccactgctctaaaaagttatatataaatatttatttatttatttatccaatttgagtgcaaaatatggaaaataggtatatgctacgaaaagatttcaaatagttcgtctatgaccacgggtggttgcttgaaatgacgatattgggtatgtttataattgtgaaaaaggaaaggggaaactgaaaatgggtttggtagagaagggtagaattgtcaaaaaacgtgaaataattgtgttgtgttgaaagaaatgagaatgaggtggtgtgtgacacgtgagaggggtgggttgacgagccaatagggtaaggtgcatgcatgcctggagaatt

SEQ ID NO: 242056 - DNA, 809 bp, Cannabis indica
tttttttaatggccttaaaagttcaggagcataattttgtacatgtcaaaatttagagagtaaaaatcataattagctaaaaaattatgcatacaaaattaatttgaaaaaatttaagggagcaaatggccccataaggtcccctcccttccgcctcttgttgaataattgaagttgtaccaaaaataatatattctacatcaaattggtgaaaaatgtacattaaaatggtgcaatcgctggagatgatttcacctcttcggtctttagacaattccttagaccacatgtcgcctatagaggactcatatctcactttctctcgagtgggtcgtcgattatgtgccttcaaaattctcatcttattctattgaggatgacatcaccgcataacaagttagccttccaagaagctaaataattccttctaacaggattgtaatcatggggttcaaacccttgaccccaacaaaaaaaaaatgccaacaaaagtatccctacaatacttgtctaaatcaaacattttttggaatgatgtcaaatttcattctctaaattctagaagtataataataaaagaaaaaacaaataattgctcagttttccaacgttttagcttgtgagagcataaaactaaacctcacaattttagtaaaaaccaaaggaatatcacattcgtatttgtagtaggtttctacccaatacacattcttccaactttattataacaaagcaatggaattaagtcaacctttttaattaaaacatttgataaatactaggttgaacatttgtaccacactttggcc

SEQ ID NO: 242057 - DNA, 2406 bp, Cannabis indica
agtgtttccactgatgagatagaattattttggcaaatgcagtactctcacttgtgtgccggagttgcaggtcgtcttgacccctactcatctcgctatgtcatggagtatgctgcaggtggagagctcttcgagcgaatctgcaccgctggaagattcagcgaagatgaggtctgatgttgatttttgttgacagtgacactactcatgttatgctaggtcattatagaaaatgtaccgtgtgaatccaatatggcttgctgctattctttctggtaaaaaaaaatagggtctcatagaagaagattagttttgatttgaccatgttttttttggctctgttttgttaatcatcagagacaggaaatttgttttgaagtttagaaaattttactatcctttttggtgttttcaggcaagatattttttccagcagcttatctcaggagttaattattgtcattctatggtaagaaaatttaaatcaatgctgtttcataatctgtgaaaatcaatccatcctttctttacttgctgttgctgataatatttttttttttgggatcatcttgatatgctgtagcaaatatgccatcgagatctgaagttggaaaatactttgctggatggaagccctgctcctcgactgaaaatttgtgactttggttattctaaggtttaaattatttgtcaacttagtggtggaagcattgtattttaatgttaatccagaaatggtttcaaaacaaagagttggaatttttttcgatataaaacactcatgtcgataaaaaccagatttaaaccttttcttctgtttgattgaaaaaatgaaatacataaagataaaccgaactttcctactctcataagctttacttgtgcagtcttccctgctgcattcaagacccaaatcaactgtaggaactccagcatatattgcacctgaggttctctctcgaagggagtatgatggcaaggtaatttagtaatttatattattttgtattcataaaccatgtattcggacttcaaatagtttttttaatcacttgccatatttatgaatctgtagttaaaacaattagaattaagtcctaggattttattgacgtgcttgcaggactattaactgggaatttaaataacataccctgttcccatttcttaaaatcgaatatttttgaaaaatattatggtaagagaaacgtgtttcattctttctttctcgaaatgacttttggaatcaagtttatatgccatccggaacttattcaatattttgtgagttggactcacaacatatgatttcaaaatttggaactaaatgccatagttctttagaatccaaatgaatttcctttccttcattctaaaatggaaataatgggcaaacaatgatttatcaaatatcatatacggctaattatttaccatttatgtattttaaccatcaataatgagtttatattattgtcaagcaattcatttagtacaatcattgtttttgttgatgttctgttgacaaatagtttttttgcttcttttgttttataataattgtagatgctagctctatataaattttcgagaatagtatagacttgctgagttatgttaagtctcttttataatgattgtagttccaattaattgagactttgccttagggatatgattgagtattatctgcaaaggaaattattcactgctggttttattttggtgtatggttcagttggcagatgtatggtcttgcggggtcactctttatgttatgctggtaggagcatacccctttgaagatcaagaagacccaaagaatttcaggaaaaccattaatgtacggtattattcttacaaaccacttgaaataactatttccatcttttagcttaatattcttcattccgctgcagcgaataatggctgttcagtacaagattccagaatatgttcacatatctcaggattgcaggcatctcatttctcgcatttttgttgcgaatcctgccaaggtacttatgatgccattgctatgttgctgaattctgtatatagatgaacatttgaatatgtatataaatatatatatatgtatgtataatgaagccattaaaacaactgacctactaaagtaaactttaggatatgatttttgctgattcatttttaagatcatttgataatttaacaatttataaatatatattttaatgaagccttttgttctgttctgcatttatttactttggagctcactcattacacaaatatgttattcgccctgtctcgtcttgtgcatcatagcttttataataagtaatgtttgacaaataaatcaatggctaatgtttgaaatctagcgattgcttatttgaagtagtcctcatatttgccagcaat

SEQ ID NO: 242058 - DNA, 1179 bp, Cannabis indica
tcctttctctctctccttgttcgaccaaccaaaaccaaagaaaacccaacaacttcatcctttttttctggaaaattcaacaaggattccagaaccttaatcatgtgtttttgaagttttatttttggttaattatgcatataggagattttagggactgttaggatttggtttatgtttggtttgaattttaagcttaatttgagttagtttggttgttttattgctgtttggaggtttggtagcatggatgcacaagtttgagtttgaaaactcaagcttggttcatccatgacatattttgagtttgtgtgttttctgggttctattgatttgaaatgattatgtaagctcattataggtcttctggaatgtttggtggcaattggacatgttttgagtaggttgtgaaatgtttggggaaacctggtgcaaaccggttaaccggtttgccaagacctgtaaaaccggttaatcggttttggcagattccccgaacaacttattttctcaattcctgtccacttcagtgccttggttgggtgatttcatgtttcctatgatattgtggttccatttagtaatagcagaaccttaagttgtaggttcgagttttccaaattagtgtgatttacccaattatgttatgtgattagggtatccatccagcaggagactttctgttcaggtcggcaaactcacttgaattcgaaaaaaaggtaagaatagcgcataatatgtgatatatatatagatgtgaatgtgtgtatgtgtgaaatatatatatgcatgcttgttgtgattcatacactaccaacacttgtacggtagcggtgcagagtgcattggtaaagtgtgtgatgtttgaagagtacatcatggtgttaccaacactagtacgagaaggtacacggtgtatgtggtataacacttaacagtactcggggtacggttcataccctacctacactattacgatggtggtactaagtgcacgtggtacaatggtacatggtcgtatcttagttagaacgttcctactcatttgttaagccttgtaaataggtgtatgggcacctagatacaagtcgttattatgtgatatgttttatacttttcttactgagtctgtcgactcacagttctactttcatgtgtaggtaaaggaaaggcgaaggc

SEQ ID NO: 242059 - DNA, 1035 bp, Cannabis indica
ataaataaatatttatttatttattgggtttcacccacatttttcattggtaagtaaaatgcacaccagcaagagtcaaatattaatttgagaagggaaaaaattgcatcaaaagggtcaaaaaaaatagttaataagataaaaaaaaaaatgcctcctaagagttttgtataagacttgcttcaaacttcaaagggtttataaaatatgatttacatatatgaacataaatacatggtcatatggaaaagaaatatagaaaaaatgttcctatttttcttttttccatattaaaataaatgcaattgaaagctataaagtataaaaaattatttaggatatattatagagaaattctagggtggagaccctaattacggatactctaatacttcttatttggtatgctttgattggttataaatactattgtggacatgataagaagtatagtgtgttgtaggggattatccctttctataaaagaagtgcactggtatttccacttaattttatttgaattgagccacgtattcttatttttttaaaatcattttaaatgccttttttaattgattcgttagttttttttttttttttgtaaaccattgaatatccatttgaagttattccattataaacctctgtgaatgaaattaaattaaagaactctattcgaattacggagtgagttaattttttgagtgatttatgtggtaagtcaatttaatttgatagattagtaaaggtacccctttaatttttacaacataaaaataataattaagaaaaactacaattcattgtttcttccttttctattcgactgttaagtttttggtcataaaaggaagatcaatttgaaaaaatattaaaaaggaaaaataaagattttgaaaaaagtattaaaaaggaaaaataaagatataattatattgtatgggaatgaacaaagcctggtatgaacaatcagcaggaacaatgggtcttcttctcggtttaggaattgaagaagaaaaaaatatttaaaatatt

SEQ ID NO: 242060 - DNA, 663 bp, Cannabis indica
ctcatttcgatggtggtatggtaactcgtgatcacctgggacacttaattgaagcttgtaccgtgtgttagtatggtactgcggtgcctgagttggttgagattatgggaattcaggagactcttagctggatcaaggataaaggttgggcggtggtagttcttgagacggattgcctagtggcggttgagaccattcgtagtcaattaatgatgacctctctttttagtttagttgttaattactgtagacatttattcagttgtattaaagggatctctttagtgtttgtgtatcattttgctaatatagtagcttatagttttactagagcttcctttttttttccaaaataatcagtgggagtgatgttcttgagtttatatctatattgttaaactaatttttcttaataaaattctatttccattttttttttaaaaaaagagttattttatttaatatactaataattaccttgtcaaataaccaataaatattataattataaaaaattctttgtaaaactagtgaaataaatacttgtacacaataataataataataataataataacaacaacaataataataacaataataataataataataataataataacaataatgttataaatattattaattatgtggatgtcc

SEQ ID NO: 242061 - DNA, 822 bp, Cannabis indica
attccttccaaccaaacgccaccaagagtcatcttcaatccaaactgaagtttcatttagtcccaaagccaatttttccaattcgtgtgttgtagtattaacagtgcatctcaaatgcttgatcgagacatcagggtaattagataaagcttgtttaatctagaaaattaggagctcgtttggaacgtcgtattaggtcgtattgtactgtattgtattatattgaattggattatatatcatgtttttatataatattatgttaaactttactttaaactaaaacattatatatttaggtgcccataaaagttaataccacgtatagttttatataaaaatattgcataaaatacaattcaatataatactatacaatacaatacggtttaatacaacgaacctaggtctttcaaatagactgcaatattcttttgttgcgtggagagcatctattataactttataatctgtctctacttgatgaattgggaaaggcttctggcagcaccaatttaaggttgtgggaagcgatttagctccaaggattgatacatccctgttagaactttatattaattgatgatatgaaggcatataatatgaacgatatgaatgcaaaataaaattgtaaagattgaacacatacatacaatgaaaggatcaaaatacatgtacctccaatcattgatattgatagtttgatttattaaagttagatttgcaaaagaaagcgaatacagattacaatgagtactcgggcttcaaagcttttactagctcttttagattagaatgagcagcgagtttgaggatcggtat

SEQ ID NO: 242062 - DNA, 667 bp, Cannabis indica
tttgacaaaaaatcaattcagggtcatatttgtactattttagaaaatacagggtccattttgtcatttaacaaaacacagagtccaattggtaacttttgtaaaacagagggtccaaaatggtatttaccctaaaggaaaacttagaagatagacgaaataaaattcatccattttagaaaaaacaaaaacttcatgaatgaaaaaagggtctctactctatctactaatgtaatgtgtactcattaaggagaagtatggatcattgactaatgattaaggtccaagctaaatccaaaaagaacatgatatggtttggactcgttttgctaaccaaatccgctctgtgagaaattttacatgaagatttgatcagaatattggcatatagcttcattggggttcgtgtttcctcactggattgggataatgatatgactcgtcttgaaattgttggggtgctaaacactgtggatggatgagaagagaggctcatcatatgatgatgaaaattagttacatcttagaaaaaggaatagtaaaataacaaataaaacatacacattcttctatcattcctacctctcataccaagcaagcccaattgataaaaaataagtgctctatttcttcctttctacatcgactctattatcaaacgtagtct

SEQ ID NO: 242063 - DNA, 1946 bp, Cannabis indica
cgaaatataaattgatagtaagttgagtaccccacatgactccatttggctctgccaatgtttagcaaaatatgttttagcattggatgaaggcttttgttggatgggtgaaatcttcaattttattttctctattattgtgtaaatgactttcaatttataataatagtgagtttttttttaaaaaaatatatttaattttagtcaaaaaaaagcccaacatgaattaaaaaatttacggagcatgatttagtagatataaaagtgtgtggagcataattaaatttatagtaatcatcgaactagtaaaattgaatgaaattaaacataaattattaaatctaacaatttttataattttaaaaaaattattaacaataaaaaaaatcaaaaaaatataatttaatacatatgaaaaagtcaaaaaattctaaatagacttcaagatttggactatgacaaaaaacctattagcgaaagctaatttttttaattaaaaataagcactttatgtcacatcattttctattattattgtaaaagactatttttgtcaattaacatttaataattgaagtgaatattaagtcttaactgaacccaaattagtaataatatatatttgacttgatgagacctcactttttttttcttttttgatgagacctcacttaataaattaattagatgttaattaagaaccttttgattaaagttcattttcactaaagtaaatacatttacacaccttctaatctttaatactggcctggcccaatgcgggctagacatgtgtttaggattcatcagtttagtagttttaaaaaaaaattcttttaaaaatacatatttttttgttaattttgaaatgttatatttctttctaaataaaggtctaatttttttatttctttctgatgaccaactaaaatttaaggttggccttacaattttgttgacatagtgattagaatcactcatgaatttacgatgttaaaattcacaatcagcacaggaccatcctattcttgaaccagaatagctcatcgtctaaccgaaaaatatattttgtcgaactataggctgctaaaatcttaacacgagctacataaaacaaaactactctaaaaagtttagacaataaaattataatgtcttcaaacaacacccctagtacattgaaaaacacattcccatcattaatatttgttgtcagagctagcaaaattaaaaataaaaatatcgcaataccaataaaccaaaagataaaggtatattagaacaataatcttcaacataaaaataaatatacaaacttagaattttacacacaacccatttcatcagctcaacataactagaaaactaaaacctgttgaaataaactcccacatacactgtccagatcagcacaaaatagttacaacaacttaaaagcaattacaagcttgcaagtggccttcagccttaaccaactactgagcagaaccaaaattagttgcaaagtttgttaaaattgttgcaactaactcttagctctctcacctaaagctatatacaagctcagatgacttgaaaatagagatcagatcgaagaagagaagagaaggaggtccattccaagagaagaacatacataagaaaacaaaagagagtcaataaaagagagaactaaaaacacacagagaaatacttgtaaacaaaaagaggatcaccaatcaatcacctgtgatttggattcccagcttgtaacttgctgatcttgaagattcaaaagtgaaatcatgccattactgaggcgagctcaaaagagcaagtacccaacaatttttggggaacctctataataagtgggtgtgatctctcctttactttcttatcattctattgttgtatgtgtgtgttatttttattggtttaatctcttatgttagcgctcccactca

SEQ ID NO: 242064 - DNA, 955 bp, Cannabis indica
tttgattgaattgtctctcatcacccacaagtggattttacaagtaaattcatttttttttgggttttttaatgtgtttcacagtcatcactttacatagcattttgaacataaattcaaaattgtatatacatttaagtaaaatataaatacgtatgaatggtgttggttcaatttattttttaacagttgtaatagtatagatcgtatgaatgttgctacgtttgcggagaagaaccgatttggttttggttgggtgcttcgggacactaccggttgtttcatccatgctaggaccggctcttggcaaggaagggttgatcctggttatgctgaggcgttaggagtgaaagaagctctaagttggataaagaattcaaatatctccaacgtcacagtggagatggatagtcttgttaccgtccaagctctccggagttccataactatggcttctccatttggtagttgcatcgaggagtgcaaatctcttctttccaacttgaataatgttaattttcgttttgttaaacgatctgctaatcgtgttgctcatgcttttgctcgagtttcatggttacatgctgattgtagttattcggtttcctccattccgagtaacatctttgatgtaattgagcaagaaatgcattaataaaatcatcatcttttattcaaaaaaaaaaaacttataaaaagatatgggtcatgtcttattgtactaatattttaaagtataagcccaacacaatttgtacgcctacattttcatgtcatgttcggactcgtgctgactttacttgagccgaccaaatttcacaaataagtcaatttattttcttataaccccaacttcattttttcaattttatctaatcaataagttaatcattcaaatgtattttttaaagtttctaattatttttttttataattaatgaattaatcacacaat

SEQ ID NO: 242065 - DNA, 524 bp, Cannabis indica
atgtaataatttcctgtatatatctcttgatttgtgtagtttttcttctttgggtctaactttaggggatgtttagttaggttgtatgggtgcctttattaagccggttctgttgttaggctagcttattagtcctttttaggctttctcctgaattttattttacttgttaattggcttgttggttttatgtatattagtgtaattaggctattgattctgattgctctagttttagatttgttatggaatttactggagaaggaaaaacaacaagttttggaattacggaaagatgggagagttttgtgccatggaaagtgggaagttttgtgccttttgtggttaaattgtgcctttggtgaggtttttgtgccatgatatgtggcttttctgatatgtattacggttttgctgctgtttaaggtattttgatgtaatctgattcaagtagctattacaattatgattttgaccgtattaatttctttatttagagtgttttgaccttatcgtataggatg

SEQ ID NO: 242066 - DNA, 2434 bp, Cannabis indica
atattgatattgattgtaaaaaaaattctatggtatgtcttattttatgttttattatattttttcattgttttagatgtcttatgtttgttcactttattaatttgttatattaggtaattagtttctatattttattattgtttttgttgttttagataactggttctaagtttcaattttttaatttagttgatttacataactagtttctttgtgtcatattgtttaaataacttatatttaaatataattggtttatgtgtcttagataccaacatttaattttagtgacaactttgatgtctaaacaactcccatttctaacttcggtgacttttcaatattgacgacaactccaacgacatttctagtaatttttccaccgacaataacaactctggcgaatattttcattctgttttctactttttttgccgctactattttattttaatggatggtgtctgttttggatagtgggttgatggttgagtctttgaccttctaagaagtttctaactacttttagttttaatattgtaacaccctacttgcttaggccgctacagtgattttctattattgtgcacgcctttattaatcaaaagatttctttgaacatcgtgaaatttaaacttttaatttaacattaaactttataatcatataaccttacataaaatttgagatcccgtttaaaaagtttgcaacatcattgaaaatatattttacaaaagtgtcgcttcgcgacaacaaaatgaagacccatgttgtctcgagaccgaacactccaggtataaccatcctaatatgtacaatcatcctcaagccctgaactcactagtgctcaagtttcgtcttttccttatctacacatgtaaataatatctgtgagtcgacagactcaataagaaaagcataaaacatgtaacatattaccgacttgcatctaggtacccatacacctatttacaaggcttaacagatgatcaagaacgttcttaaaaaaagtacaacatttgcaccacatgcactaagtactaatcccatactagtattggtaaggctgaatcacacctcgagtacaactgagtgttgtacaacatccactccgtacttctcccgtactagtgttggtaacgttgtgtcatacccctttaacatcatatattgtaccaatacactctgtaccacaactgcagtagtgttggtagtatataaatcacatattatagcatccatataacatacatacacatatacacaaatatataatatgctagtcttacctcgttttgtaatttaaatgtgccggtcaacttgaatagaaattatgcactaaatggaggccctatgtcacattgacataaaatgggtaaataacctactaaaatatttttgggaacctaaactcaaatctagaagtttttccatcgataaatagcatggaagtaccctaaatattgaggaattagaaaaccaaggctcctaaaactacctatactggtaaaccgaattcctaaaacggtaaaccgctttctggtatcctgcctgggaaaacggttcaccatttctagaaaaataatggaccgtttttctgtagaaatccccaagaacttcgaatctcactcaattcttccccaattttcacaccaagctccagaacacctaattaaaccataataaacataatctaagccataaccacaagcaaaactcacaaaatccaaatctttcattgttgagtcaagtttaagttcttgaactcgaacttgctgaacaactcaatcagccctcaaaatccaaccaaataatttttaatcaactcaaacgaaccttgggaaataatcccaaacactcaaggtttgaacaaaacctaatgcatttaacttgcatgcttgaactaattaaaacctctaaaaactcaaagaaaaagaaagcaagagcttactactgatttgaaccacttttacatccaaacttgaagttcaattccacaagaattgatgaagaattggactggagcttctagtacttctagggccaaaaggaagaaagaaaaagggaagaggtgggtttttgattttttttttcttaacttaaatggataatggttgacctaaattaaatggataatggcttacctaaattattttattccaatatcaaaattagaatacctgattcccaaataatccactaaaaaataaacttataacctttaggcaaaattactattttccctttacttcacccaaaagtaaccttaagttaaggcttaggggtaaaatggtctaataccataatcccgcataatcccgatattctaaatatcacgtattattatcccactaaataaagatcctaaatattatacccatgtgactctaatggctaaaccgttgcaattccatcgttaccgagcaaaaat

SEQ ID NO: 242067 - DNA, 902 bp, Cannabis indica
atgaatggatcagacatacaacaacaagcttatggcatatcaaaatgttcgaaacctatgcctcagaacctattttgaactgatgtgccaaaagtaatgttgaggcttatgtttctttggtttagttcaaaacttatgcctcaatggagcctcccactagggagttttactccctgttggcctcgacgcataagccttagttgttttagagaatataagaatctgcattggacagaatcatccacggtcaatttatcaaagttgatttacaataagaaaaaactgaatcatcacacaagctcttctattttccatgtagtgacatagagctttaatcccggccaagtttcaaagttctttgaattttcggtctattgttagagtttctttcaaaaagaagttccaattagaatccaattcaggcccacttgtgcatactaataaacaaaatctgagatgtggccattcttttcggaggataatttggccaaggccgggaatggtattaaaaagtagttcattttattcaagcattttcctaagagaagaagcacattttctgtggaacctttaggacattctcaaggccaacatggaaatagagtctcacttattgttatatatctattccttgcttttaatgattctgtactacagagttctttttcttgagaaaaacctcttgttagggtgtatcaacccaagtcccacattgaaaagaataggcaagagttgccttgaatataagtgtttcacctactctattagtacgaggctttttagaaaggtgcttaaaaacaaatccgtgagagcttttaggcccaaagtggaccacatcatactaatgtgggagttaaagtgaggctgcggcccaagaaagtaatggggcccaacacctccaa

SEQ ID NO: 242068 - DNA, 563 bp, Cannabis indica
aaaaagttatcactaaaaatagcaattttttgtagtggactaacaataaatcatttctgtttgattacacaattcaagatgatacggatcagctccttcttcttagaatctaaaggaggaaaggtgatccaagggaatgattagacatgtaatattgaaggcaacaagattgataattttcagcctatctaattcaataaccaagttggttgataaggaggatacactagctaaaatttgaaagaagccgaggaaaatttttagaataagtctttaactaacaagattttcttgaaggaaagaatctttagattcaagatgagtctggaacaaaacttagatgagttcttaaggatgcacatagagttggcaaactcaggggaatttgaagctttgagtgatgagaatcaagctaaaattattctcaattcactactagtcttacaaggaagtgatgagtgcacatttgtacactcattcttagtcaattattagatagattagtatttatttttgtatagatttgatgtgttttctccaagtgtgtaggtttgtgctgaaaa

SEQ ID NO: 242069 - DNA, 988 bp, Cannabis indica
attcacgaattaccatcaattgattcaaagaacttcaatacaataaacaagtgaatacgaaagcttacagattgtaacgataaagaagacgagaggcctgtttgagaggtaatttagccattccatcggcgtattcaatgaaaacatactcaattggctcattagatcctttaggaacgtcaaattttatacccacaaatcgaccaacaccaactttcttatgcacaacgtaatccccagaacgaagtgagtaaggatcgaccttatagttaaaggaggactcaacaaggccatcctcgtccttgttccgttgactggtggagcctccacgttgcttgagcttctgaagacccctctgttgctgctccttcaccaattgaatgtacttatcggcctccgccgcgtccacaagggttctagaaccatctcggttgccttggtcacggcgaattcggtggttgaggagtgtaatggcgtctgggtcgtggtttagggtttggaatggagtttgggattggggttggccttgttgggaatgggtggtggatatggctttgggttgcgagaaacgataacaatggaattgtgcttggcttagggtttgagaagggaagaaaagccttctccatctccagggagtgagactggaaatgtcagctggtgttgacagtagagaagccattgaagaacatgagagagaagatgatgaagaagaagaagaaaagaagatttttgaggtttttgagtaggtttttctttttctttttttttatttaaattttaataaaataaattgaataaataaataaaagaaaaaaaaaagatatttaatttgtggtttgggtaataactaatacatcacattttttgtttttgtttgtgatttttcctacttatttgtttgttttagaaattccatacttttgttagttttattatacatttataataaaattctttttgtgtaattcacttgtcaaaaaatgct

SEQ ID NO: 242070 - DNA, 1108 bp, Cannabis indica
ataatacactttttaatagaacattttgtaccaaatagaagtggctaggcaactactcaatgtcgtgatcaccacttttcctttttccatagataagagcctcaatagcatcagggaattatatatatattatatatatatatatatatatttatatactcaaatattctaatttgcatatgaacatggaagatcaaatcaaccatttatgaactatcaacccaaatccaaaattccttctactatcctattaataacagtaacttacaataaattcatctcagctaactaaacacaattcactaaccattacagaaaaattaaattaaaaaacaaaacttcaaaaaaatatactcacataaaagcacgaaccaatgattttcctttcccatcaccacaagcaacgatcctcatcccatcaggagaccactgaagatcatcaatccgaccagaaagaaccttaaactcattcttcaaaacaaattcattccgagtcccccagatcctgacacttccagacacatcagcagaggcgatccactcagcgttgggagagaatcttgcaacggtaacgggataagcatgttcagcataaacagaaacctcaagaggattatcgagattgagaataattacggatcggccattagtataaagaattgaattggatttcggacttccggagatgagaatccctcggcctcgctccgtcgaaggaacacaggcgtaagtctcggcgaggtctggcattgttttccgagaaagagagagagcttcaatggggtactactgagtcgaactcggaatggaactcgggatttggagtgagtcaagaatatggagatttgaaaggttttgggttttatatatatattgggtttccgatctggtgctcagcacgaagaaggagaagaaatgattgtgacacgttgaacggttaagcagagagagaatagtgactttggacacgtgtttatttatgattcgttgtatctataactaaagagccttctttcttttgacaagatgactttagtaatttattttcttttaaaaaaaaatgacttaaataattctttatgcacttttacggaattctacataaaaa

SEQ ID NO: 242071 - DNA, 1147 bp, Cannabis indica
taaaataatttccaacaacaccacacccatacacactcacactgtaccagtcggaccacccgcggcggagctattgtgatgacctatgcgacatctagtgacattttgcgatccatataatgacatactgcgatgacctatgctctttaattacatattgcgatgaggttaccgacattatgctttttgtcgacatattgcaacactattggcgacatttgttgataactactcgagaacgtgcaagggatctattaagatagccttgccgacttagatcgacttatgtagcgacatgtagcgacacaacacataatttcatttaatacaaaattttatcgacattataagacgtgttggcgacaataaacttccattattcatttttaagtcggtgcaatcaatgtggaatgacataatagtgacattgaacgacatagtagcgatatatatagatatgaggacgtgaatactagcgacataatatcaataaaatatgattacttgttctagctgacataatattaaaatgtctgacctttcatgacaatcgtaacgagttgcacggatgatgtttgcgatataaagcgatacttgtagcgatgttcattacaaaaaaaaaaaattaacaaaaaaaaaccaatatcaacaactatgactaccaaatcaagttctggtagaagaggtccaaacctcaccgttctctgaatatcatcatgttatcatcattaattttttccaatgatcggttcatcatgaggagtttgatgtgttgggaatattttaccggtatctagatttactaacaagtatgttgaattaacatcctaaatatgaatatatctaaaacaagaaaattaaacacataagagtttagaaaaccttacattgattgcagcgaaataatatgactcctcccgcacagatctctaacccttgttcctttctgtcgcagagtgttatcaagatctaagcttggatctctttctctccttcgggttggttaccactgtcttactcactatgattgagtacttgacttgctatgtgtgggcactctatcactataggctcgagtatgaagaacaatgaaggaagcttgaaaactgtattgaaggtgtctctcatttactagttgtctgacaga

SEQ ID NO: 242072 - DNA, 860 bp, Cannabis indica
agatatatacaatgcctaggaacgcccatgtcttggtccaatatgaccttctcaaccaatttttgaatttttcattccctgcctgggttttaatgttgaggtgctcctccaaattttgtattttcttcgcctcaaaagcttcattaatcgcaccataacttctgaattttttctcaaattaatctccaggtgctcttgccccgagaattgatttgtttgaccatttttttccatattttttatttttcttttattttaaacctacaaaataaaagataccaaaaagcataaaattgcaccaaataagagtaaaacttatttaaaaatacactaaaattaacttaaaaatagtactgataaaaatctaacaacgacaaaaaagaccaataaataaattgaccattaactcattagggttcctatcccaaagatagctcaccacataacaagtctttcaagggtcaaacataacccctcacaattgaggagaacgagtgagagtcgaaccattgaaccatgtaaaggagtagactagtaaaagctttcttgcatgccattacaccactaacacgtggtaccattaatgtacaaattggaaattctatagtacaccaatttaggatgctctggtaaactcctatctaattcgtcattcgtgagaatcttttaatctaatttatatatatatagaattctattttcgatgcaattatttaattagaggtatctgtaaatttttaaaatattttgaatagtttataatacttaaaatatttttttttaaatataattttcaatcgtacgtataaattttttgttatatgcgtaattgtttttttaattataattttataaataat

SEQ ID NO: 242073 - DNA, 975 bp, Cannabis indica
tggttttgagatgaaatctcatgtcctttattctaaattcaaacaaggtcaaaacatataagccttctcccagttaggatgctcattttcgacatgggaatgggcctgcggggactcgcctatgatgaggtgagaatttctcgtttgaaagggaaatagagcatggaaagggattatttcttgtccccgaatgttaaacatgcgagaatgagaattaaaatccttaatggagaccggggagtctccctccccaattctccgtcccgtatgcattcctactcccagtcctcagccactttgaaagtttccattttagtaacatttcctacatgtggcggcccgattggagtgttttctaaactcgaatgcaaaacacctaacgccttttttattctggcaaaagatttcgatgacgatgataaactagttgtattttcattatctagattctagaacactccatcagtttcttatcacatgatcatagtttctttcacgaataaaatattttgaaacataactcaatagaaatgtcttttactcttttctatttttctcttcttagaattatggccgaattcaaacttagtaccctaaagttttattgttctaataacaataataaagattatttaatgataaaaaaaattatattttgacaaatttacaattttttttttacattttacggattttaactttctttttttttaacaaaattacagtgtttttattttcaaaataacattattttcattttattgcacaataaaacaactcgagaacaatgtgttttttttttgggagaaaaaaaaaataaaaaacatgtaaaaaatcgagtccgtaaaaatatataataaaaatctataaaactatattttaagtatattgtacaaattttttcaaaaaaataataaacaagtaatagtgaaaatagaccgtttataacattattttagtattttgtgtattttt

SEQ ID NO: 242074 - DNA, 935 bp, Cannabis indica
tgggagctctagatctatttgtaagagatctacattttttgaatctaaaaagtgatattaggaggattagttctttataaatttgacctgaattcagggttgaattttagtttgaactagatttttctgatctttctttcctcaatttgaaataatatttgtttggattgattttgttcttcttctcaggttaagtcgctagaattaatggtggatttccaccttgttgggtttcgtttcggttgtcttccttggttgatctgttgaagctttcgtaggtgtatttttgattcgtggggctgaaagtttagaagaagaggtataattgtaatattttatttgtggaccgtataaatatttaatgggccgacctactgtattttggtaatattattttatctttttttgcatatacataaaaaaaagtccttacaaaaaataggatgattatttttattttcttaaaagatagtttatattagaaatatttgttaaaagtaataaaataaatattataaattaaatatatatattaaaaagacttaaaactagtacactataaattctcttatcagaaagaaacaatatgctaaatatatttaaaaaaaatagagattaccaaaaataaaaataaaagaactaaaataattattaataacttttttatatattaattagttttaactatttttacaaaaaatgttgttagataagaataaaaaaaaaaaggttaagttagagattgtataatgttagttaactgttatagtgagattttctcacctagaaactcgagaccggactcctattaaaaaagacatgtgtattcactttcctcgaggagagctgagatgtcgatgagagacccctcgaatatgagccttgcctgaaccagattccgcggaatgatgcgaccatgaccgagtccagtcgca

SEQ ID NO: 242075 - DNA, 1727 bp, Cannabis indica
aagtttcaactattccagagaagataaaagtcatgaaaggaattccttaggatcaacagtgagaggtctcatgtatgttttaaaagcattagaccagacacctgctgttgagtgggagtaatgagtaggtattagattaattcaggaaaggaacattagaagataatcaaataaatctttagattaaaagacgaactatatgttagtcaataagggtggtattttgatactctcagactacaccaaatcaagtttttagatttgaatcattgctagaaggtctagttatgagacagtgattactctgatggtggagcagtgattttagggaagtgtaaaaacttgtctgaagtctctaactctgccagtgagattgaatgttaaagttgcaggaatgatacttattcagcctatgcaatgctctactatgttttcaaacactactattatttagccttaaatccatctatgatggacatatgattgtcctagctatcttcttatggccttcacatgtaaggcttcagatttactatgtcaagccaaagtatgcctacacgacttagaggcatgtttagtagcttattctaagcgttaaaatttctctacataagctctttgtgctagttcgatgcattagacaatatagatgccccttaagcgaccatactggcaagtctcttggtcccttgctattcaccaagtttcacagacttttcctgggttcttccttggggtgctatccatagctcacatgcgaaactgaaatcacgtggtttagaaagctttcagcttagtgtccacttttgaaatcacgtagtggctacccctgcgcagcttagcaaagcagaggccaccattgaagaacagtgggaggacatgcgtagaagattttatgggttcctacacgatgaaaggttagaggaacaaattgaaaaattggctggtgagagtacttatcgagatgttcctatttcagtgtttgggtagaagttttgacttcaagttctcgttgtactagccagacttgtatgcacctatactgttatcttgtatttgttggattttgtgccctaaataaaactcatttcaatataataagatttactaattaataaaagataagaaattatttaatgttgcatggttaacatgatttatttcatgattatatgcttaatgtataaattttgttaagtcctaaatatatatatttctgcatgattatagtgttatcacactactacaaaagtacaatttccgtcagtttctaagtatcatttaaagaatttacgttggtttagaaaatcaacgtatatgccatagtcgcaaatagttttttattagcgtcatttttgaaatgacgcaaaaacaattatcttcatttaaaaaccgacacaaaatatacactcttcttttttatcttctacgtcggtttagaaatgacgcaaaattatttgtggcatttcgaaattgtcacgaaaatcttataccgtcggttcaaaaatgacacataaattgttgaaatacttttttttcacctattgcgttagttataaaatgaaacataaatgtaggtaaggaaaaattagcaaattttcatacaattttcccacctgcattaccaaattttaaaataattttgtataatagtaaatatataatacaaaaaaaagttaaaataaacgtttataaaacttatataaaattagaaacgacaagaatta

SEQ ID NO: 242076 - DNA, 1030 bp, Cannabis indica
taaaaaagagaaacagatgttgttgtggagttttggagtaaacataaaatttgtattggagctttattagaaactaaattgaaagataataaagtcaaggagatgatggattctatgtttatcaagttgggagtatttttcaagcccaactactgaagggcgattgctgataatttggaagagaagctttgttagattgatttttaatgctgagacacctcaatcggtccactgttatgttaatgtttcaggtcaagaaaaggctttctgcattactttcatctatggcttcaacacccttgatgagaggaaaagcctttggactgatgttctgagtttaaagctacctatgaaaccttggattttgctacatgatttcaacgatgtgtttaacttggaggataaaactagagggaacccgattcagtatagtgatttacttgattcttctcaatgtcttgctcaagcccatgtggagacacttaataaaactagctcaacatttacctggactaattatcaagatagttttagtagaatatactcaaaaattgatcatgcttttgtaaatgatgattgggggaatctttttcctaattccacagctcattttggttgggaagttatctcatatcactactcttgtgttatcaatgcaaaggctgctgtgaatataggtgttaaaccattttaattctttaatttttgggttgatcactcaaattataagactctggttcagaccaattggggtaagaatggtgctgccactgatttaaaaagtgtttatctaaagttaataagagtgaaacaccaactcaagaaattcagtagggaaacttttggtgatatgggaagaacttatcaaaaggccaaagatgattacatggaagcaaaacataaggctcaaatgaaccctagagatgcttgttgtcaagagcatgagaaaatagttgctggtttttcaattttcaagaaaaaatgtacaaaaagtttttaagaaaacgttgtaaaatcaagtggcttcaca

SEQ ID NO: 242077 - DNA, 1251 bp, Cannabis indica
ttttttattattattttttaagaatatattgtttaagatccttttaattattagagattttttcccttttcaagtgtaacatttattaaaaaactagaatatgtattatagagttatacacgagttaaaacctacaggttatgggtctacaaaatttcatattcacaagttttataaagaaagagttacacccttacccactcgtgaatactactggtttgaacgggtaatgggtcataggtttcaagtctgttgttgatttttatggtctaaagcaaaatttatagatgaagaatttttattaaaattgtttacccaaaaatctagtttgatgatgtggacatcgtttgtcacgttacaagaaggaaataatccctgggggccccacatttcggatagggtagtgtaatctgcatgctcgacacaaactcaacgcccaggtgagcaaatggggttcctaggtagatgcttcaatctcacaaagttgttttcgagtatcatgcttcaatcattcaagctcaacaactacaacaaaatacatgaaagatatgccacaatcaaatcttgaaacccagaaccaattccaaaatagaactttacctaggggcacccaaatatttatcaatgcccaagtgacatcatatcattttgggcacacgacaactacagttcagattttttagaacttctttggacctcgattcctcaaatccatcaaggaaaaatgtcaatgtgtatacctgagtttttgcaaccgcctaggagagggaaggggtgcatgaacctgtattggatcccaggttgacattatgcaactcacgaggtgctcagatcactggagtgacttttccaagcaaatcaacaacgattctgacgaaactagatttgtgtgtgcattttccaccaagaagatcaatttacaacaaaagagcaaaaacatgagactttcattccgggatggtgcccatattgagatgtctccctgttaccatctctcaggttgacatatttgtacatggggcactgttggtgtaaagaacccttaactttaatttggaaattagcagataattagggtttaattatgaaacttgcatgttagttatgaattatcagtttatggagatttatttgaattcagaatgcattttatatgtcatatatggagtttcataattttgcatgttttgtgcccgacaacattggaacgcggtgtttggctattaaaatcacatattagtatttttagta

SEQ ID NO: 242078 - DNA, 1214 bp, Cannabis indica
agaagaaaaaaaaaacaactaaagagaagggggaaaaaacagtgttgactaactgtgtttctttaagctcttttaacccgtgaaaggaattattcgcagttcacagttcacacaagcgtggtttatttaattttcgccaaaaaaaatgaaaataaaaaatttatgccataatttgatttatttaatgcggtacgtgatttatagaaataaattatttgcaaatttaatgcaataatgtgttttcttaatttaaatgggtggccttgataagtgaggggtcttaggatagtcttaattttgaatgatgggcaagaagtggttttgttgaactgtaacatactctaggtgattggagtatttacaaatacaatgcatctctaaattctgcatttaaaagatgttggtagcgatgagattttggaagtgtttttcaccatgacgattttgttttgcagattgatgagaatgttcaaagagaaatcattaaccacaggtctttgaggcacccgaacattgtcagatttaaggaggttggtagattttttttttttttttttttttaatcttccaatccatcccctttccattaattaattcgttgctactcttgctaaatgtataggtcattttgacacctactcatttagctattgtgatggaatatgcatccggaggtgaactttttgaacgaatttgcaatgcgggtcgcttcagtgaggatgaggttcttattcagatatccttgtttcttcttatttgttcctttatttttttcaggctgtatattgttgtttcttttcgtgtaggctcgtttcttttttcaacagctcatatctggtgtcagctattgccacgcaatggtattcaaatgttaatttattttcatttaactttaatgtggtatgtcctttatagccaatgatatatttgttattgttttctatttttctttgtaaagcaagtatgccaccgtgacttgaagttggaaaatactctgttggatggaagtccagctcctcggttaaagatatgtgactttggctattctaaggtatcaagttattttcttacacctccgtttggtttgagtattggtcctgtatgattagattaatataaggattttggggttatactctaaaggtagttaagttagtgggagagtttattctgttaaaattttgttgggcttttacattgtggagataaacata

SEQ ID NO: 242079 - DNA, 673 bp, Cannabis indica
ttagcatggttctagaagagattcaagtctacgaaaagaaatcaagtgttaccattgtaacaagccaggtaacttaataaggaattgcagaatattgaaaagagagcagaatcaaggaaagaaacatgagaaagagactaatatagtttccactgaaggtgatgttgtcattgtatgtgacgatgggtgtgttagtcttgcaacccaagattgcagttgggttatttattttggtgcctcattacatgttactgctcgtagtgatttcttctcttcttacactgttggtaactttggcattgtcaaactgggaaacaatggtgtatcaaagattgtgggtattggagatatttgcttggaaaccaatattggtagcaaattaattctcaaagatgttaggcatgttttagacatttgctttaacttgatatctgttggaagacttgatgatgagggattcataaactgttttggtgaaagtaaatggaagctcgccaatggttctcttgtagatgtgaggggaaagaaagtaaatactctttatgtcatggaagctaagctacacaaaagagagattaatgtagttttaaaagatgcaaatattgatctttggcaccagaggctcagtcatatcagcaagaaaagactttaaactcttgctagaaagcaattc

SEQ ID NO: 242080 - DNA, 1116 bp, Cannabis indica
atcaagaccagatctatggatgctattcttggagtacaggaactagaaataccagagataccagattcaatggaacagtaccaggagcattgctcttcacctgatgcgactgaagcaactcgaagtgattttcaacaggaattttcagcgtggattgatgctgcaaacaaggtttctcaggaggtaagtattggaaagcatccatctcccccaatacttagatctaacatagttcggaatttggatagtgcgtttgaatgttccaaaccgaagagtgaggtgaaattacagggatcgaaaagcaaggtgaagattgattttactgatattgaggatgaagtcaattattggcaaccttctattgtttgttatgtcattggtgcaaatcctcctgtcaatatactggatggttttgtgaggcgtatatggaaagattcagtggtgaaggtcggacttcttgctaaggggatattcataataagatttcagaacatggagcaaagggacaaggtgatgcagcaaggatatgtgttctttgataggaaaccgatggtgatgaagccgtggaatcccatagacgattttacgaaggaagaggttactaatgttcctacatggattcaactgaagggcttggacatcaaatattggggggagactgctctcttcaagaaggcaaattggggaaccattacaagtagataacatcacgaagaacagggacagattacagtatcccaggattcttgttcaggttagcctttcacaggactttcctaactcgatttcttttactgatgagtttgatcatgatattgagttggaggttaagtatgaatggatccctcttgtgtgctataattgtgctggtattgggcatgagactgataattgcaggaacaaggagaaaggaaaggaaaaggggaccaggtttgggtgccaaaacaacagcagagtaaagtcgtgaatgaaacagatagtgatggttttcagagggtgatgaaaggaaaaagagttgtagtggatgaggaggtggttccaactgaggtaggaaatatgtttgattctctagcagaacatgattttatgggaaggggggagatccctctacctcca

SEQ ID NO: 242081 - DNA, 713 bp, Cannabis indica
atatcgtatttttaaagaattgtaattaagcaatttagtcaacaatgctttcataattaactgtaaataacaatggtttcgttatttaatgaaactaataatgctgcctactaaaagtcaaaacccgccgagtaatttcacgtgtaaaattgctttcaaaaaaaaaaaaaacattcacgtgtaaaacttgaatataactacttgattatcttcttattagaaaaatctattctatactcttaaaaagggtgttatagtatcctttatttattttggtacttacagagacttttttagtttaaatttatttattaattatggttatgaaagtgtaccttattgttatttatttatttattaaaaaaaaaattatataatttataattttaaaacattttggagggtgtatatacagacttaccgcttcttatttacttaaatattgtacatatttgtagtcaaaacttcatgctttagcaaataacagaaaataatactataatgtagtacaacaacactttccaatataaatacatttatctttaataggactaaaatattgtaaattatataatataaataatcaaaattttaataataattttctaattcttaaaatttaaaatttatttcaattaataattatagaatcaaataaaatacttgttcattgcaaaaaaaaaaataaataaataaataaataattgtttata

SEQ ID NO: 242082 - DNA, 2349 bp, Cannabis indica
ggaataatgctagcttacataatttctcctaactatcagtaattctctctttaggtctcccgtcgtccgaactgaaagtgatttaaggatgtattctgtcagagttttgactagtctggtatggtcaagaatctatctattttgaacaatgggatcttctatttataggcaagaatgaccattgaatctttccctttctctcgttcagattggttcacttgaatttttcctcttcatatcttcatgcgcactttcctctccgatcccactcttcaagctcttcaaactctcttccttaatttcttgagttctacttttcttcatgagcttcatgagctctgttccgttttcttctgtattccccttttaatgaaatgatttgtttcatgtcgctttctgccatatgatcactttattagttttacttcaggtattatgagtaaaattacttttatacctctaatgttgtggaaaccagttacccaaaataattctcaagtgccaaaatgaatcctgattgattttaatggaataatcatttcaaatttttagaaaactatccttaccttttcttattaccctaatttctttattttaagtttaaattgttgatatttatttaaaaggaaaatcgataatttcagtaatttctttgatattttctcatcgctgatcttttatgttcttttacctttcttcgcctttatcctcttgctttgtttgtccttttactattaatatttttccttcttccttttgtattttgcaactgtgacttcaaggacatccaaaaacaaaaccaagtcacctagagggcttctcctttggctgacccaaatttcttgcataaatatgaatcaacttcaatgatttataaactaagtatcatgttccaaaaagggtcaccagtcacatgttgacgaaagatgaactaagttaaagtttggaagaacttgaaatgtccaatggtgaaatcttggccagcgggaagcatatggaactcatgtgtttccctattctcccttttttggcctatatcatttctcttactgaagtttcaatgatttaattagttctcaattttgtctagacagttttaggcgtggctgctctttgtgctctcaagggtatgacattgtttacttttgaatttttcacctgctttagaacaactatttgtacttctcgtttcatagccttaggggtgttcataaaatagtcaatccaatccaattcgcacaatctaatccaatctgcaaagtacatatatttgtacttgtgtagattggattggattagaaaatccaaaaatctgcacttgtgtaaattggatgttgattagcatgtaaaaataaccgatctaatccaatccacacatatttataaaaattatatatacaattaatattttaatttaaaaaaaaatagtaatttaaaaatctagcacatacaatacaaatatattttaatacataatttagtaaatgtgtattctattcttatatataatttaattttttacatatacaatttaaaataaaattaaatatttctttctgcatttgacttttttttccttcctttgaatttgttattttttttatttatttttatttgttgttcgagacataaaataataatattttgttgttagttatgtgaaaaaaatatatttttcaataaatattaaataatttaatattaaaaaataaaaaatctaaaataaccaatctaatccgtacttttgtgggttagattgtattggatttgagctattgtgtggattagattggattcaaaatataaagttgcacttagtgcagattagatgtactataagaaaaatagtacggattgaattggatgaacacctctacatagcctagtatatttcttcaaaaagccccaattgtataatctccaatttaccaacttcaaacaaaggttgggatgctttttgttaacacataattttgttaacaataatgaatgaggctctttaaaatgaaattaactgtgattgaatgaatttcccttataaaataaataatagtaataattaaggccagaagatttttatattattttgtagttaaatctacatagtccatgagtccatattattttttaattatctatctttacaaaatacaagatattcaatattaactgtatgaaatactgagtttctatcgttgttctttaagagtaatttttcttgaaccccaactgtacttatatcgtaggttctctccctattaataggattttttagaataaaaattattctcttttggtcttatctagacagctgtaacaccctaactaacataggcgtattacgtgatt

SEQ ID NO: 242083 - DNA, 699 bp, Cannabis indica
tgatcagattaaatttttaaagtaaattttaagaaagaaccgctaaaaaatgtgaaacactacaatacaacaactagttttaaaggttataatataacgaatgagaaaattatattttaggtatgcatattaaaaggctaaagtgtcgctatatgtaaagtcgttattattattgtatcttatttgtatttactagaacatttgaagtcgatatcatcactgtatctcacttgtatgtacattaaaaattattatcaccatacattatcaaaatttatagaataaaaaattaataaaatctttatgattgctaccacactgtattattacataacttataaatatgtatacataaatacattaattatatacttgacattaattatatttactaacatgtatatttaattattaactataatctaacaccctaaatataaatttcctaatacgatgaaataaacacatataaagtttagaaaaccttacattgatggcagcggaacaatatgattccttccgttcagatctctagctcttgattctcttttgtaacagatcattatcaagatctgaacctagatcttctctcctttagtttggttaaccacagtcttccacactatgattgagtatttgacttgctatgagtgggcatgacactctatcactaaaattttgaatttgatgaagaataat

SEQ ID NO: 242084 - DNA, 1585 bp, Cannabis indica
attggtcggttcggttcaattggattggattggatgatgcccaccccctaatccttctctcctttttattctcctattggattcggattgtgagatttggattgctggctcggtatctcattttgttcccaactttttgtttcaatttgtttgctcctttatcggatttgttggttggtttgttgtttgaattagttggtgggacaacatatttgtaatggcttctggaagatcagttcttgtttctgcaaatgaatatgccaaattcttacagtatcaagagtctcttaagtattcatcttcttctatcactactattgtttattcaactaaagcaaattcatgtcttctttcctcttcttccaaacggttcattaattctggtgctacggaccatatgatagataattctagattcttttctaatatttaacctcacgctttcacttctattgttaccttagtcgatgggttaccatctcgtgttcttgagtctggtacaattatcctactccaatgcttcctctgtcgtctgtctgacatttacctaatttttcttttaatttgatctctgtcggtcaacttacttgatcttaactgttgtatttctttttttttcctgatcattgcttatttcaggatcttatgacgaaacaaattattggtagaggacatgaatctggacgcctctacattcttgatacaccaatatctaaatcagttgcttgttttggtgtacaagcccccttcgcgacacattgtaggttgggtcatcagccatttcttcgtctgcttaaaaaagttttgtccacaataaagtaagtgtcttcgttagattgtgaatcataccagttcactaaacatcatagtctttattcaagtcctagagtcaataaacgggctagtgttcatttagaattagtccattctgatatttggggtccttctcctattttgtctaatcttggtttttcgtcattttgttacttttgtggatgattattctcgtgtcacttggctgtttttgatgaagaatcgttctgaattgttctctattttttatgccttttgtgctaaaattcaaaatcaatttaatatgtctatttgtacattgagaagtgataatgccaaagagtgtaaatatgctttatttcaatcttatatggttcaaaatagcatgcttcatgaaacttcttgtgttgatactctatcttaaaattgtatagcagaacgaaaaaatagacatctccttgaaatagatagagctctcttatttcaaacgcatgttcttcaaccattttaggctgatgttgtttctaccgcatgtttttcgattaagtgcatgccaacttctgtttttcatggtgaaatcttaacaaatatcatgtttctatcgatgttacttttttttggtaaaatgtaccttactttcgtcttctacctactgctactcatcaagggaatgatgatgatttatttagatagtctatcacatcttctgcgagtgacacatgttctgacacgtctcttgttcctccatctgactcggtcacaaaacctaaccatgcttacaccctttgtcgat

SEQ ID NO: 242085 - DNA, 776 bp, Cannabis indica
ttgcatttgctccaccatcatcctgagctgactattgctcagactgtccatactagagaaactccaatttacagattttcaacagacatttctgatgcgttatgtaatctcagctcttctgacagagagatatatgatggtacgaatactattataatgttttgggatgttgtatcaaccaataggccattataacgtatcatacttcttctatcggagatcactagctatgatattatttttcctctcattaactcttactactatattggctaaattattgtatagaatgtttcacaatgaataataaatcaattcataatttctttaatttcattttcatcttaaatagaaattacaggagttgaaaatatcttacttcaaaatattaaaagagaaaagaatgtcgaagctgccagataccttcttccaagcattaacgttgtccgtaacttgcctttcgtccaaaacctgcatgcacaaaatttgcttagacaaaacattgaagttgcccataaccatgtcgtgcaactcgaagatgcattgactgccaatatcaacgttgaaaatgcccagaaccttgcacagaacctcgcccaaaatctcagagcagtagtcatacaccatgctccggacgtggatcaagctgcacaaaaccttgcccaggtcgttgaagctgcacaaaaccttgcccgagtcgttgaagccgcacaaaaccttgttcagaaccttgaagatgcaaaaaaccttttccagaaccttgaagatgcacaaaa

SEQ ID NO: 242086 - DNA, 725 bp, Cannabis indica
gtactctactcgacaatcctacaaactacagaagcatcattggagccttgcaatacttgactcacacaagaccagacataagcttttccgttaataagctgagtcaatttctcaaggctcccacaaccagtcattggacagcggtaaaaagaatacttcgatatctaaagggcacaatgcatcacggcttgcatatcaagtactgtcctagacttgctctcacgggtttttcagatgcggattgggcgtgttgtcccgatgacagacgctcagtaggaggttactgtgtatactttggagacacactcgtgtcatggtcgtcgaagaagcaagcagtcgtgtcgagatcaagtacggagtcagagtatcgtgcattggcacatgtatcagccgaaatagcatggatccaatccttgctaaaggaaattcactttccactgcctgctacaccaattacttggtgtgataacctgggagcaaaagctttggcctccaacccagtttatcatgcacgaacaaaacatattgagcttgatgttccctttgtaagagacaagattcttgccaagtccttagaaataagatatgtgccatcctcagaacaagttgcagacctccttacaaaaagcctctcaagcagcaggttccatttcttagtcgacaaactgggcgtgatatctccaccgctcagtttgaggggaagtgtaaagaaatgatcctactca

SEQ ID NO: 242087 - DNA, 4429 bp, Cannabis indica
atattaaaaataataaataataacttttacatccattaaaataaaaaattaaataaataattgagctcatgtcccaatcaatcaaaaaaaaaaaacaaaacaagaacataaaattgttggcagccgaaaaaaaaaacagtataaaagttaatttcgaaaaaaaaaaaacagtataaaattattttgggcgtgtaacagtataaaaaaagaaaatgagaactgtgtaaatttcccaaaattttatcagaagcccagcccaatatgagaagcccaacccaagtcagcacaacttcatcccgccctctctctccaactctaactaccctaagtccctaacctcgttcactactgatcggagaggaggaattccgtttgccttcattaccacatgcgctttactcgttcctcggataaacaattacttcactcacagtcacaggtacgggctttgaaaggaaaggcaatgaaatcaacctgtgttttgttctgaagaataatagtttagaagaattagtggttttcaaatatgctaatatactaatttgattctattgagttgtctacttgaaacttgtatttttattatgcagccctaaatttgattcgaggtctttttacagggatatgagttagctgttatccaattttctaaagatttggtaatggagtccatattagcattcgaggaggagcagagacaactccaacaccaacaaatatcatcaacaccatcatccccctcgtcgtcttcatatggtctcaaattggtgccttggatgagctgggaagaatggctcttcgtctatgactctctcttctccgattcccctcacgcagtttcatctgctcttgcaaaggtattactctcttgcagcttcctatgtctgactatacattgataaactagggttatggagacacagacagttcaaccatgatctatggaacagccttgatactttgttgaaagttgatatcaaatttgaacccacttgagcatttgttataagaaaaaaccagaatattgtacttcgaattctagaaagggaaaaggacagaatgtctctttcaaaggcttcgaattccaagaatttttaattcagaaggggttgatgctgaatttcttagttttcgtaaagggacaattagacagacagatagatagttacttggtgataaatggttataaaattagaaagttaaggagctaacggatgtgcttactactttgttttttctcatgttgagtagtattctttagctagcattggttcgcgatggtactggcagtgttttatgggattgagatatggacatatgttcaatgttgctgtttcaatatgtatgattatctgattggttgcttttggatatcagatatcaacatggggaagcagaggttgtcttcctgttacaattgaagttacggcttcaatcattgaaattcaaatgagagatccttattttaggtacctgtttcacactattagctgtttgaatcactgtcctgatattgtttctacttctagatctttaatttctataatttcataatccattttttgaggttaacaattgactgtggtaatctattttatttgtaaatttaggaaggaccaaaatatcgatgcttcagataaaaatagaggaaatcaaggttctgatggttcactttctgacgaaatgctggctatgctttattgcatggcaatcatgaggtgaggatccttgtctatttgattgttcactaattcattggcagatgttataatgagtgaaatgaaacttatcaataattgctgactgaccatatattggaataatggtgaggaaatctgagatgcgatgctggcttgatgcttttccattttcatagcagtggcaaaatgagattgttgtgttctatgtgcttctattttaagttttcacagatcatcttgtttaattttgctgtcttttttgttgtttgtatttgtacactgatggattgggctacatatttgtcactttttgaaggcttgtcaacggtgttgttgagaaaacacgtaagcaacgtgaggtttcaattgctgtggccgctgatgcaattaatatgccacgtacattgattgatattcgtcatggtaagtgacttgttttattcttattttctactcttttgagtcactttccatgtgctaaccaactttcaaaccaatcaaattaaaccttacaagctgcggcatacttaaaatgtaaatgatccgaacaccgcatttattctagtgtagtatgatgatagtgaactttttttttgcagcttgatgttagtgaacttaaatcatgtggcttactcatattattttccatttactaaggtttatttttcaccaaagcatttttattattgtagagggttcgcatcgtgagcttcctacacttcagatagttcgcagtgcctcaatcaaggtatgctttattggaatctgaacataaatgttactatgtagttcttattcttcttaatggagcattttttgttttgtaaagctaatataattaacaatcacttttacgtacattgagatgaaaaaacttcctactaatgctatcttttatctttatactatttaggtgtgctagaatatagtaattcttatctgttgataaggttatggtaccgcagatacattacatgacagattagtagagtaaagttgaaaggttgtattgcaaatcataactgattacaaactacttggattttgaaagcctggttctctccctaaaatgaagctctacaatgccaaccaaaaattagtcatcccctatcacacactaaaaattcttttaattattctcctgacaatcacatgagatctaccacccataagaataatttactaagaaacattaagatagttctaatatgtcagcacacgcacttaacaacaggtaatgaaaatccaatatgtaagcacaaacatacttagcaacacctaagcacgccatttaatccagcagggctggcttagtggcttgtcctgctgttgattcttttcaagcctgacaaaggtaggtaaacctgattggaagtttgtcatatttctgcaatggtatcgtatcatgtggtggaatattgcttctcttttctatttggtggagcacaccttgaatcagttagaaaccttggttaagtaacccttagtattttgaaatttctttgatcaatgatttgaatgcagtaaaggtttattttagtgacattcgacttattttcttatttgtcttgtacataataatgcctaacctaactataccagctttgtaagcttgaacgtactataactttacaaagttgtaagtggtattctactgtttaaagggaatttatatattgtcatttatggtgttgaactgttgatgtttccaggcacttgattggctaaaattttactattgggaaccacagaagaaggctgtcccatttcaaggtgacagtacaactaagatcagaaaaagaatcaagtctaaacttcgtgaattggccttctgtttgaatgctaaggagagtcctgaactgtcatcttcaccattacacggaaaacgtatgtggaactcttttattttgcttgatttgttttattcgggcaattaagtatcttcttcttcaattttctctatttgatttaatcataaacttgatatgtgttcttgtctctcaattgttttacagtgatagagaattcccttggtcatactttagattattttgggttgttgggtctgtttgagatcttaacttacttaatatttgcagcagttcaattatttataagctctagtttactgtaggtttatggggccaatggtcttaaaaaaatgctagtttagtttatatctattcagagagtcaagctaagtttgttacgtgggattactatatcctaaggatcttcgatattcttacacctctaaagtagtcagggttttaaattttcaggtttataatattcttctttttaaaaaaatgtctgtaatgtctgtaatattctagccctttggcttttagaagttgttcctgtagttatattggcatgctaatctacttatttttcttctatgtaagcaatctacctcttgatttccattaattgcccctacatcagatataattaaatctagtgttctgggtttaaaaatgcattcttctttttctaaaggaaattcttatacaaaagggaattttacttctgatttagctttcaataaaaacattccgtatggcagttacatattttcaactatatagtatttcactgttctataggtcgtagaaaacatgattggatttgtgggcgtaaaatgtttctctcacatgcagctggcaagctccactcaaattctggaggtgaaattaactgctgaagttgttaactttttttttttg

SEQ ID NO: 242088 - DNA, 524 bp, Cannabis indica
taaacatgttgaatattttgatgatcttcccatgatactttgctaactacatgtcattagatagtttttagcgtaacctagttaattgttaatgcaatgcatattatagatgttttgaaatattaaattttgaggtctcggttgttactacatattctagtaataactactctgaaatgagccctgtgtcgaataaggcatatttgtgtctcgttgaacattctcgttccccgaattcgtgtattgttccaaagtgtgcctggttgtggctctccctcttcccctagctggtgttgttccacgattaggacatgttctactgttatgacccatctcacagcaaagcccgcattgtctttgtctaaaacctgtgccatttgtaggtcctccatcccttcattatgcattacctgttccttttgttctaaccctagttaagtcttgaacgatatttggattgtcacgatatgatctaggagcaggtgcactacggcttgattaaccaatctcgaacccttccttga

SEQ ID NO: 242089 - DNA, 800 bp, Cannabis indica
taatataattacatgtactaataaaactatgccacatatatattgtgttcacatgtaaatccaacccatcatttaacagtataaatttgattaaagtaccaaatagctaacagaacacgagttcaagtgttttactatcaaaaagtatgtttaggagttaattgctagcaaagtaaaacttttaggagttttacctcaatttactcaatttatcgtggtaggttcaaccacataatatttgtccagataaccacataggatggcggtaacaaataagacaaatttatttgtcgtcacgtggcggagccagcagtaaatgttaggggggcaaaagaatttcttttatccaaaaatggcctgttaatgaaaaaatatatattttataaagaagaaaaatataaattttttgggacataaataaatatatggtaataaaaatgattttttttttatagaataaatatgaatatatgtaaaataaaaagaacatataattttacaaaaataaaaataaaaataaaaatatatgatggtaaaaataaaaaaaatcttattttatggggtcaaatataaaaatatatataaaaaaaattatacaaaaattactttattaaaagttgaggaggaaattacactctatactctttttatattgtcctcttttattcttaccttcttttttaaaatctatcatttttacctctttttttaaacattgtaccaattttgtccctgtcacttcaagatactcattgtgattctcttatgtaagggtattttgggtacaatacatataaaaa

SEQ ID NO: 242090 - DNA, 579 bp, Cannabis indica
aacggtttaaaaccgtcggcaattcccttttacaaacacacagaattttttaaggtacatttaaaaattgtcgcttatatatacctcccgatagtttaaaaccgtcaggaataccctatttttcccaacggtacgttttaaatactcctttaatttttttagtgacagttctcccaaaaagcgtttttagaaccgtcgtgaatatccctttttatagtagtggattcatctcattagaaaaaataactaaaaaatttccatttaaattctctttctctcttcatcttctttttcttttgtttttatatattttatattattttataagatcatactaataataaaataaataaaatacttatattcaagataatcttttttcattcttctcatatgtaacttaaattaatacccaacaatttatatatataagtatatataaaaattaatttatatatatatcttggtgatcctcttgtacaaaagggatactgctctaacttaaaagtactgtgttaagctgtaaagtattgagttcttattacaggtgtgagtagagagatttaagaagaagacaag

SEQ ID NO: 242091 - DNA, 750 bp, Cannabis indica
tggagcctagctttgatgttttttaatctgaatttggagtgtctatattgttggattttgatgcatgatatatgtattttaatgcactacttgggtacttacaaatttgtgaaggatgattttaagttgtatgtaaatttggcttgagttaggtgtgtttgggcatgaaatttcgaagctgaaattgggattttctgggtttgaaacctagtggtcgtggcccagctttctgggtgccgcagcccgcctctgttaaaatcctaggttttaaacccaggtgtcgcggccgcatgtggggatgccgcggcccgccccttgtttctgggtagatcgaatgcaatttttgaatattcataactttgtgatccagactccgttttgggagttctatatatcgttggaaagctctttttgagatcaatgtgaatatctgtaatttgaatgccaattttgtattatgtggaagtggatttagggattaaccctatctttgtaaatcacgaaaattatgagtaggattatcggcacttggttaggagcacccggggatttggaatctccacgtttgcaagacgtcaggtaagacagttgttggcacgtagagttatgcacggcgacacttatattgaaaatgatatatgtgagtaaaattcgaaaccgagattagggttattcctctaacatgagcgacttaatggcctagggttattaccctagtgataattaagtgtaaatgctatgccatgttat

SEQ ID NO: 242092 - DNA, 789 bp, Cannabis indica
gcatgatcaagcatctgaggcgagcttgacagagacgtagcctttaattttgggtgaactccgagatcaaatctctttgtgttcttgtatgtttgttttgtttatctctaagcaacaagattgatctagatctttgttgttgtttggttctggtatgtgtctgggttttgcaggttcgaaggctagggtttgaagcttgagattgagcttgttgatggaagaagacaaagtcttattcgagtattgtttcggggttgaatcaaaagtattctcgattcttcatatctttgattttatatcaaattgatactgtgtcggttttgggggttgcaaactccattccgtgaagtgtttgtaaaggtcattatttaccttggtttctaattgttggtttagtttgtgtaggtatattctcggtattgaatttcctacagtggtattagggcttgattcaagctggaaagatttaactaaatttggaaacaagatcaagaaacgaaaagaaaggcaatttgttctattgggaacagataaataagattactctaacctaaacctaatttgttacattcttgtttttgtgttattgtatttatgtaacatttgtaaccaagctactaaggccaaaaaatacatctaaagcatagccaaaagaattacttgaaactgttactggactaatcatttttaagttctatgattctattatcaagatagttgacaaagtaaatactccaacaaatatatggaaaaaattagaagaccagtttcaaaggaaatctttgatta

SEQ ID NO: 242093 - DNA, 875 bp, Cannabis indica
cttaaaaatgacaaaaaagtaaatggacctaattaggtgcttcaaaaaaaaagttgattttagaattatgtttgtcatactgtccattaacaaaatacacattttcgtacgttatgttattgactatgatcattggatgctttatacttcaaattagtattatgtagtgctctactctcaaaatttgatcaaatatattatggaataattacataggcacaattttttataaaatatttacatttttacgttcaaagaatgtgtttttacatttttacaattttccaaaaaataacacgaaaacaacataaaatcaacaaaagaactacataaaattaatatgaaaataacatcaaaataacaataaaaataacatacatataacaaaaaattaacaagattacaacataaaaagactgtattttctgtaaataaaataaaaaaaatcgtaaaaatatttaaaattccgtgaaaccgtatttttgtaatttttttgttatttttatgtttttgtgaaataattctatatattattatgtattatgcatactaaatggctttaaaatagtattgttaaaatttagtatacaagtacatgtatcaactaaaaatgttctactagaattgattttcaatcgtcctcgtccaagaattaattcttttttatataatataatccactcataattacataaagtactctttttttataaatttattatattcttttgaaagattttttttaatatatttttagagtgttatgtgaaaataacaaaaaattataaaaaaattacataaaagtaatagaaaaataacatttaaataacaacaaaaaataacatacaaataataaaaaattaataattaattaa

SEQ ID NO: 242094 - DNA, 1011 bp, Cannabis indica
tgcccagcactgcatgccgccaacccttacgggtaggaacagacccacatagaagcgaggagggacaatcgtctcccttagaaaaaaaaacgagaaaaaaatatatatgaattttagttagttacgacatatatttgtaatgaaagttgatacttataaaaataatactagatttggtgtaaatgtaatggttaatctagattgcatatacgatgtaggttaagggttcaaagctcatcaataatttttttttttttgttctttttaagtttatatctcccctgtcttaaaaaaaattacacccccttactttaaattttgggtccaccgtagaggtgtttgcttagacatgcgaccctctcaggattcaagaatggtaccgtttcacctaacttatggtccaagtcataaacaattgttttttattttattttatttttagcatttccatattagcttttaaggaggttcactcaaactattatagaaccataatattaaccgcttaatttttatttgtatcgcaactgcttaatttaagagttgatgttgtgtcaaaaatatgtatacaaaaaaaaagtgtaggttcttatttgtaattattataagaaataatattgataatcatacttattctttttcttcaaaagaaatattactataaaattaataatatatattcttttgatgatccgtttgataaattatggcaaactttgtgaagaaaactattttgttcatgttgcaacaggaatcaaatgaaagagaacatatatgaaaagagacaatgttaatttaactgaatctgtcatctcattaaatcataaaaataaaaataaaaatataaaatattattagtttaactttggaataaaaataaacacatgagtaattattaaatgaataaaattaatataattacattaaatcataataaaattttaaaaagtaattaatttaagaaattttaaataaaaatttaaatttaattttctaagattaaatacaaac

SEQ ID NO: 242095 - DNA, 531 bp, Cannabis indica
atggggatgactttaattaatgttgatcaagcatgtccttagactaaaaaggcttttaattaattcctattactgttttcatctttattttatactcattgggatgttctattttatatatgactcattctccaacatttgcaataaaatcaaacttattattagatatattatttatttttaaaatagatatctaaactttatagatacttcattacaaaaataacgtaaggtgtggccgtgttgattagttatcaaaaatatatatttggtatttttaaaagcaaacttttactaatcatacttaaaagggataattgcggcaaaagtctccaaaaacttgaggttgatgctgattagtcctcaacctcaaaaattggcggtgaaaatacccaaggtggacaaagttgtttgtccgttcatactcagtccgttagtgagactaacgggacacgtggacgcaccagatttaatccccccttttttttttattttcccctaaaatataaaagtattaattaaaaaaaataa

SEQ ID NO: 242096 - DNA, 720 bp, Cannabis indica
tgaatcaggaaacttgttgatcacaccattctgtatagatagtactcttaagcgtgggaatgattcatgcaacttagacaacaattcttcaccaaattcatggaacaataataaggtgcgcaagaagcatttctctttagaaaactcctgaaatttcttaagcatactcgcttcttcacaatgtaaatggcgaaccttgagagaacatttcatactgttattcatcattacacaaaactcgccagagataaacatagctaaatcatgtataagatcatgcataaggaaagtttcttcactgtccgatgatgaaggttggaaaaatgacatagaaagaagataatcgaaatactcttctccaactttttcaattctctctccatttgtagactgaaaaagaccttcggccatccataacaagaccatctcttcttttttaaaatgataatcttttggaaataaagagcaataagcaaaacattgctttaatgcagaaggtaaatgaaaataactcaaccacaatgctggaagaatttcaactcttttcctttcgtacaactcccatatatcattgtttaggatgctctcccattcctccttgctgcgtattcctcttaacaaatcaccaattgactttattgctaaaggaagacccttacacttatcgactattttttctccaacttctttgagatcaaagtaatcatttgagtctacaac

SEQ ID NO: 242097 - DNA, 623 bp, Cannabis indica
ttttagggtttgaaattggaaaacttcggaaaaattgaaaaaatgccacaaaattcgagtttggaggctggctgccgaggaggtgcacaaagaggctgcgtgcagcctcatccgcgcgcacaggaggctgttggcagcctcaaatttggacacgggaaggcatcagcttcagacaaagttttatcctaggatgcgcccacgcacgtcaccttgtccgaggattggtgcgtgcgtcgtgcaccaatttgacaccttttgcacccgaaaaatctaaacactctatccttttcaatttttatcgtaatttagttttgtaaaatccaaaattgcttaatttttcacaaggaatccaaataaaatattttttgaatgaaaataaaattatttccatggcaaatttttgtaattaacatgcattcatcaaacaactcataaatcagcatgaaaacatctaaatcaacacaaaaacaatattcatcatttaaaatctatattacatgaaattatatcattaccatggctctgaggcaagtttttttaccaggatctagatttactaacaagtacgttgaattcacatcctaaatatgaattctctaaaacaatgaaataaacacataaga

SEQ ID NO: 242098 - DNA, 1364 bp, Cannabis indica
attaatattaacattttatatgctgaaacggatttcattaatatatattttttcaattactcctttatatgcatattcatattcgcaatctctatatttaactcgtattttgcgagttagtacccgacctatttaatctactttgtataaaagttcatacttatttttgattaacttatcaatccattaaaatattaataacaattaaacatacttgcactataacatagaagtcatttaacatatttaaatactcttaaataattaaataagttgttgtcgtgttatttgagttaagcatatcaactaaaattagcctctttaataagtgagttggccataccaatccatctaaaagaaacccaaatttatttatggtttcaagtcataatattacaattagcatggaaacagatgcctcattttttaaattaaaacttgttaataatgtcaaaacataaaatgattttggataaatagttacaaaaagcaaacaaataagtgcttggcaatacacaaattgaaattttgtttttgaattcgcccatgcaaccaccttgatatgtggctttgatcctaaaacaatttgagcaagcgttaatagttgcttgttcaaaataaataattaccacataaaatattaatgagtcaaaactaaaaactcatctcattaaaaaaaaatagccaagaaacataatcaattgtgatgaaagaatttattttaagattaaaatattgttcttgcaataaccccaactatcaaaattttaacatacaactactttagaaagttactcctaaaaaagaaaagggccactaagggggctacaacataagctcacaattttgacaatgaattaaatttttaaagagacaaaacacgtttaacatctttgaacaaaaacaaaaatatcataattcttaggtaaaatcttacccacttccagctttccacactcacaactttgtataccaccatcaacacataaatgaaatcgagctcagatcacttcttccgataccgaacactgaaagaacagtgaatttattgaccaatttgctgctgatgctgccgctgctgaaaggatcaaacattttttgctgcagttgaagccacctggtcttttcgaccgaaaaattgtcctgtggctgtgcttcatatataaaaagaaaatatctcattgtatcctgaaaagattcctcagtttcaggaccaacctccaatcctcatttgatagatcctcctaaacaatttgagttatggttagaaaacaaagcaaggacttatccataaaattatctaagaaatgtatatagacaaccatccataaaaggaagcagaaattatcaacaatcgtttcaac

SEQ ID NO: 242099 - DNA, 1444 bp, Cannabis indica
cctaaatctattacaacttccattcagttaattggtatctaattggaataactaaaatgggagtcaagtacagacaacaacaagggaagagctatagaatgctaaaatgatgctggggacagggacagtaaaaaatctacaactgcatacatatttataatgggaggaaactgtgtaagctagaaggtgcaactgaagccagccacaactaaatctgaatacattgctacaactgaagccataaaggaaagcatatgggtaaaaggggtcttagaggaactaattaaacttttagacagtatacctgtgatatactctgatagctagagctatgtgcacttatgtaaaactctgttttatgacatacattgaaatgaagaatcactttatcagcaacaaagtgacacaaggacacatcaacaaagacaaaatacctacaaaagaaaatcttgcagatatgggaactaaagtgatcaccctatctaagtttaaacattgtttaaacctaataaggttggatcaaggataagtgatcttagaattatagagcaaagaccctcagattggactttactacttagatatcagcttagtgaaagtttaagtggaaattttttgataaacctccacttaaattggtatcctttaattaaatctgtacaaggaaattacaagacaaaattatagtggccttaagccttattacaagtatgaattcctaatagaaattagttagaatggattgtgacaaatttctattatatatacctgccttcagcctcttctagcagattgatttagaagattttccaagattgagaggaaagaaagacaaagagagaggcatacatgcacaaaaagagagattgagttagtaaataaagagagaataaaaatatcaaaacttgtaataaaattgagactaccagttaaaatgcatacctgtaacttagaatctccatcttgtaactttgatatgttgattactagtggaatcgagctaccaatctaaggagcagctcaactgggacgtaacccacattttgggtgaacctctggaaaaaattctctggtgttttcttacctttctcttacttttttatgttggagaccaaatcaatctagatctggttgtgtgcatgtgcgtgaaattgaattgtgtttcagcagagattagggctaaaccaaaagattagtaatgatcgagaatgttttttgatttggaaaggaaaatttgttttttttttatgtttatatttggttaaatttttttttaaacaaataataattaatatttgtaggatatgataatttttatgatatttgtaaaatactcccatttacatcatcttatttacaccaccggaccacccatcgggtcactcattggaccatccatcggaccatccatcaggccacccatcggaccaccatcggaccagat

SEQ ID NO: 242100 - DNA, 525 bp, Cannabis indica
ggcggtctaactttagagtagtagttcgggatggcaatagaagtttgagttatgtaactgctactttgctgcaacaagtttttaagctaattactgttgaattgtatgcctgagcaagtttagagattgaaagtcaaagaacattaccaagcttcaatgtggaatcaaattgtaaagaagccatcaaattaattcaacaaaaagaagctgcctgtcctgaggaagatggattactccaacatattagacaattgataggtaatggtagagtaggtgggttgaactttgtatattgtgaagccaatgttgtggctcacaatttagctaattatgttttaactactaaagctagtactatgtggattggagttatacccctttgtgttcatcaagttacgaggtatcttgattatcctaatcttgtgtaatattgtttaatgaatgattccttacttaaaaaaaaaaaaatatctgagtagatttatgaatcatagggatatttgagtggttctacatttctcctca

SEQ ID NO: 242101 - DNA, 2224 bp, Cannabis indica
attatcaaatgcgggcagactcacagttgttgagtcctctcaattgaaagtcagatcgtgatctttttccaatccaattttgaagagcgtgttggtctcgggagataggcccattacaatagcccaaacataagcccaatccaaaagcccaataacacaaattactgtatcatcaaattagggtttcatcttatttctcatacattacagagtggaaactgaagacgaacttctttccgtctcttcttctctttcggagctcaaggtatctatctcatactctctatggtagaatatgtatatatgggttttgtttttagaatgtttttgataaagttgaaaaccctacttattttctttcttgtctattttgttcttcttcttttgctgtcttgaatcgcagagttttttaccaagtaatcgaaaatggtgcagcgtctcacttatcgctcgcgacacagctacgccaccaaatcgaaccagcaccgaatcgtcaaaaccccaggtttgttttttcacacacacccactaatcttaaccttttcaagtttctaccatttcgttatcgaaatcattgttgaatttgtgggaagatgtcgtttttttgtttctgggttttgcttattttgtacattttccatcattaggtgggaagttggtctaccagaccaccaagaagagagctagtggcccaaaatgtcctattactggcaagagaattcaaggggtatgatgatttttctttataaagtacctgtgaaattgagctttaatatggatttgattttaggtcatgcataatgcgaatatacatattaattatcaatcgttatattagatttcacgtctatacatatgattacaaccttaatatctagagtttacttgataaaagaacacattttcatagggtagcatttgtgttctaggaaccaagatgaagaacttggaatttggtttttgactcgtgtgtgccattgctcgcatttgaagtctgccattttagcttgtttatcgtattacttgttctagtgtttagtttatgtgccatcttttttgggttaaggcctttcccttccacaacttgttaatgtctaatttatgacttgttgcagatccctcacctgagaccaactgaatacaagcgctctagattgtcgaggaaccgtaggactgtgaaccgtgcctatggtggcgttctttctggaagtgctgttagggagaggtatgtaactgttaatgactagtcacggtcctcccatttgttatgtccaagttgaatgttctcttaagaaattcatgttgtgcaggatcattcgtgctttcttggtggaagagcaaaagattgtgaagaaggttttgaagattcaaaaggcaaaggaaaaattggcagctaaatgagtgatataatgttattaagcgaaattttgacttccttttaagtctcaagtattcaatatggaacaaaatgtttaaatggttttactgtattctgtttgctacctcagttagttgagtactcttgttagtgcaaatttgcagacatcaatcttttgaaacatggtatttctagtagtttgatttccaagtttattaatttatagtttgtcaaattcttaacgatctggtatcagtttcactatatttgtcactttagatttgcattttgcaactatggttttttgaagtcttttgatggtttctctttcacaaatcacaaaattacgcttgcagtttgttgtttcactatatttggtattttgcaccttttttatgctgatctacctattttgtgagcaagttttctttagtgcatgtttggtttgagggagtgaaggttgtagtggaatcaaaagttgcattccattgttgtctttgaatcttttgtaatgcttttcattgcaattaatgttacactacttaatatacaaatgttgtacccatgtaatgtaatgagctttatattattgtattgaaagtaaaatgacattgtactttttattttgggtttttttcagttttaatcaaaaaagataataatattataaaaatacttcggaaaataaataagtatatagtccaaatgaaaaaaattatacaaattccatttacacaccttcaacttaaaattcatgttttttgggcaaccatgaaactaacattcaacaagaattctagtttaatttacataaaactaatgctttgactttaattttcagattta

SEQ ID NO: 242102 - DNA, 541 bp, Cannabis indica
aactattgataaaatggtccaaaaaaataatttgatccccaaataaaacttatattatggtcgtttaacatttggtgtaggctgccaggtcctgtgaattcacgtttttttttcctaattttcaaccatttcatgatcatggtatattggaagtgggggttatgaaacacacagctatacctccacaacaactttcctgatcattatctaaaaagcttttgatttgaatctgtccttgcaaagattactatgaaaaggtttggtatctttcctggactaacactaaggacaattaattattattattgtagaaactaactagatccttctatacctgttttatgggtttctactttttagttgaagaagctcatggccaaaaaaattatttatatagctattttaacgttaacattcctattatagcctctattttgatttatagtttcaactttttttattttgacgtaatagttttacatttttgtgttgttgttttttttttttttttttatttttaattagtcgtttatatatacaa

SEQ ID NO: 242103 - DNA, 791 bp, Cannabis indica
agtgcggcatggtatgcttgtctagattccctaaagtttttttggttggtccactagggttgaaggatttacgtaagatacttgtcttaaacagtgattgctttcttggtcagatgcacattttaccatgtgcacgtcgagcatttcagtttgtcttatattggttatccgttctcaattttgcttacttccatagtttcttctttggatactgatatcgataattctttactgttgcattaaaaagtctttttgtccttctctttttgattaaacctattttccaaacagcacgagtgtcttggagtatttttgctgcaaattaaagcagttgatttctctttctgtttgctgtcaagattcatctttttctcactatttcttacatacaaaacagtattcacgtcctctacatctcaggatctataaataatacagtaggcattagaatatatccaactgctggtgcttagggattctctaaataagccaaatggtttttcaaacaatagtgtagtgtgtatgaacgataagctctttatcttactgacaacgatgtaaatgttgtaacctgcagaggcacaagaggctgaagaaaatatttgtggtgcttcacgaagaattgaaggttatccttgcaaactttgttgaccctctaaaatttcaagctttatgaatttctagaaggccttctagaattttgctttaacttttcacataactaattttgtacatccatcttactatctcatttccttacagcaccttaagcagagaattaaaagatttcg

SEQ ID NO: 242104 - DNA, 2320 bp, Cannabis indica
cgagccttggccctccacactaccgtcccttcactctcctctaccagcagcagtagtgctcctacctcgtatgctcgggccccaccgccctctatcacatcgccaggagggatctcaaagacagcagagtttgtgatctccaaggtggatgatttgatgaattgggctcggcgtggctctatttggcccatgacatttgggttagcttgttgtgcagtcgagatgatgcatactggtgctgctcgttatgatttggatcgatttggtatcatcttcaggcctagccctagacagtccgactgcatgattgtcgccggtacccttaccaacaagatggctcctgctcttcgcaagtaagctcccttaaattgtttcataaattcaataagcatatagtcaaataatttttgttttgtaaaagacataagcttacttgtataggatagtgttgacagagttacaaaggaaaacaaaatgaaatggctaagttcttctgcataattgctactgttctatctctattactctatattttggctattgtgtagaaaatgaaatagccgaagcaggtagaagattccacaggtttcgagagagatttttccttttgatatcttgtataggacagtgttgacagagttacaatacaactaattatagaagggaaagagggagtaaagtctactgatttctatgataggaaacctctgagttacactttgtgtacaataggacataggaagagaatcaatgacactacgagcattgctattaaacactagtggtacatagtaccaccacctcgaggtcgctcattgcaaatagtttaacgatattccataatagttataaaattaaatcatgtaatagttataaaattaaatcatgttaagacccgatagttaattgcatcaatagcgatatgatacattggatggtgctaattatcactggtgccttttagcatttctctatttgctaccatgttagtaattctgaatgtttaagcaggtttagactaacagacaggctttcgaaaacagccactttaatctgagttttctaatctaaacattcggttgcagggtttacgatcaaatgcccgaacctaggtgggttatctcaatgggaagctgcgcaaacggtggtggatactaccactactcgtacgctgttgttcggggttgtgacaggattgtccctgttgacatctatgttccaggttgtcctcccacagccgaagctctactgtacggacttcttcaattacagaagaagattggccgacgcaaggatttcctccactggtggaccaaataagaactttcctttaatttctatccatcaaagccagtcatgttagacaatctttggctatgtttcttctttttatggcataataataataaaaatcaaatcttgggtggtttgcctttcattaaaactgtgtaaagtgtgttctatggagttttgacagattatgtaaaaccattttgcttctcttgttttgattgttataattatattcttcttagaaattgttcaaaggtttatttaatcttgggattccattgactactcgtatgtatacaacaaaataatatatgaactcaaaattaagagggaatttgtttacattacttagtaatcaattcactatggtttgaaggttattaaattatgtttgtgcattttactttgtaatgtgtctagagatggaaatagtcaaatgttattgtgtgtttaaaatttcattattaaaaataaatgatatctcaccctcggtttaatacaatgtagtagtattatacttgtgtttattaagaggagatattaagttcgaatctcttttttttttccaatgtaaaaaaagtttggatttgaactcttgcatcaaaaaattagttcgcattattatttgtttggaccaagtgttttaaaaatttgagttttagattttgtattttttaaaaatgttataaatcgattcttagactcgatttaggtcaaaatatttttgaaatatgactacatctaagaaacccaacgactaaagaaaagtcgagtagttccaattaggccgatcttgagacttattgaaccttagttagcagcaaaattattggatcattttcaaaagaaattctagtctaacttagtcctgacccagctagtcgaacgaaaatctaatccaaatgcctatttttaacctttttcacaaaacacaacacagagtccactgagcaaaataatataaactctaaaatgaaatccttattctattttgtaggggtgaatttgaacaattctacaaatttgg

SEQ ID NO: 242105 - DNA, 4651 bp, Cannabis indica
tttattacaatttacaaagatgtagacgtcccattcccacctaatacaaaatcatttaactcacttatacacagttactgcagtttcattagaaacaagcagcagatttttttaaagagaaataaaggaaatgtaatagaagtgtacgaacctgcaaattatcaaggaaaagagcaacttgaagtgcacttgtatattcttgatatttttgatatatagtgtatgcaatatccaaaaccagcatatcatctgggccaagtacgtatctgcagtataacattaaatggacaaactgagttgatacaagagggtaataaggaggacttttgcaatgccgcaggcaataagcagaaactacatttcacagaacaatctgatcatcaaacattcccatttcaacataccgtgccaaactagtgaggtagaggcaagttcttttaaaatttgtcttgtcaacatgctcaattaacaaatcaaggtcttcaacctaaaagatttcatatggcacaaattctcataagctaccaagccgaaaaagaacagcaatatttaataatgatatattaacagagtagtaagtcatctgacctctaataagaggtcaacagcttcaggttcagcattgtgctgcaaaacagaataaattgatagaaaaggttatatatatgtagatagataaaaatatattaggcttttagcttcccttgtacaattatatccaagttaatacaataaattccaccaaaaatctgtattaacccacagaaatacttgtttttcttcctatccatgaaagatggaaacaattaataaagaattcatcattggacttactttcatgtgaaaggcaacaatttgctgtacgagttccattagatcatcaatagcttcctcatcagtctgcaatagcaagtgaaaagaagatttgaggaacttctcaaaacatacaggatttcatttctttactaacaaacattgagtacatttataagatagatttcaaacctgtcgcttagcatattcttgagaaatttctcctgccaaattcctaattaaataaaataaaccattatgactggcaatctgatattatttctattgaaagagaaagttgaaaccaactttaatatgccaacagtaaaaacataggagatatcgtactaaacaaactggttacacaacagcgaacaccaaatccgaacaactcttttcaaagaattgaaacttgcctgacatattcgtggccccatgaaccaatatcaccttctgagccctgcaatctgtacttcaggctttcctgaaatagttcatcaataaaaatagtaagttaaattgctgaaaacgagcattcagattaaaagtttgtaaagaatgcataaacatccgaacacagtgaaaattgaccacctattgaagagaaagtgtaagataattaagcatacccgttctccctcagcggacatggtcaaggccaatacagataatatatctgctagatatttctgcaatacaagacagaaaaaattaataaaactacagtaaatgaacaagaaggaacctattataggcaccataccttcaactctgaccctgccatttgctcataataagcttttagagttccatagtggggtcgaagaaactttagtggttttggaacagaagtcattgaacttgttgaagtacgaatttcctgcctgtataataaaattccattcattgcaaagtcataagataggaaacgtatctacacatgcactgtggctaaaacttcaatcagaacatatgcaacactgaaaggattatctccacaattgtagcaaacaatatcaggccattgccaatctcagacgttgtaaagaaaatggaagtaaaattaaatactatgaaatctgaagtttgaactaggtaagattaagaacacaaacttccacaaatgtttcaaaaaacaatatcttcagcacaggaagacttggggtcatgttttttctcggttcattttcttcgtatttttctatcttattgaactgactgtgaaacaaaaaaagtagtagggaaaaagcataatttacacatacttagtgaaattttagtaaaacgaaattacctcatactctcaagagcaactttctgcaaccctggatcagaatcctgaaccctctcaacgtacagctccagctgctgcttcaaagccaaatcctcatcggactgtgccaagaacaataaattacaaatacacatcataactcaaagccccaaaaaaaataaaacttcaatattgaaatcaataggcagtgaattcgagaatgtataataaacaaggacatggattttcaaaaaaagctcgtcagctaggtatcacttcctaaatttaacattgacccaaaaatgctattcacttcgtttcttccatacgctgtaatggcaacaaaacaggaaaataaagcaaatccgagtcaaaagaaattgggaggagaaagattaccaaatcctcgtcctttttgaggtctttggctggggccttgacggtggactcagtccgtgaggcgcttccactaccgccggcgctgttcggatctggcgccatagttattgatgaagtcgtgaaaaccctagattatacagatgagcgaagaaaggtatttcctcctctacaagaaaacctcttttactcctacttctctctcgctcagagctgggctcttttatattccccacttttagaactaaatgtaaataaataaacttaaaaagaaaaaaaactcagaaaatttgttttttctccaaacccgacttgtttcagtatcgggtcaggttggctccaattagcaagccggtcgagtttgcctttcattttttttttcgaacaagagttatttatttttttaaaagaaactatactcaacatgtttttcttaaactttattacacaaatatagggcaattttaagtttaattatttttatagtatattttaattttaagcttttttttaatattttctttgctatataaatgtaaatttaattttcaaaagtcgatatttaatatttagaaaagttagaaattttatttcttctcaaccatgaaaccctacatgccccacacctcaacagctctactacccatcttcctttaccaggtccacattcggcaatccgcgatcctcacattcgatgatcggtagtcagagtgaaactcactaaaattctcttctctccttcgaacatgcatttatctccttcactgttgcattctctttgcctcccgccttcgcagctcggtgtgctccttcgattgtatctctccttcggtggaccgctctctctattggagctccaattttatgagatatggagcttggtcccaccttctctagttttatcccttaacactttatattcaccttcgtcctcttgcttccgcctcttacatcactcaccttcacacaacactcatccaaaattgtgacagctttctcttctatacctaaattgatctttcgcattagggttgtacatcagtcaatttgggcagtttaaactatatattttctaacctaatctaaaattcgagttgttaaaatttaagtgtaacccgcccaattttataaaaaaaaaatctgtaaaccgaccaacgttttggacggtttggtcgggttaacccgcccaaatctttttttttggtttcaaagtcaaaatcaataaaaattaaaaagataaattaaaaatatcgcattccaccaaagcacaacacaatatatatgactttaaaactaacaattaagtatataatttaattttattttatttcaaaaaaaagtatataattttatattagtatatatttaatcatttatgtaatatataataaaaactataaagtaaaaaaaaattaaaatctaaaattgagttggtcgggtcattcagcttaattgggcagtttgtaattttttcgggttatttcggtttgtaatttttatcggctttttcggtttggtttagacgggttattcggtttgagcagtttacgaaattttttgtacaaccttatttcgcattacatattacatcgttataatcactcatgttggtatatttctttctttgtttaattttgtagttgttcgagagtatgtggagatcgaaagagtggctcttgtcaaatacagaaatgactatggccggcttgttgttaatgttagcgtcattgattagaattgtctatgtttttcttttaatccttttctttaatggtactttctagttttgattttatttttgtatagttttctcacgatttcattacatttgattattattgatctcatcaatagaataattcagtttattaatttcattattactctattataaatatggaattgcactctttaacaatttaaaatgatatgtacagaattcttaatagtagtccattgatataatcaatataagtagttcgtcctctaattattaggttcataattagaataggtcaaaattattgttttacccttctaattatctcttgattccttatgtacaattaattcaatgtgaacagttaatccataacttactatagatttggatccaactattagcactctcagagttaacactataagagaactaatattcgatccgtt

SEQ ID NO: 242106 - DNA, 517 bp, Cannabis indica
ataattaaaaaaataaaatcccaaccggtaaccacacctacaacaaccggttaccacttacatttcaaaaattaaaaaacatttaaaagtacggtggggccccctcgccgtacaacggattccaatccgtgttttgtcatatatgggcacaaaatacggctgcctatatatatatattaaatttgactcttcttaatgattaattcagtcagatttttcattaattaattaactctctgcacatatatatggactatttatttattgaccaaataaataattgaataataatgtagtatacgaggtgtttgaaagaatggcatattatgggatacagtcaaatttgataatatatttgactgagaagttgcatcaaggcacagtgacagcttcaaacaacgtcactaattggattggagccatttggttgactcctattttgggtgcttacattgccgatgctcacctcggtcgataccccaccttcattatttcttcctccatctatttcacggta

SEQ ID NO: 242107 - DNA, 654 bp, Cannabis indica
tttcttagcttcctccatctataagccatataaagagtaaaacccccatagacaacaatgtaggaaccccaaacataagggtatgtttctgcattctctttaattttccgatactgattcaccaacattccactccagcccacatcattagtactagttgcttgtttatcttcttctcctcctttatgctctctagtttccattgcttctcctatcaacccctttcttcaaattctgtttgacacaaatttgttgtaccaagttagaacgcctgaacaagaatccgaattagagagaaaaagtaatcccttaggacatgtttgaatggcatattgtattgagttgtatagtactacttttatacaatactaaatttggtattatagtgtcgtattaaaatattataaaaaattacaaataaaaataatattttcaaatcatatatcaaacgcgatataaaccccaacattcatttcaatcccaccgtcactccaatacatacacattctcattctgaccccagccaatttttaaaatatctggcacattgttagaaaaattacaaagttcatgtagccaaaaaaaacacctgatatactatcattgttactaaccgttaaaataataacagcaatgctgaaaagatgataatga

SEQ ID NO: 242108 - DNA, 629 bp, Cannabis indica
tttaggctgcaatattattattaaataaatgggattaaccgttgaagttatagtgtatatatatacatatatggtcatgaattatttatgttatatacttagtacttacatttaagaatccacctgtaaacaaggcaaaggaaaaatcggctctcatattgattaaccgaaacttcaaagtggctacaccagtggtcgtgtaatctttactagaatagtttgcattttggaactaaagcataaaaaaagaaacatattagagaaatttaataatatttataggggcatttataaagagcttcacagaaaaatctttaccatgtatgatttaattaagacacttaagtcctcgtgtgatacaccgtattgtaatgtattgtattgtattgcgttgaattgtgttatactgtattgtattagtattatttaatacaatacaatgtttggtattgacttgtattaattgattgtgtaaaggtataatatatttttaatacactcgatcccaacaccaactacgagtccgtgtccgagtccaggtctgggtctcgggtacgggtacgggtccacgtcctgggttcgggtccgggtctgggtccacgtcctgggtccgggtccggggtctgggt

SEQ ID NO: 242109 - DNA, 1317 bp, Cannabis indica
aaaaaaaaagaaaaagaaaactagcttgcttttgcaagagggccgagaattgtaggaaaatagcttttgcatagggttccacaggtcggtctttttttgggtgtcattgccctttgatggctgattgtgggacaaatatatcaccgaccccttgtagtgatttctcactattaccacattatttatacatacatataaatttccttttcatatatttctacatgcataatcagtactatttatatacactttatttatttattactaatatctttttgagatattacttcctattggttcttcgaaaagaacattttttttatacaatttacatgcacgtcgctttctatttttcttttcttttcacggtgttataactatttttatatatatgtatatttatggtggcaatattaaataatttaatagctaggtttggattattacatggtgtttgatgagctttgttatcaagatgaattaacataaatatgcctggtttttggcgggagacttcgctgtcaaagaaaaagaccccagaagagatgcttatttgtagtttttcgccaattggagggctccacaaattgattatatgaaaagctaactaagacaagatagctagtaatagtattatttatgttcacgtggcaaaatatagtattgtccacgtgttaaccataactgcatggtcatggtaggtaaattccgtttagttaattaagccctaattaagtgaaagtttaatcaataatactcaataatatataaattaatagcataaagaactctaaaaattggtgctggttatagtttgttaaaataccctatgaaacagtagttgatgatcacactagtacactactactgaaattgcttctttaactaatggtaatgtaatggagcttgacacgatcaacttttatttttattttttattaaacatactttatagattaaattttaaaatttcattagcagccggctattttaggcccacaaaagttttaatttcaaataattagaatattcaaaatcaggctttcgtttggattttatcacacggtaggtttaggccacttcgaggaaagaattgtggggtattcatttttctgtttatttattttttaataacatatagttcatttttctatatctattatttcactatttttggacaaaaccaatatgaattattcgaaagttttcatttttgtcgttgtatatatggagagtatatataaaggagtaatttggattggagaccttttttttccatatatatttcttaatttttttttattttttttttcttaa

SEQ ID NO: 242110 - DNA, 1412 bp, Cannabis indica
gatccgaatatataatgcaaaattcaaacaaattttttcagtttagatttttccttgtgcgaaatttttgtttttccatggtggattttggtaattttcaatggtatttttcctttgcctattaagattaccttagattttgtttagctttctataaatcgaccatgatttgggttgtatgttggttttattggcattattgttggtagttggctaactttttggggcagaaacttgccatagtggcttaccacaataattattgggttttacttttaagaaaagtataaatgatgtactaatgcgaaatattaacggttacattattgaatgcctctgcttttgtttttttagtacaaaccaaaaataattaaaaactacatttgtgtagttgcttgaattttatttgtgctagattagataacatagctaatcttcttgccttgtattgttttggctacaagtagcatagacgaaaaggaatttgatttgaatgatgtagttgtagtctctctttagtaaacatgttaaattttagcttattttatcattaagccattatgtagaagtagaaacttggtgtgccacgctctttagtaatttaactcacttattaatattgagctcgccattttttttgtattctttatattttccatctatgagctaaataaaaatatcttcaaccaaatttatttataataatattagtaccacgtgaacatactgaatttccaaatattaatattggaaatttcgaattgaaagaaaaaaattcttgtactttccaattttttgattataatatggataatatatcatcaattacttacttttttttatataaaaaaatcaacattaaaattaaaattatttaatacacattttagttttaattttttacataatatactaaatattttttaaaaaattaataaatactcaaatacagaaaaaatttatctttatagtttgaacttttttatttacaaaaatacgttattcagtaaaataataaactgtttgatattctattttggttgttttatattttatttatagttgatttatagttgtcatgatgttaattttttcattatttttgttattttatagtttatttataattgttgttgaaaataatttctcgttgttttcttactactttttattttttttgtttgtacaaagtttgtatttttgtaattttaaaatttaagtattgtatttttgaaacataattttgtaaaactgtaaataaaaaattaagtcattaaattataaataaaatatagtaaaatatatatttgataaaaaatattttaagtttcttatttcggttacttactttttaaagtatgaatttatttttaggtctatatattagggtaataccggttaatgtgtttagt

SEQ ID NO: 242111 - DNA, 728 bp, Cannabis indica
taaaaataatttataatttttttcaaactattaattgtaattattattttcaattttataaaaaataaatatatattttttaaaaaaaaataattgttagaaacttgtcataaaaagttattagattgttaccttattaattttttttaattctcatcaatgggtattatccattaagaagtgttccatatatatatatatatatatatatatcataattcatatcaaatatatatcataattttaacatagtaaattatttttttctattttgtgagaggtctagtgtaattttagtgtacattgtgtaaaaaaaaaattaacatattattagatgaaaacaattgttactctattattatatacaagattgctattaggctcgtttggtacgccgtattgtaatgtattgtattttattggtttgtgttgtattgtattatattgtattgtattgtattgtccgagtcggggtcggggtccgggtccgggtccaggttggggtccgggtccgggtccgggtctgagtccaggtccgggtccaggtccgagcctgggtcctgggttcgggtcccgtgtcccagatctgggacctaggtcccgggtctgggtctgggtccgggcccgagtcttgggtctgggtccaggtccgagtccgggtccgggtcgaagattgatgttgactccaaatcctttgtaaatattataatacaagctaatacagacta

SEQ ID NO: 242112 - DNA, 530 bp, Cannabis indica
tgattcttgtttgtttgattggttatggtttttgtttaagttttcgcccttacattaggtttaactttttttaatgctaatttaatcaaaatggataggtttattcataagttcttgctaaattgtacttttttctctttgtgcaaggtatgagggcactgtttgggatgatttggctcatggcaaaggtgtttatcttgctgaacagggattggtcaggtttgttcattatcacagttttcatacacataatatcctatctcggtaacttttcgctctaatatctctatggaagaatattaatcaagaaagtcgatgcattaatttcctacccatgaatacattatatgctgatgaagagtgggattgtctctgttatgtcttcaaattaactaaagagtaaagagcatcaaacaggggccaatcgcaatataacacaggcatatctgaaaatgactgtctgtactgtagtcttccctcgtgacttgacttataaaaataaaaccaaaatgtcaatagtgattctacat

SEQ ID NO: 242113 - DNA, 2428 bp, Cannabis indica
taacagaatattctttattttttaaaatatattctattaaaccaagaaataccgttagataggcacttttaatatataaagatattaatcaatactattaattaaaattaaggtctcttatctctatttttcttttagccaactttgaaaagtcaaaatatatatgcttttttttttaatttttaatctcggttttttttttttgaatcaaagatggtttttattcaaagacaatcaatagatgcaatacttttaagctcaaaaggagcatgaagctcactaaattcacaatttggcaaaaaaacaagctagaccctctagcaacataatgggcgaccttatttgcagatcgtttaacaaaaattagagacattatttaaagaagagattaaaatgcgacaatctcgagctaataataatccaaactcggaaggcgtaataatagagttttttatagcttgaaccattaacaacgtatcagtctcaattatgacattagcccaccgtttcctctttatccaatttagagcttccttgaccccaattatttctgcaacttcaggttgaactaagccaacacggctcgcaaagaaggccacaagcagacgactattagaatcacgagcaacacacccaaacctgaacttgttctgcgcttcaaaaaaagcttcatcaacattcaccttgactgtattcaacgttggtttcctccatagctcactaacattattaatatcatcaactagcaatgcaccatatttttgagattgagcattcttccattggtcaaggacaactctagctgaccgaactacctccctagcagagcacgatttgttcttccacaacacatcattcctaactgcccaaattttcaaactaatcatggcagcttctagcaccaacacctcactttgagtctctgccacattaaaaaaccagctgttgtagtctccatccataataacagccatgttcacaccagaaacactccaacaagtctttgcgaacccgcattggagaagaacatgttgtatggtctcgacatccaagttacaaaaaggacacattaaatcaacattaacatgctttgtgtctaattgtaccttagtaggaagacaacccgaaacaacacgccataaaaaatgatgaacttttgaggggacatccaacttccataataatttccactccgaccgaaccacttcagcaaccccattaacattacagaaacttctaagtacttttcatagtataaaacccagaagcttctctattccagtaccgctcatcgttttcagctgtatcacaaagtttgtatagagacgatcaaatctctatctcttggcccaaacatatcatcaatcacctccaaatccagcttgtagatcccactgagaactattaaaaaccatttgattaaccaaaccacgatgacccgaaatgacataacggttgtcaaaatctggcaaccaaggatcatgtaagatactcaccaatttaccattgccaattgacttcgcacccctacctgaactagatcttgggcttcaaaaatactctgccaaataaaactagaattttgtccaagagtagcattgagaaaactactcgaaggataatatctagctttataaattttgctgaccaaagaatcttcattagtcaatagccgacaaccttgtttaacgcaagattatagttacgaagatcgcagaacccaatgcctccagcatatttgtgtttacaaagccttttccaactcacccctttattacccaatcttgactgagatttccactaaaacttggacatcattccttcaaggctagaatagatttcttttgtgagcaaaaagacgctcatagcataacatgacaatgcttgggccaccgatttcaacaagatttcctttcccgcttttgaaagaaattgtactctcccagctaaagatctttttctgcattttatccttaaggaaaccaaggattgcatttttatttctccccataatacaaggtagccccaaataaaaacggtaacccgaagcttccaccatgcctagcaattcacacatccttgaccacatagccacactagcatttttactaaagaatatggatgatttagtatagttaacctgttgtcccgacgccatctcatacacatgaagaagctataacacattagaggtttcgttcttattagccttgcagtacacatagctatcatcggcgaaaagcatatgtgaaactctaggagcacctctagccactttacaaccagtcaaccaccaattatactcatagtgtttcaacagagctgataatccttcagcataaacaagaaacagataaggagatagtagatatccttgtctaattcctttgcccaaaattataggacccataacatgacccccataagt

SEQ ID NO: 242114 - DNA, 1661 bp, Cannabis indica
cctccaaataactctcatttagtgtaataagtatatatctttttaaagtttcctacacaaaaataacattatacccacctaaaaagttttaaatatccttaagtaaaataaatacattaggggaataagggttttctctcttgttaacttccctaaccctaacaagcagttgtgtggggtttttctttgtctctgaccagggcctgttggccttcttttgggtttgggtgaaactttggtcgggtttgctgatttcacactgtagggaaattcaagttctctcttattttcgttgtttgaaatagattttggtctatgtttctttgcctcattgacagatcgagtctcatatagtacgggtttggatggtgtgtggctgtgtcggaggtgtgttttcttcaaggtgtttcctttttttcgatttgttcgaagggtttcccttctaaaaggatggatggagggccacgtgtttggggattgtcgttgtcggtggagtcattgcacaaccatggttccgatcggcaaagatccttcgttcagggtcgcatatctgatgtaatatcttaaaaaaatattatgaaatttaagtggacatattttattaaatatgtgattaagctaatattggagtgagattataatcttacttaagctaaatgtgtggtaattattgtgaaattaataaatgattaaataaaacgtaaattattaattacaaagattttatcggattgtgtgggtatgataaataattaaataccatttgtgaaataaaatattttcgggttcggcggccttggaaactggacgaagtggtcagaaatatcacgataattaagttgtgttgtattagaattatagtggactaggttaaatgttgaggagttggttgaactagaaaaattaggaaatgaccaaaataaccctagatcatattatagcgtaagttataaagggaggggtagaattaggggtgttcatcaaaccgttcaaaccacccgcaccgcaaaaaaatgcggtttgaaattctttgcggtgcgaccgcagtttgaatttttcctaaaccgcgcgatgcggtttgcggtttttaattattaacatgcagttcaaactgcaccgcatattataaaaatactaacttttatatttatttagtccaatatgtgaatgtccaacttaaaacccactaattattgtattgttgaaagattaaattttttttttcattatttattgtcaagccttagtatttttgacaagtgttgcacaagttttattgtatttacgatagtttaattatttggtgatagtccaaaccgcagaaaccgcaaaaactgcccgcaccattttttgcggtgcagttttcgcagttttttagttttgcagtgcgggtgcagtttgggaaattggaaccgcatgtgcgggttggtttgaaaaaatagtcaaaaaccgtccacccgcaccgcgaacacccctaggtagaatagtcattttcaagggttgaattcttttgtcttctagtgtttattaggctaaattttaaataatagtaagtgtatatgctggatataatgataagagataaaaggctgatatttagaaattagaatgtttaagttatgcttcttctccttccttcgcgcaacctgaagccagccaaa

SEQ ID NO: 242115 - DNA, 572 bp, Cannabis indica
tattataatatgatcactcaaacccaacaaaattatcattcttatgttaactaaaaagttattagctaaaaagaaataattccaaaatattttcgaaattaaatttatatgaatatatatataccataattccaagaatatctgttggagtaaagtgatttgccatcactatgaactctgaatggtcccaactcttgcattgcaccataggctagtgaagaacaaccaggtcctgcattgcccatcaaaattaattatatatattaatttatttattacttttaaattttaatattgattaattttagcaatattctaaatatatatgtaacgtaaatatatggtctaataactgataatcttttatgtctacataattatagaagttaatttgtttttatgatcaggacagccgtacttataatttttttaatttataattaattaatgtacttttctatcaaattttatttaattagaattttttttatattgtacttatttgtattaatatatattatatatatttagttactaaaggccaacgccggaaaattcctgaagaagagagt

SEQ ID NO: 242116 - DNA, 869 bp, Cannabis indica
tcgacaccaagcaatgtaattgttctgtctagtgagtaattgggaaaccagcacatttccagggttgtctccatgatgcagaaaatagggatcggatggatcttcataaggatttctaggtctgtttatttgagtattcaaacccgtacctggcgtttgaatctgattgtcaccattgtcgatttgagcagtggcttcgttgtcacgttctgttccttgatcgttggacatggctggacagaaagaagcttagagacgcttctcaagaactcagagaaaagactgtgaaggaagaaaaaattcgattgaagaaacgaattcttcaactgcggacatcgaacgtcgccggagaagaacagaaagtacggcgaggaagaaggaaaaagaatcaagatcgaaaggaagtatagcttccttgctctgataccatattgcggaagaaaagggaaaacattaaagagattttattgacttgaatgaatgaatttacaaaggaaataagccttaaataggcaggagtgaaaacagatctcctcaaatcaaggagggccgttgaaataagggaccaaatcaatctacaatcttaactgcctaaacagaacatatacaacaggtatatgtacataacatagtcactaacagagtactaacagagaaatacaatattcttgttaacatgcctcattaacatgtaaaatccaataatttttacattttttttggtactttttaatatttttcgtatcataatcaaaatgacaaacgaggctatttgttcattaattttttgaacaaattatggtctccaataatatgtattttataattagttataaaatatgattattgcatgtattaaattttaatat

SEQ ID NO: 242117 - DNA, 552 bp, Cannabis indica
gtgcatcaatatatcccttttaaggaggtgcattgtaaaatcaccctatactttaagtggtttgaaactagttttatttttttaagtaattatttctttttcctactaaatttttttaattttcaaagcattttcttctctttttattttctaaaaaattataatattaagtagccttataattagtatagggaagtacagtactaaagattgatcttaaatatcaagattgtattaaaaaattattaatgatattgttattcatatttttagaaagatgacgcatgtacatttgagtgttcaaaattagcttacagagtcatttactatgtctaagaaaattagtagcccgacccatgagcagagttaaactaaggttttggattcaactacaactctaccatgattaaatcaggcatacagattcggaaggattacacttgttcaaatttacaagtatttaggaaaatgtagatggatgccctcaagggtcatccaggaagggcagttgaaaaggtgtcagggagcgtcgaccatccaggaacaatccta

SEQ ID NO: 242118 - DNA, 552 bp, Cannabis indica
gtactcaaaccatataaaaagcatgtataaagtataattattttttcttacctcaactctactgtaattaactctgacgataccttctaggccctatcaacaattagcgaaacctttagtccaccgataaactcaatatatttattactctttactatacaacaggttttgcctagaatttgactcataaacattttaaattagaaatcctacagttcacaaagtttttagttaatcgaaagatctttctaacggtataaagatcatcaaaatcggagttataacctaagagttatgcatgttttattaaaacagtttctttaaaatcctgaatcatgcgaatttctaaatacagcccaaaaataaaagttttaaaaatagttacaccccgatctagataatacttccttcataaaaaaatgtagctctttttgtaagctttaaaaagatataaacatcttttaaaatggataaaaattgagagagatattgaatttttgctacagacactttttctgaaacaaaacttaaaacgagatatcctaaccgagt

SEQ ID NO: 242119 - DNA, 533 bp, Cannabis indica
aaattgctctactaagttaatcatccatcactcacatctcttttcatctggttgaggcctccataacattccactcaaatatatccattactttgggctggaagagctgcagcatttcaacaaccaaaaaaaccaaagcaattgtctgcaatgaaagtcaagattgactcagaatatcaaaacaactaaatcacaaaccccaccccaacctttttatcattccatataatcactttttatgtccattactcacatgccagaaatatctcccaaaaaaacaaatccaacttttcaattaaattcacgcaaataaagcaaattactgaaaaacttcttttttttttcacacatatgcaaacaaaaccacacttgaaataactgaaaaaaaaaaaaaaaaacaaaaccacaatatattaaggtttcccaaacaacaatcagtttctacaagtacaattacaatctacacgattcctcaaaacaaataaaaaaacaaaaaagaaatgtaactgcaaagccttgtcatttcaaaagat

SEQ ID NO: 242120 - DNA, 1301 bp, Cannabis indica
gctggccatgtcaaaactgataccatgcaatttaagtaacagttgagaaggaacatatacattattatacagtacaactctgctatttaaccaagtaaatcagcacaagatgaaacccctaaattatttatcatcattattcttggactaccttaggctttttgtttttctaaagaagtttttgccagaacttgtaatagttatacactacatgggcaaactcagtctgaaacatttgctgtcactctttagtattttacttactttaacaaagcagaaccagaaaacatcaagagagtgacaaaagctcaagctttcacttaatcaatggttcagaaatttagaatatcaaatcagaatatgaactaacagtaacagaacttctcatagagcctaattgctaagggactaattcagagtcctcatcaaatatattcacataaaaaactattatactactatactactataagcaccgagaataatcagccctttgatccaagcattggttttcattgatggtgcatagattgcatctgatacagtgtacttatactactataagcaccgaactgcgatccacaaagattttccaaacacaaagatcaaacccaagaaaggaaaattgagatgatcaaaaatactcagtcagctaaaaactctaacattttgcttagctttcttcaatttcccaacacacacacacatataaatatagagagagtaccggaaggggaagacaccaaactgaacgacgacagacgactagacgagtccttcaccttgagatagcagacatcggagtggccgacatcaaaacactaaagtcagggcgagcttgtgagggcgatcgtttgaagttcgatcgagatcggcaccagagtggaggctgtttggattttctcaggaaaatgaggacaagaaaatgagatttggtgacatggtgatttaatttagggtagattcaaatttccttttttttaaaaaaaatatattaaaaagtaaaaaatgttttttttaaaaaaatatatatatttaaaacggatcaggtaagatccgatccgtaaaaaaattaactgggcgggtcggatttgatcctagatccaataactatccgaacgttttggatcagaatgatccgtcggatcagatcactgacccaaactgaatgaatggatcattttgccatgcctatctgaaatgcttgaaaagtctcaggaatttctagcattggctcaaaaccaattgggtaaaacttcaaaaatcttgcgaactaataggggtggagaatatatggatat

SEQ ID NO: 242121 - DNA, 1143 bp, Cannabis indica
tgatttgtgttttgtcaaggaggaagtgagtcatactatcttgctgatggggaggcacaagaatggcatgtattcttttgatcagtctcaaattggcaccatttactcgagccctagctgtcctttacccacccactgcagcaaacagaaccaagatcaaaccagtagcagcttgtctacttcatctgtgtctaaatgtacctttgtagctactctaaataatactgcccttactgtgtcaagttgttttaagtgtaattcaagtgtcaaaaacagcttcacattgtggcataataggcttggccacccatctgagaaagttgtccaaactgttctcaaaacttgtaatatgccacctgttaataaagactctcatttctcagtttgtgctgcatgttgtcttggcaaaatacacaaatttccttttcctaaagcatctaacactgtcatttctgaaccacttcagcttgtagtgtctgatttgtggggaccatctcacacattatcctttaatggatacaagtattacatccactttgtggatgtctactcaaggttcacttggttgtatctattaaagataaatctgatgccctcaaacatttcaacacttcaaatctgaagcagaattgcaattaggaaaatccattaaaaccttgcaaacagattgggggtgagtttagatcctttaccactttcttagctgacaatggaattcatcatagacacccttgtcctaccacccatcaacaaaatggattggctgagagaaagcatagacacattgttgaaaatggtctagctcttcttgctcaagcctcattgccacttaagttttgggatgaggcatttcgagcatcagtttatattcataatagactgcctactcctttgttgcaaaacaaatctcccttagagactctattcaacactaaacccgattactctatgtttagaacatttggttgcaagtgttacccgaacatacgaccttataataaacacaaattagaattcagatctgctccttgtacctttcttggttatagtcttaaccataaaggttacaagtgcttagacaccaaaggtcgattgtacatctctcgtgatgttgtgtttgatgagttttcctttccctatgaa

SEQ ID NO: 242122 - DNA, 3209 bp, Cannabis indica
caagtttgagcaaaaaagttcaagtgtgagaaagagagtctaaagtgtataaaagtaggagagtgtcctagacattgtgtttaaagtgttttaagtttgtaagtactcttcattaaatttaaagtgttaattttcttactcaacataagttttctatatatgcgcaaaagattaatcaattcaaatgataattctctgacaaaaaaaaaaaaatagaaatcaaaagataattaaacatgggttaatgaacatgattaaatgcaaatgtacacacaaactgaataaattttataattctgctattaaattatgcttgcaatctcattcaactatggttttgatataatttttttattattctttttttgtttgtaagatggttcaaattggtttagtccgaagttttatgtttttaaaactagattagtatagcattttgttgaaaatttaaaacaaaatcagactaattaaatgtttaaaccaaactaattcccttaaaagtagattagcttagtctgaaacacactttgtacttcataattgttcctttctttcaaactagattagtatagcattctggtaattattttcattacataaataatactataaaatatatattgtaaaaaaaaacattaagtcaatattgaggcaaaaccaattatcaattacatctacaaaacacaattatttgggtattaattcccagctacccagcatgcatatttgtaattcaaacaacatcctttacttaagtttttcttcaaaccagtaatctttctttctattataatttaacttaataaagagtatgattttaagctagctacacatgagaacgaaaagagtaaatgagaaaatagctaaaacaaagataattaattttaattttctagttatttcttagaaagatatgttcttagctgattaagctaatcataagaattatttatagctgtaaactattaaggcataatgttccaaagacttgcacattcaagaatctggaataatgtctaagaaagggtttgtcccttcaaacattttatgttataatataataacttttagccgtcattattttatagttatacattgttacaattctacatatgcataagctagtatataataatatgcaagatactgataataagatgtttggaagaaagaaaaaacaaacaagagggccaaatagccaccttttgaaatcacacattcttctttttggtgataaaatattaattctgatcatcactaaagtttgctcatgtgaacaactgaataatatgacttttagtacctcaaacaaggactcaaaaatcagtccctctctggatcttaaagttataatgccttttaggtagtaggcaaaaacccctacatttgaactcatatgtacaaagatcattctaaactcccaacaaatatcaaaattaattcagtaaaaacatgtatatatgttaaatttacactaccatacaagtactacttcatgaagcactgctatcttaattaagagcatatatagatatttcattatctggcaataactacagaacaaaattgatctccttacagaaaacaattcactaaatatgtgtgcagttgacaaccaaatccttcatctctgttttcccaaagacaaacccatcttctaagagctcaacactcagatccttatctctttttccaagttcataaagtaagaaaattaaaataggatttcatagtgaccaaaggctatgatctaatggtaagtatttcttgaccccgaagcaacccatgccaaaaatctcatcttactacaccttaaattttctctggtaataattagtcttgtatccatataagacaatagtttttattccgcggaaccttacacctcaagttatatatagtgctaattgaatcaagcatttccttatgtctagttaatcactctgtgtttggtttgaagaccaagaaaactcttatacagagactagttatatgtttaaaatacagatccctttttactcatacattttatcaaacgagtagaggtctttacatattctggattataattaaatattatgttaggatcactgcagaatgttgaagaaagaaaaaatcaaaccagaagaaaacttaaccaaatatattagatcgaaatcgcaacaagtagtttctgactttcttgatgaagcaaactcattatgtactagccataaagttaatgaagatgaaaggaaatactaaaaaaatactaataaaaataaaattaaagaggttaattaagtaagcacctcgatcacgatcgttgcagcttcgtgatatgtgaatccaattaagactctaccttaatccaaccatagcaggattcgcatgaaatagctctctttaattacataatattgtttgcaaaaattcgatgatcattcctggaattaaaatcaaagatgtgagcgtgtatatatctacatacatacatatatatatatattatgtgactatttacacagattagatgcaatgtatatcaacctgaaccattcgtatgaaaggaagactgaatggtacattgagcggagaggagaaaatttgaggacaaaaagcaaagtagtgagaaaatgtagcaaggaagggaatgtttgttcatgtatttatattatttttatactataaagatagacgacttagcgtacggctcaatatagtttgttgaaaattgttaattagaaaatgattcgacacatacaatatagctaatcttaaccagactgatatggttttactttaaaatataaatgacaaatatttattacactgtatgtaataagtaataggtgcaagaatattttttcaattttttctttttacggtggtgatccttatagtattatttttgtaaattttttaaaaaaatttaaatagtttatagtataaaaaatagggtttaaattttccgaacaattgtaataaattaaaataaaaaattattgtcaataatgtatactatatttgatattgtaacttatataacaaatttattatgaaaaaaattaaaaaattaaaaaaaaaaacatccggacatttatttttttggacataaaggttgaaaaataaattgttttaaaggcatgaaatagtagatttctagtttgtttgttatttctaaagtttattaatttcttaagggattttagttgttgtgataagcaaaa

SEQ ID NO: 242123 - DNA, 969 bp, Cannabis indica
tactttataccactctaattactacttaaaaccatggtcaacatctcaaaaacactaagccgaaacagtaactcaacaatggtgatcctagttgattctttctctaacaatgaattttgaactctctctctagattgtatggttcagagccaagggtatttatagtactttgtctgtgacagttggttagtaacaaaattaaccaactgaagatagttggttaataacagaattaaccaactgaaggatgagttgtccgaagggacttaagatggctctcaagtggtcaaagtaacaacaattctaccttgctttgatcacttgaagagaagaaagagctcaacagaaatatttctttgaaatcaatttagcaactattgagggtaagaactcgtcaactaaacttaagttagaaaatcaaatgcaaattggtgaagatgaaaagctaaagagaaatttaaaatattaatggagaaaaatagtgttgtattgaatctctaaactctcttacaaatgattatttttcaacccttcttcaatagaagagagatgtatttatacggatctccaattgctccaaaatacaagtggtcccataagttaggagacacatatgctatcaacatgaggatctgagatcacctgacttgttgcttgttggcttgtttcaattgcattttcaacttgattgttacgaagtctgccatgtgttgtgcatactctgtattgtagctaaaagttttaaataattaaaacaataacatttctaagtaataaaatagaacaaaacatcatgaaaataatacactaaacaatcaagtgttacaaattcaacatacaaaaaaatctaataaatatttattataattttcaatatttttattatataaataattttttaatatatataaatgtaattggattggatcggtttttaattcgattttgagattgacattcaataaccga

SEQ ID NO: 242124 - DNA, 591 bp, Cannabis indica
ttttgtataaataaaaattcaactcattaaaataaatgagtttttataatatgttatcaacacgagtttttgtctcagataaatattttttttggttaaagttcataaattattttgaggccacgatgtactacatatatacatactcatcccactgaaataatttcaagaataatttttctttctcttctttgttacctatacattatatattgttagagagtcccacattgctaatgtgtggaaagattatagaatatataagcggaacaggctactcctcccattgacaattagttttgagatagaacaccattcaccttattccaaattctaactatatatatatggtcttattctcacttatctatataaaattgttttatattttcaagattctttagaataatacaattaattgtatgtgtttacttacacaataattaatgtgtgccattaaaagccatcactatgtatggttaaaacaatatccttatattatagaatagagcattgctattaggtactactagtgtctagcacctttgtgacatgttgcattgcgattgactagcgatattccttaaaaac

SEQ ID NO: 242125 - DNA, 507 bp, Cannabis indica
ttacctgcaagtgaagttgatataagtgatccagaaatgagaagaaaaatgagactgatgttcttcatcacaatcatgatgagactcatttttgtgtttcaatttttgcaaaaatataaatatgttttttttgtgttgtaattatgagctagctagctttctttcttgttgttctcttcattcaagagaaaaagaagagagagagagtgtttgtgtttatatataaatgaacaaaagatgatatgtttccttgttaattatctatatattaaaaaactatacactaattagagcacaaaaatcctagtgataattatatgatttttttttgagaattgacagttaatttaaaaaattcaaactttattagttatgcttttaggttataatttattaattattattataattcaaataatgaaaagaaagaaaaggagggacagcaaatgcaacttttcttgttgttgttggggcatgcactaagtctaagagtggatttttatatag

SEQ ID NO: 242126 - DNA, 1103 bp, Cannabis indica
attcaagctttgattctggtttggttgcagttggtgaaaatatggaagtaatataagactttttcattcaggagagagaaaatctaaatgggtgaaagaaagttatatgaatgagaatattgagggaatgggaaggaaaatagagaaagaaaaagtagtcatcttcaattcaatatcattttttgatttttaattaatttactatttgttttttattatcatcactttgagatgaaaagatgggaaggatttgaaattcatggagtctcaaccgaacaggagtaagataggtgtgtggtggtggggccaaattaagtgaagagcattatacttggacgtaaggctgccaacaatcttcgacatgcgatgtcgattcccaacttgattgtatggtacacaattcacccaccaccaaaactcatactcaacactgttttgcatccattttggaaagaaaaataaaacattttattactagatattgtggcaaccgccttaattaacaaacaataaatattacaaaatgtgcatttttaagtgattatgtattatgcaatacatatgtgtctcttgttaatttaagttggaaactttatgaataaaatatttcaaaaaatagtggtgcaatcgatattatattattggaaaattctataatgcactcccttaaaatggatacatcgatacatctctatctgttttagtatccgaaataattttttagtcaaattttttctcatggtcatgtaaattatacttatttaggatatcctgtaaaattttaagaaattcgaaaaaatttaactcaccgaaaattgcattcaagtagtgtgttgcacgcgtgactattttattttatatgcatgtaaaataggctgtttaaacattgttttctatattgtaaattattccgaatctcttaaaattttgtaagatatcttaaatagttataacgtgcatgaatataaaaaaaattagagtacaaatttttctggatgccgaaacaagtagaaggtgcatcaatacatctattttaaggaggggcattgtagaatcaccgtataatattttatttttcaaatcttgtttctttaatagtaata

SEQ ID NO: 242127 - DNA, 626 bp, Cannabis indica
aattacaatttaggttatttttatttataactggcccaaattgggacttgatttttttataacaaactagaggttattcttgaatagagtattcttaaatagaggttctactgtaatattaattagtaatcataaatattttagaatgggtatattttcttgctgctctctatattttaaaaatatatagtgtaaagtgtcagtctaatttctcaaatcaagctcctatttataatagttaataaccctttaattaaatcatatttaattatttaaataaataaatatctataaccgaattcggttactgatatttatgaaagaatctctcaactacttagagaatatcttaaaaactttgaaatatctataaccacttttcaaatttagatatttatctaattgaattaattaaataattaattaacctaaaaagacaaactttatagggacatgctacatgatatgtgcctaccttgtcttgtttaagacaaggatggtatcttttgttctcacaacttttgtctcaacaaatattatcttaataacttttgtcttttccctatttatttaatttaattttttttttaatttattacaaagataagtaattactatttttccaa

SEQ ID NO: 242128 - DNA, 4594 bp, Cannabis indica
aaaaaaaataattaaataatatattgtgtaaagttttaaggaacaaaagttaaatgcaaataataaaataaattaaatgtaataataatgagttatgattttgtgtaattaaacaaaataatgtgaaagtgttcatattcaaacaaaagttataataatttttttaaaaaaaacaatgtacaaagtttgcaaaatcataaagaaacatatgatgttttgaaaatttaacgtggtatttagataattttgaccatttaactatatatgtaacaatatttgtaaatatctcaacaatacaaatgtacatatgttgtaaaatttctcttgtaattttaatttttttaatttgctaaatttttaattttctagattataaattgaaatttatagcctcaagaaaatataagatatggcgttcagttgcttcttttgcttcatcattatcaatgtgagtttcatctcagagtaagagagccattccttagctgagacaagggtgtacatcatggtcattcgaaggttttcagttgcctctaaaaaagttctatttttttatttgaaaggggttgcctctaaaagttagtatggcattaaatcaatcttatatgaacgaatacagttgttcacatagtaaactaaataaccgactgagagatggactcataagctcaaatcatatacttggaagttcgaactacaaaaatgtgggtgagttggtaaaaattcacttatacaaacttcaacaaaattactttccgaaatcatattgaaaaatgtaaagcataaaatccttatttgagatgaaaaaagatcactgctaaacaaaattatactaattaaacactataattgaaagacattaatatgtaattgctaccatgaaaataagtagtagcatcagcttgggctgccagaatcttctgtgcctcttcagggatatagtcaagttgatacccttgctcttgggaagatagatccatggttttgtaccaatttccaaacttatgatcaaaagcatcctgaacgtggatggtctcaaaggtgcccttgtatttttcggttctgaaacacaattacatatgcatggtgcttaattttatatagaatccttaaatatcactgatcagaaaggtgagataacatcagtgtatgttggcagaacagtaaaagagatacatgcttaaaatctaaatcaagaaaatatctaatgcatagaacccatttaatttgcagagaaaccaaccttagcctcatcattcttgaatgagtgaaggcaaaaccgaccctcggtatcgtaaagaaagttctcgttggtttttgggatagaaaccacatttgaaataatacaaaatatcttaatgttcagcgaaattatcaattacagaaatccaaacaatcatttatcataataatcgtagttacaaaaaaaacataagcacaaaataacgagaaaaaaatattttagtattagtgacttgagcagtcagaatgtaagtggaggctcatcatgatatttttctatgtgccaaaatgtcaaacctagctaaactgcaacagactatttcgaaactacaacgttaaagaaaatctaatgatgcagcaattaaaagaaaaatgtaaactttcaattttgtaaaataataacctggagaagactcatgttgagattgaggcatagcttctaaaaccatgcaaacagtgagattttgattgagaaccaaatcatgggcataatgaatacagtgattgaaatcaaattgttcttctgaaatttacaggcagtagtgagattttgaatgcctcgattgggaatggagacgggaaaccaaatcatgggcatagctaaccaggcattttgagatttcaaatgcccttaatttggaatgactactgaaaaccaaattgttcttcttctttttttttaaatgtgagtaaagcaactaacgttttgtttattttttaccaaaaaaaaaaaagaaaattgttacaaaaaaattgttaaagtaacgaatgttattagatagtcacttttaatatataaaaaaaaaatgtaaagtttatattattactgaaatagaaaaaaaaacaattataaccaaaataataggacatttttcactacatgtgtactattaactaaatgagatgttttggaaacattcttgatatgttattgagttgacgtgtactattcagttgaagctctagcttttagggtgtcctgtttgaggaagttatagttttattgtctaaatttccgaatatatttttatctcatgttgtttgctgactttagccgttcatgatttgacaaagcatgtttttcgattagacgatgagttatccaggttcaacgggttcctgagctagttgggatatatgcattgtcaattcataaatgattctaatcactacgttagaaaacaaactaaatgagagagtatttatattaattgaggagagagaattaatcatatatgtgttaaccttagttaattcttaccaatttaatttatattaaatagatttagatgatgtgtcttacaataattagtgggacagggaggagacaataaattggggatagtaaatttttttccatatttgaaaactaaatgcttgaacttcaatggtaattttatggttttgatgtctttgtgatttctgagttcataaaaatattataattgtgattataaattgttttagaaagtttggcaaagattagataggtttggaaggaattggatttgaaaaaccaaactttagatgtttctgcagagaaaatggttagtcgtttttacagggtatcgtaaaaacggtgaaccatttttcccagaaaaaatccaaaaaagtggtgagtcgtttgaggtgattttcgagagtttagatttttgtgttttatcgataattatatttttgtcacactatttatcgatagaaaaactttcagcttttagtttaagtcttagatacggactagattgagattgtttaccagattattgttgttgtgatatagggcccaggatcatcgagcgttttccactcaagttgactggcacgcgtgaatttggatttgaggtaagaaaaatcaaatgtatcacatagcatgtcaatgtatgttattactctttcgagttatctcattaggcaacaatgtaaaagagagtactactctaattgaaatcgttgttaggtttcttacttgtcgattacctcattaggtaacaatagcgacattagatgtttggttgggcttttcaaggtttctttattaagcaacgatgaaaatagttactgtataaagtaacgttaatatcttatcttattagacaaatatatgtgttatactggatgcttgtatacttgagatcatgtgtgttagttatctgctattatctgagtttgtgggaatgtttgatatttgattaagtttggtcatatttgaactaaaatgtatgctgttatgcttctacttttcttggtgagtctctgtgactcatgagtgctttgtggtgcagatgaagaaaggactgaattagggcaaccatgagttagagatcttccccaacaaatgtatatatcagcttatctggtcggcggtgccaagtagtcaggatcttggttgtaaatttttaatggaatttttgtaaacatttttaaaggggatccccaaccctaatttttgtataatgccaaaattaattttatttcttattacttattaaatttaattaaattacaattttttttatatctttaatttattattataagctgatttattaaaacacacatgtgatgtccctacgagttagggcattataattccaataccactggtgaatgttcactaagaccctatgtggcaggtttccccatttacaatggggtgcaacacatcaaccccaaccgaatactaggtgcatgcatgagtacccctaagatagatttctagagtgactagtaaatattgtcctcacatttaagactcccaaaattaaaggagctacccaaattcaaacccatgaccttaagctcaaaaaacttgagagtaagcattttaccactaaaccactcaatttgaatgaagtttaagatctcagtccaaaaatttatttatccctataatctaaacattaaaggatattatcaataaatagctctatgaaatttagtttttttgataaatttctaaccaagtgttttgtggataaaaaatagtatttttagataagatacctatatatatattttagttaaatcctttaaatttcaattttcaccaacctcataattgattaccacacttaggtaggatgtttatgaggttaaatagaaacattttgaagttacaaaattattagtttccaaatactttcaagtagctcctaataggaaattataatatgagatataccagtaatatatattgtctagaactgttgtattatttttttactttcggtttctaaaagctgaattgatttaattttggtcccaataaattttttaactagtttccgaacacattttaacaatctattaattctccataacagttataacttttctttttctttctttcttt

SEQ ID NO: 242129 - DNA, 1045 bp, Cannabis indica
ttagtggatctaacttcccacagaaaaaatagaaatctggaagtctttcatatttaaagtccagccatttgatgaactctcttcccatacgaatgaatttgatattcactcccctccttatggacaagctaacatccagaaggatacagagacgcatataggggccagttccctccttaatggtgttcttatcaatctcgataaggtcacccacttccatggtaatgaacctggctagatcatgagacttacacataaaagggattccatacacttgaacccaaaaaggaacatagtgtaaattatcaggggtaagaggaaaggagctatctcgagcagcaaaaatagttatgctctgagcaaaatgccagggctgaccatctaacactctacccttatcaccctcacaaccaaaagtgaccaagaacataccatctgcatgttcagagacaacaaccgggaatcgacattgcgatgaccacataccaaaaagggttttcatcagggaaagacgattataaggcctaatagtgtgaagcttaaggataagactaacaggagcatgagaagaactagacgaagcaacctcataagtaaagacagtggactcatcaggagggagagctaaagcactagaaacagtgtttaaaaattcatccatatttgcaaaagaaaacacttcagagacagggacaactaaaggaaagattaacacaaagagatgaaagaaatgatacctgagtttggatatatattgaaaaaaccataatccacgaaggattttcttcaacgctgccctagtcacttccctagtcacatatcttggagccacaatgatgaagagaaactgaagagcttcgggaacccagtcgcccgcctccatattacaatcttcaagggtatttctcagagttaagatttgagaaatctggattaaatgaggcgaagacaaaaaaagatgatggagaagagagagggatgacgaaaatggagagctgaagcaattaatgttctgaagaggattaatgagatgggaagaaaggta

SEQ ID NO: 242130 - DNA, 746 bp, Cannabis indica
accccattagatacagttatggaagaagcagactccctcgcctctggtccccaaacaggcggtataggataaaaaggtgcaaccaatgtcgagaatcgaagggaagatgtcgagaatgtgtttgacagcctcgacgatgaccagaaccctaaaaacaggcaaaaagtagacgacaatagagactacataaaaaatgggaactataaagatggttattactatgaccacgacccaaacttaatgtaagtgactaaaagaggctactctgataaagttaacagaacaaaggaagctcactgagaaaatgaaaaagatgatgtaatgcctctagacaaagtttagagacttggcaaagtccaaagatgacccttcagttgaagtaatggttgaaggatgtgctcacaaacaaccaaaagtcaaaaccttgaatcctcgcaaggataaatataaaggcaaggtagatgagctcccacaaaagtccattcctaaacaaaaagacacaaatccactcaaacaaccctcaaggatgcaaagggccagcggtgctttcgagcctgaacacccttttgatcctagaggaaagatcgtgctaaggggaaaaatgcaagagtaactaagccaaaagggcaaaggaaccgccctagtgattctgtcaatcaagacataggacgatcgtggacatctaaggacaactagtccactatagaccttcgacagtgaatcaatgccaagtacgagaagtacaa

SEQ ID NO: 242131 - DNA, 813 bp, Cannabis indica
ttttggtcttttggccaaataaggttatattcagcaaaatcatagttttattaatttgaaaaccaatttctgagttttaccaaacccaaaactgactctctctctctcttcccattttgtgattgtgagttgaatttagaggaaaagcttggatttggagtaattatgcatgctcatgcttgggaaaaacttgaggtagttgtttttaatctcttttctatgtttacgattctaattttaagaggtcatcatgagcggtcatggtgttcttgatgatttttgattatggtgatgcatgtggttgatattaagggaagttatgatgttttatgtgtgattgtgttattaagattgtgtattatgcatctagattgaattgggagaattttgagttgaattttggtgtttaatttttgggtaatcacttgaatttcttagattttactttgaatgtttgaatgcttgagtttcaagcttgtgtaatattatgtaagtgtgttctttgtgtgtagcatgcttaatttatgattttggtgttgatattgagttttgcgtggtgctcaaatatgtaccaatgtttgattggtttggttttggttgaaagattgatttgtgtatggttttgaatgtgttttggtatgaaattaggttaaaattgagtgtgttaaattggaaaaattagggttttgtgtagaagcaggggttgttgcggtgccaaggtttggctaaccgcggcgagctccaccaggttgtggccaccgcggcgagggtcctattaccccagtttttattttctcgtttttgctataactt

SEQ ID NO: 242132 - DNA, 863 bp, Cannabis indica
tttttttttttgttaaattgtttgataatatttggagatatgtattacagttaataatattaggaaaaagagtatgattaccaattaagtttaattcatgattacatattacttttttttattgttaatttttttaattgattgtgcaattttttgggaggtgtgaaatgattcattgtgtatggacgaatgagatagttctatttttgaagttctacattaatgaaaaatatgaaaaaaatggaaacttttgtattgggattttttattttttatttttttgatagagggatttttttttttaatttgagattactgtttttgaaatatctgattacaatatcaaacaaaaacagatacaaacaatacaaaaataatgatataagtttccaattttgaatttgactatcaaaacaaaatgggcaatatggagtaacaatgtatgtagtgagagttttaacaaaaaatgacaaatgttttatttttgaacacaatgacaaattttttttggatgtgtaataaaatactaaattagttactcatttattattatctcttcataggaaaataaactgccataaaaattagattttgaatttaaagtcttaatttttttttttaatgagtaattccttatttgggtcgtgaatgaatgccaataaaaaaagaaagttcacattttggttactatttattacaaaacataaaatgactttcatttatataacaacaattattattattattattattattattattattattattattattattattattattattattatcattattattattattattattattttggttatgtacgcatgactatataatatatcagtttcctc

SEQ ID NO: 242133 - DNA, 742 bp, Cannabis indica
gtgtagtgtgttttcttgagttgctctgttcttttagctattttgtttgttccttctattctgacgaactaacagtcctcaagtaatttcttgagggattacccagggttttcgtgtctgtttgtttttgcaggaaaataaaatatggagatgtttcgtgaaggaggttccacctctcgaccacccatgctggaaggagctaactacccttactggaaaaccaagatgagggcattcttgaaggctgtggacgaaagagtgtggatggctgtctctgaaggttggtcccctccctcggttactgatgaagagggagataaacccaagaaaaccagtgagtggactgttgatgaaatggaaaaagcaaacttcaattcaaaggcgctccatgctctctttaatgcagtctcaaccaatcagctgaaggttatctcaaactgtgaagttgccaaggaggcttgggaaaagctaaggataaagaatgaaggaacagaagctgtcaagaaagctagattgagagctcttgcaaaatcttttgaaaacttgtccatggatgaggaggaatcagtgacggactttcatgccaagctatgtgacatctctaatgagtcctatgctctagggaaggtatactctaacaagaaatcggtgagaaaggttcttggtgccctgccgaaaaaattcatgtccaaggtgacctcaattgaagaaagtcgcgacattgaagctcttgatcttgatg

SEQ ID NO: 242134 - DNA, 992 bp, Cannabis indica
ttttcgtatatacaactgacatttgcaaaaactcagtttttcacacatctttcatgtaattagcccactaatcacatagaacattaatatcattatcggtgtatggcgtgtcgaacctaacctgcaaaactaaagaaagaaaagatgaattagtagcatcattgaattagtacatatattcacaaaacctattttactatagataaatatttaagatattaaaattcaactctcatacgtactctacccatctgacaatagtatagttaatcgcataacctgcttcacttcagataaatatttaagatattcaaacatcactaagatttataaaatattaagaacaaatttttgtaacttaaaaaatccaataaagctaccaattaatgtactcgaataagattaccagtaataaattaattattagttttgtggtactaagcattttgaatgattatcattgtgccacactcagtgtctccatatgtatatacattaaatttaaaataaatagatgaatagaaacatttacaacttgaagcctatcatggtattcttattttttttgccaagttattattgatttttatagtccatatcagtgttataaaagcggaagtagaagtttgataaaaatagttttatttaatatgaaccataaacccagtgatctcaacataaaatatatagattgaatctaatatactgaaacaaattcaattacctcttgatgcatatcaaggtatctttgtttctttttgtataacaattaaacattcaatccaagaactatgttgaagaatcaacaacttgatcttccaagccagcctcaacactcaggagtagagtgggctattagatcttattagatgaacagatttaggtatcacactgtgtactcaactcataagacactgtaatgagattaggattttgatctcacacacaccttgaatggcatgggcgtgtgagacaagagagagagagagaga

SEQ ID NO: 242135 - DNA, 2371 bp, Cannabis indica
tcatccacaatggtgagaaaatatttgtatccttctgtaaaaggaatgggatatggcccctagatgtctagatgtatgagatcaaaaattgctggtgacaaattattatttgatacaaaatgtaatttttttttgttttgagaaatggcaagtgagacagttatgtacattagatgcatcaaaaggaaattgcaatcttttattcaatttgtttgtaatcaatacagaataatgaccaaggcgtgtgtgctattggtttttattttgtacattatgagagactgatgtgtaggcttggtagtgagttgcatcttgatacaggtagtagagcttgctaattcttctagctgtcccaatcgttaatgtctgagaatggtcctgaatgtaacatgtattagatgtaaacgacacattatacatgctttcataaattaatgaagtgatagagagtagatttagttagaatttgggtacaaatagcacataatgaagtgtaatcgcaaagtttataataacagtaccaatgagtttgatctgcatagtgccattaggaagagtgacaaatttgtgtgtggtagatttagtgatgtgagaaaaatgtctaatattgcaaaaaacatgatgagtagcaccactatctaaaacccaagaaattggaggttgagagttgttgttaccagtgaaattattgatggtggggccttctgatgttgaagcattagttgttggttggagctgttgaatcaacatggaaatcagatgttgacattgagctgaggtgagttgagaagtggatgagtctcctgatggaagagaaatgttatgagtctgaggtacagttttgttggtcgaaccaatttctggtttcttgctggtgttggaagtgtcacttgatcttcgttttccatagccaggtgggaagccatgtaagaaatagcacttatccttgtaatgaccaagtttttggcagtgagtgcagtggggtcttggtcttttgtttttagaatttttgttgacagcagggttggaatcaggtgcaaggggaggattagtgttggttgcagcagtaatgggaggggttaatctattgccaagagttctttgtctttcttggtggatgaccatagaaaagactttgttgagaggtgggcaaggatagattaatagtatctgataacgagtagcatgataggtttcattcaatcctttgaagaattgtaaaacctgatcatggttgatgtgatcttgtgtttgagctgcaaatgcacaagtatagttaattcttggacgtagttgatttattttgtcccatatggatatcaattttgtaaaataggcactcacagtatcatcaccttgacgtagataagtcaaggtttcatttagttcaaagagccatttccttgattaaatctactgttaagaacagtccacatctcggtagcagtgtcgagatacataatactgctcttaatctcaggtgagacagaatgaaggatccaagatatgactaattgattgcatctaatccaagaactctaaagggagtcatgaataaggggttgaggtaaagtaccttccaagaatagagttttgtttcgtgcacttatggaaatcttgaaatctcttttccatggttgaaagttgcgattgatgaggatcagagtagcaagaaccaatccagggtggtctacgttgctcaggtaatatggagaacaaatgtcttcatatggaggtcgatcgagggacatggatttggtcttgtgatgattgatcgactagaatgggtcgaggagcaggaacgtgatcgactggattgggtcgagaagcagcttgatttgtatttggttgtaaattgtcaacagatttgttttgaggtggtggagcgattgcaacatcgaccactgatggattttgtgcaatgaaagtagctgagatggtagctcgtgtacatactattgttgaagatgaaggaaacttcaattgaattcttgaaggttgaagatggaggagtcgtctgataccatattagtgattaagaaaaatagagtaattctttattaaacaagaaagaatatcaagtgtttgttacaattggttgagagaagaggaatgaatatataggcaaagggaaagactaactaacttaactgtaataactaacctaaccgacttcagctaaacataaatttaagaattaaatctatgtggacctaatacaacttaaaattttgtcgacaaaatctattaaatctcattccgttttgttctttatacttccattcaaaaattatagttgcccacgtttacacaagtgtaagcataaccaattttagtggtccacgtaatattcataaaaaataatttaaaa

SEQ ID NO: 242136 - DNA, 440 bp, Cannabis indica
cagtactataaactattcaaaactttctaaaaatatttacaacataaactattatgaaataaaatagattaaattttttttaaaatagataaagatatactagaatgattgatccttctaatgtgcacttaaaatatactctaaaataataataataagagcatttccaatggaatactataaaaatgatgtaaatgtattttttaatgcatgttcataaaattaaactctaatgatggtgtataatgtggtcttaatttgacacatgctaaaagttgtaccaaatttaacacaaaatataatgttaactgtaaaaactcgtcaactaaactttatttaaaaaatcaaatgcaaagagctcaggatgaaaaatttaagaaaaattaaaaacactcaatcatcaatggagcaaaatactctcatgttgaatattagagctc

SEQ ID NO: 242137 - DNA, 680 bp, Cannabis indica
ggagccgaacctctttaaaaccatgtgttctttatttatctttgtgtattgtacctgaattatatcacttatagcttacaattaagactcattgtcttggttaaaagcgagatcaataagagccttacattttttcaagaaaaaacttattctgctatttttgtaatttaaaactctaattaaatttatttttgtcaaaacattttcaacatgacaaaactaacctttagaattatgaaagtattaattatatataaaaaactttttaaaataaataaaactaaattaagaataacaatattctgcacatgtggtctccaatgccaataccatattggaaatagttaattagtggttctctataataattatgagaaatgtaaaagtattaagcatcataagaggtgacatattactattagtgcaatttaatatcaagtctcataaattttaatttaataaataatataaataattcctaagcaattataaagtactaaatcattgttgttaggcaccttaagcttatataacaaagctctcattatattattccaacaaactcaagataattgtttcctcaatcgcttacttttacttttatttaggtaaaatcgttcaaactattgtatggttaatttgtgcgtttaaattcatgtttaatgaacaataaatgttca

SEQ ID NO: 242138 - DNA, 533 bp, Cannabis indica
aagtccaagcgttagatatttcaatatgtgtataatgatcattgggtaaacttttatcttcgtcagaagaatcatcctcactttcctccacgactagttctagaggatctacatgcatttctcttataattaggttgtgaaaaaggcaacaagaaaaaataatttgtcattgaatttcgataggatagtatgatcaacctctaacgatttcccatcatccctttaatagtccaaatgctttctctactacgttccgagcagaagaatatttcatgttgaccaatttagcaggagtatttggtgggacatccaaataatttaaatgatatcgttgtcctctatacggtactaagaagcattcgccattatggtatcaagtatcacataagtagtaatatcctgtaaattcattgacaaagtgtagacctattatgaaatttacacgtatatgtatgatattacacatggaaaaaaaaagtataccttgtggaactttcaacccatttggcctagatatagcatctcgcaacact

SEQ ID NO: 242139 - DNA, 7635 bp, Cannabis indica
tcaatgtgtgtcactaaaacttgattttctagtagtgtaggttcggccggaggtttgtggactggggccaagatggaatccaggttcaaggtcggggtcagggttagggtcaagtttatggtaaagtcaatactaaacatagtattgtcttaaataatatcaatacaatacaatcaaacacaatattatttaatacaataaaatataatacaatgtaccaaacgatcccgtatgttttattttatacgcttatcattattgtactcttattattattgtaatgatatatgttcatttaaagaaacaaattatataacttaaaagttaaatagttttaaggacaagtagcagcaccaaataatactcttaccagtttaataaatcccgaaaacaaaggcaactgtttcggaaccttatttttcttacggtcatgtgcgtttgctgcttgaacggtactagaaatagaaagaagcaaaaacttcatttcatttataaaactctgttctgttctgttctgtgggatattattactgtagaaaataaactttgagaatcagagataatattattaatatgttgtcgtagtaattttgatgttgagagcgtcggtgtgtaaaattcacgttgcattattccaaaatcgtaagtaattgtaaaattcccattattttattgataattttcttttattaaattttattatcaccgctgtataataaaataaacaaaagacaaccgtatctgatatctttgtgatgtgtctgacttatgtctcgaccttggttgggtcttgcagtttcactctctttaattattattgttattgctgacctcaacacgcttctaatcgctccccataaatacgtacgctgctctccctctctttatccaatgcacactcactcttcttaactctactctaataactgtctgaacaagaagaaagaggctatggaggtctcctcctccatcaccaaccgaatctcgactctgctacttctgctatgcctcttcgccttgtgctcaatcacttcgtgtctcgcaaccaatgtcacctacgaccgtcgctctctactcatcaatggccagcggaagctactcatctctgctgccattcactacccgcgcagcgttccagcggtgagtcattattgcaattatttcattctctcttctttctacctgaaattttgttgattgtttgttaattcataatgtcgaagaaaagaagagaaatacttcaacattcattatctcttatgttcaaatggctctaatgagacctaggacactagctttcttgcgttcagaattagaatgtcacttggcgttcatatatttcatcctattttttttttcagttgattttcgtgtaatgggttcttttctcactatacacaattacttagtaaatgtgtggtccgaattttgccctcttctcacaagaatgaacaattgagtttctcactaatatcttaacaatgtagcgatgacactgactatgaaatgattgtgttttatgttagatgtggcctgggcttgttcaaactgcgaaggaaggaggggttgatgttatcgaaacctatgtgttttggaatggtcatgaaccttcccctggcaatgtatgtatgaagattcaaaagtttcagtaggttggatctgaaaggaatttatcataataattaaattgacttgtttttcttcttcttcttcttcttcttcttcttggcattagtattattttggaggacgatatgatctggtcaagtttgtgaagattgtccaggaggctggcatgttattgattcttcgaatagggccatttgttgcggcagaatggaactttgggtaagtctctacgttccagattatcacagcagttccttttcttgtgaagtaagagttacttgggcagatgcctaaagttttcagttctctgttgcactttctctgatttgattatgtataacagcgggattcctgtttggctgcattatgtgcctggtaccacattccgaactgataacgaaccgtttaaggtactaatgtggagtcttagaaagctgctcagcttagctagtgtcatattctatctagtaatgcaattgtttcgtatttagaatgaagtgtgttgctgctgtcttctaatggacttctataacttgctggtaatcagaatcatatgaagaacttcacaactttgattgtgaacctaatgaagcaggagaagcttttggcacctcaagggggtcccattatcttagcccaggcaagtatcattttcaagtatggaaattatttgatattatccaactgagttctcttcttagagaatgcagtgtagctttcatgagaaattaaaaaaaccttgaaagggttctagtgatttatgatgttttaagctattggttgtctgttttcaagtttctattgttgcacaatagtaattctggatgttataagagctgctgtgcttagtaaattcaggtataggtgctgtacatatatatataaatatattctttttttttgtgcttactacaagagatgatcatagtctttgtttaacaatcccttggtgaatgggactatttttgggatttgaatcttctaaggaaatacttttctgctgtatattcttctaaacatttgctaaaaaatcttataattttgttttgaatcctcttcttattgcagatagaaaatgagtatgggtactatgaaggagcatacggagaaggtggtaaacgatatgccatgtgggctgctagcatggctgtatctcaaaatataggtatcccttggataatgtgccaacaatttgatgctccgagttctgtggtaagaattttgacatagcaaatttcaatctcttgtcagctggtattattgtactttatcccaagactaggtaggtaggctcaacattttgtgcatattactaactacagattagacatgcacttctagatgattcttatatttttttggcttttagaaacgacacttctagacgaattctttattttaaatgttatatacaatgaaaaaaaatgacaatattcagctcaaatgttgtttttctttttggcagattaatacatgtaattcattctactgtgaccaatttacacccatatacccggacaagcccaaaatttggacagagaattggcctggatggtaatttagttttctatttttttttaattgtttaataaccatgtgaagtttttaaaagaagaaccaaagtccttctggagtctaaagctccgcatggaacctttatttttgtgagggtaagggtgaaaaaatattgtttttcccctaaaattcagagtttgtatacacctctaacttcaataacaggaaggagaaaattatgtatatatattttctcttccattcatttaacctgtagaagttaagcagagtgcaaccaaaagatatgcaaacaagaaagcaaagatacagtcaggaaacatggagaaccatggtcaactgaactacaaattaatatttttattcatttctgcttatcaacctttctaatgatgaagatagtgcctgcaaaatgcaggctttctttcatctgtctaatcccttactattgtttgcaaataccacatactgggagcttgactattaataaatatttatttaggtaaccaatacttcataaactaaagcagtgtttaaaataaaggttttaagccttgtgggtttttttttttttgaggagaggaagcctcaaggggtaagcctcaggggtacgcctcaaatatttaattgaaaagctattttcagaacacctaaaaatatcaaagatgaataatgtcttttagaattcaagcataccataaaatatgtcattaaactcaaactaaaacaaaaggataacttttgtttctaaaactagaatcctagattcttctatcttagaacaaacttcagcagtaatggcatgatgatttagaaatcatcatctaattcatcattgacgaattgttagtgtaaaatttccttatcattatcaccctcattgtcaccgtcaatattctctcatccaagtctccatgtcacgcacttcttttgcatctttttggagctaatgggcattttttgttttttaaaaaagttattaaactgagctttaagttatttaagctgggaatccgcgaggatggggatctcttgccaactggcgggtcttgcaactgccacgtgtatagtccaaattctgggataacacctataattaattattcttcataaggtctagtcgaccattctgccacagaaacagaaataggtgtcaaagtatttatgcatttaaaagtgagttaattatctgcaggtttaaaacatttgggtcccctgatcctcatagaccagcagaggatgttgcttattcagtggctcgcttctttcaaaaaggtggtagcgtacataattactacatggtatttttctcaatttctttggcatgttctatggtaattttgtgccggttgttttgtccagcatttctttccaacccgatgaacttttatctcatgcattctatatttcatgtcatcattgttattttacccacattctgtttatggtatcgatgttcctaacttatattcatttgtggtttagtatcatggtgggacaaattttggtcgcactgctggtggaccttttattactactagttacgactatgaagcaccgattgacgaatatggtaatcattacatgattctcacattatcgatttgaaattttaatatttgaatcgatttaatacatgatatgtaaattgacttgcagggttacccaggctcccaaaatggggacaccttcgggagctacataaagctataaaattatgtgagcatgttatgctcaatagtgatgcagttaatatatcgctgggtccttctctggaggtaattttccccacctggataattaatctccttaatgacttctagatgttgactttataatctttccatgattgagattgtaaccttctggcaatgtaatggttcatgtagtttcaacttgtaattattataggaaagcaacggtaaaatttactattgactcaatttaagaaaggaatagaagtaaacgaaaaactactgactgctcttatttttttttgaaaaagagacacaggccattgtcttaagactggcccttacccgatatagggtttagggtatattcttgtcatattttgtcttgagtgactggaatttctattttttattagtccatggcgtcattttgtatttgtctatttccattgcttctgatgctactgagaacaattactgatcgattaccacaatgtaggctgatgtattcacagacacttctggagcatgtgctgcatttctggctaatgtggatgataaaaacgacaggacagtagtattccgcaattcatcatatcatttgcctgcatggtctgttagcattctgcctgattgcaagaatgtggtttttaacacagctaaggtaactctctttgacctttcttattttctattcacccctaagatactatatagtgcgattaccctgaagcattctttttgttttcttttttattatctccatccggaatagggaaattaatcccgacagaaaaagaaaaaaataaggaaaaaagaataatttgtaaattagtttactttctgcaagtagattagcgtgcatcaataatggtgttacatggtttggcttttaaaggatcccacatccaaggtagagtgttcattctagtctaattcactatttgatgttagattactgtttcaacagtcccaagagatgcactcggttctcagtacaaagagctttcccggtctattaacagacctgaaaatactaaaacgaatctgaaacaacccagaaaagttactcaacagttttttcttgagtctctctatacagtgcacacaagatgacttgtgttatctcagtttagctactagctactaggtatctttacattgacatctagaccccgacattgagatttcaaccaccaatgaacaagctgcagtcttgaaacttggactaaactaacttaattattaattaacaattaaacaactcgagacagccttaacagcttgtaatgtcacacattcatgaagagtagaactttgcgaactgaacacaaaactcagctgtagtaagaagctttcatgtcttaagatatcagtgttgttttgcttcttttgtgtcttttgctgattgatctattatgttcagtcaataaaaatgcatttattggatgtatcccgagtaagtgaattatttaacatgacttatatcaaatgattgaaaagaaaaaacaagagaggtcttgatgatttagaagtgtttgtggagagttataatatggtgtgagaggttattcatgtttctttgtcgtgtattatttttcctgttttgataatgaatcaatagatctgatttttaacagattggaaccccaacttccatcgttgaaatggtagcggagaagttgcagccatcagtaagtaccccagaaaagaactcagaagctctcaagtgggaagtatttgttgagaaagctgggatatgggataaagaggattttgtccaaactggctttgtagatcatatcaataccacaaaagatactactgactacctttggtatacaacaaggtttgttttcacccttgatgtaatgatggtttcctattgttttttcttctttataatagataaaggatggattccatgcctatcacatggtctagctattcaaattacaaccaaactagaacttacctagcttaataatctgtgatctcattagctttctagaatgaaaagttataatcatatttacatccttctgtcctcatcattagtgtctagaatcataggggcagctataggacaagttgtttatcacacgagtttattcttttagtttgtgatatttaatgggttaacataatagttttattatttgcttgtgattttagaccattagacaatggaagttgaagaaagtttgtgaaatcaaatataatttaagattcatattttcatgtattgcagtatatttgttgaagaaaatgaaggtttcttaatcaaagggagccaaccatttcttatagttgagtcaaagggtcatgctcttcatgcctttgtgaaccaaaaacttcaaggtcataatctatcttcaagtctcgtttgtcttttagtagtaactaaaagtaaaacgatgtgcaagtactaaaatgatagtacaatttatttagtgtatgcagctgggttttaactcttttgaaaaagtatattgccggtgagtaaaagctgtaaggagaatagagggggtttctaagctcttgcaatttctttttccgaagactgttaacataactacagattgcatgttggactaatataactgggaaagcccaagacctaccacacaatagttgtaattggcggttcaatttggtcctttagcattttttctatcctatccttgcaagctcgactctactgtaactgcagaatgcctagaaaaactttttgtacaatttagagaattaaacttgacatcatattgtctatgttgta

SEQ ID NO: 242140 - DNA, 2667 bp, Cannabis indica
caaaagaagaaaaaaccaaatctaagattaacccataaatctaatctgtactttcctattagaattgtaaatcgactaattttgttatggatcccaatcccatgaaaataatggctaaaaatgaagaattataaatgaaagaagaaaatgaaaaagaataagaatatcatcttctcaagtaaatccgaaacggaaccagcagaaaattttgacggagctgcaagtgccattcattgttctggtttggatgcaataacataccatgtaactaaagtcaccacgagcttcttctgggaagtagcctcttcgttgaaaagttaacaagacagtagctcaacctcaatatctgaagtctcaagcattggaagagaagtaaccaccaagtcactactagttttagactaactagaactagaactaaatacatctactactttagacccaaaagtgttagacggtggcagattacaccagttagcaagttctgtatatccctgtcctatgatcaccttagaatgtacaaaagctgttcggttggttgtgtgtaagctaatctcagaacagtcagttttgcattgatgttgttgcttcgatttctcccgaggttaaagtcttgtcatctggacacagaaattgaagaactgatcagctaatcagaaaaatacactaaccaaagaatcccaccattgtttctgctaggaagattcaaatactaatgaagaaaagagacaccaacagaacacggggcaacagtagtgagaaccatccatccatggccaaacggtggcaacttcgtcaacaaagcattgtatagacgtggaaattattcaaaaacttttagattaatcatacctggatcaagggccataggatcagtctctggagcaggcgcaatgtctttgagaacttcaccactaccaacaggcggactacttgtcctagtttctcttggagttttagagttcgtttccggtgcatctttcaactgttcatttccaggatcagaagtgacctgaacaaaatgcaacctcagaccttgaaacaatgtatgtcaaaaaaggagaaaatatagatgatttttgcaagcagataaaaagaaatacaataagacaagattatctctggtcaatggaagtcaccattgagtaataaagcattcctttgtggaataaagcatgtggaactgaaaggtgacttccattgacttgttcattttacggggtaatatgaaaggtacctaataaccttccattcaccgtagctaataaacctttaagttccccgtatttattttattttcttctggctaaactctcatagaaatacgaagcattagccaaattattcgataattttgaaaatctctcataaaatgatattgtaactaaataggtacattgccttatcaataatttatggaacactgtgatacacaatatagacagaaaaatatagcagctgaacctaaatcaaaatttctaggtattttttactcacaaatataatgaagcaatgagtttaaggttcatctccaatatatcatgccatcccatgctaattatttattaataagagacactaatattgatgagtcaaaatatacaagttggaaaaaataaaatacgtgccatgaataaattactgaaactgtaagaagaaacaaacaaaagaaaccattgaataaatttccatataagactagactgactacaagaaaaattggacctgtggtggctgagaagtatcacaaggtgtttggtcctttactgtaggaatgatagccccttcactgcaaggcacatgagatgttgattcctcattaacattaacaacttgtttgttttctgcagcatcctgcttgaggaccccagaacttgttttactgctataatcaccatttgacatggcacctccagtttctgcagcaacccgcttcctgtttaggaataattaataaaacaatcaaaacctaaacaacatctatcagggaaaataaagcatgattacaaaatgaagagacattctttctatcaatgattgtttcaacagtatacctatattcttacctactaggcgtcggaataggtttgtggtgatagtctggtctattggaaaataagattccccgaagaggctttccatcaatgattgtttcaatagtatatccatctgatattctttcagtcaccttggcttgaaaggttttcttgctctgctgcatcaaactgaagttctgtatagctgtattgagaagaaagaattagattgttaggtaccaattaaacctccacctagaaatcccaagagtataactactgtcactatgactcttgaggaatttctgatgaaccacaaacataaaccactgcatagcaaaagatactctcaaacacagcctcagttgcttttaaaaacagtctccgttaagaaatagtttagaaatgcaaacacattaaaattaaaaagaaagtttgtgttaaatcaggaaaaatgtcaaagacacttatttaatgggtaggtttgaaactgatccactagacaacacagtcgatgtgtatatttgtatgtatcaagattgtgaaagaaaaagccaactaatataatgacttatcagattgtgaaaaaaaaaaactagtaataccaagacacaacttgttaactgaaaaa

SEQ ID NO: 242141 - DNA, 1253 bp, Cannabis indica
tcacaacataaatttcttgtgactaaatgtgatttttagtcacaacaaaaagttacttatgactaaaatatactaatttagttttagtcataacaaatattgtgactaaaaacacattcagtcacaacaaattataatttttgtgactaatacttttagccacgaacttttcagtcacaatataagaataatgatttataattagtcataatttttttacttttggttacaagttttgttgtgactgaaattaagatttttttgtagtgcttttagtcacaagtacatagaattaataatttacaattagtcataatatttttattttaatcataaattttattgtgactaaaaataattttttttgtaatgcaataattgaaagtttattttcaccaatattactttatcatacacattgtctcacacaaaaattcttgacactctatctcgagttcacattttgaagaaaaaaaactaaatcaatttaatatatcattaaaaagtgatatattttctattgtttctaattgtttttttaatataattctttgcagaattcattaaaaacccaaaccctataattaaaattttcaaacacctttgacataactcaacattttgttgaaaaattctaattaatgaatcacaactaagaagaagtaattggtcaaaactagaatattgttttttaataatatcactttactaaatatgatacattttataattgtttatagaaaatgttgtataattaagaaaatattatcaaatctattttatgaagaaaaaaaaaattgtctaaaacaatttaattaaaaaaagtcataattttctaagaataataatattttgttaaatgataaaatagaccttgtatttttaaaaataatacaaataagactctaaaactaattttttgtcaaaataaaatttaatgataatctaatttaaaactgttatgataaaactgtttatattttctgtatatgttcgtattataaattttcaagttagttatattaaaaaaaagaaagtcaaaaattaagctcaagattttatttttaccactttgaaaaatatatagtctatttattatttaacaaaataaaaagtccattcaataacttttagatccaaaatagtatttgccctaattatatacgtgaaaacatatttaacaaccaggtacttactgttacagagtctaaaaatataactaagttattcttatcaccaaaaattaaacttag

SEQ ID NO: 242142 - DNA, 520 bp, Cannabis indica
cttcatggctcgaacaggttttttcttttgctgccaccgaagacatgtgcaaaatagcaatggtttgctggacgttatggaaagctcgtaaaaattttttggaaaaatcaaacttcctctttgaacgagattatggtatcggcatttacttctcttgatcattggagaaaagctcaagatattacttcactttcaggtatattttttgacaatataggtaatcaaaatggagctttgggttaaaccggagatacaaaccatcaagattaatgttgatgtcgctgtatttcaacaggaaattcctatgggtttggttttattgcccgcgatcatcatgcttccccactctacattcaagccatgtatcatggaggctattttccagctgaaacaatagaagcaatgggcatcaaggaagcactcagttagattaaaacaaacaactggaaaggtgtcatgattgagagcgacatatgttagcagttcaagcaattcattcactcagccaatgacttcggta

SEQ ID NO: 242143 - DNA, 532 bp, Cannabis indica
ttcatcaaaagctgattcatggaaaagaagaatcatcaacaaccattgaattaggtgctaataataagctagaatagatcaagaaaggtagaagaaatggcaaattattaagtaaaaaaagcttgttacattatatcacaaggccaatactttatattctcatagagctctattaggtgaaagcctcctgatggaattataagaatgaagacttttgccggtgctatttggagaaatctaatgaaagatttttacatttcatttactacttttttttggggaattttttttaattatttttttttgttttggactacttgctctttattaataaagtgtcatagtggacacgttttgattattttagttatatggtgttaataatttacataaagacaaaaacacaaaaagacaaaagtaagaaatattttcaatattttatgttagtatttttcaattctctcctagtagacctacgtgttaataattttatcattattttactcttattaattaattaataattttattt

SEQ ID NO: 242144 - DNA, 566 bp, Cannabis indica
agttcatgtaattaatggactaattgtacaaattaagggagggtataaattttgatatgacttgtattattaaggctaaaaagtgaaatttccctttttttaccaagtctttcactgctatagtaaatttgatatacatatttggatatttatttaaagagctgtgggtgtatcactctttctcataagctaaaaatattttttattattttatactttaaaaatatatccaatttttttttttttataatagtgtacactataattataatcagtattttactgattgaaaaatatgaacaaaatttaaaatagtgtataaaatgaaataagaacacatgcaagctaatatttgaattctatttctccatatagtaaatataatttcttaaaaatagacaaaatataactataataattttatcatataaaaaaaataatttataatttctctatataatatatatatccctacagcaagagaaaactaatttataattttaggaaattacactttatatcaatttttttatggattatttaacaccacatactgaaatttttaa

SEQ ID NO: 242145 - DNA, 651 bp, Cannabis indica
ataaatatatgcaattaaccaactcttcaaggaccaacaaacaattagttataagtacttgtgattatgatgaacaattgggaaagattgatggtatatataggcctcatcacaccagattgggatcagaattattattattattttttttattataattttttgtgttatcttcaagatttctaacaataatgcacacatccacattcatttttaaaaaatatatgtatatggatttttgtaattaaatttttattaaaattgtggtattattattatttttaaatgttatcaaagggtcaatgaaagtgtacttgtcaaatattcaaaattacagaaattaagaggataatttcttggaacttgggagcaaaatatatatatgtatacacatgcaactacttttgttagggatttgttttaaaatgtctcttttttttagtatgtgtatacaatttatattaagttaattttaatcaattatttttatttaatatgacttaatacgtataaaaaatttaacttattatataaatgtgaatcatgtttgtgtgtaaattgtgttattttttttttttggcttttattttacatttatgggaaatgagatagagtctagagtgtattatgagatgacgatgcttaaagagg

SEQ ID NO: 242146 - DNA, 658 bp, Cannabis indica
aaattactaattagcctacaatttatactaaatctgaccaactccccatatacttcctttacgttcttaacagcctatttttatctctgaagagcttttcaatggtatgttccaatctttagactgttcatctgatccaatatgtatttttttggtaaaacaacatccaattcgtactaagtgtggattttatgttttagattcaattcgatctacataacagttaaaatccaatccaatccaacattatttaacatttcattaaaatgcaaaaaaaaaaaaaaaaaaaaaaaaaaaaaaaaactattgtttcttaatcttcaatagtcatctcttttcatctctatttacatacaaatcaaaccaatatacatatatctcagtatatatgtattcatctcagatgaagaaaaaaataaaatgatcattacaatatatatttagatttacactagtatatatttgtatccattattaaaataaataaactagtgtatatatacatatatatttatgtgtatgtgtctatgtgaataaaaattatttttcttcgtgtctttcatcataaaacagataaaatgcactaatttaatatattactaaaaaggattttaacaagtttaaaaataagatgtttgttattttttttttaatatta

SEQ ID NO: 242147 - DNA, 1900 bp, Cannabis indica
tgttattaattttttggagtttttttttcttttcttttttaattctttttttatttgtttttcttttcttttttttttttttttttttttggtaaaggagattttgtcatccttaaatgctatgaatttttgagaacattctagtgtacaagtaataaaataaatattttatcatgttcagggatttgcctaaataaaatattataattatatcaattaaattgggaatgaaaataagaacgataaattaattaaataaataaataaaaaaggaaaataaaaaataaataaactacttaactaagtaaaaaataaaaatgagacaacagctaattgatgaattttgtaacaataatcacaatagtaacaataatgttgggaaaagttttatatattggtcccatacatacataaaaaaaaaaataaaaaaaataaaatataataaaataaattgtgagagtcgatgatgaaagaacaaacaaaaatatgataatcataaaataacgaattgagacaaaattcttaccctataaaaattattaattgaattgcatcagctttggaccaaacctcaagagcctatccaatgtattaggcaagaattttcttgcgaacaaatggcatacattagtatgttttccattgtactcacatttgcttccatgccttaaccttttcaagaggtctacagtgacatcttgtcttataaatctagttggatggggtcctcctctagtccaatcaacccaagtcagtgtcctattggagtttctcctacaaaatctgatactaacaaaggtgggcaggtagtgttcatctgtgtaacatgaaccatggcaaaacctcttaaagactggaaagtatttttggtcagccacaacttcgatggatattgcccggtctagttggaaccactgcgagccctttcgccattggtggagcctaatctgtggcctcattcgaatgttgtagcggccctgattcacggccccaggaaggtcgtatgactctacaaaggtctttgttgagtccatcatatagttatacactgtagagaaattgaataaagggatgcatgactcggagattagtacaaatctttggttcgaataatcaagtaacgcattcgctaatagtcgcctctctgcgtccatcatgttgggatctccccatctcacattctgtagcaatcaaaacatattcctttattttaccaaaaaagataacatatttatttattcataacatattattaagcaccaattatgatataaatttatcaacttaatgtaatataatgggacatttataatttttatatttatattttttctacttaaattttttcttttttttattttttctcttttctttatacatctgtttagtgagtttttgctaattttttttttttttttacttttttttttttctctttttctttctttttcttcactctctatgtttctttgttacttttttttttaattttctctcttttttccttaaactaattttttttaatctttctatatatataaatatataatacgtgtatatttttatatcttttttaactactctttctctctcttaccaaaaaaaaaaactaaggagcattcctcctgtattttttattcttttactataattaataaagtagtatatttttttggtatgttttatagtttattctagagttaatttatgtaatgatttgtcatcttataacaagattgtatatcttgttatttttcttgttgtatttcttaattatctttttgtttattttattatttatttttattgtggttattctaagtgtgtttacgtagtatttctagcaactaaatattttagtatcttaagaaagtactaataatatagatagcagataacg

SEQ ID NO: 242148 - DNA, 1871 bp, Cannabis indica
tttgatgatttaattttagatatttcatgtcttttatcctttttccctagagttactgtttctcatgtcaaacgtgatgccaacatggctgctcatggtttggccaagtatgctctagagttggatgaagattgtttttggttggagtcatgtcctccacctatatactctgttgttgtaaatgacttttgtcctaatttatgataacaaggtattttcttttatgataacaaggtatttctcaaaaaaaaaaagtaagtgaaattatcttaatttatttacttaaaaataaatatctttagaaaaagggaatatatatataggtaagcacaagctggttccaataatagtcggcaccgtctcaacaaatctaatttaccctaaccttcaattcattttgtatttgattaatttgataaactatataccttttttttaattattattctttattttttttcatctaatttgattaaattccatatacggaaactactcattattattatgcatttgtcttacttgacgtgctattttcctcaaatcccagccgttgatttctcctcaaatttgtgtatgagtgtaaagaacggtagagattactccatccggagagagagaaagattattctttggcttttaacttgtcttgtttggcttttacagttggttatcttttctttacttttttgccttgtttggtttggttgacttttgtatttgacttaagaggcctaattagcacaatggtccaaaatgggacagaagagtaaaatgattttaagtttgaccaattcaagagtgagagagagaaagtgtgttttggaatgtagggattcatgaaaagggtaccctaaagctgcacaacttcctatataccctacctaaaactgtaatcagaagatagagccctaatataatgattgaatttttcagtttgactactgatcaaatttatataaataaattaattttcaactattaaggctctcatcaatttaccattctactcatcatgttttaaaccttttgaattaagttcaaaggtaaaaaataaatagctttgccagatcagccagtttttctcgagaaaatttcttaagaaaataaaaattaaaaagcagaatttaaaatctcaaatgatcaatcgaagtaaataaaaacaatcagaaacaaacatcactagatattatgggtaaataaaacaacacatagtacagtatgatagaaatagtagtcacaaaccaaattatggaaatgtaagaataattaaaaaaaaaaactgttgaaaataaatatgaaatataagattataaataattttttttattattaattaattttaaaataaaaccctaaatattttaccaaataatcactttattctgcctttgtcggcatagaatattgaaaacatcattttcatttttgatagctatcaattttactcttttaatcatattctcaaaattaaagtttcataagtaaaataataataattagaaataggataaactttttaaaaatacattattttattaaaaaaagggtcatatttaaaacaatacttgggattttctttttctttttctagaaaaaagcatctgttgaataatatttgtttagacaatagtatatttattgtattgtattttccacatctaaccaaacaaaaaaattatttctattatgaattccaaaattttcaataaacagcttattattaaatttcaatattctcaagcattttaattttattattccattaaaccaaacaaaacctcaaagttacgtacaaaatcctcttttactaatcaattttacaaagttatgttaatttatgattttaatatttaattttaatttttggt

SEQ ID NO: 242149 - DNA, 683 bp, Cannabis indica
atgaaaataaataatatatattctttaaatacaattaataagataataaattggattaaaatatatttaactttaaacacaattttaatcttatttattttcaagatatattactaaaataaatttattttaattacataaaaatttaattgacataagactttattttgtagggttatttgcggtaaaatctctgttttgatattttacacttaacctctttattttttttttgtggtaaaattcttttatgtttatttttctgtataaatttaaagtattagctagatatcactgttaaataccaattgaattattactgtattgcctttgaagttttaattttatgtatacaagtgtacacatcggtcatccagttggtatttaacggtgatatttaactgatgtcttaaatttacaaaaaaagaaaaccttaaaaggtttctccgtcaattactattttatataacattatatattagagtaatttgcgacataaatatttaattttaactctcagttgcaagaaaatacataagtttaatttttggccgtaataatatcgaagttatattttttgaacttcataagtacttggtcgttaaatgtcaagtcattatccacatgttatatttttttattggtctatttaaattatttttttcttaaaaaataaaatttaa

SEQ ID NO: 242150 - DNA, 920 bp, Cannabis indica
tttatttttattttaaaaaaaatgatacaacactacgtacccatatatggcttcttcttatcaagtttgagaatgttgcatattatattatctaacaactaactaagtccacctttctctccattgataccacttgagcatgctaatttcatgctcccattttctattaatccacgtgtagtctaagcttcatttaaatttgaaaatctcttattagtttccatgcatacatgtccaagacactccacaaactcttaactaccctaaataatcttcctttttaccacatgtataatactatggatactactattattactactttcttattacttaatcaagaataaaacacatcattcacttaatagtacctaacacatattaataggggtgcaaataccattaacttcataatttcttaagtcctacacgtggtagactaaacctaaaagcccatagtacattaattaaaaacataattctcataacttaaaaaaataccctttttttttctaatgagttaataacatattttatgcaatcactatttccacatcgagttatctagactagaaaataataaccaagtattttggttattacaatctacctaccttaaaggaatttcgtcctcgaaatttacttacttgagaataactcggggtactgattctgcatgtccttctccaactcccatgtcgcttctgtatcagaactatcactccacaggattttaactaaaggtatattcttatttcgtaagacctctatttctttttctatcacgcgcacagggcgtgccatataactcatgtcctgctgcaagttcaagttctcgtatttaagcacatgtgtcagatcaggtacatacttctgtaacatagaaatatggaaaatattatgcgtttctgctaatgttg

SEQ ID NO: 242151 - DNA, 1191 bp, Cannabis indica
aaaaaaaatatgaaaaactaattttaattatattataatttctctctcgcaataatagtaatcaaatttgttgaatttcattaggtagatctaatgaatatgctatctcattaacaagttcatattttcttttgttttgatttattaggttataaaaaacaactatttcattttttctgtttttttttttttttgaacaatcttttatcactgtttaagtaaataattaatcaattgacttgtcatatggaaacaaattaaagagttaagtcaaataaatgtttataaattgttttaattttttttttttaaggaatcatgtctcttttagcccaatgtttgaaaaaaaaacgtcggcagagttacgtaatatagtatgatttgatcactatgatgtatagattgaaaacttaacttataaaagttgggccatatccatgtggctgtggatttgtcggtctccattattaattataatatcaaatttatatttttatatgaatactatgcacttgattgttctacataaaacttattttattatccaaattccaaatttgttgagagaccagacatgagcagtttatatatgatggtttctaatccaatattcaaagatgaggtgaggtgagaatcagatccatcttcctcatatattgaaattaatctctaactggtgatcaaactggtaagaatactctaaatctgaatttaaccttaatttatgagaatcaaacaatagaattaaggaataacagaagcgtattggagtctatagaatcgattttgtaatggtatgatcttccaatttttcagtgaaatctttttctgtaacatttgtctcttaatgattgggtttcaagagaaagaaaagatacgatactgcaaattgaggaccactgtcgtttatattacttacagacaaggtggcgtttggttgaaggtaatgaaatagaatagaatggaaagaaaacaattttcattattttcctttgtttggttgcatttttaaagtattggaatgtcatttaatgcccttttcactattttggtagaaaaactattccattttgaaacggaaagaaataccattctaatgtaacatgagaaaaaatttagggaaaaaaacaaaaaaatacaaaaaaggaaaaaaaattacaaaaatactttgggccggcccattaaacattt

SEQ ID NO: 242152 - DNA, 561 bp, Cannabis indica
atttttttttaaatgccatatttttattattaaatttagacaaagagtttggtatgattgatattttttttttttttctattttttctatccgacactctttttgagtgtaaaagtagtaaaaaaaaaaaaaaaaaaattaaacaaagtataaaatatttactaaaataatagtttatgtaaatttctataaattactaaaacgttaaaaaatatgaagtattttaaaaattaattaaaaaaaaaaagtgcataagttctttgttgggccttacaaacagtggcacaattttgttagagggtgaatcttatatgaaataaattgggtgataagttgaaaaatatctctctttttttccattaatcaaaaataccttcatattatatttttaaaatatacctattttttttagtgagttgttcaatataccctaattctttacttaaatttagcatataatttgtattaacctaaggagtttaatgaggatataatctttaaaaatgtgtacatcttaaagaatatgaaaatagaagtaaaaataaaaacaaataaagtaaa

SEQ ID NO: 242153 - DNA, 1593 bp, Cannabis indica
tacatataattaaatatatatatatatatatatatatgtcagaaaccatgcatgcaaacactcctttcctttcacttcatgatgaagttatttcaatcactaataatatcctacacttgttcctatcatatctctctaagtaccaccaataaccatcaacaagtccaagttttcatccaaaaaacaaaagtaaaacccttagacgacacattaatagttatggagttgttcgggaaccattaaaaaatcaattttttgattaattaatcaaaaatcacgaagaaactacaagtttttgttaagtaaaattaaaaaaaaaaaaaaataaaatcattcccgaacaggccctatatatactgcaaataactctgaattacaggttgtaaatggtttgttttgagctatacaaatttctaattcataaaaaaaaattcaaataacactatttttttaaaaagaaaaatccaataattcatggctaatttatgacactgaaagtaaggtttaaatgttttgtgggcaaataccattttggatcttttattttataaaaattatcgattaattttctattttattaaatgataattcaaatcctgtgtttttaaacatggtacaaaatagtatcacgagctcaatttttatcaaaataataaaacttattaacatggtctaaaagtattataactagattgatttttttttttctatctattcgtgctaaaatattgtttccaggttagttatattaaaaaaatttaataaaaattaaattaaggtatatcattttgaaaaatataaaatctataatttcaacaaaaatgataccatattttattgcactctgttttgtttgaactttaattttattacataatttattaaaaaatgaacttatatataagattccttgtacaatgtacatggtctcaaaaaaatattagaattttaactatctatctaccttccgaaaacacaaaaaagcaaatagatcaataatcccatttttaaggaccacttgagaactaaccatatttacacttaacaatgacacatatcaaattgcaataaatcaataggttaattactgtaactatcccttaatttattcgtctcatcatttgatttgctacaataatataatttaacctttataaatagtatcaaaatatataataacaatttaaaaattttctacctaatgtgataaattatctccccacatgtcaaatacgtgttaacacttgtgcacaagttgaaccacaaaactttatttgtaggggaataaagaataggggttacaaaatttgtagcgactaatttacacattcaaactaacactagttttattcgcacgctctcgggaaaaactttttcagaaattatccattctaagattgctcaatgtcaaaacatacttaattttgatgtttttaagtaattagctaccgaaaagaaaatgcatcttaatacccatcaatccattaatttttcatcaattatgtagtctcacaactatatagtctaaaattatcatagtatttgacatttcttagataatgtgggattatacaacttactcgatctcgtctt

SEQ ID NO: 242154 - DNA, 505 bp, Cannabis indica
tctaaaaaaaaatatctttctatattattctttttcacctaatccacatatctttttaaacaataaaatggaaaaagtgcatatatattttaaagaatctataatatagttacagttaactcaaaattttaggtcttctcgttttgatgattaacaaatatttaattattattgtcactaatgatttattgattttgtagcacaattaaagataaaataaatttttctaaagtagaattgactccaacggtgaagtggtaattttaccaaaattcgtgaaagtgattcgaagtggttttcaagactcaaagaactcaagccaagacttcatgaaggtttatttacatttcctaatcttgtacagtggttttcatgtccttacttaaaaaagttttaagtacagattttagtccactaacttgtacgacaatttattttaccaaatgatatataaaatttttaaattgactttttcaatcacataatttaactaagagaacaaaat

SEQ ID NO: 242155 - DNA, 694 bp, Cannabis indica
gtagcctctaaaggcagcatccagcttacgacagctaatacacagccatgcatgagaaaatatgtgcatcacagactgaagtcgatggaagagtcaggacctaacgtccaccccgtgtcccaaatatgcgttcaggcaatcgtcaggtaaccaccacaattagacaccaaaatgagcgtcctaacaataatcatatttgcaaggaacgtgtgattgaacaaggtctcgatctgaatcaacccacacataactccactcgaaatagggagccagttgcacttgaggctagtcgtggaaatgctggaatagaagacagaccgcagaaggaagaccttgaacggcaaaacccacaaagtcgtgcccagacgcgagtagaggtaaatgaattcgaatctcatattttttttctactaatagtcgctctcctagcatttataccaggtcagggtccgtagagactcgaggaggaggtaggtagcatgtgtatagaggcgatctccgcggtcatctcaatgagatttttagagcgcgatcccggacactaaggaatcgcgaagatgacgagtcccgtgatccccaaatgggtgatcaaggcacgcagaatccattgatcgtaccagctgcgaccattgaagtaatgatccatgccaacatagctgcaattgctgctataccagcggtaacacaaaccaac

SEQ ID NO: 242156 - DNA, 716 bp, Cannabis indica
aataaaaattgaaaactaataaaaaaattaaaaaaaatgctctctcccgagaagagcctgccagaaggattgctggagaagcctccaaacgccatggatgaactgctctctcaaatgaacaaacttaccctccttgatgaagatggctgggaaatcaacgaagatggagatgcagaagtggggaaactgtgtgctataggacgtctctgttctaatcgcaccatgaatcgatctttgatcaaaactattctgggtagggtgtgggggttactggagaaagatcggggagttgaaattaaacatcattcaaggaattccatcttcttggttttctctttcaaatcatccaaagacttgaacagaattctcctcaagaacccatggttcctcactaatggtaccctaatcttggaccgtatgaatggaatcccatctaattgggagaattttctctctaagattcaattgagtggcagaatcttgtctttgccgcctaaatcaatcactcaaaagaacctagaaagacttgctggtatggctaaagatattattgaagtacagaaggctgatgttgcaaagatttcttccaaaggcttgttcacgtttaaagtctggtgtgaactggataaacccatttgcccaggcttcccatttcctcatgaaggccgtaaattatggctcccttgttgggttttatgccctaaataaaactcttt

SEQ ID NO: 242157 - DNA, 1885 bp, Cannabis indica
aaaaaaaaaaaagatagcattaatgtggattgttaggatgatttatattgatttgttcaattaaataatataccaacgtgcttttttaaaaagccactaaagttagtttagtggtgagagaagtatggaaaaaagggagagatcatattaaactaatatataattgtaaaatattattacactacactaaaaaaaaatatatacgtaggccatggtcctagaacataagaaatctcgaggactaacaattaaatcactaggtacgtacataactaagagctgcattacaaacgaggatccaaacctaacaatatgctaaaaataaatagccattattaagctacactacagtaagccagccaaactttcttcctttttttgtttttgctggattcaatgagcaaaaagactaaactctagtgatgtcattcgctatatacattgtgactgatgaaatcaacaactacaagtaatgcaataaacaagtataaacatttgtagtattttatttaagaatctttaggtgtttaaacaatataaactaccatccaaagtcagtggttataacatatagaatcagataaccaggcagccatatcaatctatccaatgatacaaatgcaaattaagacaaatttgctgctaattagataaatgtaaactactagacttttataatataaacacacgcaaactaaaaacagatggtgacagaatataacttggttaaaactatccagcaaacaacaatgactaattctagagagggaagctacaagtgcaaaagggtaaaaaaactacattacccacttacactttacctactaactactaagaaactatcacaaaagcaaacattagtgccaaagcgaaaaaagagagaaagttgtaatcatagacagtggacacaagtttctaagttaataacaacggaataaattaagtgacagcaaatagctttcgttgttcagtccttggaggtcttgttgatgagagacttgtgaatgtgagggattacaccacctccagcaatagtacctttaatcagggtgtcaagctcctcatctcctctaatggctagctgaagatgccttggtgtaattctcttgaccttcagatctttgcttgcgtttccagccaactcaagtacttctgcagtcagatattcaagaattgaagccaagtaaacagcagcggtagccccaacacggccatgagctgagattcttgttttcagatgcctatgaattcgtcccactggaaactgaaataccaccatgcaaaaccgaatcaatcaacatatctacaaatagctcagctcaaaaaaccccttcaaatttcctgactgatacacaaattttaaatctaactaaaacataaagatttgcatttgtgaacaagaagtgagagagtatcataacaaaaccatctttgagaataacgagattaatatgtttccttttaaatgaaacccttttaattcattggtctgtgaatccttcaaacaccacaacagataagattaaaactgcaacgttgactttaggaccacaacattaaaagaaaaacgaaattcaatctaaaaggtctaagctgcacataaaaggttgttactttaaatggatgggtaggaaaaaaatatttacctggattccggctcgagatgaacgagaaacaggcctcttcttatccttatccttgtctttatccttgttcgctgctgtggtctttgctgccaacagccccttgccaccttttcccgccatttcttgcctgttttcgagaaataattattggtgaaacaagaatatgaagtagaacccaccaagaaaatacattgaggtacataaaacgaaaagtcaaacaactgaaaaaaaaaaaaaaa

SEQ ID NO: 242158 - DNA, 2504 bp, Cannabis indica
aaacacaaatcaagtttggttgtgtactgactaatagttttagaaactaaactactagtttgtttgtaaacatttgttgaaaaacataataccagaaaagggttgaaactttaaactcttaaacttgtgtgagttttttcttctaaaagaatttaatttctttccagctctgctatgtatgagaggcaaatttgtgcatcatttggatgtaaatggggcaactcttgtttttctttttgaattggaaagtggaaattgtatttattagccaagaaaagaaaaatgaaagaggtttacaattttatgtctatttgtacaaggacttcctgagtcctgactggttcattgcttttgaattctgggcactttctatgggttttgattctctcattatttattttatatgggtataagagaacagtaacaaattcaagaggagtagctgaaatggttaagcatgtcttttgctctcctgaaattagaagttcaagtcccttttgggtatagtttctttttattcaaatattgtaggcttaggcaggagcctaattgacagggtcgagaagatgtgactttcaattgttttatataaacaaattgttaacatcacagatgctaaagatttctgtgtcttgggtatctctagttcatttttctaatcctttgtaaaatgaccagaatatgtttaatctgttttgtcctctatattataacattatgtgcagaaaaacgttagcatcaagaaaaactattaactgtttgtgttttgcataagtaatagttacttttcttgttgttattactaagattgttgcatatttctgcagatgttcattattcactttgttttgattgttgctttgatttttattagcttagtaatttaatatgtgaattacaaatgttgatttttgtgtctttgcaggtatgtatattttatttggttctccgagcccttgacactgttggtttgttcctattacctttgctcttaagctttctgttaagtttcacctgatattgcatgtaacagattcaatctgatctattgcatttcaaaatttgagtagtaaccccatatttcttttcagcttttataagcttagtgttgcaattttttaaatctcaataaacattgttgttcaagtgttaaaagaaaattcatgacttttggttattgcgatagcttttacaaaacttctttggacctttgttaatggtatttattatcaatgcatatatatgttatttatttcttgattgatttttcagaggatgatacaagcataccaaatgatgttaaagtgcctatcttgaaggagtttcatcgtcgcatatatgatcccgagtggcattttgcttgtgagtttttttaagaactcatatactatatttcaataagcatgagaattctatattcaatggttcttttcaaaagatatttttcaaatcataatatctttttgtatgcttctgattggcatgtttacttctggatgaccacatatattttttttagtgttgtttggtatgtgaagttcgaaataatctgatttatgagcttgaaagggaggggaatatgattctgcagaaccttatttgactctatgttttgctgtgacatgagaatattgtgcatcattcatcccaatgtaacatatatatgttaataaatatgcatgagaccataattttataattaaacccatttgttagttagatttcattttaaccacccttggagtgtaaagtgaacaccaatgatattgcttttatgtgactaaagaaatacaactctgctactaattaagaaaatttttacaccttcccgttcacgtgcaagcaagcaagcgatacttaggtaccgattttggcataccattcgtaaaagtttgaagtggtcacatattgcttcttttgagtaatgttgaattcattgtcaaaattcttaatttgctttacttatatttatctcatattgctttcaggtggtacaaaggagtacaaagttctcatggacccagtttcatcacgtttcaactgcatttctggaactaaatgaagggtttgttcttatttttttcttatgtaaattattaagtacaaagcaaatgtacttattatgatatgtgcatcagttaattactgtttacaaataaaatgcttgagatttttcttgtaattatttttcttgtaattgtgcatttaattacatgtcgattcatcaagtacttcaattttgcagttataaggaggtaattgaagatattacgaagagaatgggtgaaggaatggcaaagtttatctgcaaggaggttggtaactaattgttttggggtgcatttgaaatctattttggacctcaatcaaatcaaaacataggttttaaattggttcgagccaagtttttaacgaaattcacaaaaaaaaaaacataaaattatgaaaaattagaaatttagtatgtataggttcataagaattaaaacataacgtgccttaat

SEQ ID NO: 242159 - DNA, 649 bp, Cannabis indica
ttatttgacattggaacgttgaggactgaggaagggtcttcttcttttttttttgtgcgacatgcttattttatctctgacaggttggtagcaataattaagtgtacaaactaaaaggattggataattttcgtctaaaaaaagaagaaagaaagaatatggtataaataaatcttagctgaacaattaattaatcaattaacttagcattactttgctatacaagtgggtgagaaaccgcagagcacatcgtatgtaaatcggaggcataataatttgtgtttatcgactaatccaaaaagatgttaataaacatgtgtttaaaatattgcaagttcactacaaaataatttttaaaaaattaacgaaaattgtattttaacttaaaaaaattattgacctaataacataacgatcttaatggtttctttcaagttctgtagcttgccaccatcagtgtttctctttctccactctagccatggctcactactaccaaaatggtatcttctaacgtttttaaacagtcgttaaagtattttcgtcggtttttataaccgtcgcaaaataaacgacagttaaaaaccgtcgctattgtggacttcccgaaagtttaaaatcgtcgctaataatagggtatatgcgacgg

SEQ ID NO: 242160 - DNA, 1168 bp, Cannabis indica
tttaactatccataaatctttcttggtaattctagaatactatcttctgctattataacattattgaccaattcgttgagttcccactgctactgaacacataagcatgaaaatattcaatttcaaatttaatatatatagcaaacctagaatttaataaaatttttgtaattgaaaaattatatcacaaatttttatttctaataataagacttactttcataaaaatacacatatatttataattaactgattaatcactcataatctaataattagttgctagttttcatgtctaatcatacggttattacaactacatattaaaaatcttattataatttgataatgtaataataatttgattatttattagtaaatattaaaattttaataattctaatatttttttataattgttatacctcaaaaattggctgatacttcattgaaggacacgtgtcaacttggaagaatataaatcaacaaatataatgataattatattagaagatattaaaatggaataactcattaaatgcggagctgatagagtatatttataacttgctgactgtaaagtcttaagcgagataatgatatacaaactattgtctcgcgcattgatgagaaaccattctacgtcagaagttcaaagcgaggcaccaacctcgctacgtataaagagatgtaaataagatacgttgactgttagcacacttagcgtataatatacattatacaaactaagcgtaacagttgaatgaacttgaacaacgaatagcaaggcatccatctcgctataggaaggcatactcatggtaccttcactaatcagctccaaacatctttcaatgagattcgctactctgtcgagtcaactctctcaaatagaagctgacattcaaatgatgttaactactgaagttcatcttgtcactaagaactgcgattatcagatggagcgttatgtcttcagtcacaggaacgacgagatttacattataaaccatggaaagacatgggaaaagcttcagctcgctgctagggttattgtttctatgttcccagtgagatgtcccaaaacgatatgctttacaacgcatttaatacacgtatgcattgacccggtaaaagcaaaccaatcacagctatgtgattttcaaat

SEQ ID NO: 242161 - DNA, 753 bp, Cannabis indica
attattttcaattgattttttttaattgttttttgagattatcctttaatctttgtctgacttagaacgggtacacaacgattctcatctcattagtcataatttgtaccaagctataaacagagaattttgaacaaagttcaagtcaaaaactttttttaatttctatactcgaaatagctagtaactgataaccaatctgattataacagcagactttctataagtagaaaagttaattgagtggttttaaggattaactactacaaaatattcctattaccaaattcgcctctcaaaagaaccttcttcctaagagattctttcacaaaacaaatgatttgcatactagttgtcatagctctagcatgcattcatggttctaaaggctgttattgtctataaatatatatatatatatatatatatatatttattgttaacagctcattgttagtttcccttttaagcctttgatcggattgtacagaattaaactcattttctcagtttgttaaatttgttatagactgaaaagtgtgttattgtgagaaaactctgtttttttgtattgagagtgttttgattatatatacttgaatatgttatatagactcatcagtaatttacaacaagaatattacatctttattacattacaggaaacaggatgaacaacaaagatacttcacttcattctctaggaacaacatccatatatatatatatatatatttatacacatatgtataa

SEQ ID NO: 242162 - DNA, 929 bp, Cannabis indica
ttagtaatgattttttgaatttggatgaaaatatttgaaagttggcactacacgtgcgcgcggaccaggcccttcactcagtaagcacgtatcttcagaagagtgcctaactcaggtactcgaacaaggccttgtttgaaggtctgctcatgccgagcttgctaggccaacagaggctgcgtgcagccttctcccacgcacaccagcccacattcgcgcgcgtaagggtatgcaatgtgtggcgtgctgcctgcacacccgcaatttggccattttgcaatatgagcatgccgtgttgctggaggcagaattcatcaaaccctcaaaggcaccttttggtgtccccgtgttgttcaaaagaagaaggacgggaccttgagactgtgcatagactaccacgcactcaacaaggtgactgtgcgcaacagataccccattcccttgatcgcggatctgtttgaccagctaagtggagcaaaatacttcacgaagttggacttgagatcagggtactatcaggttcggatcgcagaaggggatgaaccaaagactacttgtgttactcggtatggggcgtttgagtttcgcgtcatgccgtttgggttgacaaatgcgccagccacattctgtacactcatgaatgaagtcttccatgatgtcttagacaagttcgtggtggtgtacttggatgatatcgtggtctacaacgccactttagaagagcatcaggaacacttggcaacggtgtttcggaagttgaggaaggaacagttgtatgtaaagcgggagaagtgctctttcgctcagaaaagtatcaagttcctgggtcatgttgtggaacacgggaaaatccgtatggacatggaaaaggtgcgggcgatccaagagtggacgaccccaaccaatgtgaaacaacttcgctcgtttct

SEQ ID NO: 242163 - DNA, 1063 bp, Cannabis indica
ggttaatgaccccattggccattatgttattactttctttttcatttttgaagaaaacaaaacgaggaagctcctgaaaacatacgtgtttttacattacatgaaatcctcgagagcacaaaagtaaaaggtaagaacaggtctagatttgtcccaaaataacatccccaccagaaaccttgaagtcagagggtgcttcctctacattaagagacttaatcttcccatcaaccacatatgccgaccatctacatattgacatagttaaccgaatcacatgagaatgaaaccaagaagtgtggcgtacttccagccaaacaagctaattgtttatccaaaaagtacaaatttgaaatatgagttgataatcaacaaagcaaatgaaatataaagaccaagctacctctggaatttgagagaaaaacaacttgtgacaatgcaaatgagtcgaacaaataaagtaaactaattgaggccaaagaaaagagttatcaagtgtatctgtctatggacaatgctaataataacatcccacactgaaagattttaatctttttttactttgaacaaagaaagaaatccaaaatatgtacctttgagagcgaggtccaagcaatgcaacagagagatctttatctaattccaaggccttgtggaatttcccatcgaaatccccataaaactcaatctgcaaaggcagataattgggctgtgctaagatattcggctgactatataatgctaattgagcatgaatttggtcaaactaagaaaatttagcatagaagcattatagataaacaaatgtcacatggggactcaagtgttcacaaatgacttacagcatctttggcttcaagtttctctgcccagccatttaaagcaaacgggtcattcacagctacacaaattacagaatcaattcctttagccttaaacttgtcaatgttgttcttgtaactgggcacatgttgctgagaacaaactccagtatatgcaccctggaatgtgataaatgctaagtctggtaaattgaatttgaaacattaacattaaatgagat

SEQ ID NO: 242164 - DNA, 533 bp, Cannabis indica
gcttggttgaatgggatgagaaaattatcacagatgtgttaagtgacagggatcaagctttggtgtgaaaaacacctctaaataatcattcgggaagagatacttggtattggttgcaagatgattcagggatgttcactttcaagagtgcatattctctgctacaaaatttgaaaaccagcaacaacacaccagataactctggtttttgacgtcagttatggaaattaaaacttccccccaaagtattaaattttctagtggagagtatccacaaacagcctaccaacaagatttcaactttcaacaaagcatgtaccaattgattctagttgtcccttctgccttgcagctcctgaaactactatgcatgttctggttcggtgtcactttgctcaaagttgctggagtagggtccaagtcccatctgttgcacctggtgcgatgatttttttttagttggtttgaggtggggttggaatcgtggaacacaacagaggttattgaggctgctatgatttgttggtcaattt

SEQ ID NO: 242165 - DNA, 1177 bp, Cannabis indica
tagatgcagtggcatcaatatttatttgaattgagaatataatgcttattgttatttatactgtcttactgggcttggctcacgagtgctttactatgcaggaaaagataaatatgtttgtggtcagccatgagtgcgagggctctacggtggattgtacatgttcgagccatactagaccaagcaggttgagtaattagtggtcgtattttgtattcttgaattttgcagcctaggtcagcatgtaaaagtaacttgtaacgttttgtgaaaatttttacaggatcccaaaatgcatgcaatcttttggaagggtttgtaaattataaagttacaagttatatatattttttcattctgtaaataatttaaagttcaaattttttttgctcttattttagtaatcccagtttagcgggatgaggctatgttaatcggcaatcgtatcatgcctatttgataggacgttacaatttggtattagagcgccaaggttttcaaacgtcctgtagaacagctgaacatgtacaatcatcgtcagagagaagctttactcgtggtgcagtaagtgttgagagtaaatgcttaaactgcctttgtgattatttatttaccgctttccattttaggcagcatatgcgcatctagaatgaatgtgatatgaaaatcatgattagtgttttaattgataaatctttattttaataagagaaatagagtgtttgaattagggtcttaggcaacaagtgcttaagtgtggtattggtgcctgactcgtcaaggttgttgatttcgagggttatttgtgaaaaatggaccctccacaatcatcaagaccatagagcgagcaagtagagcctggtaatgaccaagccaatccaccgacactgcctgcacctccgcagaatccaggggataacacgggggttggtaatgctaatctacctgccgactggcaacaaatgttccttgaaatataaagtatcatacttcgtcaagaagataaattgcggttgtttagtcaactggcacttgaagctccagcaaaacaagtgttaccaccagctcctgttccagtggtgggtaacctgggatttattctgccacattgtgattcagtgtttgaatgctttgttaagctgcaaccaccaatgtttctgggaggtactgatattat

SEQ ID NO: 242166 - DNA, 1391 bp, Cannabis indica
tttaaaatgcttcatgaaggttcacagggggaaatatggccagattcacttgatagcttctctcactgctggcttaagtcgctatcatgatgaatttgctgtggctgttgttgatgaggtgaagtttcttctagcttcccatactcttttggcattatagtttactggttcttaggacgagtatatccctgtattttttgttgtttcctgataaatcatagtgatatgctctagttttcaacaagtagtcttgctgcattccagttctttggcatcatgtcttatgcttatcagtacaaaactctgagaatatttctatcattctttttcatagacccgaaccttgttttaagttttaaatgcaaagaagagaaaactgtatcaactaattgagtgaatagagaagttataaagtgatagaataatgataatcttaagagtagacattatatatcaacacaaacaactacagtaatgaattcccacaggaatgctttctattaatcaccaaagaattactgaaaatagctcttcgagaggctttctctcctattctaacctttcaagaaggctagatctctcccaagagatttctcaattctaaaccctttcaacataactaaaactgagttctgattccctatgcatacacgatagagaataaagctttcttcatagcaacttaattaaaagctactagccaatacaaaaagaacaattcagcttagaacaattagaacaaagactaaaactgaataaactgctgtcataaaacttatgcttggcatttgtggcttttcctctttcggtagacacatcaagggtttatcaatatccctactaaaatcttaccttgtcctcaagtggaaatcatgcattgatagttgagcaagtctcctgtgtagcttcaaagtcaggtagggagtgccattccatcaaaacgttggaatttgcttgagtaccagctgttataaaatggtgttggaggacctgtccgggttcaacctgtagctccaatttaggtgtcagttgcagacgtaatgtaggagaggagtgagcatcacctactgtgcagtggagctgggagacatggaaaattggatgaataagagctgaattcgatagctggagtctgaaagcgactacaccgattcattgggaatagggtatgggctagcatctagttggcagtttttcattggaccgtttggtgagtgaatgctggttatataatttgatttttaggaagaccttgtctccccaccttaaactcctcttttcgacgttttagatcagtatgggctttcatacgttgctgtgcacgttagagatgcatgatgcatccttaaatcatcacgatctcattctgtgcctgaaaacttttcaataga

SEQ ID NO: 242167 - DNA, 2861 bp, Cannabis indica
aaataaggtccgacttacctggagcgggtcctgccgtcgtgactcgggcttcaaaaattgatgatcaaccttataagttaatttttacccgttagataattatctacagtaaaaatttagccaatttaatgttttttttcttcatattttgaattattttttcctatttttaaggatctccttcacctataaagtctagcttatttttcatattaaaaaaactttcctcatgttcagagcatctctctctctctaaaaaccagagcttaaacacttatcttttttttgtcattaccatctcgtgagaaataaaaactcgaagtagacgtgactccattaccattgcgacatggggattgaactactataaattgtgtgtgtgactctaattatttttttttacttccattattcatctcaccaatatagtgagctggtgttggccactttttagcgtcaatattttggtactttcattgagagccacaactcaagttccccaactacagtttgatttctataccaagaactttgttccaaaagaaattcataagttcaagcaagaaatcatcatgaacatgcaaaccaacactaccactcctagtagccacactaccactcagtaagcagcaggcattgagattccccataaggaagcgaactacgagcgagcattcgaaaagactcaaacttagaaatgtggatctatggggtcttttcttgatatggagcagtctcatgttagggaaaccagctacgagcgagcatccgaaaggattgaaactcaaggtcgtatgcctacatgtccaccacactcagctaataggaccaactacaattctattcaatgtaatccgaataatgtaggaaaccaatctcctccatgggattatcttcacaagtctaatgactctaaaccaccccgtgaccttgcaaagggaaagggacctgcagtcaaagaccccagaagctctaccaagaaagtgaagagtatgagatttggggggtgaaggtcaatgaactattccacacttagaaatactttcgtgatgaatgaggtgcttggtgtaggtacttctcctgaggtcgtgatgaccaacaatacaaatactttccatgggtgcatggagacatgttaaacttgagcaatcgttccaattccctccacacgtcactctaaggaagactatttgaaagggaatagttggtatagtactacgagtagcttctcatgaagcaaatgctcaagagatgactctatcatcatacaggataagtcccccacagttgccatcaaggccacacgaccaagtaataaccacaaggctcaggtcgatcaatgcctttgctcgacttggaataaaaaaaaacatgcataacaacatcaacaagaagcggaaaactaatacacgcatcaccacagtgtgcaaggccaaatttgacaccattgccactctggttaagggtatcactactcaaaagctaacaaagtactagttagatcaatagcggtgttctccattcttagattgaatgaaggctttgagatccccttaaagttcaaaaatcctgtgtggcatccatacactggcaaagaagaccctctctctcacatataaaactttgaagtacagactgacctacaaggcattcgagacgattctcgttgtcgagtgtttctactgatgctatcaaatacaacacatcaatggtatctcaagttttctccagaaaatatcgattcttgcgaaatgcttaagcaagcattctatatctaattctccctatcaaggcacagaccaatcaagcccaacaatttggtttgcatcaagcaacaagaagaagaacctctaaaggattacctttagtgattcttggatgccaccacacagacgaagatacttagtgaagatgccaaggttatggcaatgacaactggactaacagtaatgagtccattttggaaagacttgaaactcaagactaaatacaccattaaaaagtttctagacagagctgacagttttattaagcttgaagaagccgtcaagaaggccagaggagttgctctaccagaagaaactgattacacttcttatttatttcttgagtctcgaacagacattgaccaggatagtgaagaagagtcaacacctaatacctccattgaaatagactcctcttctgtttcctaagatgaactcgaacaaggagatagtgatgacgagtcccttactatttcttaagaagatctcgagctagaaagcagtgaagaggaatctcctcctacttcccaagacgactcaggagagggagcggtgacaaagattctcccctctatttccaataatcatcaggaacaggggagcaatagtagtgaagatgttttctatgagtcttctgaagatattggccaagaaagtaacattgaagattccctatgagagaggagggaccttatatcgtcacagaagcattaaaactcagaacaaacatgttggattttgctaggactgccacttgaatccaatgtctataccaagaactagaatagggagcatttgagacgatatcatcaataaagcaactatttcctaaatagtttgcttcacagtgagattcactttactttgtgcaagtgaatcgattgcctcctaaaccaacaagatgcgacaaaggaggtccattgctaatgtatggcccctacactattagtcaaacatggcattagtatagtggggatcacttaagctaatctttcatgaaaaacgaaagtttgcaactacaaattctttttctttcaacttagctcatagtgatgtaattaaatttattatctaatgaataaaagtgttgagtaa

SEQ ID NO: 242168 - DNA, 475 bp, Cannabis indica
agattaaatcaaatgttataaattattatctctattgataggtattttaccctatacctactgtaatagtccccatttaatttatataataagtacagttacaataataacaacttccgttaaataattttactcacctagatttttagataaatttcttttataaatttttcctattttagccaaattttataactattagttttattcaaactctaataagtccaaaacaagcatgaaaaaagaaagataatttataattttatgtacattatagtacttaattatattatatgtacataaaaaattatttacaatttatcataaattttattaactatgagaaacgtattcttaatttttatgtacaaactatatatggtaaaaataaatgataaacatatatattttatttataaatttgtatttaaacattaattaacacattatatcaacattgttgggttttatgccc

SEQ ID NO: 242169 - DNA, 888 bp, Cannabis indica
tttgaggtagaaaataaaaaattaatacataatatatgtatcctgcatggaatatttatttttcttctaataatactacactgagcattttaaaatttttattttaatgctctacaattttttttaccatgttttagttttagtttgactataaagaaatcatgtactaaacaaatgaatatataaaaataatatgtgcatgtgctgccgcccctggtcacgcgtgtaacacactactttaacgtaatttttagcgtattaaacttttccgaatttcttataattttacagaatgtcttggtcacgcgtacaacacactactttaacgtaatttttagcgtattaaacttttccgaatttcttataattttacagaatgtcttaaataactataatttacatgaccataagaaaaaatttaactaaaaaattatttcaaatactaaaacagataaagctgtatcgatgtatcccttctaagaaagtgtattataaaatttctctatatgtgtgttttttaccctaagaaatcagaaagtggtaataaggatagtttttttttttttgaaagttgtaacaaggatagattaggagggagagaggaaagtgaaagaacgtggggtgtacttttttaattttttttaaaaaaagcctaattttgtaacaaaatggggtgttcttataaaaaaagttaatattttaaaattaaaatgggataaatttagatatggggtgtaaatatatttttgggtgattctacaatgtattttttttaaaatagatgtattaatacaccatctacttattttagcattcagaaaaaaaaagttagtctaattttttttttcatattcatgtatgctagagctatttaagacatcctacaaa

SEQ ID NO: 242170 - DNA, 3052 bp, Cannabis indica
taagagccattcattccgtgggtgtaagggcccaatggaggcttgaagcggggacgttacaccgacagtctataaaaccgtcgcctatacgagcgtcgcggatagtgagtagaattgacgatagttgaaaactgtcgggaaaatagtatgggttacaattaaaaaccgtgacctatagtgttcattataggcgacagtttaaaaccgtaccctatagtgatgacagtttaaaaccgtggcctataatgttcgctataggcaacagtttaaaaccgtggcctatactataggccacagtttaaaactgtcgcctatagtgttttaggcacagttttaaacagtggcctatagtaaacttttcagtctaaatataattttcgtatttatcagcgacggtttttgccggtcattagattgacaaaaaaaggaaaaaatagttaggataaagtatatatattgtcactagtgaaactaaaacaaaaactagattatgccgcaaattactctagtaaatatccagttaactgtcacttgtgcttaatgtgaattgtttgttgaactaactcagagatgcagtagttgacatgtaatttagtaccttcattatctgaaaagaatttaggtggtttttataatctgtcatcacataggaggaagaagaatagttaattaatattaacaattaggtaatcaaagcaattgaaatcagttcccttcacatctatttattgaacccttttattgcttattttatttttctgcattcttgtttccaataccaatttttattttaccaaataaaaatataaacctaatttgattagtacttagttacaatttctttgggtttgatctcactcatgtgagttactacttgaataatatgtgcacttgcgtgagtaaatatctacaacaattacgacaaatcattagagagagagtctaaatttacttaagtcaattacttttgtaattttcgatacttcactaattggtttaattctctaggcatgggtccatggactagtaccattcgaatgaatagtgatactgcatataattttcttccgtgaatttttaaattctgcaattgtttcttgctacaagtattgtttatgtgtgaacaagtaatcaacttatttctgcaaatttttacaattataatttgttgaacctctttgccatgataacagtcaagaagtaaaacaaggagaatgaaagagaacgagaaagagaaagaaagccatggaaagaatgtacagaaagaacttttgattcattacagcaggagtaagagtttatatacaagatggttacaacctatcaataaccgaacagtataatagagtaactaactagctgatatcactaactaactaaagcctagagactaacagacttaaccgtctcttccaacacctcccctcgaattcataattaaaaagttttcaattttgagtttgcgtctgaagtccaaaaatctttgacttgaaatggctttggttaatctatcagctagttgatcatagactgtgacatgtttgatctgcaccattttatccatcacttttttccttataaagtacaagtcaagctctatgtgttttgtttgagcatgtgaaataggattttgagtgagaaaaacagtgcttaggttgtcacaccaaatgattgaaggttgaggcaattcaactccaagttcagaaaataaataatgtagccaagttaattcatcagtaacattgacaacacttgtattcatgattctgtgctagaccgagatatggtaggctgtttcctactcctccaagctatcaaattcgagccaaagaatatagcaaagccagtggtacttcttttgtcatctagatctgatgcccaatcaacatcacactaagcaactaagtcatatgacattggatttgtgagatgaagaccaactctagagtaccacttatataccttaggattcatttgatagccatccaatgagtagttagaggtttttacataaactacaaactttgttcacattgaaggacaattttgttcagtgtgagctagattgactctattcactgttcgatcttcattggtcaagaattcagttggaggagccactttaatatatttgaacaatcgatttcctttgataacagccagtacctgtgcttccatagaaggaaattatgatcgttcaatcagaatattaaaatagtgtgatagaagaaaacaaggtcttgagaagtttgattagcttgtagtctatttgttgcctgaggtccatgcacagttggatctgcagtgttgtttccaagggtcgccatgtttgctataagaggatcgggaactgctttgattccatgttgaacctctttgccatgataacagtcaagaagtaaaacagagagattgaaagagaaagagaaaacaaaagaaagagaaagaaagacatgaaaagaaagaattgttgatttattaattacaagagaaagagtttatgtacaagatggttacaatcaatcaataacagaatattatagagtaactaactaacttgcatcactaactaactaaagtctagagactaacatagttaactatgtcttccaacacgatttgataactattatttgtagaaataaattatttatttttttgcaaaacatcaattttcatgtgacatattcccttacataccaatgaccattagaaaaatatatatgacttggacaaaattattaaaacttattgatcaagtgctcattacatgctgatctttatgatgtgcaagcagggctactacacagagctaaaataaataaataaataaataaataaataaaataaaaggtccaatattttttttctttttcgataatgccttttagtttttctttattatttttattttatttttatgaaccaacttgtcattggtcacttcattctctattactgtttttaagcctaaaaaaaatcttactgctatttattaattatttttgataatatttaaaaatattatttataaattatactttttaattta

SEQ ID NO: 242171 - DNA, 1343 bp, Cannabis indica
acaaagaagtgtcttgtttataggcttgcaatccttgtttgtgtttagaatctcaaggcaaacacgagttacatccgatcccacaacatctcaatggtgatcataaaagagccgaggcatcccatcctcacctggggcctttagagtattaatttgttgtaatgcttgtactatttccgtggctgtaaaatcctgaaggaggttctcattttgtctgctacttagtctcaaaggaacaaaacgctgaagataaggtatgaggtcattttcgggttcattgtgggaaaatagaaccacaaaatggtcacatatagtcttttctatcccctcttttgtgttctgccaggtgagattattatcaaataagccacaaattctgttctttttccttcttgatgaagccttttgatggaaataccgtgtgtttcgatccccatgtgtaagccaaattgccctacttctttgtttccaaaatagttcctcctttgcaagttgtccattaaggtctctttctttttcttttaatttgttaaatccatgtatagattgatcccgagacaatatttccacttcttttttcagatctctaattttggcttggctgtccttttttcctttgcattccattggcccaaaatccgcccacaatgattaatgcgtctccccaactctactgtcgattgtatagtgtttcccccttcccaaatctctttgacaatgtgatggcattcttctttgtcagcccctgcatgttcatagtgaaatctatatccccatggcggttgctttttatcatcgtttgggatggctttaaaggttactaagagagggcaatgatcggaacaccatctacttaggtgttttacttttgcaattgcataggtattccaccatttgttgttgaccataactctatctaagcgctcatagatcagattttgctttctgtcattgcatcaagtgaagtggctgccttcatattctacttctcttagagcacacttgtctatagcattgttgaaatttttcatcaaatatccaggtttcccccctcctcccaatttctcatgaattcttctaatctcattgaaatctcctccacaaagccaaggaccattgtagctgcgagctagccgtttaaggagagtccaagaatattttctttgcgaaggatcgggatccccatagaaccccgtaaaccgccaattaacatcctcttccgtattgatccaagcatcaatatggaagtcattgaaggacatcaattgcactgcaaaaggagctttccaaaggagaaccagccccctgcttttgcctttcgcatccacgcaaaagcaaccatc

SEQ ID NO: 242172 - DNA, 489 bp, Cannabis indica
catcctctcccttcgggttcctggtgcacaaaacgctcttttgatcctctcgatcctgagggccaagactccctttttggagtttgccctctgcggacctttcctttcgggaaatctgagcggacctttgacggatcctgcaccttcttcttttcctaggagtggaagtagggttttctgctggttcccttcagagggataccttatagggctaggttccttagatttctgcttttgggcacttggtgaggattcctctggtgtttctccaagtccagtagggatggctttatgatgcatgtggattcctgctgcctccatggctttttccattgccagcatcacctcttgcatctttttattttgttctttttgcgccgcgatctcagctttgtgatcagcaaccttttgtcttaagagtactagctccgtatagctaccttcctcgaaggcgtcgtactcataaaaatttccttcgtattcgtcgtc

SEQ ID NO: 242173 - DNA, 918 bp, Cannabis indica
tataagaaaaggaacctttctccttgttcttaagtcaatacaagtaacgaggattaggctattaccgaactgctcggggctgaacctctataaaattcatgtgtctttatattgctttattacatattaattgctataaatcacttatcgcttattaaattagactcgttgtcgttggctaaaagcgaggtcaacaataggcatgattggcaaagtgttgttcttgaaaccgatagtttactgtgtgttcaagctataaagagtaatattcctatgttgtctaaatttggattactagtgattgatgtgtgtgatttattattgtctttggattacgctgatatttgttatgttaaacgatctgtaaacaaagcagctcactgtcttgccaagagctcttgtttctcttcaggtcgtgcacttgagttgaggattgttctgctgaaatgcgctcaattgttatgaaagattgctatcattaataaaaattgctattttattcaaaacaaaatatatatatatagtttattagcttgcaaaaaagttcaatcaatattacctttagaaattcaaataaatggattggccatttatttaattataccattttggacactttagtatgctacggcacaactgcaacgaattttaattttttatatacattagattataaggaatagattttgtccatgttgtataatttgtaataaatatgacccaaaatatgaactaatttataatccatgcagaactaaggtgcaaattagaacaagacctaaaataatattaatggtcttcacaaatcaaatatttaaataaagctaaatactattttggacccttaagttttacaaaattaccgattggactctgtgttttgttaaatgacaaaatagatcctgtattttctaaaat

SEQ ID NO: 242174 - DNA, 1294 bp, Cannabis indica
gtgactctttttagctctactttttgaatcggtatttttttggggctctttttatttttttggcacactattcccgaattataggtgactttcttgactttggctctttggatcaattttttttttttggatttttagtggctcttctttttggctctacttcgatcggtttctttttgttggggttggatagtcattagaagatttcttttttgtttatttttactctgttaccatgttataatttgggataagatgaatgaggtttcatctcaaaatcaattggcgatggaagtagtagttcattcctcttatatattctattatatttccacgtattaacgatgagagactatttgacaagtagtgccatttagcatttcttaaaatctaaagtatttttcaaatattatacatatatcactttgtccttttttttttgtaaaatggactttgtcctattttaagaatcgtaatttaggggtgtatataattcacaatctgtagttctaaactctaatcaatcaggcccaaactagttgagaccggaccaaatgaatttggtctggatgatttgatcaatccaaactgttttgaattctctgattcggtcacggttttagaaatcttagtagcagttcaaaccaaaccaattcgtataattattatatatatatatgtaatatatatattttttttttggataaaatattgatatttagaaacaactttaagtagaatattgatattgagtttatattgttacaataataattttttattattacttatgtattataaacttattaaaagtaaaaaaattactaaaaaattaacaattattaatataaaaaaaaagttacaacaattacgaaataaaaaccatggttcgaaccaaactagtctgtttttgagtagtttgatttggtttggtttaattatttcattggtctgatttggttttgaattttcaaaacatcgtaataatggtttggtttgaaaaaataaaaaattcagaccaaaccagttcataaacacctctatcgtaattattgtaatatgactattaatattatagtaatattgattttgttgctaataataataataataataataataataataataataataatattttattaaagacatgatgtaactggttactaaagaaatataataataaatattaattttaaaaatgttgaattattaggacatagcaataaaagataaattttcatttttataattaatttaactacttaattaaaaaaattaatctattttt

SEQ ID NO: 242175 - DNA, 577 bp, Cannabis indica
aaatttatttattgtttttcccatatttttaaactttaattattttttaatcccattttttctacattatttatttatgccataaaaaaataaactctactacattttccaatatttataaaaaaaaaccccaaatttaaaattaactattcaaatcttccaatctctcaagcttccaaaagaaaaaaaaatcttccttctcttaacgtttataaataaattgaatgttaattgttgaaaaaaaaaagtaaaactaatgaattaatatttggataaaattattttagactctatattttgtaagaattatcaattagactttctgttttattaaataataaaatgaatcttatattttctaaaatgataaaaatatgactcttggctcaatctttaacaattttttttcttaatataaccaacatgaagacaattcttagcatgaacagatataaaaaatataatcagttttgtcataacacttctagatctgattattattgattaattcaggatattttttgtaccattttagaaaagggaaatttgataaattatgcttaaacattaggggtgg

SEQ ID NO: 242176 - DNA, 518 bp, Cannabis indica
gaaaaacaacaataaaaatacaaacaaagaaaaacaacaataaaaagtaaacaatacaaaaataacaaacaaaaaataacaatacagaataaacaaaaaatgaaacaacaaattaacaagattacaacataaaaaaccgtatttactagaaaataaaagaaaaaaaatcgtaaaaatgtttaaaattctgtaaaaccgttattttttatttgttttttttttttgttgttttttgtgcatttgtgaaattttccctaaaaaatacctacaattaagtggacttggtatccaaaaataatatgtgttttctaaataagtcttacaaaaatatacaaactcaataccatacaaaagttccaaagacattcatagaaaatggacaaataaaaacatgccataaaatgccatatatttcaaatattgtttcaaaatcccttgtaatttccacttaaggttggttttggtttttaggagcccaacttttttcccttgtaataatgggctttgattttcaaacc

SEQ ID NO: 242177 - DNA, 532 bp, Cannabis indica
ttcttttgacaaaaggacaagaaaaaaggaccacaagttgctagtcaagctttgtattttatgtgaaaatatcaaaagaaaaattgtttttgaaaaaaaaatatatcgagtaatattcttgaaaaaatatcgggtatttgatatttatcaaatgtatgatatttttatttatttatttttgaaagaaatcaaatgtatgattaacttaattaaaatagaaaatttacatacattactaactttttctattttattacttttctactagtcacacgcttattattacttttatactgtttttttttctctactgttatttttacaatgtctttcattcttactttgacgtgtttatactgtttttcttcgtagtcttatataaaatatgtattatgcattgttgtcatatttatattttcatcattttataataataataataaaataggaaataatagtagttgtgtctcccacatcaaattttaaattttttgttttattagagtgattgattggacgtgagatgtgacaa

SEQ ID NO: 242178 - DNA, 1117 bp, Cannabis indica
aaaatagttatattttttaaaaaataattaataggaaaaatacaaaacatattttttaaaaaataaatttgaggcatctttattaatattttggacttggtgggcctagagcgtaagcccctactaacacccttagagtatctccaatagctagtaacatctctaatagtagcatcctttaaggatgctaaaaatttacatattatttaaaaatataatattttattttatctctctttcacatcatttttaacactcttacttctaaaaacactctaatgtatagcactctttaaaaatactataattatgatctcacatattattattatttaatatatatcataattttttggctacaataattttttagctttcaattttttatttaaaaaaatgaatagcatcaatgcaaatttctagaatgacatcattttctctcaacggtataacatctcaatattttactatgtaatatgtgttaaattatcatatagattatgagatattcaaacacattaaaatgctaatcttccttactcataatcattaaccaagatctatattttatttagagcatcacaaaccaaaataaacatacataccttccattgatgaaccatccatttgatccatgttagagcatccaagaatccaaacaatccaatgtaaaaccaagattggagaggagcacaatgtggagctatcccctcttcaccttattaccattaacttaccttaaaaccacttcttcatatataacatatatatatatacatctcatgcccctttaaccctaaagggttatttactaattgggcttaagtggtccaataatggtatactataatttaatgggccaattatagttttaagggtgctctcatgtgcctctaacataatatatgattattaaccatcccattatggtagtgaacaaatattgggcacatagttaatgattgtgtttatggtattaagctcatgattatattagtccacaataataattctaacaatatgtccacttcacgaaacatcttttaaaattttaccattagagatgctttttatactaataattggccgttatatattcatgttcaaatcccaattc

SEQ ID NO: 242179 - DNA, 1351 bp, Cannabis indica
aatggcgacttcgcgttatccactgacctggtggttggcccaggtttgggtgctgatcatgggatcaggtgggagagcgtagagagggtgatgcccgctatggattctgtggtgaaggttttttgtgtccatacggagcctaatttctcgcttccgtggcagaggaagaggcagtatagctcgagcagtagtgggtttgttattagtgggaagagggtgcttactaatgcgcattcggtggagcattatactcaggtcaagctcaagaagcgtggctccgacaccaagtatttggctactgttcttgccattggcaccgagtgtgatattggtattcaaatcctccttattgcttctttctttgaaatgtttttgctctctgtatattttttgtaagaacttatatatatatatatatataaatatacatacatatattactgattgcttagtttgtagtttttcttatttaatttttaatgtaatattttccatttgagtaattgtgagatagttggttgttcggtaatggcaggagtatctatctctgtttcattatagataggtaaaaaagttgctatttttccagaaattgtgcaatttttccctttgtaatgaatactttttttttttacaaaattattgaattttaagccaagttcatcaggaagattaatagtaaataaccatataggagcaaatattcaaggaagtggcaagtattagtctattagagcctcaacgtgtaatgtgaagtaattgttggtattagtagtatttctctgaacttgtgttcttcctatgagaaaacaatttaattgaatgttttatttatgtaatgcagcaatgcttactgttgatgatgatgagttttggcaaggagtataccctgtagaatttggggatttgcctacacttcaagatgccgtgactgttgttggttatccaattggaggtgacaccatttctgtgactagtggagttgtatctcgaattgagattctatcctatgtttatggttccaccgaacttcttggtttgcaggttatgagatggtgattttggctatttttctttgctccagtgctggtcacaactcttaaatttgtctttaactctactttgcatttttgtatctacagatagatgctgctataaactcaggtaattcaggtggacctgcttttaatgataaaggtaactgcgtgggtattgcatttcagtcccttaaacatgaggatgcggagaacattggttatgtcattccaacaccagttattaagcacttcattcaagattatgaaaagaatggtgcttatacaggtacatatatgtctctctctctctctct

SEQ ID NO: 242180 - DNA, 628 bp, Cannabis indica
aaataaagataattaattaattaaaattactaagaataaacatatgccaaatttatatatacattagtcaaacaactttttgaaacgttattcatatggttgactattattaattgttgtttgcgtaaaaaaactatggagtattatatttgcatccataaaattataataagtctactttaatatttttaaaaaaattaatttaaattaatttctaaaaatcattcttaatattttttacattattttgtatcaaaatcaataattattttagttttattacatatttttttaaaaaaaatttatatataattatttttatttttattaataaatttcatataatttttattttaattttttttgacttaatatttaaaataattttatatactttacaattaatattaattatgttaattatatattaagtaatttatgaattaattagttgattatcaactattaatgattagtaattacttttttttttctttttatttatttttttaattaaaatttatatactaaatatatatatatattacgtttcaagctacttatgtttaaaattaattttaaaataatatataattaaatgtcacatgtaattttataataaatagta

SEQ ID NO: 242181 - DNA, 1092 bp, Cannabis indica
agataaaaccatatacaaattatgttatttggtgttattgattatttccaacttatctgattttgcaaagctttcacagctacagtaagtttttacaaaattttatatatctaataaatttgatagctttgttaggggtagtggtactaactactaacccacctttccaatgttagaactggttattgtaacaaggaataaaacattggcatggccagtaatgctacttttacaattacttattttggattaagcttttgatgaaacaatgagttttgtgttaccactgaattaggatgcatgtaaatggaagttatcttatactaggaattatttagaatatttgattaatttgaaccattatcacatcaaatccaagtacacaaacaacagagtttttcttctttctaaattgaaggcattattcaacaacaacaataagaaaaagattctgacacaaacaaaatggctaaaattataatgaatgaagtaaggattattcaacaacaacaataagaaaaagattctgacacaaagaaaatggctaaaattataatgaatgaagtaaggattattcaagaagtatagtagaaatgattttccttgtaaacacaacaccaagcataagttagaaacagtcttctgattcatccaaactaagacattttatcaaacagattgtgtctttcatgagagctagctaagagaatcgaaattgttatcaatttaatttaaacatttgcaggaactgaatacagataaaggaagaactagtacctgaaacacatctaagcagcaatgaattattccccaaatttgttggtgaagttgagaagattacctttaactcatgtgcttctcgccactaccgtccttgtaattatccagaacctctttgattgggatctggacctcgccgaagctgcgatcggagaggagcttgatcggagacaagctgcgatagaagctcattcatagcaacctaaaaatgaatttgaaaagtcaaaaaataaatatttatgtaaaatatttttagctgttttttatatttactgtttttttaaaaaaaaaaaaaaaaaaaaaaaaacaagt

SEQ ID NO: 242182 - DNA, 5064 bp, Cannabis indica
taaacataataaatttaaaaaaagaaaaaattaaaaatattaaattaaaagagatatataatgtaatttcttcttataatttaatcatatcaatataaaatcatttatctaatatcacaatatatttctctcatcatttttattattatcatcacatttctttcacatattttttactatcatcacttttccttccccatcacttttcttttttttttttttaattttttattctttctctaacgactatttataatcaatctcttttctcactattttatgctctcctcaaatctccctcagtttttaacccaaatttggcacaatcccaaatctcagccttgacttcatgttgatttccaccctaaatagataagaatgggtactttttagatcatcccaaatataaaaaaaaaaatatattatttctacccaaaatatatatgtattatattcaataatcactattcactaatcactatacatgaatttgagatgttgatgtatcatgatttcaaaaaacacggaaactttatatatattattgccaaaattatcatggtactttgcaatttttttttctcaaaaaaaatcccttacattttccctgaaattgtttaatattgaattttgattgaagacaacatattccattttcctctttactaggaactgcaaatgtcgtattaaatcttgtatatattacagtgaaaaccagccagtgtaacacttttcagttcaattctatgaactagggcatgtggatttgattttgaataccatctcaaaatctatttgaccaaaatagaaagaaagaaaaaccttatatagctttggctgcaatttggataatactatttaaaaccatgtacgcccaacttgtttgtgatcaatgggtactggtctatttcgattgtaaatctcgaataaaaatacatgttatctaattaacccgcctctatgttttaggataaacatgtatactataaacccagagaaaatctcattggtttgttaagtcaaaacctcgaaactcaaaggtttggtcatttaaaaaaatggatatacttaacacctaccaagacccattatcatgtttggctgtaacgcactcaagagatgtctataggttatttcgtgtgtagatataggtctttcgtgtcaaattccgaattagagttaggggtttgagcactcatatgtttattccattaaaagttcaatttgaacttctttacgagtgtggttaacaagttgcaaccaaacccttttaaataaatttatttatataaaatgaaaagggtattttcttttcgacataggtagtgacggcatatgttaatgttagtacaagtgttgaattatatgacatggaaaagtagatgcaataaagaaagccaatgttcaatcagattccaacattaaaaagaaaagaatcgcaatagggactgggagtaggtgactcttgatacttgtcctacatttggttgcacttgagcactaataagagctttaggcctcgtttgttatgccgtattatgttgtgttagattgttttgtattgcattaatattattaatacaatacaatatataatattgacttgtattaatagaatgtgtaaagttacaatatattcttaatatacccatcccaacaccagagtcccgagttcgagtctcgagtccaagttcgagtcagggtccaaggttcgggtccgagactcagtctaggtcctgagttcgagtccgagtttcgggtccaagtccggagttcaggtctggatctaggttcgagtcccgagtccgagttcgagtcggaaatcggtgttgactcctaatcctttataaatgttataatacaagttaatacgaacctattaaataatacaacatacattgtattaaaaattttgatcgtaataattaatataataaattgcgaacccttaatgaatgagccatattgggtgaagttttatttgttactctacacatttcatgaactaaaatcactatcaccaacgatcacttgctaaacaacagcaactcacaacaaatccaaatgttaacctttgattttgtatgccttattgatttttttttttaattttaaatccatgttatagttggttcaatgagtcactaaatcataattatgctcaatctatagagtcaagtcaaaggagctgaacttcattcacaccaacaaagctggccataaaaaaagaaattgaagttaaagaatcattgatacaggttttgaaccccaattcccagtggtttgtgggttccaaaattgcatgtattgcgaacatcctccattgctggtctcaatgaatttgagctttttccttgcatggggcaacaactattgcattgctattctagaagctaatcattgcataaacttcaatctgataaagttggaataaaataaatagtcagattgtgtggacagggtatagacagtgagaggtcaaaatgtctaatgaataattaatctaggacaaaattactctgaacagtaaataacaaactttgaatcatgccattgcataccaactacatcatattaacactatgtggcaaacgtatgtgagttttttgatttgttctcagtaataagttctgatattataacctaaacttctaaatcatccatggtttagttcaactagctctaacgaaaaagaaaaggacttatatcaaccctgcatcagataacaaaaccatttaagatctttaaactcgtcagttatcccatcactctgattgtaagatgattttgggagagagttccagctcaaagaaagtgaccatcactataaaaaggtataaacaatggcatcactctccataaatgtcacagcacttaagagcaaataatggaagacactatagaaaatggagtaaaagtattatggtccccttcataaattctattagttcttcgtatccctgttcgacacttgtatgcaaaaggtcatgccatgaggatgaagccatatctactcacctaaaaaggacatcaccaaccaccaacaatgcctattcagtcactatcaaattccaaaatgggcattcataacagaactgaaaagaaaaataaggtgcaaagtgagttaatcacataataagcggacaccttaagcttccagatgtctccctgttgaatcttctaggagacaaaggaagcaataatggtaaagagaacaaacctaaaatgaaaaacaactacctatttgttccaccaaccctacccttgagcacttaaatggtaatagcaaaggtggcatttttggctacaaacatacaatactagatcaagtttaaactcaacaacatctacaagaagataggcaaaaagctgaaagttggaagcctctacagttcattggcaagtggagaaaaagataaatcaacacaattaggtgttgacttagttaaaataataagtagcatttgatattgtaggataacaaagggagcctagtacaaaaagaaaaagaaaaaattataactagcagcaatacatgcacaatgatagatgaatataataactgcatctggaaaggaagcttgaccttgaagatagaatgttttatacaaataataaatatacattgtaaaactttcaaaagtagagaagcaattaacatcataaccacaaatagataataagttgtggctgctctttacctctcaaattaatgatttccactctttcttcatcatataagctgtgctcttttcagatcagaaacaacacccttatcttcagtacttctctcattgtagattacctagagaaagttagaaaacatggtaatttaggtaaccataatatcaaactttatatttgaagacaacttcactgctaataagaataccttgtctatgataccatattcaactgcctcactgggactaaaatactttggacgcctgatgtcagcttcaatttgctcagatgatttgccaatatgctttgcaaagaggttaaccttgacaaaacgaaaaaaatgtaaattgacgtatcaccttaaataaaattaaatatatgtgcagtattctaagcatcattagcaaaacatcttttcagaagcttatgtatttccattttcatttttcttccaattgtcactttgacacgttattgagttctattcatggtttgatgaattaagttctacagacaatttaaaaattagatggttccatttgctagagtggtactttgtaataatagagccaaaatacacagacataggcctgacaaattactattgtctgttagccacacaaacttctaattgtatagggattgtattgagcgtaattattgtgctttacattattttatctagcttgtaaccacagtttttctacaccacaagtgaggctccctaataaaattgggagaaagtagcactctcatcaaagtctctattcttcaaaaaaaccctcttcaaaacctcatattctctatttttcctcacacttttacattacacttacaccagtttctctatatttttatctacatcattaagataatatacttttaatatatttataatatataaattaataaaatattatactatatattatataaaattaaagaagttagctataaaattaataacaaaagaaaacttttagctcactcttagagaagtattttgttgaagtgcaaatctattatagctaagttaaagatgtatgagtaacataagtctttagctaaattcttttagctttaagatattatgaagactctgaaaaggttaaaggtctaagtttttgatgcgttttgaatgagcataaaatgcatagctggaagtctaatcgttgctaatcttaccaactccgtcttcacattatttacttcctttctggcaagctcaacatctgttgcttgaccttgaaaccttgcaatgggctgcataagtaagaaggtgaaattttcaagttcaattgtaatatgcactgacacataattttatcaaatacatacatttgtgccaaaacagaagtcatgaaaaaaaaaaaaaaaacc

SEQ ID NO: 242183 - DNA, 1776 bp, Cannabis indica
acgcgtgatggtcctcgatgcctaccacagacctaggagcccagatgtctaccgtatggtgagtaccagatttccaccgcaagacgagaggcggatgtctccattaaaatgatgtgtccactctttgacacaaaattgatattgcccctatattgcgcgcaccaccactacatacaccccttttgtccgacgactctcctaccacctttgtctgtcagctgtcacgggctcacattttcacgtagcgaaacacttgtgtggcactttgacttatctaagtcaaggtcagcctttcaaacatccgagtaacaatgggctcatttttcgtgtgaccgtgtgcctcgtgcacactttcgtttctcaaataactcctgctgagtcatgctcccaagcatctatgagtgcatccatgcatcgaggctctctaaccaagatactcacattgttcataggttcccactatgataaagcaaatcccaacaccgtcggtcacatagtcacttatgactaaggtagcacgttaagttagtgatggcagaggggctccgcaggagatatggcctagctctaagcaccaaacccatctatactcctagaaggagacttgtccagaagggagagcctattccagcatagacctagaatgttttggactctgcccttatttgagagtcgttggagcatattgtagccccgaaacttattcttgatttggtcaatttccaaaatgggcgagctgtatacaattcgaacatttttatttttatgcttccattttggattcgcttccagaactgcatctttctctagctctttggccagagtctttacctcaacctcctcaagatctacaactttgaggtggaatttgtcattaagacttatcatttgaagaaaagaaaagattcaagcagttacataccccaaaccacaaagagagcaagggtaccggggaaggcctaccttgaaacttcttggagaggtcccctccggacctgttacctggaagtacagccctcgcgaaaccacgcctccgagtagcagatcgagaacttaaaaaaaactaggaaaaaatctaaaaagatccatccaaatccctaatggcttcaaatgaggagacccatggcccaatctagttcaaaatctacttacacatacagggattttcgagctaacttacctagaaaaaataacatgcaatcacagttcaacaatcctataattaccagataacccaagcactacctatttaattttcctagtattatatgcgtgcaaatggtggttttttaaattaatacttgaatataaatgtacagaattaaaaagttccaaggtttagagaaactgactcgtaatgcgacacggggacgggggaaggtaagggtggttaacctataaattgaaagcctaacgaagaatctgatcacagcctgcttgaacgttaattatttcagacggctagggtagctcacaacaggattcagaggtagcgctcctggaaattttgaattcgtagtaggaggtggataagaacgtcaaagagattgttcattcaccaaaggatgcagctcgtattttttggatttttttttagaatcattctctgatataaatattttgttcaaatttgaaaaaataagctaaaaaaatttgaaaatgtgaaaatggtaaaagtggttccctcacgcctatatacaggcaaaaatggcgatccacgtgcttcgaaatcaagggccacgatctccctaaaaaaagcacaaattgcgatccaac

SEQ ID NO: 242184 - DNA, 4032 bp, Cannabis indica
atcctaaaattaaagatttcttatagctaaaaaataatgagataactattaataataaatttttattaatattatattattatattattattattatcagtttaatattatatatattaaaaacattaatatatattatgttttaagaaacataaacagaagaacaaagaatgaaaccctcatttttctttgtgcgacgaaatcctctccctccttaatccattttcttcaattttcaacttgaaacctagtaatttaagctccagtagtagcgggatagcaaatctttgaagagagaaagcttaaaggtcgagatcatcggggatagttctccacctagattggccgacatgtatgaatctggattaaaggtaagaacagtatattgtactacatagtatgttgtattgtaatacaattaatattgttatgaattggttaatattaaggttgtctgcgacatttacaatccactttgaaaggagtaatagattcaagtgttcgttgggttagttaagttagttacacgatttgtatcttgatttgcttgatctgttagttcagttagattatgataagttggtagcttgatgagtcttgttgccttgattagttcagctaactctagttagcttagtccaattagtataaataagtgtctttgcatactttatgtaattaattcaattctattatcaataaactttttttttttatttcatcttctctttgttttcaattcggcaataacttttctctcttctctttctccacccccactttccttcctagttcctaccaaacacccttatgaactaattacacatttagaagaaaaaaaaaatgaaataataaagtgtgtaagtatttcataaacattattcaagaagatttgaaataatcattttgcttttaaaactaccagaaagaaaattttgactgagtatgtcaaactacatcacatgaaagtttcaagtcttccacatattgctgaaactgtgttgaattatttagttgcagcagtcagccattgtcttcttaattttgctgcatgtgaatacgtgattgatttctaattattttgttgaaaaccatatcttgttctgttgtgtcgacttaatatgagctagcttgatgtttcaaattgacatttctaagcaaaatatacatttgctatgtttttgttcttatataaggtgttggactaaatgaaagtgcgaagaaaaaggtaagtgcaaattacagaaactttggtcttctctatttttgttcttataaggcgttggactgaataagctaagtctaagattattagagtagaactcctatcttgtgagtcaaaatgtagcaactaatagcaagacagcataataacaatacaataaaaggactgtatatattaagaaaatcaagttgtgacttcaccaaataccatcaacaccacatattgttgaaactaaactcaaataaagacaatgcaaacgacaaaaggagatctttcactgaagatattaatgcattgtcacatagttaattttctcttatcgttttgtgaaaaatgagtcattgaatgaaagcaactaccctataagacaaagatactgctaattttgatgagtaaccaactccaggttggaaaaatcaggttactccgtactgatatgcaatttgtaagcaactattatatacataaaacaaaatctatggcttttgtggtctacccttattatggtaatgacaaccaatactttgacatcttccttcttgcaatgctctgcaaatattctgatactcaagacaaccatcaccctgatatttttttacatatgtcaacttggaccatatatttttatatatatatgggaccactaaaaagtgtaagcaagctcttacattacatatggtcaaatgtctcaaatcatacaattatatgaattgaattgaatcatataatatacagtactgaaatggaggtgcttgatgttttgaaaggcttgatatggaaagaaactgaacatttgcttgtttgtaatgtgaggtactagatgtcacacattacaaacacttgcatttgtaatgtgtttttgaaagttttgctgtgatcagtttatgtcttttctttcactttcattacattacattacattgcagcttcagtttcagtttcctttcatcaatcaggctcattcttttcaccctagtaataataaaaataatattacaatgaactctttacataccattttcttgaaattcttaaacagtatagctccgaaacacaaaagaacaggaagcacgaacagtaactttatatggcgatgtagaacagctgctcaaaacagagggagatcttacaaacaatgcagagaaaataatgttttcgtttgttgtttgattcttacgtgaattaagtctatgttttttctgtttggtaacatctctatcatattcacaacaaactaatcgatattctagcactgcagggctctctttgacgaaaacgcttcaaaaagactagactaaagttactttgaccctggttggatgggttttttaaagcgctttaacagctgctggttgggttacaagtaagtttcagcttttagctctaaaatgctcttttaacagaagcaaactttaatagttttcttagagtttagcttcttaagaagctaaaagccgaagcaaaaactcaagccaaacaggactttatatggtgcaatgatcccacgtaactttgtctagtactctttagaacgtctgctcaaacgagagcacttataaacaaacagtgcattgaaaaatcactcaaaacaagacgttctaacatgaaatgaaaccttatgtttgtatattgaaaactcttaagtgtgattctatgtaacctcactattagatgttataacactatattaactattaataaaatggttgtaaaccaattctaaaatctaaataaatatttacctctactggtttttgttcacacagccttaacactcactcattactgcaactcgagcaaaaaagttattcccattccctctacactttctgctaacacatccttaagtactcacttgtgtgtatgtataatcctacttaaatatcccattgcaaccaaagaatttaaaaaccaaagacttttatataatatcttaactcacaatgataccgcagcacgtgttgttgttggtcatcttcaaaatctgataacggcaattaacaaacactattcatttgtttggttattagtttaaacaatactattaccacgtttgagtttcagatcacttgatgtacagcagatgaaaacgattgttgaggaccatatttgccatggcatgaaaaaaatctacattgttataatctcaacaaccaacttcaactttggatgacaaaaacaaaattcagttgtagttcttggagctcgcaggtacatctttagtccagatcatcaacagcttttttctacaatctacattcatttgagagccaaaaacaaaaggagcaagaaattacaaacatggaatagtacatgggattttaaagctgagtttttttttctttctttctttctttctttctttctgttttctttttctttctaggatagtgaaatgaaacaaaaacttataaatataacttatcattagatacgataaatttaaagctgccatagcctcttgtccaaaccaacgcttgcaacctacctaaaccaagatagagagaaaaatattgagaggaaaaaagaatgtacgaatatgaaaaagagaatgtagtgacttgacaaagtagtagataaaggagttagaaccagaagaaacaagataatttccaccaataatcttctatctctgagttcctcttgttctctgtcaaatagaaagaaacccaggtgaatgttatgagctaatggcttttttccaagagacccaagtgaacttttcttacacacaggtccttcttttttttttttagaaaaaactagttagtttaaagttttttttttttttggaagggtattctaaa

SEQ ID NO: 242185 - DNA, 564 bp, Cannabis indica
cttgcgtctttagttgtgttgttgaagttctcagttactcgccattacattataacttacccctaaaaagtacagccgaacccatctttcaaatcaaatttgctcaagatattaagcaaccgcaacattcattgcttgaatgttctcaaattctatgtgaacttctgattttgaatacatgtaggcacatgtgtaaatatgattcgtgaagacatcagtcttgaacttgtggttggaattcataataatgtggcggtagcatgcacaatggtgtgcatcagggaacacaatctccaaagcatgaacaatactttgatgcctatccgacacaaaggctaagttctcaatatcactgatcgtttctttcaattttctcataaaataggtcgaaaaattatggttttcactgtcaactacagcaaaagctatcaaaaaaatatgattgactacatccagttctactgcacacaatatttgcccaccatatctagtcttgaagaatgacccatcaatgcatacaacaggtcggcaaaatttaaacccacagatacaaggacccagaga

SEQ ID NO: 242186 - DNA, 514 bp, Cannabis indica
atcaactatagattagtaaaacccaatgaagatcacctcaagcttctgatttattcccaagggtttcgagagagagaaaatggagcggagaaatgggttcttttgtgtttttttccttttacttgatttttgtaaaaataaatgagataatcataggttttagttaatttacttcagccataaaatcagattactaacccaatctaagtccactaaaagacaaaactaatatagggcaaaaagaccaaaatgcccttgcccacactaaaaatcataaaaatcacttaggggtattttgttaattttaaaatctcgactattctcgacattgctaaggtctaattatattgccctgctatactaaaaatactaagatgtgattctaatagccaaacactgtattccaatgttgctgagcacaaaacatgcaaaattatgaaattacatatataacatataaaatgcattctgaattcaaataaatctccataaattgataattcataactaatat

SEQ ID NO: 242187 - DNA, 561 bp, Cannabis indica
ggaggagattcttagagttgagctcatggaactcacagacgaagatgaaggggaaggaaatcaggatccattacgtgatcttttccagcttcctttaacacctaagtcttccttgagatcgatcctatagcaagaggagatagttgctgattttggacactttcttactgcaaaaaaattctatctcgattgggaagaagactacacctccaatagttagatcagggaacgtcattagaaatctggaaggctcgttttctacccagaagacagagaagaaagtgcgaatcagataagaggatataaaagaggagattgcttattggaagtcatctattgtctgtgttggaatatggtttaccaggatctagatttcctaccacgtatgttatttaacatcctaaatatgaatctctaaaataatgtaaataaacacatataaagttacagaaaccttacagtgggtgcaacggaataataatgtctccttcacttagatctctaacatttgtatcctgtctgtagcaaagtatcaccaagatctgagtccgaatctccttc

SEQ ID NO: 242188 - DNA, 3131 bp, Cannabis indica
aaaattatataacaaactcaatactttatagtagttctataaaaatatgtatgaatgatagcattctctctcttctcattgcaattaaactcttacttaattttttctttaaaatcatattgttgtaatataatagtaaaccgggacggaccaattgttttaatgtgggggctatagcccccactagcaaaaatattgcctttaaaaaaattaaattttttttttatagactaaaatagtaaaaaagtccccacaaaattaaataaatctagtaaaaatgattataatatatgtacaaatattttttaataataaaaaaccctcacaaagaaaaatttctaggtccgtcactgatagtaaatgcacctttttttttttttgaattgatttttttttctttacttaatagtaaaatgcaactacaataatgctaaggtaacgataagattttcacaatatttaaatatatttttttttttttcttatgttatgtcaattgctcaaacttattttgaaaataaagaaaaattaaactttttatttttaacttttgaataacaaaacaatattttaatgtaaaaaaactcagaaccaacaaatatgaataggagagattctaaagcagaaagagatagaaatacataacatggtaagcattatctcattcattgaattgtatgccatttattatgaaacttttctatacttacattatttatctatagtaagctagttaatagacaaaagaactaggtggaggcttatccccattaggttttaatattttatttttagatacaaaatttacattttatttatgttatgataattatggtgctatgctaatagtatagctcactagttatttctcttataaataataagtgaaggtatgtagagaaattcttgttcctgatttcttaattctcgtgtaatagttcacattatttcttaatgaaatgcaatctttacttacaaaataaaatttgtcaaaataataatagttaaaactagtgaagttgctaagtcagtttaacccatcgttaccatttttcaagatttttagaattaagacgaccctttaattgtctgtgatctcttttctcaatatttatccctagtttaggaatgatgactttaattcttgttaatttgctttattagtgtatatgacttgattagccttaatttagccatttaattagtcatcttataagatttgtgaaggtggttgagtattgactatggtcaattttaaccattgaagttcttccattttttttttaaatttcaaaattacaatatatattatttttgtaaattaatcttcatattttttttatttatcaaaacgatcctcaattaacattaaatttttatgtattagtaaattggtcctcttggaaaaatttaggaagttagataaaattatctatttctttaagaaccctacctagctagattatataatgattatgtagttagtaaaaggttcattaaaaaaaggtaaaaattaaaatataatttattatcaccaatgcaatgaataagggaattcactagagttattattattttgaagtttttttaaaaataccttttttatgttttaattataattttacgatctaaaatttttatttacaaaaatatgtttgtaaagttttaaaattacaaaagtacaatttgctcagcgaaaagtaaaaaaataacaagaaatcaatatcacgacaacaataaaaaaattataaaacaactaaaataaacaatcttatgataagtataaaacaactaaaaaatagtatattatttttactaaaaaagatgtttatgtaaatgaaaaatttcaaagaataaaactgaaaacttttatgtgtttacttatttttgtaattttttttttaatttttagttctataaattttctattatttaaccatctagtatttataaattaggttgagatcctgagtcaaggaacattaactactctctaacttcccaagtaatatcatcaactaaaatcatataatatattatttaaattttaggtatgaattttttatgttgaatgatgtgactttcatctgcaatataacaatatattattattattattcattttaagaattaacaatacaaacatcctctttttgttctctttcattgtttctcatttttaataaaaataatatttaaataatgtaatatatatagaaatattcatttaatgtcaaataaatgagataattaataatagaaaaaaaaagtaaattcatttaatgatgtattttgcaacatatttgaagtgctctaaaacaagctttagattttaccaaaaattcaagaataatttatcaaaaaattatttaactaagatacaaacatgaaagacttgaagtcaactcttttttgtttattttaataatataataatagaagtaattaagtcaactaaaatagatttagtttagttgggtttggtttaggtgaagaagaataagtctacacattttttaacataaaagagagaagaagagatatgattgggattgggattgggattgggattgaagaaccaaagaaaagaaagagccaaactaaaacgacaactaaatagtaacctttctttctcaaactcttgttatttatttatttttttttggatgttgtgttgttgttattaccacaaaacatattcatttttttctcttttgaaaaaagccaacaatccacatctctacattttaataacataccatgatattatataatatggtacttatttatatgtatagtcttacaaaatacaataatataatttctacacttttttgttgttgtttgatggtgtacaatgaattgtcaattcttattagaaattattgacataccatataaagacatctcaccacaaatgttaaatgggcctttaaaatttgagacatacatgagtcatcttccaaaaaaaaagtaattttttaaaattattttaagatagaaaaagttaaaaattaaaaattataagagtttatttatttatgacataaataaataatattatggggttatgaatttttttattttatttacatgtatatgagcttttttatgtcatatttttgtaaaaa

SEQ ID NO: 242189 - DNA, 1079 bp, Cannabis indica
cctaaaatgaggattaatattattacaaacttcgaagtgatgttttgcgaatagctttcataataattattaaactatgatatatgtatttaataatagagtgatatcttaaaatattttttacctaatatttaatttttcttatatataatattataatgtaagaaaaataaaataaaatcatcttgctgtgagaattttttttaatcaaaaaattaattttcattaaatcaaatcagctaccaaagtagcttccaaaccagaaaggacataaccctacgagatacagtcaggaatagaaccacaagaacgagctaaaaagttagccgcctaattcccagtctatttaacaaaattaattgaaatatgaaacaaatgagaggactgcaaaagagcaacacagtccgtgattaaaagccccaccagagacaacaaccacttcttctgttgcacggcttgcaccagcagcagcgagtctgactccataaccacaccaacaggcacaccccctctacccacctccccatcacgcaattgagcgcctccttcaacgccataacttcaaccaaaaacaggtcgggctcaccataagttttaaccgccaaagcatcaatgaataaaccattatgatctcgagcaatccaacccaaaccgatactattgtcatcctcaaagatagcaacatcacaattaacctttatcgcaccaaaacgaggtttagcccattgctcacacccagttgtattctgaccagaaactggcgaaacaactctattttccagctgagcattcttccaagaattaagataagtaattacagcattcaccaccctctctatcgacaaagtcttattactccaaaccaagtcattacgagctccccaaactccccaaagaagcatagcaagcctctcaatacgttccatacgttgaaccttacaaacattatcaaaccagctaccaaaaacagcagcttcaccccctccaactgtccctcccaaccccctgtcaagacaactcttagtaaaagagcagctaaccattatataaaaaattgtctcatcctcccggttacacat

SEQ ID NO: 242190 - DNA, 720 bp, Cannabis indica
ttctgttgggaattaggaacttctggatgagcttgtttatccttcctcagaaaatcactacagcaattgacaaatgatgtagggactttctctgggggtccaaaggtaaccgcatcaagatgcacttgtcctcgtgggaaaaagtttgccttccgaagaagtatggaggcgttgcctttcgtgaggggagaaatggaatacaagcttgatggcaaaatttgtctgggccatctcgagcaagcaagataacttgtgggttaggtggataaatgctatttacttaaaagggaaagatttttggcaggttgaatttaaatctgatgcgagctggtatttcaagaaacttttgaggctgagaagcactattgacaggtcagatattgttaatgcttgtaagagtggtaagttcaaaactagcatattttacatatcagctaatcccatgcaaaaagttgattatgctagtaaaatttggcataagatgtgcatcccgaaacatagatttattggctagcaggcgattaataatcagctcttggcaagagaccacatcagcaagatcatgccgattccagatgttttttgtacagtgtgcttagatgacaaagagactcatgctcatatcttcatggattgtccttatactttgaaagttgtgactgatgttagcaagtggttaggaagattagacaggccaaagaactccagagactggtatga

SEQ ID NO: 242191 - DNA, 1034 bp, Cannabis indica
ttcgaagtgttacaatcatttgaatcctacttggggagatttgattcattccgaattctttaaggattccaaatgtcttatacagctttttgtgacctatttgtagaccgtcaagtcatttttcgaggaagccctagtaccaattccggactttgttttggataaaccgttagtcgagctgcctccaccaggccgtgaagaacttttcgctaatgtgccgagtttgttgccacccccttatgaatctcaatcaagggaagaagaagagatgatgtatgcttagtttggaatctaattatactttgcacattcatagtaaacatagataagttgttcaatagattattcattgcattttttgggactcaaagcctgttttggtccccttctataacaaaacaaagttggtattttttattcctttctcgatgtttatttacattatatattaatgaaacatttttaaagttttatatcacttattgaacaaaattttactttctttgtagttttgaacctattgtaagtatatacacatatattttttctagaagaagagtataaaataatttttttttttgtttattactatgttgtatttattgttgtaattgttcaaattcattgtgttctgtaagttttattattaatcataccatatagttccagcaattacaaaatctgaaaaaaaaagaaaaaagaaaaaaggctgcagtgatacgagaatagaatagattgtatctaatatgggttcactagaaagagaggagtgattactgttcgtattaaaaattgtcttcaaattggttggtttttttttttaattatttttttaatgtcaaaaattatcttgtgtactattttatactatttcagaatatacaagattcattttgtcatttaacaaaatagagtatgataggtaactaatatatggttcaaaatagtgttaatccatataatatgatgatagttccatatctatgtttaacgctcccacttaatttgtattatctgttaggttttgtgcccta

SEQ ID NO: 242192 - DNA, 720 bp, Cannabis indica
atccttgaacgttataaaataatattataaaccagcaaattgaagtcggactccaaattcattggcccctgtatttattaatctagacctatttatataattatatataaatatatatatatatatatatataaatatgaatatgtgctttgattaattttaaaataatttttgaagttgaaattttcaatatacgttttttccctaattaattaattaatgttcaataataatatttctttctccactttactcaatttcaacttagtttatcaatagattttatctatatagtaaatattaggcattaacaacatgtaattttatcaatttcactctaaattatctaaatagttgttacttaatgcactctaaatttgcataaacttgttttcagtttatgatgttgccaaaaaaaaaatattgattgaattttggaacaatctgcatagattctgcatttaaaaactagaaaattggttgatatggttgtaaataacaacacaacgtagtttttttattactttacttgccatttataaatctgtaagacttactgatatatttaatgaagacctaatgtaaaaatactttttttaagagatgtaaaaatgcctttttaaaaatatcaattttgtttgaagaaaaagtattgtttgaaccattttgtatataaaaagtaaaaaataaaagagtataatttgaatcttatgtgtctat

SEQ ID NO: 242193 - DNA, 658 bp, Cannabis indica
tcttttaagggggtgcaatataaatttttcagaaacttttatggttggcccctctagtatttaagtgttggcttcgcccttgccgacgacccacaaccctccctctctctctctagttctctctggtgcgtagctgacgactcacgaccaccaccgccgaacgaattgacgaacgatttgtggttttttttgggtaaaaaatcgaattttggagaatttttttttctgtgatttttgtatatggtccgctaggagacgatagtaagtacgatagtagtgtaatctggaggttagagatgaaggtctgatagtggtacaatggttgataaaatgtccgatggtgatatgatggtggtctgataatagtctcatagtgtacttaaaatttatgtcatagaagaaagagagaagagtgagtggggttgttgatgtaagagaagtaaattggggagatatgagaaatagacttacattaccaatagtgatttaactttagtttagattgttattttttacctaatataagcatgttttatcgaatttctcttataaatattattttattaaattaagtttcaaattttaggatggatttttttaaagcaattaccaatttcattgataaactaaaaatgttaatttattcatgagaaaaaca

SEQ ID NO: 242194 - DNA, 459 bp, Cannabis indica
atagatctcggaacgagctttccaacggtatatggaactcctgaattggagtccagatcataaaattatgaacattcaaagttgccttcaaatttgcccaaaaataagggggcgggctggggcgcccaaaagctgggtcgcggcccttgggttccaaacccagattatctcaaaaaccagcaacgaatctccatgtttaaacacaccaaaaccaacccaaagcttaatcaaactctataatcacaaagtagagttgtcaataaatattagagagttaaaaatacaaattttatgcatcaaatccatcaataaaactctcaaaactcagattaaataacagaaagattaagctcagggccggccctaggcagaggcggcctaggcccgtgcctagggcccacacttttcgggggcccaaaataaaaaattaaaaaaattattaggcttttatttaactaa

SEQ ID NO: 242195 - DNA, 549 bp, Cannabis indica
atgtttggcaaaaaaaattatatgatgcgtagagaaaaatacaagaaaatatgttttactattttaggacaaaaacccaataattaaccattttgaaatgaacaaatactgtgtatatttcaatgaaaaaaaaaaataaccaaacacaacgtatgtactatgttctccatctgcaagactgcaactgcaagttctctcttctagactctatctatgcttctgactctaattttatctttccaaacatggccttaaatgtggggtcatcaccagatttttatatttagtgagtttcttttcaattattagtttttacaattatagtctatgcaacgcgtgtacgaatgacatgtccacgtgtggagcatggtaagctcatactagtccacgtaaccactaactgccacgtgtacaatacctattcaatcaagtcaatgtggtgggccacccttattagtcatcacataaaaaatacaaaccaattcttgttaatggagatttccaccaccaccacttccacccacctccctacactaccgacctaaacta

SEQ ID NO: 242196 - DNA, 831 bp, Cannabis indica
tgcacaatttttgggaaagatcgagcaactagaaaaaatgcagataccccaactaaggtagaggaaaatgagaaaaaaatcaacatgttaatcttgatgatgataagttcaacttatttcataatatgggggatacatatgctaaaaataagagtctatgtcatttttacaagcacaaaatggaccaagagctcctccaatccaatcagatggctcatcaaagaaaaaacaaaaaagttcaagtttaggagatattgctgaggcaattaaggatgcttcacaattcatcggagaaaaaatagaaatgtcttctgttcgactaagtcgtgcgattggcgaggaaatgaatgacaaacaaatgcgagtcaatgaagagataatgagaaccacacattgcttcctatgatggatcgccatagggctgctcgcatgattatgagtgataatgctcttgtttcattcttctttagtctccctgatgaagagaaagatcattggattagagctttattaattggagctatctaatatgtggctatgaattattttttgaattatttatcgaagctttctaattgtatcattgataactttttgaaatcttttgaaagacttaccacttcttactcttttggatgtaatcattatattgctaatgttaaatatatgtaattctattaaaactttgaacataattataattatatagatatataaatatgtgtgatgattaaattaaatagataaaatttatgctgaaaaaaatatttatatgtaattttattattttattttttaataattagatttaagaatgtgcatattctcatc

SEQ ID NO: 242197 - DNA, 615 bp, Cannabis indica
aaagttggagttttagatgatgtggtgctcttattgacgtaagatatatttaatttaaattttcaaccttggatctatagctacacaaaacaaagtataattccttacctaccattgtttcaatttcaaggcaactgttgaaaagcagttgttgggttagtcttgttttttgttactttttatgtttgacattggatctatatcttcacataacaaagcaatgtctttccctgtctatctatatttaagatcaaggcagggaatgaaaggaatagcagaatattcgaaggaaatgagagatcagcagaggatgtgtgggagagcataagattttggacagtcacctgggtttttaaaactaagcattttgagaatttttcctttctagacttgtgtagggaatgatggaatgtgttgatgtaaataggatttatgacttattatgctcgctgcttacggagcttagtttattctagatgtactttactttggtcaccaccgccacaagtgaggttattaatacataacgcccacgtgtgcttgagtctaagacgagtgacctctttctctttttcaaaaaaaaaaaaaatctaagatcaagacaaatgttgatta

SEQ ID NO: 242198 - DNA, 1110 bp, Cannabis indica
ctctcattctcactctcacttcaaatatcacacattcattttcgtttcatatatatatttataccaccacgcatgcaattatatatatacatataattttcatgcattaataaataccgaaaatatatattaatggagtagatctactacaacaaaaataaaaaataggggccgatctattattggcggaaaaagtccgctcccaataatgatgttataaccgacggacttagggggtccgtcggtataaattatgttttaaaataaaaaaaattaagaaaatatatataaaaaatgacaataccggcatcattaataccggcagacccctacccgccggtattaatgaagttatttaatgcgggaaaaaccccatttattaatttgaaatagtgtggtttggtttggtcgaccttactatattcatataataattaataatatgcataaatatatatcaagttggagttggagatagtgtggcctcgtaaatcaatcctggatatgaaacaaatgaatagtcaattaatattagcaagtggctctttctatgatcaaatattccattaatggtacaaatatatatacagtagaatcttttaggagtactttattcaagaataacatctaatttgttataaaaaaattaaatcccaatttggactagatataaataagaataacctaattagttatacattttctaagtctcgtattaccaaagtatacctctatataaaaataattacatcttaataaaatatatatatgtattttgtaaatttatttatgtaaaattaataattttattttaaattataatacatatacgaatattatatttactctaaaatatttctattatgatatagtattaatgattatttattgttattattgttacattgatattttttggtttttaatttttttttctagtgtaactctatttagttataacctctcaattagaatataatttatttggtctcaagtgtattcttgaatagaggttctactacatatataaataaatttttagtctcatgttcaacaaaaattgaattttaattatggtgatgtataatatactaaatatagtttaaattt

SEQ ID NO: 242199 - DNA, 559 bp, Cannabis indica
aacatagtagtcccagcaatccattcaagtcctcaaccactatgtagtcccacacctacataatctcaaaatcactatatacacctttaccccaggcaacgtgagattgtacaactcttggtctttcctttgtagatcacagggctttgattttcacagcttgacacatgccccctggttgtgaatagatccacccacacaatcgtcgcctttaattcacctacggtttcgaacaatactcataaattgtcccacttatactaacactagatcactgttaataaaaaatatttcgttctccaaatcaattagatggatacctccattaactactcatgtcctatattccacttgggaatatcagtaaatttaactcatattgccatttttctaatctttctaccctatcagacgagttaccactaaataacttacacgtactgcccatttagatattttgatatcccctcattgagtgtataatatttaatatcgatatcaattgaaacaacaactataatattgcccataaaattctaacttgagtcggtcaaaggac

SEQ ID NO: 242200 - DNA, 636 bp, Cannabis indica
attatggcgttctcaaaagcaaattctcgttgctacatcttcaaatcatattgaggttattgcattacatggaatattaaatatacactaatccattattttaaaaaaatagtattgaaattaaaattataaaaaagaatagtttaaattaacataaaacaataaactaaagaatataatgttaaagacaacaaaactaccatctaataatagggatttgaaattagtaagaaactaaaaattcaagtgagtgtggtggagcttcttcattggtttgagttggcatcgagataacgtattaatttttgtaaatcttctatatttttcagctctgacacaaatgtgggaatgatggatgaactttgtggccaaatggatatttttgaagtggatgatagtacaactcatatgggtttgccaaacgatatggggagaaagaaaatatttatccttggtttcttaaaggataagctgaaaaaaagaagggtggaaaggtcgattgctttctcgtgcaggcaaggaggtttagttaaaaattgttgctcagattattcctaactacactatgtgtgtctttcttttacctcttgttacatgtaaggagttggaacaacttatggcaatgtttaggtggaa

SEQ ID NO: 242201 - DNA, 2101 bp, Cannabis indica
cttcttcatatgggcaaagaaataaacctctaataataatcaactgttgttaaagaaagaaaatagaacaaatgttagaatcctatcaaaaatatatcgacaactaatcaaaaacctatcaagaaatagacacagcacaacagaggaaaaaaaacacaccttatcaatgatatcaacaaaatttaaacaatacaataataacagaaataaaatgcaaacttgacaacaaaaatacaatactaaatcctatcgagaacctgccaaaaacctatcgatagtaagttgacaatcaccaaacatgaaaactaaaaaactaataattgatcctatcgagaacctgtcaacaatatgttgataattaagcaacaataaccaacataacaacaacgaaataaaattttcactcttatcgagaacctttcaacaacccactgataatcaatcgataataactaaattctcaaatttttttagcaaaacttgaactattgataacatgtcgagaacttatcaataatcaagcaataataactaacataacaacaacaaaaataattctcactcatatcgataacttgttgttaacacataaattcgttaacaataatgaaacatttttaaataaaattaaaatattaattatgattaaatataaataagataaaaggaacttttatgtggttttgtagttaataacctacatactccatgagtcaatattatttctaattattctcttatagtgtttctgaatataagataatatttctaaatatttactatacttaatctgtcaaagtcttctctccaaatatcctctcctctctataggttctgtctctatttataaaatttttagcagggacaattatgccatttcgatcttatttagataagtgttcatgaaacatgaacaatcctcgcgttttatgtttacaacatgtgtaaactagaataactgttaataacgcccatttgatcttatctaaaaagtagtttctttatcgagataggatacccaaaaatttgctttgcattctttagtgatgttaaaaatggctaggcgtattttacgaaatgctaatttaagtatcttcctcgctcttgtcttctgagatgagtctctagatagcacttaggattcaatatttcgtgttctttagagtcaattatctcacatcgtttatgaacatcccgagatgggtcatctcttgctcatattccttagtctttcaacataattatgagtatgtggatcaatgagttgcaagctcttaaaaaactcgttatctaccattttcactcaactcatttcttcgtgttttatacacgccttgtttgcctcgtttaagttctgtgattgcttataatgttgttattcttgctaatcactgtatttataatgttattgcttttatttgatagccataatataatacaatgtgagacaatgcctcattaattgtggcacatcccgacgtgggaaacttactttcattcctcacatttatagtttttttcaatcttcaagacttatatccacatgtcatgttcatatttaatgttcgaaatatgggcgtaacaatcacgccttaaaaagtgtttttcttttttgaaaaagtctttttaatcatgatatctattttttttgtgtaccgaataagtttattgaatttcttcttttggcagttttgtcttcccaataaagggttaatcatgagttttgcaataaatatttatcttttcaactgactcgtaagttaattacccttgattcaattcctatttaatcaaacggtccttacaattcagttaaaaggctggcatttttatccctaagtaccatttctaccattattgtccaagagaagaagaactttaaaaattagaattctctcctttttcaattctctacatatgccatatttgtccctttattattatcttcatgttactgaaatcattcattcctaacctcgatcacactatatcccgaacgcttggtaccaaaatttttgagtgagaaatcgtcaatgccatcaaagcaacccagaattcgttgagtttctatttttaaccttttttctctctcttttttttt

SEQ ID NO: 242202 - DNA, 3855 bp, Cannabis indica
aaaattaaaatataacacgttaattatcattcaacatactaattattatatcttacaaaaaaaatatcctaattattatacaaaaacactaacttaataaattataaaaaataatactaatatactaaaaaagtacaaacacatattaaaaaatataaaatattaatattgtgtaaatgtgtgtgcaacttaatttgagattgaattgctgaatattacaggttattattttattcacttttcttgatgagtctatgtgactcatgggtgctttatggtgcaggtaaggggaaagcaaaggttgagcagccatgagtttgaggttgtagcagtaatgtacatatcagtcgcagtggctcgccctagtgaacaggatgctccattttagtagtattttgggattgcaaagtttatgttgtaaaaaaactaataaactagtttgtaatattttgaaaatagggggtccacatagttctccttacttatcttttactataaagaagtttttttttatgcttgattttaaatatcaaaaatttaattacccacacttttgatataattatatagtatttaaataagaattttatatttatacacacatgtggcatccctgttggacagggtgttacagtttaattttataaatattaactaacgatccccaacaacgatgccaaaaacttgctgtggttcttttcaacatgaaagtatacgtatcgttacaagttatacactcacaaaacgtgaggtcaagtactttaaaattaaatttttttattctagttggttattcaaatttaagaagaaattagaacttgaaaacaataaaaacaataaaataagcaagtaaattgatatgtaaagtaacgatgattgaaggttagagttattgatttcaattgtatatatctattatggtctaacatgattcaattcctattactaaattttattccatagcatgtttactcaagtaatttatagtcttctcaaatatataaattttaatcacatgcaaactttctactttcatgataaattaaacatgtaaaaggcattaaacacacaaaccccataagttatccaaaccacataggtactcttgtcctatgtcaaaatttattcctatttaattggtgatcaagtaattaaaaataattaagcacgaatgaaataaaatacatagaaaattgtgagaaaattaaatcacattaaaaccataaatcgatgtcaaacaatattcatcagtatcctaataaattgtttatctactcttgttcatcgtaacaccttcacacatataaattaagaataaaagaagaaaatagaaaagaagagaatattgaaaacttcgtcgaaaaaatccttctcaatcgtttctgctctctaatttttgtactctcagaatgtttgctaaaatatgaaagtctaactccttttatagctgaaaaaagataaaaaggtcaaaaaaatatcatttttttgaaattttaaaggtgtgggccatgacactcaattcctatgtcgcagcccgtgtctgcaaagttcctcttcttttggcaatttgaggacacgggcctaggtgtcacccttgactttgtcttgatcatgggaaacagtgattcttctaaaagaatacatgaggccttggaaagaataaccactctcttccatagcttaatcatgcactatgagagtagcactctgctcactctccctggcattacacaaagaggagtcatcttcaaccagaatgtctctatacactcgttcgtaagacgctattagtccaacttaacggaggttgttgttagtaaacaacactttcccattcctctcctctcaaggaatgtcatagagcatggcatcccctcattttctcatatcaagaaatatggctggcctcgtgaatggtcgtactttcgaaaaggagacatgtcttaatccaatcaaagatgtgaagaagtactcatgcgtataccgtttgcaatttcattctttctcatcatcaaaaatggtgcaaactgggataagtagtagaatttgtagttccttctgatggtactacacctccctaggtcaaatagaaagatgacttcatgggggtagggaacaagccaacatctaaggcggtaaaagatgaagagagtagagaaatttcgattactattttgatgagtttgatatggacatactctaaagaagtcaacaatggatataaacaatggatgcaggggtagacgggctaatgcattcatgtgcatgcgagactaaagactgcagcatgtgctcttagtggtgcagggaccatctattgtaggtttctttgttatttcatgcggaaggtcgttaccttttctgatggagtcaagtttcttttcactaagtgtgctctttactagaggttcaagatcacaatacctatcaacagaattctcactctcaatagctgaagtcagaagctctaaggctactctatttccacctcttgcagtttcaaaggttgcagactagacaatgtgtgctttgctctgatgtactgagaaatatgtgggtcaagaagagctgataatcttcaagtgtttttctaacgacgcatttctcaccactagatgattcatctcagctcaactacctttactttagttcaacacagttaaacttaaacgaagacgtttcaaaaagctggaaatgtaaattaagcttcaacatagaagaatttttttcttattttttgaatttaaagggcaaatgcttgtcagaatggatattcaaatttaaaaggaaaatgcttgtcagaatagagttttgtcaattttgttgaaatcagtgagtcgcgttcttcgagatttaaataaatttaaaatttaccttgatatgaaatatcttaaggcaagttgaagcaagccctagcagagcactccaaactactataggcgtgtagactagaagttgagaggagaatagagtaatgtcaatggaagtgaatgatgaactcttgtatttatagcaagatctcacctattcctaatgcaactaggaaattatgaaaaaaattatcattttatgaaaattttcaaaagttgccaaatcacagagaatctcagctgaaggcaaaaaacaaaggtcatgtgccaaaaagtgatgccaaaatggtggttatgcatgaaacaagcatagtttgtgttagaaacacatcatgacacatatatcacactaacttaggggcaaatatttaccataaaatttgacttcaggacatggacaactcttttgacacgtggcgagaaggaaacaaccctgggccctagccaccgggactaatggtggtccacttaggcattggaagtgtatttgtgccctggttgacactagtgggtgcccaagtaggcactatgatccagcaaacacatttctagttgtcatcctttggaaaagttgaagtaaataggtcctagcgaccctaaaacgatgaaccatgaagctgaggatgtcacgtggataacccaaggctcaacttgggtccaacatcagtgttggttgcctaggttgacatcctgtgcgccatctcgcatttgttttagttcccatcaacttcttaatggtaatctgcttagccattgtcctaagatcccctagacaagttttagactttagagatgagtctacatgaaatgacacatgggcacctaaaagctctaatgggtgcccaggttgacatatagatgatttaggcacacacgtggctagggtttaggtttttaggtacatacttggacttggattcctcaaatccctcaaggaacattgcaaggacatggtatttcaccaacaacatagaaaacgagccca

SEQ ID NO: 242203 - DNA, 1815 bp, Cannabis indica
ggcataaaacccaacagtgcaaacatccaaaacaagcatacattcatatatacattcttatgctatcttacctcgttccgtgctcaagtgtgccggtcagcctgagtggaaacgcagctcgacgctttacagggtcctaaaccataatgttcagaattcgatgagagacacgctaaacacttatcggggatttaaaatcaaaactaagagtaaccctatcgataaataggacgctaataccctaaattacgcaaaaacaaggaaaactagggttcgggaaaaagccccaaccggcagaccggtttccaaccggaagtccggttcctggcaccaaccggtcgaccggtttctacaggcccccaggaaccggaattccggttatgaactgagaacccgaaaatctctccccttaattcaattcaaacccaaatcttcccaaaacttccagaatacttgtatgcactaatataaaccaatcccaagcaaaaagactcaataatatacccaaaatccatacatgccattagagctccaacttgagctcttaaactccaattgactcaaataacaaagtaaacccttagcttaacacaaaccagcagcaaacatcacaatctaacttcagattacacattgaaatcatccttaaacaaacagccaccgaatcctccaattcaacattcaaattcaacctagtctttaagaaaaacaataagaggaagctaagaagaattaccttagattggaaccttagaattcagctagaattcttgattacaaactgaaaatccacaatcgctagctgcttctaggcaattcgagagcaagagagagagagaggggttgagagaaatggacaatttaattctagggttttcttcttagttttctttatcaaaaaaataaaaggatttatatatatatattcttaccattaataaacttaactaataggctgaaaagaataaaaagaataaaaagataaaaactaattattccattaataaatcccatgaaattaaagaaaaggcttctaagggcattttagtcctaaaggtaatatcccgaccaataaccgatacttccgagcctaacaatgatactccgaaaataaaaggatactaacacacaaaatatgactctctaaaggcccaacgtcactttccacagcttccgaacaccaacacagaaattaagtaatttagtaatttacataaaatagcataataaacatatatgaacttaattatattaccacaacatgcattttataaatattaattaaatctcatatataaaccctacttaaataataatccaatttgttaatcttaagcggtctttacaagggcattgtccttgaacttgtaatatgggggcttacaccttaactaagtatactttattggctaagcccgtgcttagggcccactcattttaggagcccaaataaaaaaaatactttttaaaaaatacatatatttttttaataatttttaaaaatgccatttaattgtaatactaatacaaataaaactgttgaccaaaaaaaagagaaaattacattgtatacccactttattttacttgttttaatttttacctcaattctcatatttttttttaaatatacccacttttatggatgttatccccattagaccccttaggttatgtaaattatatgttagacttaagtagagagtgagaataaattagccaaattactcaaaaaaaaagtggtatattttaataagaaaataatatgagagtatttttgattaatagataaaaaaaaatcatttttcaacttat

SEQ ID NO: 242204 - DNA, 946 bp, Cannabis indica
aattcataaaattttagactatttattgtattgattaaattttatctaaaaaaattgaatttatggtaccaaatagatatgattgtaaaatacaaagtaccaaataagttttattaaaaatacagggtaccaaacttatatttagataaaatacaaactttactagagatggcctaaagaatataatacaagtggccaaattcaactcttaaaagtaataaattctcgaataatataataagattttcaagattgagattcctttctatggctactactcactcgagttgggcggtggtacatataagactttactaaaagggcatcaaacactatcacatcactttctcgacatctcttatactgaatggttttcaatggcggacgaaaaatttgaatccaaatgggaaggaaaatcttcagcccaattgaaaggcctaacggcaaatcaagtttggcctttcctggaggatttttgcaacttccacaagttgcaccaggcggttgatacgtgttaccaagtagatcaggacccatctgccacagtggtcgccggaactgggcgaggcctgacccgttactgctcctccacaagtacatcaccgtccggcgagtcgtcagtgatttgggccaaagagaggctcgtagaaatggatgcagcccaaaggcgtttgacctatgaggtgctcgacaacaacgttggatttaagaagtgggtggccactttcgaagttgtccctatcgtcgaaggcggcgcgtgtgagatacagtggtcgttcgtgggagaaccgccagaaggttggaattatgaaagcttggtaaccttctatgactcttctctccaatccatttctaagaaaattgaacaagctttgttgatgacctcttctgtttagtgggtaaaatgaaggctattttttactttaaattacaatagaataaaaaa

SEQ ID NO: 242205 - DNA, 3253 bp, Cannabis indica
gattccagttcctgcagattggttgctactatattacaaagcatgatggagaagattctttatgtagttttaaagattctgaccatgtcagcagtgccaaattttttgtaacttccagacatcgtctcctgagcctttcgtttattcccgatcatgctctcccaggaagtaatttaccaagctgttctctattagattcttgttcactcagtgatgaggtttctttgaaaaattgcaatgaggcctgcctccatgtagcaaatggtgattgtttagaaacctcttcagatgtttctgttcgtgtgcctttaaatatgattaatttgttggacttaaatttgagagaagtgaaagggggcctcgttgaaccagttgtgacatctgaagaaattgctgaggtttatgcatgcccagggactgtggcctcttatcctccatccttttctaattctaattgcttgccacctgagggtaatttaattactttgcaagggcatgtggtttctgcacactattctcaacaccatggtgactctcttaaatcaaaattcttaagtggaattgcaagcacttcctgttttcatgttttggttgagcatcaaattgtaagcttccatcactatttttatctctctttattgtgtataatgttaaaatattatgcatcatttcattggattctcttaatggaacaggtgaagatagttggttcattgagtaaacatgctctccctcttggtcttggacctggtgtagatgcaatatttcatcgagttctccaattggggtcagtaatctgattgtgctttgagctcttgctatctgaatgctttttgttccatgtagtatgatattgtattctttcaaagtatagcaacacattgcaacctatacaaggttcaattatagcttttctttatgtctttgtaatgttttaaaatggttttccaggggccagaatagatgggtgttgacacctgtgtcatttattgtgataacttccattggggctgtgaataattcatgcaatgaccagtgtcctgctcttgttccagaaatgagttggtttacttccatggacacttcattttcgggtttggtttctggttttacttctctggacaatttatcctctagtctgatttcaaagttggttcaacaacctgattgcaggctaatgcgtatacattgcagggtaacttttacaagctgaattttatgcctttaagctatttgatttagtttatttctcaaacttctgtccaatgatttattaatgcctcatgagagtacactatcttaattcttgtgacaggttgtttctgttaatatcctggtttttgagaaatatagaaaatgggttccccttctatctaaggcccgtcctctgcagcatctagtcaacattccaattgctggttttgtcttgggttagtatttgcctattttgaagtacaccggtataattcgataaaaggtggtccaaatctgattagtggatctgtaattttacatgaagaataaaaagaaagtaaattattttataccaagcaaggatgtggaacctgctttcgtaatgagtttcctagtatggcattctaactcactatttcccagctttgtatgctcacacatatttttcacttttttgtccatcttctcatagtctaagtcatgatcccaatgtaattctgccttgtttaactgcattgcaaaattagtaaattgcgtagattcagattcagtcatttatgatacatttttctggaataatgtttgattatattcaagttggttgtgctagtgatcattgtgttgcaatatcacccttttgataaatcttaaatgcttggatttatggtgattgaatagcaaaagttcctgttgcttaatttctgccatcccagattctctgttgtgatggtatattctgctcttgatattcagtaatattatattttctactctttcttgtgtagatgatgggtcatctccttgctttggctgggcaaatggtgaaagagctagaagccttctcaggctgaacgatgaacttccaaagaaagcccatgaacgtaataactggacattaaagggggttgacactgatgaaaatacacaccacaccatcagttatcatcttgagagaattttagagaaccatgacaggattacagtaaaaaactttggatcattgtacgattcctcttaccaagatcttgttgtatctgttagtccagaaaattcccttagtgtttcagatgaaaacttcctcaaatctgttgtcttgaatgcttgttttggtacatcatgggtaagtttctttacgatatggagtaaaatgatgttactctagttaatagaccttttgatcatttctttctatgcatgtgaaaatattgaagagatacttcttaatctttgcagacgatcattgcatcgatggtggatttagatgctgttgggcagttggagatagaaaaacttttactaccagagattagaacaaaatccatgaaaaatgtatgggccaaagaagttcatattacaaaccccttcaccgaggctaggaatgttattcaagaattgctaggcaggtaggtaaatgacacttagtacatggatcgtttatggtgatattcatgtgatatttggtttggtgtaatggtaatggtaatggtaatatgatggaatacgaatgataataggaaatcgattacagtgtgtttgttgttggtaaattgacaaaattgttgctactttaatttttatgtttatatagagaaagagtgtggagtcattttgttttagtttatgtaatcatctatattgtaatcctcattacctaactttcctatgtaataaggattcatgtatacacagcttgtgttaattaatctctttaacaatgtcatcacaagccccaccgctgagtgtagtagtagtgtctgcagcagcacatagtgagccatggtccatcaacatcatcctccgttgttcctattgttggcgtcttagttactgttctcatcttaggagcaatggcagtaatggtgggtcggttgtgctcaggcaagagaatcatggtctatggagatttcttcttgcattgacagtagaatccaagttaacacacccctttgcccaatcttgattgagatgaaattacttgattgagatggcttgcttgtatttgtggattattggtggtgggtcttttgtcttttttactcttttcagtagccaaaaatgt

SEQ ID NO: 242206 - DNA, 854 bp, Cannabis indica
tataatttaaagattgaactattttagctcatctattgggagtgctcttagaagctggggacccatatatatcatccaatattaaattacatatcttcatatgtatagcaatatcacattattatattatacgtaggataaatactatgttaaatcccgtattttataaaaattatcgattgatttatttattttattaaatgataaaataaattttatttaagttgttaaacatattgtaattaccagcagaagttatagtctaaacatattaaaaataagagagaagaacaaaatatgatttgagaatctaagtcaaaggacatagtgagattttgtgagttttagttctttggttaactgaatatatgaggtctaatgtaaatttgttatagtgatgaaataaaattgacttatttaccagaaaaaaatgacaaaataaatttgtattttctaaaatagtaaaaatgaactttgagttcaattttcaacaaattttttttactataatcaattggacaataattcttagcacgaacatatataaaaaatataacaagttttgttataatacatctagatcgggttattattatgtcaatttgacaaaaaaatcagtttaagatcttatttgtactatgttgaaaaaaaacacattatttaattaatgatttttacaaaatataaggtttaaaaataaaatttaccgatatattagaattattaattaacttttttctaataagctctatttcttttaactcagtttttggtttttatgttactgaatgtcaaactttgctttcaaacttaaagtgatgtcgatttatgctttatcaaacgatatgcaaatc

SEQ ID NO: 242207 - DNA, 529 bp, Cannabis indica
tgttgtaataagaattggacaatttcgctctcttaagtatatttataaatttaagtaagatatgcataatattttacttcatttaataatttttactggtcttttagtattaaattattaatattatagggcatggtacatatatgtatgttgcaagggggtctctccatgttatcattttattattcaaagatctacattaattgatttttttttttaattaagcatcatgaatttcattaaaggcatgaaagtcaaatacagaataaaacaagcaaacatcatcactattcacttaacgggcataaacatatatgttggtaagtggtaacccatgtcaccatgacctaggctcaagagccaatttggccaaggggtataccattccgtcacactcctgtgaatgatttccgcctataatcattgctattgatacattttaatactcaagctgactttttatttatttaaaataattaaactacacacttagagctactttgtagggcagtctacttacaatcactta

SEQ ID NO: 242208 - DNA, 1791 bp, Cannabis indica
ataaaaaaggtatagagtgtaattttctctttttacagcatcaaattgtactgtaattaagattaattacattatagatataaaaatgtatggtcacaatcattattcattttctatttgatatcgttttttttttttttttttagtaagaaaagcgtacatatattagaatcaaaagtagttaaacttcacggtcattaccaaaaaaaatatttcgggattgagaaaatcgagatacaaccgaacttgtggtgggtaaacgctcacttagccactctatttgatatcgttaataatatattagcaagtgattaattatgctataaatataatgatatagactatatattttttttagataaattatctcttccaggaaaagaatatatatttagtaaatagtcatcttcattcagaaatgctttggcagctgtgtacgagttacatttagatatggagagtactagagagaaaacccatgttttacacgccagttttcattaaataaatttactttctctaatttgatagccattttcattaatattttcaaatattaatacttggtacaaattgaggtgctgaatcaaaatagataaatttatttggcaactccaatttgttaaaacttaaataattttttatcaacgaaaagtttaaatggaaaaatataaatgataataaatctaggattatcatcatatgagtaatgatctgtacagacaaattgtgtaccaaatttttacacttatggtatactttatttcctaactcaactaaatttcattgtgagaacatgtttttgtgtctaaaatttggtaaacataaagtgcacatatcattactcagtcatgatattagaaatttaaacactaaaacgagtactttcaaaaaccaaatgtaataagtgacaaaagataaagatgcatacagatgaaaacaattgttgttttttaatggtaaaataaagaaagaaaaaataataaaacatgacttgacaatttgggatccaattttttttaataggagtaataaagtgggagtagatcaaggcatgaagctgtaaaaataatagaaaaagaaaagaaaaaacaaatagaaacgacttagatattctcaggcaaagtagaacgaggaatggataaaattgattgtcggttatataaaacatttcgcgggaaacttttattgaccaataaactccaatttttcatcgtttcttttagcattcctttaataaattgaaagtgggatttgaaagtatctctgtttgggggctactaacttgcttcgactattttctcttaagctgatgacataaataactacaaaacatgcatgattacaaagctctttctcccttctctttgcaccaaaattgacaaaagtgtaacattctttcgtttcatcattttgattaataaagaaattcacttattaatttgagctgcgcttccttatcataaggaaaggaaccaaatgatgaactcacaattcattatgtttttgaagccagaagctaaaggacgcccaagttggctggcccacctacaaatgctatagtgaactgacacccccattatcttcctatccatatatataaaagcttatgccaaaattcacaaaaatcgtcctatccatgtaaaaagcttaagcaaaaatcagagatctattttactgtacatggaacttcaaatcaattatcagaaccaaaagaaacccatcatatgaatcaagacaaattcactcaaagactctaaacaaataaagatttactgtgcttaccatcta

SEQ ID NO: 242209 - DNA, 919 bp, Cannabis indica
aaaaaaaaggcaaaggtgccactgagttgatagtagcgtggaagaaagaattatatgcattttttatatatacggtacaacattagcggtatgtatataatttaaataatcagaggtatatgtgctaataaatctaatattacgtatgtaattaaaaatctccctattttttatgggccaacacgacacgacatattattgcgagtttttcaaattatggatcaggctggctcgacatgcacgtatttacagctatgacgagaagtgtactaataaatagttacctttttcctttttctgtttctttatcaaagaacttggtggtatagcaaatcaaaaactaagaaactttatcttcaacatcacaattagtgttttgtacattcaattctatgttcaaacttgagttagttctgcgtacacgtttcccaggtttcttcaacatgggatttggaagagaagctaagctgagttgttgcttcccattgatatttgatctccggtccatatcttctttcaagcttggattcctcttcctgcaagatcgaccgggacgagatgaaaccaaacttttggtagcaggacttccccttgttttagtactttcgatctcattctcaattacgtctcccagacaatgtggtgcacctggatctaaactcaaccatgaagacctgctattatcatcattcccctcacttgtcaaacctaactctaatgagggaatgttctttcctggaatttgaagattgctttgggaatgaaagttggatattggttcacaattcctttcatcaaaatctgttgtggtagcattttctgtagcaaaaccaggcccctcctgttaacaaaagaaaatagtgtcaaaaacggatgtatcaaaacttggactacgcaaaaataacagcatagcagacca

SEQ ID NO: 242210 - DNA, 519 bp, Cannabis indica
cattttgtctacgaattaagggcgttattctaattatattttcttctgtatgtaataattattataaggctcgtttagtacgccatattgtattgtactgtgttggattgtattgtattgtattgtattgtattagtattagttaatacaatattatgtttggtattgacttgtattaatatattatattgtattgtattagtattatttaattcgggtctcagtcctgggtccgggtctcggtcccggtcccagtcctgggtcggggtgtgggttcgcggggttcgagtccgggtcggattctgggtccaggtccatgtctcgagtctgagtccgggtccaggtacgggtcggggtcggggtttggggtctgggtgctaggttcgggttggggttcgagtcgggttcgggtttgggtctaggtctaggtcccaagtccggattggagattggtgttgaccccgaatcctttataaatattatgatacaaactaatacagaccatttgttatgtattaa

SEQ ID NO: 242211 - DNA, 519 bp, Cannabis indica
tttttatattttttagaatttatggaagaagttttatattgtttgcttggattagagaagctcacaaattttcattttgtgtaaattatgtatttatttttgtacaaattacagtaaatagtttaattaataatttttatatttgtgatataaatctgaaaaatgtgagtaaaattgttggtttataaatctgaaatgtattgtagttatgatttttgggatatataattatatatgggtactattgaccgaggttttcggcaaccaattaaataatatgtataagaaagctgtaggaagcttaatgcatggaatttttacgtggttggggtattaacgagccttagtccacgagtctttgttatttatgagagtatttattacagagaatatttttggtggatatctctcttatttactctctttaattcttatgaacccagaattctcgacccccgtctaagtgtgtttgtggggtatttatagtgttttttttggaggatccctagaactgaatca

SEQ ID NO: 242212 - DNA, 2006 bp, Cannabis indica
atcttggtgaaaacttggacctagatagactcaatgttgaagcctaagctaagcagccaaatactttcaagtggttataggatttatgtttagaatgtagaatgtcaaagggagatttatgtttcaaattagccgtgggggttctgttaatcaaatatgcatcagtggctatgcattctccccagtagcacaatggaatgtatgattggaagagaagagcaagagcaatatttagaagatgctgatgctttctccccattacaaaattttgatgtggtctttgaacacacgaatggtaatgcatgacaccaaggtctttaaacagtacatcaaactgcaattccttagcattattagatctaaaggctttaattaccaattttataaactgtggaatgacaatttgtgcctcaaatttgtgcttaataaggtggatccatgtgtacctacaacaatcatcaacaatggtgacgaaatatttaaaaccctctggtgtgatagtattaaaaggcccccatatatcaacatgtgtaaaatcaaaacaatgctcggagaaattgtgattggagatgaaaggaagtctcctttgtttggcataatgacatatgaaataatgaaataaagaattagaatctgaatggaaattcaaagttttattcaatggatgaattttgatacaagagggatgtcccaacctataataccttacagtgtttttattgattttggaattagaaatggaagaaaaaacagaaacataatgagcctcatggaattccattacattttagaaaatatagattgccatacttctcacccatcccaatcaccttgttcctcataatgttctggatgacacaatgatcattagaaaacatgaatgtgtaattggttgatgctgttagataattggcagataataaattgcatttgaatgaaggcacataaagcacatatttaagaactaagtcatggtttaactcaacacttccaagacaagaaacatgtgtatgtaaaccattaggcagtaaaacaattttaagactagagtcatgataggtgattttgaataatgagatgttgtgacacacataatgtgtgtcctcgtatctatgatccagttttcactatgaacaaaggagttcttatcagaaaaatgagatactatgggctgctcgtcaggtgtattgattgaactgttgtttgccactttttgagcaagcaaggtcataagcttttggcattgaacattagtcaagctagaaacaagatctttatctcctagtgcatcttcaagcttttcctcatcagttcccatagcattagtagcagcagatttaggtgcagcatttcgatttggaaattttccatatagcttgtgaccaggtggataaccaatgagtctgtagcatctttcgatagtatgcccattcatgccacaatgagtacaattaaatttagatttgaatggctgaacagcaccagcaaactgtctaggattgcctgcagtagatttttcaatctcaaaaggattattagggccactagttagtcctcgctgccttttttcttgaatcacagtagcataggctttattcacatttggaagtggatctcgcatcagaatttgagatctcaccatactgtacaaaccatttaatccaacgagaagaagtcgatcttcttcttgatattcatgaatcactttcatagcaccacaagaacaatatactctctgatctgatcccacggagctttcagtcgagtaaaataagtggtaacactattcgatccttgaataagactttgcatagtcttattagcttcaaagatctgaggtgcattcctttcattaaagctctcgtaaagctcagaccagatttcagcagcattatcaaggtacataatgctattagttatttcatcagaaatcgcatgtagaatccatgatatgacagtgttgttgtatctacaccagctgttataatcttcatgatcatcatcgg

SEQ ID NO: 242213 - DNA, 888 bp, Cannabis indica
gtaagaatctggttggatattattattaaattcatttataaacatgagcagcttaggaaataatgtgtttttcatgatattgttagattaattcccgaatctacttgtaggggtattcataaaaattttaaaattgaaaccgactatctaaccaaccgaccgtaatcaaatttttgattccacgtcatcactgaatttggcagtcgatttcggttacgtttttttttttttaaaatggcagtcgattttggtttttaaaataaaaaatggttcagttaaaaaacagctaaaaccgcaataaaccgcaaaaaactgccaaaaattatccaaaattgtcaaatcaaaaaaccactagaaaccgtcaaaaaatgcacagtcggttttatacagttataatttctaaacgtcacggtttttgtaaaataaaaactataaccgatcggtcggttataaaattgtaaaaactgaccataaccgaccgattttcacccctaactacttgtttctagtgtttttttagatttggaaaaggttggttgtttgatcagaattgttttgagttctgtacaatttttgctacatgaaattgtttcatttccaagttaaaattagaggtggacacctggtggtagactataggaggttgaggaggcttaggaagtggttgaggtagtggaggtgcattgtgggagctatgactgaggtaggtgaaggaacaagagactcgtcaggatatgtatcaggcgcagatgatgtaacagaatatactaacagatcatcatcctcgtcctaatgagtaggagtaggtgaagatgaaaaataagatgcatttttcacaaaagtaacattaatataaagaagacatttattaagatcaggacaataaca

SEQ ID NO: 242214 - DNA, 1793 bp, Cannabis indica
  modified_base (1718)..(1718): a, c, t, g, unknown or other
attggatagatttgaatatgttggccctatatgtgcacatatcactactcatcgaatcataattttataattattacctgttgttatatttgaacacgtacatatttatatatgaactagaggaaaggtgttatatatgtgtgcctaaaaaaatgacagatgaaaaaaagtcgtgggtccaaaatcttgactttcggagaagttaataattaacaaaaagtcaaggtttttcctactaataataataaagcaatgcatgaaaaacactatctatactccttttgggttggtgtgttctttataaaaaatataagaaataaaataatgagtgtatatatatactatatagtacaaaaaaccttatagactatataatttactttgtaaataaaaactctattaatatcaagtattgggttagttaggaattagttcatgtcagttagaattagttaagattctgttagttgtaaaggtgtcaattcagttgattgttgtaactaacttgattctgttcaagtgtactaattgagctatatatatagctctttttctttctaatcatttttcaatataatcaataatactctcaacagagagattcatactctgtttttctcttccgcaactaatatggtatcagagcagggatttctgaacaacctccattgatttttctcctcttctctctattctctatggctcgaggtggaggtgttcagactcgaagctcatcagacaactccaatcaattttctgttttagattcgaatgttcgatcctactccgacgatgctcggaatccttactttctatcaagcagcgatcatcctggagctagcttagttcctaagatccttactggatgtgaaaactacagttcatggcgtcgtgccatgacagtagctcttgtggccagagataaattcaagtttgtcaatggaaaacttcctgcaccagaggaagatgatgatgattttgagctgtggaatcgatgcaacagtactgtgatctcctggatttttcatgcaatttcaagtgaaattgctgaaagtgtgatgtatatggataatgctacccacacctggacaaatcttgaggaaagattcaatcaaaaaaaatgcaccctgtgtattcgaagctatacgcacgaagcaatctctggttcagggttccaaatctgttactacttatttcactagactcaaatctttatgggatttgattcaggagtatcgtccacagcctgcttgtacgtgtggagctatgaaaaaaattcaagaatatcaggaggaagaccgtgttcttgaattccttgttggattaaatgagtcatacagcagcactagatctcagatcttgatgcaagatccactccccaacatcaataaggcttatgcttctgttatacaagaagaaagtcagcgatgtttatctaatactgcttctgaggatgacaagaatggatctggatctagttctaattgtggacagtttgcaggaaatgttcagccacatcgtccaaagatggtatgtactcattgtggcattacaggtcatacgatgtccaagtgttttcggattcatggctatccacctggtcacaagctacatggaaaatttcctagcagaaatgacaatcgaggtacaacacttcaataagcctctgcagcaacttttctaccaattctgagactactgatggcaatagtggaganaaatttctggcaaagggatcaagaccttattgctggtttaaccacaactacagtgtcaaaaagctcatggcattg

SEQ ID NO: 242215 - DNA, 1070 bp, Cannabis indica
aagttactgtatataagaatactaatattagaatttgaccttttttttattattcttgggccactattatttttttggttaaaaatgtagctagtttacattaatgtatcatatgcatatatgtatgtagaaaaattgccttttttttaataatgggccttgggcaattgcccctcttgcccatagcttgagccggcactgggtatgactagagtaccgagtataggcagtgttatacctgaaattcggctacacttcagaggttgacacgtgtcaattaagtggaatatgaaccacttggtataataatgattatatcatttaatgcaaaaaggaataactcattaaatatagaattaatagaagcatattgataactcgctaactatatagtcttaggtaagataaggatacaaaactattaatgtttgtattaacgagacactatcctgcctcggaagacacagatccaaggacaagattcattttaaaagaataagtgaagttacttaaagtattcacgagcagtatatagtgagacatccacctcgctattcacaagacatattgacgaggtgaataagttgtaatatacttagcgtattgtatacattacaataactaagtgtaacaacttggaaatatgcaggacatgattgtccagtctacgaggccttatggtcaaagagaagttcttaagtttgctcagtacactagtgctcatgccattgctagaaggcatatgattattcaaaattcagcattgaccatttacaggcaaagcgagatgctgttatccaaatcagcatcaaccgtctttaaggataagaataaaaagctgttatgcgattatcaattgttatctacacgtgtttgaatgaaacatgatcaattcccacgttttatgaattgattatgtatttcaaatttaaaatgtaaataactgccaacttatattcctataaataggggcgaattccatagcaaaagggatggaaaatctgggagaaaaatactatcagttgtatattgtataaaaatactcagaattatcttgaataagatagact

SEQ ID NO: 242216 - DNA, 910 bp, Cannabis indica
tagataatgagtttagaataatcatgttgttgttctttacaatccttgtttgtgtatttgaaattcttcctggtatgaatgtgtttcttgatgctttcttgatgatttctttatgctttctttatgatttcttgattaatctttgctgcagattgtgccttgtttggctctgatacaactgtaagaatttttattccctccttaccctagagaactaatcagaaaaccaaggtcaattttagaccttttacccttcagtcaaacccttcttttgacccctgcttataaaccaaacgacaatccctatattgtttactacacgtcgtttatgacactcaagaaaaccctaaaaatgcattggtcatatataagttgatttatttctaaaatacacattcatcaactaaaagaaaaccctagccgtgagactgcctccttcttctttgttcttctctgaagaacacatgcaacacaaccctgaaaaatcccactgcccagatcgaatcaaccccaaatcgagccttattagtcttcgtggttcttcactaaagaacatgaagacaacaacaacaataaaaaccagaaattaatcccttaaaccgagcctttcccaaactatttaacgacccagaaatcacataaacatacacacataaacacaatagaaattgcagaaaaataaaggaagagataacaccagattttatagaggttcctcgaaaattgttgctaggtacatcctgttgagcttgcctcagattcactatagatctccaaaagatcaagagtagaaagttttggattgcaaaaaaaacaaaggtatgattttggtaaaccctttaattatagaatttgtttccctcttttctctctattttccctctctaagtttaatctctaatcatcttct

SEQ ID NO: 242217 - DNA, 1628 bp, Cannabis indica
tttaatttaaaaaaaaaaactaacaatgccccttgcaacacaaagtcaaatatcatattcatagctctaaaatttggtgaatgctagaaaacgaggacaatcacaaaaacttagtccttaattccatcataaaaagcatgcatttacattttacactaaccataaaatgtagccaataatcagaaagagaaagttctgaacttgacttgagacaacacagatgaaatgcatagaatcttcattatgtaatatttacttcgtatactcataatcataatgaaacttttattagtttaacacactgccttaaagaacattattatgtttacttaccagtctaactagctggagcagaagcagtaacagaagattcaagagaaacattgttaagcctctccagagctaaaataagcgcctgggtacccaaattcccttcaccatgagccttaagcgagacataaagctgttgagccaaagccaacccaggaagagcaagactcatattctgacactcctttaagcaaatacccaaatctttcacaaagtgattgacgaagaaccctggctcaaaatcccttttcagaatccgagccgcgtacaaatccagagacttcgatccagccgcgccagtcgatatcgccttcaagaaaagcgcaacgtcgagtcccgccttgtgagcgtacaccattccctcgactagccccaccattgtcgaagctatggtgatctggttcgccagcttcgcgaattgtcctctacccggaccgcccatgtagttgaccttccccaacagactgaaaagaggattcaatcgattaaccacggactcatcgccgccggcgaagatagctagggttccgttccttgctcccaggtctccgccagataccggagcatcgatcgcggcgcagcctttggcagcggcggaggaagagatctcggatgcgagagagggttccgatgtggtcatatcaactaggacaccgccggaacggaggccagcgagggcgccagaggatgggtcaagaaggacagaacgaacatcggaaggatagcctacgatggagaatacgacgtcggattgggcggcgacggcttgaggagagtgggccaagtgagcccccatatcgaggagcggttgggccttggatagagtacggttgaatacggtgagagtgtagccggctttgataaggtgagagcacattgaacggcccatgacaccggtgccgatccagcccacgcgagtgttggatgggcttagagtgggctcggctgaggatgtggtggtggccattgagcggcagaggtgatgggtaagaaagttgattgagagcttagaaatgaggaaagaagagttggaagatgagagtgagcgaagttggaattgcagtggcatgactaactaatgtacctacccaccattaatcccttatcccatccatgatccatcatagtgtatctttgtccagtactggtaattttgtcttatttttggaaactgaaatttatctaggaatgatttttatgtgcccatattaatgacatgtttgagagacacaaaatttcccctaaacaagttttttttttttttgaatgaattcccctaaacaagttctatctccttc

SEQ ID NO: 242218 - DNA, 540 bp, Cannabis indica
agtaaagcatgtaaatttccctatatatggaggaaaaaaaaaagggtcgggccaagcccaaccggactgctgaaatatcttggtgttaattacttgctgtttatttatggctaacataattaagcatatatcactattagatcctctttgttaattgctatttaccacaggtccacaacctattccaatgcaatgctatgaatctaagtattaagtttactgttttatttagtcttttggtcagctagcttaggtgattttgttctgtttattggtattgttgtattgttagttttggattgtttcttatctttttctgacagttggttatttttagttgtaacggtttgtctgttaataccgttagtctgttcaaaggttcaagccttatataaagcttgccttacctgttcttgcttcttaatgaaaattctcttttctctcatttctcaatatggtatcagagggggagagataagccctcccgtctgatccttccagctcccgtgttttctcctctggtgttgctgcgtctctcgg

SEQ ID NO: 242219 - DNA, 535 bp, Cannabis indica
gtcgtatacgagtgcaggttagaggtctgattcggcgctagggtcatgggagggatttgggtccgattctagtcggagtctaaaatattgattaagaaaaaaatttgtttaaaaaaatatttaaagtgatttttttttaaaaaaaaaaaaattgattctcaattaagaaattaaaaagtgaaaacaattttatagattttaaaaaatattttcacttttttaatttaaaaaatagaaaactgattaaaaaaaatgttatcaaacgccattaaaatttataatttgtgatatgtgaatgatttcatccaaataaataattgcataaatttctttttttcacattttataattgtaagaatatattaatcaaaatattatttatagtgtatattctaaaagttactatcatttttctaaaaaaaataataagaagttactgatttttttttatttattttatttattaaatagtaattcagaccttctacaagattgaggtataattttaggtgtcgtttagtaacacttttgtttt

SEQ ID NO: 242220 - DNA, 717 bp, Cannabis indica
tgaaatttcccttttaaaaattatttaatacataatagtacactaacatttgtcggttaccaatttcaaccaaaatttatatacccttactataaatgaagctatcttaaccataggataccaaaactacacattttacatcaatctaatggtttaaaatctattgaggtttcacatccctcaatataagtgaggttttacataattggcttatataaattccataaataaattctaaaaatatatttcggcctcgaacctgatttagcccaaaatactcggctgtgactatactgtggtgacttgtcagaaaatacctgcagaaagatacaataaacatactatataataatatagtcaataagcacaatataccataaaattataattttacccttcttgggtcaaaattacaaaaatacccctgacacaccaacgagatcttaaaatgcaataaatcataatagttttacatattaaatcatattataatatagactaattagtaattttccccctgaactttaacatgtactaaatcgtatcccctgaacttttttggccgttaaaaattccccccgaactattgagattgttaaatttaaggacttttatctaatttcattcaatttttactgtttcagtgattaattatgtactaaactatactccccagacttggatatctaccaaatcatgcccctcaaactttgatat

SEQ ID NO: 242221 - DNA, 650 bp, Cannabis indica
ttttagataaaatggtcatatattttcaatggtgatatgtattagtttaagaataaaatattaaatatatgtaagtataaaaaatcaaatttcccataattaaaagtgacgtaacccatctacattatgtatgggtaaaactatatcttattgtgtaaaagttataaacaatttaattatctctaaccttactaactatttttttggtaaatagtttttttttttgtaggtaattaatagttaaaacataatagtgaaagtaattagttcatactattttggataaagaacatatataatatattatgattattatcatttttattattattttattatcatttttattattattattattattattattattattattattaataataatttgtttagtatgttatattagattgtattatattatatattattatattaaattgtgttttatttaatatttttatataaaaaattatatgtgatattaattttgatgatcacttaaatatataatattttttgctcaaaataaatatgtaatatttttatataaattaaaatttaacataacattatataaaaatataatatatgatataataggctaacaagaattacactactctgctactgctatttactctgtt

SEQ ID NO: 242222 - DNA, 1140 bp, Cannabis indica
ataaattccttaaaatcttgtacattaaataaccaaatacgttctcaatgtcatatttatttcaatagtttgtgtaattttactctcttttttgttatttaatttctggaaactgcagactgaggaaatacacaggctgaatgggatatacaagaggttattgtcgaatgctggagtaaaattgtttgagggagaggggaagctagttggacctaatgaagttgaggtgactcagctggatggcacaaaattgagttattcagcaaaacatatcttaattgcaactggaggtagggcacaacgccctccaattcctggccaggtaaaattctgcatttttggagaagtcttttttttttaaaaaaaaaaaattatccttggtgtgccccttaataattcataagctattgataacttcttattcagtatttaattttatatcagcttttaaaatgtctgttagaacttttcatttaaacattaatgtttcatgaaaggaacatctgttaatgttatattgttagtagtctgtgttcacagccccaaacagggtactataagctcttatttgtaatcttgtattattggtaatagttcattcctggtgtttatttccgttgtagtaaagtactggaaattatgaaaacaatggaatttcttatacatcttttcggttaatatttaccttatttgggcttttctttggggattcttcttttttcaattctcagtccacattctatcttgttttctaggaaatttttgcggtacggagattgatctttattatttgaactctcttttccctttcttttgccaggaattcggtataacctctgatgaagcactgagtttagaggagcttcccaaacgtgttgtggtgcttggaggagggtttgtttcattgcctttcttttagcatttcttgttaacctctatgtgtactcatcacctcaaactattgtcctctttgtcttttttttcaagaacttattatcctcttgtctgtttaggtacattgcagttgagtttgcttcaatatggcgtgggatgggtgttgctgtcgacctttgcttcaggagggaacttccactaaggtatattgatgttgtcattatttttgcatctggattgcttggc

SEQ ID NO: 242223 - DNA, 826 bp, Cannabis indica
tggtcaggtttgggtgttattgggctgagcccgaatatttcatttatgggataaaaataatttattatataaaaattaattaaataatatataaaataaaaattataaaatcatataacttaaatttacataaacattaagtcattaacagcacgatcgctcaagattttgcagaaggtaaactctacttttaatatatatataaatatattatattttgatagatttaaataatcagatgaaaccatttattatgttgacctcgctttgaaccaacgacattgagtcaaataataagtgattaaataatgtaattaaaagagaacaaacatgataaagtaaaaagaacaccaaatttaaaaaggtttggccccgtgagtgtggtaatagtctactcaccttgtattgtattaacttaagagaaggaacaaagtgttcttcctctttaaaagttcttacaattgattctcttagatcactattttttctctagaatctctctctaaatcaattcttccatccctttcatactgaggctaggtcactatttataggagcttaatgcacgagggatggttttctttttgcttacaatgcataaaataggttattacaataattacataattatgatatacgaaataggaaactagaacaggttgccatatttctctgactgaatctcacaattatagggattctcttcgtgcctggactctgggtaaaataagatcattttgaagtagttatcttttgtaaattgctttggcataatagacttctacctggtcaaacgtcttctttacaactctactcgggtaatcga

SEQ ID NO: 242224 - DNA, 594 bp, Cannabis indica
tattattattatgattttttttgagtaatcgatgatgaaaatatattcgagtaatccatgatgaaatatatattttgtactgcagttttcaattacaacagtctagttcatgatgtgtacaaagtgaacggtagtgacttcaatgactgcattgctcgacctggttcagaagtattgagaagtggaaacgacgtcgttacactcaacgccactggaaacaaatggtacctttgcagcaaatcaaatcactgtgatttaggccaaaagcttaagattagtgttatggacatgatgagtagttcttctactactccacctcatcatccccataaccttttccttggattattattagtctcttcactcaccatcttcatactcctttcttatggcgccatttgatattagagacgtttttcaaaatgatgatgtatattataattataacagatatatatttcatactaagttcggtaaattttgaataatttatggttttaaaaatagagttcaaactaataatttattgcacgtgcaatttaattgtttatgttgaactttgttttcaacttttaaattatttagaatttttta

SEQ ID NO: 242225 - DNA, 784 bp, Cannabis indica
caatatctcctccccctcactggagtagccttctccagctttgattctacatcagagctcctagtctctgagtccacctctagctcagcctcgacaggaggctcgacagtctcttcctccactatgattcgaccctttatggctaccatggccacatgtggatcgtacgggggagccctacgcaaagtctctttgtccttgccatcagtatgaggtgagtaggagacctacacaactgtcacttccctaattaaccaccgaccactacttgtatagaagaaataaggggaggtgagcaaccagacaaagctacaaatatattcaagtcaacaggacactcagcgacatcttccagaaaaaacaaagggtacaaggtcgaccaacgaccaagcataatcttaggtaaaattaccaggacacacagtaagtcctaaattgcacaactaactataatggactcattatctagccttatacagagtctccaatagaaaccacgcattaggccagagttgtatatgccttcaagggcgccataagactctaatcgtggtcaaaagagggaaaagtactgcctgcttgcttagagccttggccatggccggccagaccccaagacccaatttagaggccggccaggaaccctagttctaggcataggccggcaagcctattgtgatattttgcacacgcaagtgcacatatcgttacaagtagtaaactcaccaggagtgaggtcgatcccacagggattgtagttaagtacgttgaaattaaactttta

SEQ ID NO: 242226 - DNA, 816 bp, Cannabis indica
ccgtcggttctttgctaggaaccaacggcatagggtttaacaaaaaacccttatatcatcttcttcttccccacgataaaagtagccacaccagatccctgaaaacacacgaaaccctcgccaatcaccactaaaattcaccttatctccctcatttcttcaccatttcatcctatttttgccttaaaattttcaattttcaatatctaatctcatacactaaaaaaattttgttttctcacccatttacactgtacccgaacatattttaaaaaaaggtggtggtataactccggccaccaattttaacggagaaaacattgaatctcaacgtccattaaggtataaatatgctttctattcattttattaatgtacattggtattgtttcatttttgtaatttttttttgggatttttttattttattaatattatattgtgtgtgctataggtgactggatttttgtcgcaatttatcgccggattgtatttataaggtaaatatttattaacttgatatataatatgtatgtatatattttgtattttattattgaatatgtgtttatatatattgtgtgtatatattatttgtgtattttgtataattgtactgtatatatatttgttgtgaatgagaatgaagtagtagggatcaatttaattagtttagaattaaattttaaattatgttagtgtgatatataattgattatatatgtacatgtatatgttattttttataaaaattaactatagaatttaaacaagaaattgttacattttttattaactagtaagtaatttaataat

SEQ ID NO: 242227 - DNA, 561 bp, Cannabis indica
tacatagtgttttcatcagttgaaattaagagatatgcctaaaaggggataattcatatatattctcttaacttgcgtatagactgtctttctaaactcagttgtaagatatcaagtatgatcatttatgtttttgacttttgttccagccttaaaagtgaacaatgtggttcatgtttcagggtgcaattcctgatatgcttcagaatactaccaaggagtactattcaaaaattgttgcgattgtcaaagaagctgcagagatatgctactctaaaataaaaaataatcctgtcattgattgtccacacaagccagaaggctcaatgtttgtgatggtaagtagcattaagtagtttactgtaactctactgttttagccactgaaattatcgttctgaagcacctaagttgtatctcaggtaaagcttaatgtttctttgttggctgacataaatgatgatttggagttctgtctcaagcttgcacaagaagaaatcagtcatagttatgcctggtaagctgactgtttctctgttttgttggaagacataaacaatt

SEQ ID NO: 242228 - DNA, 1878 bp, Cannabis indica
attatcttgatcgctaaggacttcgaggcatttcgagttatttgttgacatttgttgacacggacaaattcaagcaaaaactcttaaattattttaatattaaactttgaacatataatagttccaaagataatctttttggaaagaaaatcttttgtctcatggtagcctgctccagttcccttaagaaactttcgttattgggttaagcatacactttacatgtttctagtgattcacatggcatcatcaaaagatacaagtcttggataagaatctacaatgcgaaaaatcatacggttttatgaaaccatgtgctatggctcgaatccatagtcgatcttatttctgataggaacaattgacaatcaaatccaatgtttcctattattttcgtgtctgtagtagtgcgaaaagaaggcccgagcccaaaccaacctcgaaaaatcctattcaattacactaccgagactaatatcaaggcgtaacatacttgtcttagcctttgacagaatgtaattacagaaattagtacctccttacataattacagaagaaatctattcaaaatactgacctgaatgaaggttgctggccctcccaagatatcaaaatacttcttaatacgctcaacaacctgaattacaacacaagtagaatgagttaacatcagtgaatctgtatggagacataacaatgttttgaaatcatttaagctagaaaaccacctttggttccctaaacatgccacaaggatcagttgtgacgaaccaaccaagtcgccaaccgggcacaatccatctctttgataaggatccaagagtaagaacaggaacagtttcaccaaacacacccattggaacaaagggattgtctccaaaagcaaggtgtccataaacttcatcagcaatcacaagaattttcagctttttcgccttttctgcaacctaaattgaatgaacataaccattaaaagtaagaaaaacaagtaaacaacagaaaacacaatgtcatatagctatacataccttctccaaatacttatatctgtacacattcccacaaggattaccggggtttataacaaccatagcgacggtgttatgatctgctaaagcttcgagtgaatcgagatcagcttcccatccattctgagggacaagatcaaagtggcgaacttcaacatgtctaaatgcagcacagagttcataaatgggaaaaccaggccttggaagcaatatgttagcaccgggacgagcaagcattgttaatgcaacatcaatggcttgtgtacaaccagatgtgatgaaaacatcatcagatgttaacttgtaaggaagatctcttgataagtactcggctactgctctgttataacacaaattatgcaccaatgttcatcagattagccctctcaagagctcaaacaagagttttataactgagttcagcaacatttttactcaatctaagctatactaagatcctaacaaaacaaaaatcatcattttcaccaagttccataaattaattctattcaaaaactaactttaaccacagttgtgataggtaataggttctcttcgaaacaagataaatctcccaaatctcactcccttagagacagttctaatctcccaatgaaccaaagttgtattatgtcattctacattccattaatgactacaaaacttcatatttagaggtatttaatgctacaaagaaattgcaaataagtccttagtgtaacaatctgagacaaagactaacataacaatgagaaaggttgaaatcactatgaaaaaagaagaaatattatatgacatcacatcctatcattgttttgacagttgaactatttttatataaatatatata

SEQ ID NO: 242229 - DNA, 1068 bp, Cannabis indica
ccaattcaatccaatccgcacaatggatggtacttggcactactataatgctttttaaaattaatatagtaaggtacgtatataattaaaacattgaagtggatttgaatattggtagggtcagtttgacataattgtgctaactgtgggaaaaaataattgtaattgtattgtgagaaaaataactataaatgagtaatggaaaaatgttgtgctaaatgtttagtaaattattaatttaaaagtgttgtaaattattaaaattttaattataataacaatgttataatatttattataatcacattaaaaatatatatataattctagttaacaatagattcatgcatttggtttgtaattagcataagtttatgaaactaaaaaaatatctaatgatcactataaaatatagttttaaaacaaaatgaaaaattaaatattatttattttattataattaatagtaatttatttcatatagttttatttttaggaatatattatgttttaatcaaatttatcaaaattattttttctaaaaattgggttgtactaattttaatttctccataaatttatcaataagtgatttctaattgtttaccaaacatttttgtaacacaacttcttcagaaaacaatttttaacctttttaaaaattgtgttgaattggctattaattaatgcattataaactattttttcttatatagttttttactatttgaatcctaaattatgcaccgtacgaatttttaaaaaattaaagagaacttgctatgattacaataaagagtactccatcataaaaaaattaagccacactaataaaatattttggtatatactttcgttatgttgtttgttaattaaatagtttgctacgtacctataacgtcatgaataattaattttattgtgtgtgccacttaaatttcacattagctaaaatgaaaaaaaaaaatatatttgtaaataagtaaatacggatctataacaatggaagggaccttgttcctcccaagtttttctattgataaaaaaaataatagtgtattttttaaa

SEQ ID NO: 242230 - DNA, 573 bp, Cannabis indica
tgattccattgcaataggttactaaattccaatcctccttctttctgagaactacacaaatcatgccatgaaacataacatgaaccatcaaagtcagtggtcccttccaaaagaaaagagcgaaaaattgcatctatcatttgtttcaggaccctcttagaaactaacataaatctgtgcccaataagagtgaatggaaataaacacaaaaataattagagtgactcgcccagaataataaagatggagagaatccaaactctaattctagtaactatcttctcaattagaccatcacactgagaattccataatcaatttttcacaaatacatattcccaaatacatgaacgacatgctatctttcaacaacctaaacacatcaatgaattctaaacctcttgttggtccattccactacaatagaaggctgattagcttcactaggctataacatgaagttgtgagaatagtttcagcccttgtaacatgaaataaaccaacttgaagtccccattacataaaaagaagacatcatctacgaaacaatgatgatttatcttcaaggctcta

SEQ ID NO: 242231 - DNA, 879 bp, Cannabis indica
aacacttaaaattaaaaaaaaaaaaaaaactcttaaacatgatgatatgtacatcatatggtggtaaatagtgaggcacgaagttatagcttcattacatgaattttgtctattttatcaattaaggttaggtaagagtaatgaaaacaaaggaataagattggaaatagaaataagattagatgaaataaaatttagggtgcgtttcataacctttatttaaataattttttattatttaattaaaaaagtgaagaaaaaaaaatacaaaaaacatatgtttggttatacttttttaatcatattttttaatttttaattagaaaagtgaaaatattttctaagaacatgttctaaaaaattgtttttgcttttcaatattttagttgagtaatcaaagttttaaaaaattttgaaaaaaaaaatcacttttaaaatttttttgaacaagttctttttcttaatcaatattttagactctgaccccaacttggaccttgacacctggactaagtggaccctggatccggacccgaccctggacccagaccttagactcgaccccagatccaaacactggactcgaacctggacctcggtctgaactcagacgcaaacctgaacctcgaactcgatccctgaccccaaataggggtgacaattcgtttttgcgggtcatgttcgtgtcgtgtcgagacccatatgtataacaggtacatgcctgacccgaacacgacgcgtttaataattgtgtcaaaaaattaaacccgaacacgacccgtttataaacgggttgacacgacacgacccgtgtaacccgtttataagcatattttatttaaacatgtcaactaattacacgtttatgaagtattcaac

SEQ ID NO: 242232 - DNA, 1630 bp, Cannabis indica
tatatatatatactaattctttttccttttgataaattaatattctttgattattaattggtatctaataagaatatgagtttgaatgccaaagctcttattgtctcatctaatcactacaagaaatgtcacttttgccagtacatttttgtgctggcaaaagttggtattgcgctggtaaaatagaatttacttgtgatgtgttggcaaaaggggattggcaaatcaatgttggtattagaacttttgccagcataaaatcaaaagtgccggtaaaaataacttttcccagtgcgtaaatgtgctggtaaaagttagattttagctactgtaaatgtacgttggtaaaactttgacctctttaccagcgcggtttgcgaactgcgttggtaaaagtgacatttcttgtagtgatcaatttttttaaaaaaaaaatataggattatgggcgcacatggatttttaaatgtaattaattctaattaaaatagaaaatataaagtcaattaaaagtacttgataaaatataatatctaattgaagaccttaattaaaaaaagaaaaagaaaatgacattttgtaacaaagtggtcctaattaagatattgagaatacaatttttctttggcctcaatataaatacataattaaattgtccattaaaaaactagtaatttaaagtctacccctgatttttgtttttatttcccggcagcaacaaaattaaaagcataaaaataatattaattattaaaggaatatatcatgtctcaaaattcaatttcataattaattaaagtaatattatttcttgatataaagatggggttagtttaaaagggatttgactatatgacaaagatcactattgagctccatggcatttcctataattaaaatatatattatagaataataaataaattgtagtgactactatatagttcccaaatcaagttgtagctagagataataattattttaaaaaaataaaaatacattaaatcaaattataaaatgagatttataaaagattgttttagtaaattttttatctgtttcgatatttaataaatttttttagtttaatatcttttttttataattgtgtacgttgctgctatatatttaggattacttataaatttttaaaaagaaaataaatattttatagtgtatattaaacataaagtttaaatattttgttatacacatggcacaagaactattttttcttatatgcgtgataaactactatttaaattatatttttgagaaaattttcaaatgattctaaataaatactgtaacgtccccacttcaaacttccatggggtccttacactcacggaatgaatagctcttatacacgagtacgtcactctagctgcttaatggaataacgactgaccctacaaaccaacacgagtgtttctagcgtgctttgtcctcactcacacgcttcctgggaaaacttcccaggaggtcacccatcctgaaattgctccaggccaagcacgcttaactttagagttctttcgtgatgggctactgaaaaacaagatgcaccttgttgatataggtagtaccaatcaatccatttaagccctcttcaactgtgtagtcccat

SEQ ID NO: 242233 - DNA, 1012 bp, Cannabis indica
ctatacactacgggtaagcaaaaatggtggttttaagactatgaacagtagagatattaaattcgatgaaaataattttctttgtttacctattgtctcatcttctacaggtgtctccaattcatctccacatattactgcacaacaacatcatgtaagtccttgcctttctcatgctggttcacctattgcttatgccactgacaatttctctattgaatcacctattattttagcaactgatttatcccctctacctaatcctgctccactagaacctggacaactttcacatcttatggtgacccactataaagcaggcataatcaaacctaaagtctacgttggccaatctaccttctcccttaatactcgtgaaccggtttcatttgttgtagccttaaagcataaagggtggtcatctgccatggatgacgaggtttatgcttttaagaaaacaacacatccacacttattcctcctcctcctcctcattgcaatattgttgggagtacatgggtctacaaattcaaattttacttagatggaactttctgaaggctgaaagcacgacttgttgcaaatcagtttcattaaagacccagtttggattatggagagacatttagttcattggtgaaggttgcaactatgagagtggttctaacaataattttggcttatgattgggaagctaggcaatttgatatcattaatttctttctaaatagaattattgatgaagatgtctttatgacacagctacttggttttgaagatcctcaacatcctcactttgtctgtaaattacataagtctcttcaaaacctcaaactggcacaaagagcctggtatgatcaacttagaaatacattgttgcaatggaattttgaaaatttaaaagttgattcattctttttttactcaagcacccaacatttgtgatcatggtcttaatatacgtgaatgatatcgtagttacaggaagtagttccagggaactcaatttatt

SEQ ID NO: 242234 - DNA, 519 bp, Cannabis indica
ttagcgagttatcctttgttgctcaaataattatttatttgagtaaatcttctattcccttccatcaagtaacaacttgttccttgtaatttttgccaattttttttaccttaatagccctatttgttgaatctttgacttttttttggatgaatttaatcattgtttacagcaagctttcttctaaatcgttaatcggattttgttttgaattataggaaaatatttggcagaatattgtacaagtgggtattctaaagtgacaaatttcataatttgggttcttattgagatttcttgcttgtgatattctggaaggtaaaaaaagtatctttcaaatcaataaattttctttcttaaatggcatttgttgtagcagagatgagtccattacttatgtttttgaatgagctatttatttgcaataattggaactacttttgctctgaacatgcccttcaaaatttctttgtggattggtgttcttctgactagttttttactttgattcttctagca

SEQ ID NO: 242235 - DNA, 1992 bp, Cannabis indica
taatgtgtttggctactcaagcatggtgttcttagagactatgaaataagtaattaaattaaaaaaacaatttcatgttagatgaaaaggagaagaattcaacagtactttattgagcccccaaagtatatggctaaatattaatattgaaccataaaagaatttagatatgacactgaacaattgagttctcaaaacaaatatgatgaaaattcaactaatctagataaagagtgttctttaacacagatagagaactaaagaaaaaatatacatatgtaaaagaaaattctcacgatacaaaaatagtagaaggagaaatgagaatactgaaatacaagatatattacctctccatgatactttaactggttttcccggatccgatttaagaccacttaacaacgagcagcatttgcagcccatgaatagagtgttaagaaatcgctgaatttatttacctttcttcggcccaagcagtgttcttatcttcttgagtctctttttgatgattttgagtgtgaatgtgaatcaccagttgagtgtttctttctccttggagcagagtcgaccaacggtccagaccaagtttggatgggtgcttttgaataagagaagttggtggagctgaatgggacatcaggaggatcaaaaacaggatcaatgtgatgcgatgaacccaatggatagccgagtgttccatcttggtgaggaggaggaaacttttcacttttgctctttgcatttgcatgcgttattagacgccgtctctgttggaaaaaaaaaacatttgaatacagttatcaagttttgctaacttatcggagcacatgaccagtaccttttttcccctaatggctaaaagcctatattaaagcaacccaaatccaccttgttagtttaaatgaatagaaaagatataatgctgaaaggattagctaatgttacatacatccaggttggcttgaagctcagcattggcttctggagcaggcattgcccttacagctcggtcacgtgcacgggatctcttcacgccatctgcattagtcttgctagcagctcttaacctacattttagtcatataagaaaattttaggttatgagcttgtaagataattttgtgaatattgaaaggagggcataaccacgacgagaccaatcttggaagaagaaacatggaggatgagaatacgagatacaataaaattgtctaatgagtcagagtcaacagtcccagaaattgatctcaataagttttaagataaaaacaagaaagcataataaatggactcaaaatcagaaacaataacactgattcatattccaagagcaggaagagaaaaatgtcatagttggaattctttcagcctctaaaggatttttttttctcaattctctatttacgtggattgttgagaaagacattataatgaattgaacaaaaccattatttataagaacaatttcaaaataataaatcagtccactcatcaccttctagcttcttcgtctcgtagcttagcatccatctctttgcttggaggatatttcggaaggctagaaggatcacaagcgtaaggtttggttgtgaaaaactgcagaagacataaccatttaaccttgtttgccattgacatattcaaagtgtctaacacagagattataatgaaaggcaacttaaaagataaatttaaatctcacttcgctactcaatgcagcagttgcagtttggcgttctgctgggtcaattgctagaaggctttcaattagtggtaatgatgatgctggaaagtctttgtatgtctctgcaatacaccgtttgtatgattgttggggtttaaatatggttgcatgtggcaactttgacttcttccaatattcatctgaaggagaaccacataacttgaatatcttatgaagctgttccacctgattaaagagataaaaaatcatcagcaaaagaaacagacatatacacaaataacata

SEQ ID NO: 242236 - DNA, 527 bp, Cannabis indica
tctgatttcaggtcgttgaatcgaacctacagtaacattaattagttagtctcaaaaaatattaaccatatgatatatgttaattagtttctgattacaatttttcctcaatattattgattgacaattatatatttcgattgtaagtagtgtcgtttttgcattggtcatattgttatttttagagtagttattagatttaaggatttttgtctaattttattcaattttactaatttaagtgattgtttgtttactaaatcatgctttctaaatttgatatttattaaattatgcatctcgagctttaacatgttccaaatcatgtctctgaacttttatctattttagatttactttactaaaattggacaaaaatccttaaatccaacgattgatgaaattttaataaccttaaaggtttaggggcatcatttactatatgtcaaaatttgagggtaaaaattctaattaaccgtaatattgaagcagtaattaattaagtatttatattaattaattaatta

SEQ ID NO: 242237 - DNA, 931 bp, Cannabis indica
atgataattattataattcaatttttatatttatagctataattgttaaaattctttgtatttagtttgagttttagagactttaattagttgactttgatgaaataagaagtaaaaagttgtttgttttcctttgtgtgattattaatagttagttaatttttttttttaaattttgtacattgtagtaaatcgtgtctcttgaactttttttggcgttaaaaattcccctcgaactattgagattgttaaatttaaggattttgtctaattttattcaattttacagtttcagtaattgattatgtactaaaccatgctccccaaactttgatatctaccaaatgatgcacctcaaactttgatatgtatgcctcttgaacttttatccatattagaattttatactaaaattagacaaaagtccttaaatttaacagtctcaataattcgggagaatttttaacggccaaaaaagttcaggggagacgatttaatacatgtcaaagttcaggtgaaaaaattactaattagcctaatatttttatacaaattatttggtccatccataatttttttttagctaagtgtagatcattttcactcttttagtagcttagaaaatcccggagaccattttatatttataaggttcttatatttcatcttcctttgagtcatcaatatatacttagaattctattttttaagatgatatatattatatttatttaaaatattttgtaaaattttaaaaaatttaaaataattttatgctatgaaaataaattttaaaaattttatctatatttaactattttattttataaacgtgtaaaatatattatttaaactctattttttttactaaaaattattataaatttcttaaaaaatttataatatacattaaatattataatatacacta

SEQ ID NO: 242238 - DNA, 1621 bp, Cannabis indica
aataattaaaattttgaaaacataaattagtgtgactttattgatttcttacttttttatatttgtaaaggtcttttagcattaacatatttgttttaatacattgagttatactataattatcttgtattttcaaaagttattattataatagtataaagttattattgattttgtcccgtgatgtattttttatggaatgtattccgtgatgtacggaatacattagagagatcttagggtacgtaataatgggtctcagtgtacgttatcactttttaaccctaattacccttagataaactccagccctcagatcaaataactctctcatctaacagctgtcgtacattacagaatgtattcagtaaaaatatattacggaataaaatcgtgtccctatataaataattttatttttgtacaaatttttttcctttaattgtttttaaaatttacaggaggacatacacatgatcattaacaaaaaaatgaataaaaattccttgttagatgccaaaacagaaagaaagtacgccaaaatgacaattttagaggatttactatcgtatcatctgtagaattacagtaaaatcaatttctttgggtaaataattttatttttcaaaggaagagtggtgtggtggtgcatggtaagagtgtgagggggagtacttaaagtgcagcgcatgatagcaatctccagcggaagcttagctgaggtagtcaatgcgcaatgcgcatattaaaataaggaaattttcagaagaaaaaaaaatggcgctaaatgacaaaacaacataagtagtggagccgttgactttttatttaaacagcatctccttttgtttttgtttttttattcattttctttgtttcacttttttctggtaatgattatttttatatttacattttattaataattattttaattattataatgttgaaacttggagcctaaagcattcattacttgggaataaagtaagtcaaaaatgatgaaactagtgcccaagagtcaactcttttttttaatgctacgtaattgaatttcatcataactactgttaccactattaggctcattttacatttacagtacattataaacgcctattaaaaagttacatatacagttcaactccaggataattatatatttgaaaattattatgggtaaaaaaaaaacttatgtatattgcattacgagaagattggcaaattggacgaaaggctgacaaatttcaacggagcaaacaaaagagcccaagctagaaaacattaatagagaagaaattacactctatgtattttttatatttttctcttttatttttacttcattttttaaaagtctatcatttttacttcttttttcaaatattgtaccaaatttacctctatcacttcaagatactcttcatgtgactctcttatgtaagaatattttgggtacaatacatataaaatatgtttcgattaaatataaaattaaaggtaaatttgatcaattgattaataaaagtagtatttttaacttaccccaaaattaaagggctaattaaggtaaccttcaaccttgagaaagaaacgagaaaatactaaattattataaaaa

SEQ ID NO: 242239 - DNA, 975 bp, Cannabis indica
tcaaaaaggcaatactcgagaaaatgggtccaccaaaccaattatgtctatattacatatatgttatagtagtttatagaatcttaaaatgttgaagttgatgattgaaaagtatctagaaatggtgaaaaagtaatggtgaggaatattcattgaatattcaatcatatggcttcatatatttttgaaaagtatcacgctttaatgatccaagagcaagtggtgacgaacatgtttcagatcttatcaacaaccagtggtgactggcttgaccgagtaatatgttgtagaagtgagatattaaaatcatacggcttaaacttcccatgttttgctttctcatagaattgtctaaaaaagaatatttcgtaattttttttttttaaaaaagaatattttattaaaaataatcaagtctaacacatcttaggaattacaaaagcatagctaaattaggaataggacaattataaattaaagaaactgtaggaaaatactttggatatatttggtaatagatttattcattttttattctaaaaaaaaaaggaaaattgttaataaaactagaaaaacaagtgacaaagtctaatttggactagcaatagagggtcactgtcccatttcaaatatatgctttaacttcaaaacatacttagcaagacatgagtaagaaggttaacatctttacatacacttatccactactttatttagttggcttataaaatattagaatgacctcttttttactattttgataaaatagctatttcattaataaattttcattacatccagttaaaggcacctttaagatttccttaaactagattattttttaagattagattattaataatccttcctttgcgcttacacaagtcgtttatgcacattgcaattatatcccccaaattagtgatgatacattctctatttaaatacagaacgttcaagttcatttccttttca

SEQ ID NO: 242240 - DNA, 995 bp, Cannabis indica
attactaattatatagaactcaatacttaaatacactaataacaatatgacactttgaaagatgttaagcaccattagtatcttttaacatttttttttaaacattgctattaagcactagtagtactttgtttaacaccatctgaaagtgacacattttgattggttaacaatattccataaaaattataacaaaaaattatacaggactctcaatcttattagctgccatattatccaaacaattaaggtaaaaagaacaacaaacattgaaattggaagccaaatgccactatagccacatgttgccttatagcaatctctatcaaactattctcatacattactcatgggacttgaaacatactaagtacaagtaattcaaccgtgttatataaggaacacaacaaatagtgtactaaaatacaaagctacaaaatagtgtggtttaagagactctaatttaacaatgacaagagatttggtaaactaaatgtaatacacaaaaaaaaacacaacaaatttgcagtaataatcaaatatagttcttctgcacttcttcagttagtatctgcctaatcatgtactctattcctctataataataatacttcacatccctccttacctgtacaaaagtaacagatttttcaagcacaaattcgcttagttacaccacaaaattatgtaaaattatgcttgaaaattgaatttaaaaaatatatggaaaaagtaacggtatggaaattaaaaaaacaaaaaaaaaaattctcatatttgatgatgaaagaaaaagaataatttgcggcataaatatctaagtttaactctcggttgcacataaatacttaagcttaatttttgacagtaataatactttcggaatttccgtaggtacttaaccgttaagtgtaaagtcaatagtcatgtgatagtttctaattggtttaggtcattaaatttttatttaaaaattaatttaaatatacaaataa

SEQ ID NO: 242241 - DNA, 839 bp, Cannabis indica
tccatctggaccaaggcttttattcgcaggcataacaaaaaactgcttgttcaacttcttccaatgtaaaaatcttcgtcaatgcttcattcatgtcatctgtgaccactttctcaacaacttgtaacaactcctcaatactttcatctgttggcatcatagacgtaaagagtgcagaatagtatttctttgtgatatcacctatagtatcgttacttgtataccatatatgatcttcatttaataaacctaaaatacaaaaccaaattaacctcatacaattgatttgtaaagtacttatgagctaacatctcatattccaacttgcgtcagtttctctatatgtacatacaatcaattatgtgacttgtatccatcagttgttatctatttaggttaaagcataacaccttttagaacacaacctatattaaaaagcatattaacacaattattatacataaacagtcacattaagacctgaatttgaaaacaccttgcatcaacctattctgaaccactcttgaaaaaatcactagttgaactgttcgatatactatttgccctaattaaagcacattaaactatgttcaattgcatttatgttaaatttcttatccatactatacttcactctatatgtaaattgtaataataaatacctcgaattgtattattcttctttcgtgcatttgcctttttgtaaaaatatttggtattctgatcaccagtctgtaaccattggaccattgccctttgttttcagaagacctcttcctttaataacagatcgttaagtttattttctaatagcaaagatccttcgctggaacatcctt

SEQ ID NO: 242242 - DNA, 980 bp, Cannabis indica
acattactttcaaatgatttaaccatcataaattttgtcgtaaataataatataatcataacaacaaaattattataaattgttaaaaagaaaatcattaaaaaaaactatgatatttttagaaaaatagagaataaaactttaattgcaacactagcacttgattactaattaaacaaaatggtttttttttttggtaaggaaacaaatagtaaaattaattagaagcatttataattagaactaattaagcatctatagataatagattagctattaattaggtcaaacattaaataaagagattacttgaagtataattaatgaaaccttatcatgagttaaaaaatatatatatatatactataatcagaaatattaaaagtgtaattaattaatattaatcataatacatatatttaataaagaagaacaaagtcttaaagccaataaagtcaaatactattttattatacatatttgttttgaataaatataactaaaaaatttaaaaatttaatatatatttttttctacatacttctaattattgattactaaagggttaaatatatatatgtttggtgcttaaatagtgttgttaagctcaattagcatgaaaattctataatacacttctctaaagagattcatttaaggctggccctgaaattgagtggattttaaaagaaagaaaattattgaacctttcattaaaaaaaatatgtggtattttaaaaaataattaaaaaaatatgtataatttaaatggaaaatatttttttgggcccctaggttaggtaggccctaggcgtaggcctagcccgccttaacccctatctaatatgcatcaatgcagtcctatatatttcagtatctgtaacgtccccgctttaagcctctgttgttacacacacagaatgaatgactcttatacatgagtacgtcactccggctgcttcatggactgatgactgacc

SEQ ID NO: 242243 - DNA, 857 bp, Cannabis indica
  modified_base (820)..(820): a, c, t, g, unknown or other
ttattaattaatagttaccgaacagtccaaaaatataaaataaaacacaatcgaaagagtattgctataaattgggcaccaatatctagcacctctagatagtggcggagccagccacaaatattaggagggaatttttttttttgataaaaattacacttataaaaaaatattatttttattataaaaaaatataaattttatggagactagaatagatatatgagaatattaaatatgaaaatatgtgaagacaaaaataaaaaaatatacaaatttatatagtcaaaaaatgctaaaaaagataaaaaaaatgctaaaaaaacctattttacttaggattagatggggccgtcacgacgcataatttccatgcctaggcgcgccccctttatttgggcagtgagttttctgttgcatcaactgatcgtattttggccataactctttcgatattgctaggaatcggacgattcaagatgatctggaaagatgaaagagagatctagaacttttatgttttgaatttttccaaaatctaatcagaatatagtcgaattcaggcttgaagtttcaaatttattttttcgctcaattttctctattttcaagattatttatttctgagatctttttatcttttttttttccatcttattcctttaatattttctaatcttcttctattttaaatttgcaaaaataaaagatgaaaagcgtaaaattgctctaaacaagagtagaactaaattaaaaacacattaaaaattaacttaaaatactaaaacaactaacaatatatttatgtgtgcgtgtaatntatatcggtaaaaatttttaaatttttgttttttaac

SEQ ID NO: 242244 - DNA, 981 bp, Cannabis indica
ctttaacctgtgggaaacagttcgagtaaacagttaattacatttcttctaagaagaacaaaacagatagcatatcatgaggctcggtggtgcttacacaaacagcaacatctgatcccgaaaaaccttctgttttacgacctaagctttcaaaatcactttctgtcaagttgtgaggagtatctcccagatgcacctagcaatagttatcaaaagccaaaacatcaaactttaagccattgtttagattagataataaaagatcgactgtaatcattttaaattaccttgaacatatgttgtcgtgcctttgcatcgggtagaggaatataaattctcttgtaaaaaacgtcgccgaatagcctgcatttctactaattagccatagctacaaaaccgatcgcaagtggtttcaaaagaagacacgaaaagcttcatcgttttttttcttttacctggtctagagcatagggagtatttgtcgccgcaagtacaagtactttctgatcagtagttcctacgccctaaacatttgaaagataattcaagttaagcaacaagctgcaaatgagttcatcaactcttccataagagaaataaacaaataaagtccccacaataacaggcaatacaatttttaaaataaaccgaatagctaacgataaccatggaaattaggatacacccattttctcttaaatatactattatttgatacatcaggagcataattatatggaaaaagaacaaaatcttatgatacatctcaacaaacaagtaatatcgaggatctattgatgaagaacaaacttaaaaaagacaatttttattacacttatcatattaattttctcacagaaggaaataacattcattaaagtcgaggaagaaaaataggtaagtagatgaaaataagcaaccttccagagaaggactaagcccgaacacaatcagaaaaagaaaccaaatacacacaaccta

SEQ ID NO: 242245 - DNA, 903 bp, Cannabis indica
gattgttgaggatggcactcagagtggaaaagctaaacgacatacacgctttcactttgaggaagcatggtgtgaggaggatgaatgcaaggcaattgtggaaggtcattggaagagtggggagccgtgtgcaattgcgggttcttttcatggtaaaactcatcgggttgggaagatattgcatgggtggaataagaagaggaagaaggaattgaatggaaggatcactaaggataaaaaggttcttaatgaacttacattgattcaataacctgggagttgggtggagttaaagcaagcggagaagcatttaaatgtgttgttggaaaaagatgagcattattggagacaacgaagtcgagctatgtggttgaaatggggggataaaaacacaaagtactttcaccacaaagcttcggcaaggcgtaagaaaaatgacattagagaactgatggattcaatggggctgtggcaaacgaatgcggttatagttcagcgacttattgaagaatactttgataatatttttatggctttggaggtgaactcaagggtggttggagaggttctaacagttgtgacaccgaaagtgtctaatgacatgaatgcttttcttttggaaccgtttatggaggaggatgtggttcgggcggtcaaagatatgaatcctacgaaagcacctgggggggatgggttaccggcgctattttaccaaaagttttggagctctgtcaacaaagatgtggtgcgggtttgtttgaatattctgaataatggggcggatctgagttgtttgaatgagactattattgccttgattcctgaagtggagaaaccaactctggtggctgaatttcgcccgattagtttgtgtaatgtaatctataaagtggtttctaagtg

SEQ ID NO: 242246 - DNA, 594 bp, Cannabis indica
gataatttatgatttttttactttgcaatttacattataatttgcacaatattattttatattttttcgagcttacctctcaaatcgttttttatctttgtgcgatattaatgtgatttttttattcgttttgcttttagttgttcttcaaattttgtatcctcggaattgggaggttgactattggaagtctaactgtgagggtgaagtcttcacggtggatatgggcttggatgagatagaagaaacagaagttggtgcacaagattccacagtattcgagatacaagtaaaatagtttatcgaacatgttcaaagtgtaaaattcattccaccatcaccactgaaagaaccaacaaagttgttggcatcaaccactatgcctctaacctcaaatcctgcatccaataacgtcgactacctagggttggcaaagagattagagaaggttgaagcccaacaacttacgattctggctgcacagattgagatgaaggctacatttagagtattccgataaaggtgaagaatcttatcatggatcaacttaggaccatgaaaagtttattgcagaagcaaccatcatagccatca

SEQ ID NO: 242247 - DNA, 1336 bp, Cannabis indica
caaatgggtagggcgaggtcatcattcttacttctgttggcggcatgcgaggtatatgtgaaaacctctgacacttatcaaatttcctgaaaaactcatgggtgtccttattgatcattggccagtaatatccatttctaatgatctttttagataggctttgccaacttgcatgatccccacaaaagccttcatgaatttctcttatgatttcgttcgcttctgtagggagaacacaccgatgtagaggcatcaaataacctcttctatatagtttgccttcaattattgtgtagcaaggcaccaattacaatagtttttgtgcctcggttttgtcagttagaagtttcccgtcaagtagatagttgataataggagtcatccatgttggagagctgtctatcatctctacgtcttccgtttcacatatgcttggctcgcttagcatctctactggaactaagttcaattcatcaaagttgttctgcaaggccagttttgccatggcatcagcgttagagttttggtctcaaatttgctcgattttaaagtaatcgaatctttctaagttcttccgaaccttctctaaatactttgcctttctcaaacctttggcctggtattctcctagaacctagctcacaatcagctgtgaatcattatggaaaataagatttttgaccttcaatacctcggctatctttaagccagcaatcaaggcttcatactcagcctcgttatttgatgtgtcaattgaaatcttaaagcatagtgaaacttaaagccttctggtgatattaatattacccctgcacccgaaccctatcattggatgcaccatccacgtataacttccaagtttttgcgtctcagtgaacaggcgaaatttcttctggagttataccttctattaagaagtctgccaaggcttggccctcgatggaagtttgagggtggtatgttatgtcgaactatcccagttcaatcgaccattttatcaatcttccagaagcatatagttttgataaaacttgtctcaagggctgctcggttaacacttttatggggtgtgcctggaagtacggccgtagcttgcgagacgcgtggactaggcacaaagtgagcttttctagagggtgatatctagactctgcccctagtaaccttttgcttacgtagtaaataggttgatggtgcttaccctcttctcgcactatagccgcactaatcacattttccgagatagccagataaaggagtaaggtttttctagttattggtttcgccaacagtggaggcatcgctaggtgctttttttatattctgaaaggcctct

SEQ ID NO: 242248 - DNA, 451 bp, Cannabis indica
tccaacatggcataccattgttatgaagcttgtttgaggctataaaggttcttttgcagtttgcatactacatttttaggaatagttccttttcgggtgtacccttggagtaatttcatgtaaatatcttcatgtagttcaccatagaggaaggcattgtttatatccatgtgatggagatgccaacttttgattgcagcaagtgcaaataatagttttagagtgttgaatttggccacagaggcataagtttcaaagtaatctactccttgttgttgtgtgtagcctttggctactaatcgagctttgaatcgttcaacagagccatcagggttctatttgattctatacacccatttgttactgatgacatgttgtcctagaggtaggcgagctacaatctaagtgtcattagcttctaaggcattgatttcagtatccattaattggt

SEQ ID NO: 242249 - DNA, 520 bp, Cannabis indica
agtagataccggttgtttctttagaccaagaccaacaatcctccatccttgagtcacacaattgaatggataaaattaaggctttatcatgaggattaaaaatatcattgatcacctccatatcccaaacttttcgatccatctgcattaggctatcaaccgttcttccttcaaggctcggatgataagtggtgacaaatttattgtccaaatcgggtagccaagggtctaccataatagaagtggatttcccatcacctatagaccttaaaacacccatctgaagcaaagatttggcctccaggacactacgccaaatgaaactcgggtttggacccaattcagcagataagaaattgcccctaggaaaatatctagctttataaacctttgccaccaaagaattatcattagttagcaactgccacccttgcttccccaaaaaagccagattataatcccgaagattttgaaaaccaagccctccagcatccttgtggcgacatagtttacgccaact

SEQ ID NO: 242250 - DNA, 707 bp, Cannabis indica
gttttttcacttatgattacttagttagaacgtgaaaatgagggattctgtgctgattttgacatataatcttgcttagtagactgtgattatatgttgatttttgctcatcatagataagttccctttgcagaagttctgtttagatcttacatagactttaagaagttcacaagtagattgtatagttatttaaataaatgaatcttcatcattagtcattagcctccatagtaaattataaatgtagagctcttataaatgcaattattttcttataaatcttttcccttaataattgttaaattactgtttttctatatgtttcttacggtaggttatgcgtctgtggtcgttaggaaactataaatgtttggaagaatattcaacaccagactcaacctctgtagttgacttcgattttgatgaatctaaggtaacttgaatacatcagcaaatcattgaataaaagtgttgattgaaacgtgcttgcacttatagttcatggttttctttcctatgttagtgacattgtttgtgtttcgtagattgttggattacttggcagtcgtatatgtatatggaggcgagatggggcaagaagtgtatttcctcctcgtgagggtaccttttccaagggtttatgcatgcggtatggtgcttcatcctctcattttcacgtggtcatttgataaaaatgtagtaaa

SEQ ID NO: 242251 - DNA, 2172 bp, Cannabis indica
ttttgtttcttaagtagttctaatttttcaatgttacatttttcttttattgctcaaaattcaaattaggattttgagaaaatgttgtttgttttgttttgggctgcagattatggatgacatattcgtatcagaaatgcagaacttgcgcgggaattctctgcacgggaaagaactggagctaccggcatccataagagaaatccattccatgctccgcaaggatgctttgtaagaaatttagtcccttatttatattattttcatattttaagtagtcatcacggcctccgtggtcactaattttttgtttctcaacaattcttcttctttttattattacatatttaaaatataatttttttttcctattctaacttactagtgaggaaaatgtaaagtcttctgaggtcagaattttgtaacagcatagtatcatggatggttatactcaaaaaaaaaaaaatgttgagtattatgtatatataaagtttttgctacatacttatctcattcattcttttcatttttttcaaacaccttgtggttagaattcttattgttagttacatgtatatatctacatatacctgtatgtgtatttaatttatgaagacttgtacctattacctattagttattacgtctccactattgccacttgagaacattaataaaagacaaaagagaaaagttcaaaactccaactatataccaggtgtccccaaaaaatgggctataaaacattatttctataggttagttttgtcaccatggggcatgggccacacaacataatgcttatactaatcagtgtgccaccaaagcatgatatgccaactcatgatgctagtgcttacttccaagtctttcaccaaacaatgtgactaatataaaaggtattggcaagcaataatattacactaggaatcggataggcattctcaatttggtttgatgctattcaaataaatgcctatgtctatgtattaaacgttagtaggggagggttaccaagtcgttgaatgaattatttggagtttgacccaatgacattatgccaaaaatattaatggcatcagccacatgaaacagaaatacttaattaatcccatcatccactttcattattataacttataactcatagctatagggaacccataaatatgacatagaaaattaaaatttttatgatatttttgtaagggaaagaaaatatccaagttcagtacaaataaaaaacccaagttcagtgaatgcatcaaaacatcaaaccacgtgtatgggtggacctgattcaatcttctgagtcagaatcaaggaggctttatgggagaaaatgtcttttgtcttccatgagatttatgcataatgtaatcaaatgagtaattaaacgataataattaaaattagagtcatgacaatgaagaaaggaatagatccatgagcttcaaataaagccttggcattcggagaaaactgtaataaattagtgcaaaataagtaataaagccaataaaaaaaaggtcccacgcgcaaattttagctttactataaagaagaagagggcttccaaacgtgttgtatttggaaatgagcatgtgccagatgtcccccagttgtagtcaaatttttgttcctttctttttggtatattattattttagtcattttagtgggtttagttagtataacctaataaatgattatgtttaaaaattctttaccttttctgtcttttttttttcccgcaaagttacattttctgtttgttattgaaaattcgagcatagagttagcactgcctaaagtgttatgttgttgaccatgactgttggtaacaatttaagttctccaaatatttaaactggagtacttttcattttaacattacttttgaatgacgatgtgttgtggttgtagtagtatcattcttaatgagatgagaacactataactgataggcacatgatcccgagattgaccgaaaacgtggaagggaatttacaccaacactccacatgatccttctttagtaaccaaacaaaaaacaaattacttttgaatgtattaaatttacaatgactgtctttaggaaagcacttgagaaaattgaatagtgggaatatgtgctgatgaagagggcaattcattgatatatatatatat

SEQ ID NO: 242252 - DNA, 1018 bp, Cannabis indica
agatctagcgattttagtgaattttgttcttgtagctattaacatctattgggctcaagtaatgatacttccgaagaaagtgttaaaagctatattgactctatatgtagagcttttttatggacagaggtcacatagcccacgaaaaagataatctttggattaagtgagttcataaaatttatatgaagaaggaaaattggtgggattatcaacctcaccatgccaatgggtggtgttggaagaaggtgttgccggtgcgggatacactcaaaggtgtttattttaaaaagcagacggagactgtgtcttattcaataaaagaattttgtaaaagactttttgagacttcaaaagggaagacatggtatccgagtaagatctggatgcgataaagtgtttcaaagcatagatacatcacatgaattgcagcttgaaataggctcaaaactagagataaatttcacaaaatggggataatagagcctacaaactactatatatgtgggaaagaacaagagactcacaatcacctattttttcaatgtgattttagtttgcaatgttctaaacaggtgtggaactgggcaagctttagatttaatcaataaagattctaatactttgtgtacatgatatggaaagctaaaaaatagaactatatggaatcaaaatgtgtctcaacagtaacaagtttttttaatgaattagaaatatgagtttgggacaaaaaagtatagtgataagtgatagattgtggattgaaaacttgattgggacatttaattgtatataaatgaccaattggtataagtttcaaagctgtacagtttgatggagtaataaaagtgaactaaacttaccaaaaaaaactgataatgtataaaaatttaataacatatatatgatgcctaccaattaatttaaaatagaatctcctacatttataatagcatgtacctcacctttaaaatcacatttttaacattgctttttttttaaaatatattatattata

SEQ ID NO: 242253 - DNA, 905 bp, Cannabis indica
ttttgttagtaatgtcatttttgtagggttttaaggaattgggcaatgtacaaattaagagtattgaaaaagggcatatgtgtaaaattctaagatgtatattatgttatgttatgaaatattaagatggaggagattaaaacaaagtactatgatgtgttgttgtttgttttgattgtgatattgaaaatgaaaatggcatcaagttgtggtcccttattatacactctcactttcaccaagtaagtaaaggtgatcatgatgattatgagtcatcccataatgccacacaccattattacatcactactccttcaccattacttttaaccttcttttttataattaaaataaaataataatataattaaagatagaactaaaataatttataagataagtagatcttggatgaatttcttttatttttagagaaattataagttttagttgtatgacgatttctattaaagttacaataaattttttattaattttataaaaatatatattttattatgttgaaaataaatttatacgcacgttaaaaaatttaactttaattttgttactaaaaattattcatatagtattatgtgttaataaatataatgtatacaatcatatcaaaaaaaatatataatttcccatataagaaaacaaccacgataatgttattcataatatttttaataataataaaaaaagacatttggagtttcccaattgggttctacttctacctcttgcaataacaaacacaaataatttattaaagaaatacacactcaaacttataacatctacttgtgttgtttgttggccaagaatctaatataaaaatgttaaatttcacttgtatatgtataacatacgaacttaggatgagttatgaaaaaaaaaag

SEQ ID NO: 242254 - DNA, 8107 bp, Cannabis indica
attaggataatttcgtttataaataagaatccaacgatgcttcgattagcgaaagtcaaagtaatcttatttatataatcttcttgtttcatatcgtaaaaatactagtctaaggtgtcatcaattgatgaacagctagatgtcgcatatacaatataggtcggagatgtcccttaacggggatgggaacggggggagcactccccgccaattccccgccccgtgtgcatccctagtcataacacgtataggtcggattattattaagttttatcttgacaaaaaatcaattcaaggtcccatttgtcatattttaaataatacatggcctattttatcatttaacaaaacagaatgtctaatctgtaacttttgcaaaatataacgtctaaaatgatatttactcaaataattatcatgtcaaaattttttgtttcaatttatataaattaattcttcaaatatttgttcctattttatatacacatgaatattattaacataagaaattcatttatatttatttattcatttgttcactaatatttttttacccaaataaatatattactatacatttaaaaaaaacaaataatattcatattaaaatcctttaaatatggatagtacatatattaatttaacttcttatatttataatttagtctaaattttaaaatatacattattcatgtttttgataataataataataataataataataataataataagctttaatatgatatgatctaagttaattagtattaagagtcctaattaatctttaaatctcaaatcataaattgaaatttacttcaaatattcaaaacccttttccccaaatcaaaaattcattctctctcccaaaattgatgatccaattttcgtgttgacttcaatccatggcagtaagcttcaaattcagaagctccttgatttttgacaccgtccatatcgacgatggtcgaccttcaatttctgttcgcgatctcaaatccaagattatccgattcaaaaatctcaatttttgtcaagattttgatcttctactatctgatgctctcactggtcaaggttagctttcaattttcgattggtttgtatttgataaatatccgaaccctagtttagttcatagggattttttgagatttttgattttgatttttggttaatggcagagtatattgaggacaactttcaaattcccgatggttccagtgtgataatcaagagagttcctgctgaattggttcaaggaaacatgtatgattctgggaatttgattaactttctccctaagctaatttcttaacttgtgttttacttttccttttaattttgttacagtgctggacctatctctaatccacacgagaatcttcggatgaatgaaaccttgaagctcaatccatttaattcacaggtacttttgcatatatgttatactgttttccaattttcaagtgttgactcatttaatttctttactaatagaaggcaaattcaaattgaattaactaggaattcggcttccattagtaattttatgacgatttgataatacttgggattctcgaactgttctattatttgtgaacagtagcaatttaagtttaaggaaataattcatgagatttatgttactaagccttaactcgggttttggtaacagtgtaaatgttgtgtttggtgtgtgactaaatttatcaaaaaagtttaagaaataagaaagtgtggatctcaaattgttagtttcttgcctcacttttcattttggtattgttttttacttaacagaatgccgagacactcgattttgatgactttggggttgatttgtatcctgttgaggcgaccttatctagttccaatcttgatgagaagaggacttgcatcaatagtgaccctccgaaatttggcactgcatcaatgtatactcacgcttatatacactttttttgtgaatattttttacttgacattgaaatacaattaaacttttgattactaaaacattgtttatttgcagatgttccgagtctcctttgaaagaatgtcagaaacttgatgggagcgatctcagtaatgctgttccagaatgtatgttatgttcttgattgtattttgaaaatatttactctcgtagagatctatatttagtaaattttaattttgtttttaggtcctgccaatgatgcgaatgagggggatttgtttcagaagaagtcggagcctaaacttcagaatgaaatgaaaaagtagggtatcgtttgttagtatatttatttggtcttagaaaatatcaatacgaattgtttatattatgttttgttgttaaggaactgattatatgagccatttggaaattctagggtggataacacaaaagctcaagctttgctagatgtcaatctcccttcagagcttaaatgctccatctgcaatttgttttttaaggaagcggtgatgattccttgttgccagcatagtttttgtcataaatgtaagtgtatttctttttttactgcagcattgttgaactttattttactcatgaaaaatgaataagaacaattgttagctgtgttatttaagtcatctctgtgattgttctgagtttgttttcaggcatttatcaagtgcttctcgagaagaaaagttgtcctaaatgtttctctaccaaatatagagtacaagatctcttgccaaatctttctcttaggcaagcaattgagcattttcttgagtcccaaaatttaactgctgattcaggcaacgattgtcagcgatatgcccctggtaggtatcttatacaagttgaagtgttatcaaagtctgaatgggaaacacaatttaataatttattatttaacttggcttgcagatggagagtctggaattcaagctaaagatgtctcatgtggtgtgtccgtctttcgaagagcattagagttgcctcactctccctctgaaactgggaagggatcaaatcatatatttgtagaatcacctagtaaatcaaaattgccatttaaaatgaatgtgtacaaccattatggaagcaatgatactttgaaatcacctcctttgttacacaagatgaagcatatagataaaattggacccggggatgtggtggattttgatgatttccaaggagaaagccagcccatgtttgatgaaggtatcgtgttatggattttctattttattttatttaccttctgcccagaattttctctcctggaaaaatttattattcttttgttgttcagggatagaacaatttcattttatttctttagctcttaatatataattttcatctatgacagtgcctgctgctaaatctatgatgaagagaaagagggaaggctggactgataatgaaggtaggatctgtattttttgcactacagatatattctaaaaccatttcttgtgatgtaataaattataacttttcaggtggacatatgaccaatattgagtctgcaaaacacaaaaaggtgagtggacaatttatttctacaccttaaaaagttacatgaacaactagatgatgttcaaataatatctcatatgctttaatatgtatatgtatcctctctcgctttttcttttttgcttcagactggtatgagcttaatattgaagttgccatcatgattttttattctatttgaagcaaaattagatatctagaaaagaaatcaatttgtgcattatacattttagacatgttttagttcataaaaactgattcaaatctatcttgatgatttcagggtgctcgaacatgctactattgtggctctccagaccatttcattagagattgtccagctgctataataagcccacgtcccatgcctcagactggtatttagtcgatacctcgctttaacatctcatattttagacttgaagatgtgtgaatgctcacctattttggaaattacaggaagtgctatgtttcctgggactatgccaagctctgtgccatactggaatgggtctcctgtgccttatgcgaggccgtatggaaatttctatggcaatggtgggatgataccttttaatgcgtcgtttttcccatctgtcccttatgctgttcctacctatgtgtcaccaatgtatcacccggtgcctacttttgggtaattttctaatctgttcaccaatgttttcgtaagatgtcccataattattaatttgaaacaagtattgatatagttatatgatttttgccactcaaataactttgcagtgggtgcatgaggatgggaggtgtagcgccttcaggaggaactattgaaaaccatcgtgctagtcatcctgagttttcgggctttcaagaacatgagaagagtcgaatgctttcaaatcataattttaggaggtaagtatttgtggttctggatgtgcatgcaatggggactcttaggaaaatttgactcacttttgagcttctcacatagcaaatgactattttccaaattataaaaacatggttcatcaaattatcaacttagtttgttaacaaggtttatgttttaccataccaaaagtgggcctttccttcaaatattccttttctatgcattgaaatccttatagtttattttagtttatctaatatatatgttttatgtaatattatgcactacttttctccagagagctgtctccgactgacaaccaaactcgagatgttgatgagctgagtcgtgttggtcgcagagaaatatcctatgatcgcaaacctcgtgaaaagattttgagctactcagcagatacctctgcacaaggttgtcagaggaagcattatcgcagtaatcacattgatgatgaccaccgttcaactgatgaatatcatcacaagagcactccttcagtggttcgtggtagagaccagagacataatcatcggtcagaaagactaagctctgaagttgacaatctgccctgcagctccagttggaacggagatgagggcgaaaagcatcactataagagctcgaaaaggcatgatggagatagggagcgctctagcaccagtcgaaatgacgatgagaggaaaactcaccatcataaaagctctaaaaggcacgatgtaagaaaagagcattcgagttctaatattggtgtgaaaaagcataatcaaaatcataaagaagccgagcgaagtttgaaaaaatccaagtacaggtcaaagagtaacaactctgaatcaagttacgagaggtggaaaatgatcagcggatcagatgaagatggttcagaagactatcggtattataagaggaaaagaggacactgaataagaaaaaaagctatagaggggataatcattcccgagctatagcggtatatatgaaatgaagtacattttctacaattcgctgatcactctggtacactcattttttttgtaggtatttgtataaatttggtttttaatctctaagaagatgatggatttattagggtaattactttcatacaaaattagagattctttctgagctaatattggttttgatgatacagatgtagtacagcgggctttcggactatgaaactattgtttatgtattcgtgctaactttgttagtcttcacttttttgtttagcttagagatgttgaagatagccaggaattattaaccagtgcagcattgatatgctgagattcttgcagaggagaaccaaggtatgttttctttttctagaaccccgaaaaacaccaatttcttttatcgatttcgtgtgtgccaactgatgttaaaaacatcttttacttcatgatattatatcggttggtgtagaagaaattggtacaagaatttgtgtcaaattatttactccttttccatttatgctcctcttaaaagggtggctataatataattattggttttttttttaaattaaatattcttttagtaaaaattaaattaattgagtcaattatgagtaatatataatctagccaccctttaaactgagctgaaagatcgatgatggttttgttgctaaagtgatagcaaatgaaaattccacatgaattggtattattaaaaatatatatatatatatatatttataaattcgttattttcattagtacagtgttttaattttaatgtaattaaattattctagtcgttttttttttttaaaagaagttctctataattaattattttaaaaaaactgttgaattttttttttaattttgttttttggcaaaattcttgaaagttttttgttttattgaaataataataaatcctaatttttttagataacataaaaataatacaaaacttatgtgtacatatgtctattgtctccattatattaaattcggctatataataaaagttttttttttttgaaaaaaaaaatattacaatttaaattttttttttttgttaaagttaacagttaatactagtaccgttaaatcaattaattaattaattaatttttttttaacttttttaaatatttaaatttaatttaaaagtatcaacaaaattattgttttttatataaattttaatttaaatttaaattagatgttaattcaattaattaattatataaattataatatttaaattatttatttattttattgtttaataaaattagttagttagaattcataaaaaaaaagttagatataattttttataaataaatatgaaattaggttaaattttatgaatttaaaaatgttattaaattttattaaatttatcttttaaattaataattatggagtaatttgccgcataaatatttaagtttaatttttatttagtattaatacttaagttatatttttaaaaatttggtaagtatttaactgttaagtattaagtcaattgtcacgtgacaatttttgattggtccacatcattaaatttttattttataaaaaaattagattaaacatactaataagaaaatgacacgtggataatgatttgatatttaacgatgacgttcttacgaagttctaaaagtataatttaagtatttatttacaactgggagttaaacttatgtatttatgtcgtaaattactcgtaattaagtaatacaacataatttattgttgtaagttttttgtttttttttttttgtcaatatttgtctatgtagaaagcttattattatatataaaatatttattaagtatttgggagaggttaaaaaaaatgaagatatttcatgcaaaggaaaagagtaacatttacacttagaaccaaggtcaaattctattgttcttcacaaacaactagaagaacctttaatttctttactcgtattttagtgttcttaaagtatccacttctttttgctcatccaaggaagagagtattctatttattgtgacacaactagattttcatggtagaataagttgtcctcgacgattggttcgagataatgaaaagaaatgaaaatgaattaattttcgtttcactcatttgtttagttgtttaaagtactaaaatattattaagtatttaatagttttttatatttttttttatacattttaaatttaattcttatttttatttttatatttttattcttttcaaccaaatactatctaagaattagcattcaataataaaccaatagtggtaataccatcattatggtcatttaatatttgatagggcaacattaagtgtagaagttaagttgctttgcctttatccatatttttggggatacatatagctttttgttgaggtcgagttggtcttcatttacctttttatcctagagttgggccaataagcatgactattaggctatgttgtgccttatttggatcgatttattttttattctttgccactttatttagcataaatgcacgattaatttttttgttactaaatgataatcttgagggtaaatagcggcataagtacctaaagttttaagtttgtaagtagcataatttcaatgtttatttttagcggcataagtacccaatatttgtaaaactgtaatttttttctaatttcgtccttacaaattctgttattttcttaaatatgcc

SEQ ID NO: 242255 - DNA, 1119 bp, Cannabis indica
attcaataaataacagtataataaattatttaaatggctataaataattttcataattaatcataattaactgctaattttcaaattaaactaagcggtctttacatatagcttatcaaaccatgctctacgggcctcttttaattcatataaggccttagacaacttgcaaacatggattggattttaaattgttcatttacaaaacttgatggttggaccatgtaaattttctcctgtaagtctccatttaagaatgcattatcaacatctagttgcctcagtgtctagtgatttgtgatgacaatggtaagaatgaccttaatagtgacatgcttaacaataagatcgtctcaagcaagtgaggggcctagggtaaaaattgaaacgagaccttttttttacaattaaatttgatagaatatcagtttgatatttaattaattaaggatgtttataattactaataataaatgttcagtcaatagtttaaattacttatactgcataattttatataatatattaattaatctacaaaatttgtattattattaaaaacatttctaaatttaatgatttattgtacattgcatgtttctttactaatatttatatatcgtggtccatgttatctagcattttatatataaaaatctttggattttaaaattataaaagcaaaataagattttgtctcagttaagtttcgaactcaacacaagccaataattacactacttactagatatctacttccatcatggtgaaataatagcattacatttatatatattatattttctctgcatattatatatactaatttatatttttgggttcattttgggctcccaaatttagggggcttggggcctaggccccggtttccccacccttgggtcgggcctgcttaataactaaactaaaggtttcgtggtagtcaaactctgtttgtgttaggttatttttagtatttaatttagttttattttagtatatttttagtttagttttactcgtgtttgaaacatttttatgcttgttatcttttatttttgcagatttaaaatagatgaaaatttaaaaaatatcagcaaaaaaagataaaagattgca

SEQ ID NO: 242256 - DNA, 544 bp, Cannabis indica
tatatatctaaaacccttatattgtatttgcatctaagtcgtatcacctgatacgtatcacctgatacgttagcagtctctctgtttttgagagttcgttttgaggtttaggctttttgttcagttccgattggttctaaggtctacaatggcatccagtagcagtgaggaaagagtgttagatgcagggagagaaacgatttctttggatgaggaagagacggaagttttacggcttcaaggtatcaacacagaagaagtgtcgattgacaccagatggtgcttagtgggcaagcttttaacgggcagagtctcagattttaatgtgtttcaaaacatgatggtgttcctttggcagccgggaatgggaatgtacgtcaaggaacttaatccgaatctgtttctttttcaattctaccatgagattgatatacaaagagttattgacggaagcccgtggacatacgatcgcaaaccttttatctttacaaggttgaaggaaggagataacccaaggttgatcgaaattaacaatcttgatatg

SEQ ID NO: 242257 - DNA, 688 bp, Cannabis indica
ttttattttagttgtcttgttctgtcggaattctatgttttttagttttctttttttgtgttttagagacattttacgaaatctagcgacattagattatgctgaagcttagagatgacttgtcacaaaatctctgggacatgtagtggctaagttcacaacatgggccaatttatgcttaccatgtacaatttttgcgatatttgttgacattatttactacatgtattgatagtttagagttatatgttggttaagtagggagaattttgtcaacatattgcaatgtgatgcgactttcttatcgacagattttgtgattttttgcgacataacttgcttcttgacatattattcatcaactaatttttttcctttttttttacagatttaactatttttgtgattgtactgtgtgatgaggcttagaaagttaaaggttttaactagatattcaatgtcacaaatagtacaatgttaatatttgaggttgacaatactctaaagaatatgcatgaatttttttatgaagagttggatataaagcctcttgtgtatgaattgaaagtagaggtgtattacatgtaaatgaaaggaaatatgataccgttggaggttttagtataagatagtcaagtaagattgttcttaaaaatgaaggcaaaaatgagtgtggagaacttgctgc

SEQ ID NO: 242258 - DNA, 547 bp, Cannabis indica
acactgataacagagcttgcagctgtagtaagcatcgacattttaacgatgctgatcgaaattggtctgaaaaaatataatgcttgtgttatgaaaatgacaatatatttgtatatagagaaaattgaacaataacataaagttgttaatggagaatcccagttcaaaatgaataatcacagcattgtaaaccatatccaaaagcatcaaaataagaaagattacagagccattatcagacattcaaaagcttaaatgagttatttggaagaagatagtgctaagaataccagaacaatctcctcttttcaattttgcatttttccaatacaccaagaacataataacaacagatacatacataattatatgattctataaattactatacaaataatgaaattagccatattttctaattatgcataggagaagtttaacttagaagcctataaacataaagagataagttctaactcaaagacctaaagaactcctcaatctcatcaccattgactagaatttattaatttggaatttaattgaa

SEQ ID NO: 242259 - DNA, 1087 bp, Cannabis indica
ttgcacctcaagagcttggataacattaaggtattttactatcatataatattcttttgtttaagaacttatagatattaaatctatatataaatatttaaactaatgttgaaaatgttatatttctcatcttttaatagaagtacatgtattagaagagtttaaatatcttatatattcattcatagagaagtaagttctgagactttatgtgctgcggtgatataaggatgaaaacttgttaataaaataggaaaaatactatccgatttttttaaatatatttatcatattttctaagtaggaaagcgatctatcgttgaccctaaatctcacgtctataaatcctttctgccattaatattactattcacaattctttcctaactatctatttttctgtctatctcagtctctctctttcaaaaattatgaagaatgataaagttttcttcgaaagaaaagctacattgatgaaaaaagctagacaatttagtgaattgtgtgaatctcaaatttgtgttgtgtgttatgattccactgggaagttatttgtgtggccagaggattcgattagagctcattctgtcatttcaaattatatgaaaaattagagcaaagaagagaaataatagtgaagtaggcctctctaatgtgttggggaagaagttaagaaaactcgaagagaaagtgagtactactactcacgataatgttaccgttaatggggtttcatcaatacccatcatgaattgggatgaaaaactagctattttatccaaaaattcattgatgggtttggcacaatactttgaggctaagatcaaaggtttggatgaaaagattgagatgggtaaggggaaaagccaattaatagtttcacaaacccaaatccaaaataataatgatgatcatgatgggtttgatcaagatgactattttaattctcttccaacattaatgccactgcccccacctctgcttccatcaatgcctcagcattacggaccacttaactatgaggattatccttgtaatgacacggagtactcagaaagtcagtttgatgatggtcaaattcaagaat

SEQ ID NO: 242260 - DNA, 630 bp, Cannabis indica
ttataaagtgtgatataaaaatttaatagttataattaaatattatttaaattttaataatgctaataatttttatgtatagttatttataaaatattgttaagaagctatataaatataactaaagttattaaatatacatatagtttagtaattaaaaaaatatatatataaaaaagtaaattacgaatttagtccgtatataataaaaacgtgttggcgtgtctaagaaatacgggttgatacgaacaaagtacgatacaaatctgagcatgacacatcaaatcgtgatggacctttcctttaaaaataatgacatagtagcataaccctttttttttatagtacgacataaaaagtacgaataaatatgagtcgggctatagtacgacacacacaaatttacatcactaactagtacttgatagtaatgcccatatattaattactatttcattcttttttattgcatgattaaaattgttatatattgttttgtgtaaaaatatatataatttaaagagtaaattgtggcataaatacataatatttcaaattttatacatttaaatactttatttttatttttagaggtaaaaatactgaatacaattctcttacacccattac

SEQ ID NO: 242261 - DNA, 1093 bp, Cannabis indica
atcacaggttgtagggattttagtggatattatagtccttcttcctcttcttctagtgattatgttaaattctttaggcaggaaattatgccccaatctccctttttacttgtttttcaataaatgctaacactttatcttgtctcgtagaaatgaatttcgagcctcttgtccaaaaaaagggaaagaagaggctggccatctcggagaccccttcggacgtcgaggtggacccctaaagagggccacgaagactacggctaacaagaagcgagcctcccagaatgctaatctcgaggtccctgaaatagagacccaggatcaatccctcctccggcccatgcaagtaccgatgagcctactcccaaagcgacccaagcttctgcctcctcgagccaagccctcgaaactttggctatcgaggttggaaaaattggcccagagtacactgcagagtttggcgcaatatgctggcgtcatttcaagtctttcctcccccatgaatgggatttaatcaatcatggggatctgggggaatgctcacaaggagtttatctcatacctctcagtaaatttccttatctttcttttctcactcctgtttttttatccttcaaaatacttatgtatttttttgttggtttccagacatctttcatttcttttgtcgcctagcgacgaggcatggataagatcaagtatctggagggtgaggtccagaacttgataggcagcgcgaggttgtggctaagcaatggaatgatgcccaattggagattactcgccttactaaagatatcgaggggtgaagaagaatcttgaagctaccaagaaggaggcaaaggacaagaccgatgcatgcgagaagctccaagggaaacttgatgcagccaaggtaacacttgatgggaaagaggccaaaaccattgaacgatgcaacgtcgttggcctccataccatttacgaagcttggatggaaaatccaaagatggatacgagtttcttgggagaatttgagaggaaatccttgccttctgcgagaagactaagaaggaggaagaagatgccgaggcagctgttgggttttatgccc

SEQ ID NO: 242262 - DNA, 1648 bp, Cannabis indica
attttttaaaatttatatggaatgtaagttataaaaacataacacgtggctaattctaacaaattccaaccaagtactaaacatattagtaataagaaaatttaatatgtcgagtaaggacaagacaaataatacaaattacgaaaaaattacgtactatacggcaaataatataatcttaaattatattatcactgcaaaataatataaaattcactccctaattaaacattatattgaaatatataataatttattcaagaacaaacttaaataaaaaaaaaaaaacattgctgtggaaatcatgaaatgaaacaatcattcaagaaaaactagtcacaaaatacaacacaacaaaattacccaatcaaattgtggttgtggcctttgtcaaggacaagaatttcaccgatgaacccaacaacaacttagaagccttaatagtaaacgtatcatatcttaagaagagttccaccaaaagtaccctacacataagcagcaccagatcttttccaggacactgtttgttatcaaccgttggattctgagtctccctcccatttgaccaataaacatattgcaataacttctctccctcttctccaacaaatctatcactaacaaattcttctgggttatcaaaaatccttggatcttttgtagccaacggctgatatccaaagatcatttctcctttcttaatctgaaatgccacgtcatggctgttgactatcatatcctctttagccttaccatattgaaacggaactggagggtcaattctcaatgcctcatagattactgacttagtcaaactcattttattcaaagctgttatggtaaccccaccttgttccttaacaacggttctgatttcatcagccaattgtcgatgcaaactctctcctcctaatgcaacccacttgattaaacttggaaacaaagctttcatgccaccgtaagcattgaaaccagcaacgaaaaccaagttgtgacaagcttcatctcttttgatattgaaacgattctctgcttcgtcgaggattacacttgcagacgagtaaaaagcattgtaaagcttgtcgtatccggatttaaccagaaacgaaggtaaaggaaacgtgtgtagaaccaaatcttcgaacaaattaaggaacttcgaaagtcctaaggttatcagtggatggagttgaaagaagagccacttgtcgaaatctatgtttgcttttggtccaagcccatgttcagttgggttaccatcgcaaaagaggttaaagacgaagttaaaagacatgttatcacttaagtcattgaagttggcaacgttgttatctcttatgttgtcttcaatattagcgaaaagttcggataagcaagcacgaaagagagggatgaaagtgtcgtgtttggaggcgagagtagagagtatgaagcctttgattgctgcgtgtttgggctcagaagggtcaagataagcgcacacgcggtggccgccggtaaaggaggtggagggcatgaacgtgccgtcaaggacgttacgtttttcgatttttgagttgtcgagtaggacggaaaagctgacggcgtcaaggacggcaatgactttgggatttgaggagatgaatggaccaggaggcatgttggtacg

SEQ ID NO: 242263 - DNA, 776 bp, Cannabis indica
ttacaacacagatccgactaagcccatttgcaatgtaaaacctaaataaagtaaatcaaaaggccattatataaattgaacaattggaaatctagggtaatcttttttagaaaaaaggcaattacggaagactgttttacagggcacaaaaaaagaagaagatacctgattacagtgaggagccattgttgcagaagaagtcattttttagtaagcactacctaattgaaaatatattactacgctgtcaagctatctcttgtagtactcttcctggccatatatgcatacatgtatatagattatcattttgcttttactattgtatgaagtaaaaagttgtaaaatgcaacaacaatttaaaatttgtcagttgctacaatcactaaaatgcaacaacaatttctcttcttcacctacatgcatataatcattaaaatgcaactaaaacccaatttacatttagggctgtttatttcaacactgctttcagaaagttttatattagtattaatctcaagttaaaaagaaaaaagtaaatagcccagagcgaatttccattttgtaagaaaaaaaacgaaatgactccaaaaggcagagaaactatgaaataattgcagaaggaaaaatgtatttcccagaactgcagctaacactcaaacaatggacatatcattaagtcatctgcaaaaaatgtacttgtttccctagtccctcagtcaaagaaatatacagttctgtaaaaaggataggaaaaaccagaataaaggctacaa

SEQ ID NO: 242264 - DNA, 879 bp, Cannabis indica
catggtgataagggtcgggacatgtattcccagaaataattttgcatccgctgagcgatccacaaaattctctggagcctcccgttaaacgacatgcattgtagatatttctagcagtggttgttggacaacaactcttcgcctcaacttgaatttgtcccaaaacaaggctcactaacagaacactcacaataaccctagttttgccttccatattgatcttctattagtttttagttcactctactatatatcttcttacaaaatatttattatagagacactttgttattgatgaacttgttgatgaaactactagtatatatagccaacttatatagtagcaagctttacctactagtacctatcttatatcccacatttaaaatgattattgtaaaagtatataataaagtatcatcatgaagaagaaacatagatttttttttttttggtaagttaactttttcatttctatcaaacatacattagttacaacacatatataagttaaaataaaaaacttgtactataaaaaaataataagccaaaaccaaccatacatgtaaatcaacaatctaatctgaccaatctacaatgctgattttatgagttaaaaatatgagaaacatcaatcatttaaatttaaatggtcatactttaacttctatatacatactaacaaataataaatactattaggtattagatatacatcaaatttaagatactaacatgtgatagatactcttaagcacatatatattcgaaattatatatactaattcatatatatacttgtattatattatttatataatataatatttataattaagggaaaaataattaagcatgacaaaataatgtgtttgtcta

SEQ ID NO: 242265 - DNA, 675 bp, Cannabis indica
aacataattaccacccataagttttaaatttattacacattctttctaatacaataattaaaaaaacaacagaaacaaaacaatttctggactgaagaattaccttctgcgagcacgagcagtgaaaagcttgacaagctcatcggtagacatgtcaaggagagcatccaaatcaactcccctgaaagagaacttcttgaacgttctcttcttcggaactcctgcaacagcaacatcagcttcaacttcggcctgaaacatcaggacatagcaacaatgttagaatttgtaatgaaagcaaaaacgaaataaagatgaaagcttttcaaattgcaatgataacccaccatgattgcagaagctactctcggaacctaaattctaagttgaagacgacggagcgacgaccctgcctgagatttgtccttacctccggcgaatgcaacggcgtgtaagaccggcgaagaagatcgtcactggcctgagaagggtgttcgcacgcctcggagagaatggatagagaaaaatgatagtgaaaggaagggagggaggcggcacattgtagtgtgctgtgttgttatgtacgtgcctagttagggtttggtaaaagagaagggcattttacaaaaatactggatttagggtaatactttttaattttactgccacacgaca

SEQ ID NO: 242266 - DNA, 570 bp, Cannabis indica
agactttaattttatgttatgattgttttaatgtttgtttaagactttacttatttactatttaaaatttttcacttatttcgtgtcgactgctctaaagttttcaatctttttgacttaaagtcgataatttatcgatagaatgtcgataaattgtcgacaaacataaatatcagcaaatattcctaaatatcaacaacaatttaaattaattaggtgtattgtcgacaaaatatcaatattatatcgacaaattgtcgatacattgccaaatatatgcattttatttaaattactttatttatcgacatatcattgacaaactgtcgatattatgtcgacaaaggtcctccctgaccttcattcgcatgttatcgacattacatcgatattctattgacaaactgtcgataatatctagaaaacctaaatttcgtcagaaaaccagatctactatttcaaactaaaaatactagttccaacaaataccacgcacatataatgaaagcaaactacatactattactaatgtctaataaaatgcttaaaatacaacttacctattataat

SEQ ID NO: 242267 - DNA, 1650 bp, Cannabis indica
agtactgattgcaagccagagttaataaggtatattgacatacttctaaagtgtttactgcaaactcaagggcggcattagtttctgatggtccattctgtacaaaaaaagaaaaaaaaaaaggatgaacatgaaatttcataaatgtatagttcaacaattcaagtataggttactaaagcagctagtacaaaagatcggatacctcaagtggaggaacaagatttgccacatttcgaatcatgaaggcttctccaggttgaaatccaagaatgttggaagggcatacccttgagtctgcacaagcaatcaccatgaactgttcttgaacttgtaagtttgtacatagaatcaggcattgatttataagaaagattaagatgaacttagaaagaaggttcatacaaaataaaagagtaacaatacccaattggagcattaagagaaagatcgagaattcaagtttatgaataacataccttaggcacttgtacttcagcaagtctacgataatgctccaatttttccctgttaatacaaagtacaacatatataacttgtgcccaataaagtaaagtcagaactaaatttctcaaaacaaacatacttgttagctttcctatgtacttacatatatacacgcttcttaaaactcagaaacctctgtttaatatcatcaaacacctccacttcattcttaggttttggtacatttttcactataaactttgcactacttgaaacctccagcctcataattgagttcctggttttattttttagggaaaaaaaagagtgttgcagacatattaagaacatgttgcttgaagagtaaagaaagtcttttgaatatcaatcaaaacagtaataataaatacttacttgacagaagatacttgtactaaatttgtttgctcgatcctctggtaatttttttttaaaaaaagaagaagaagaagatattacaaaacagagaattttatacaattaaaaaataaaacataaaacaatgttaagaacaaactgagtctgaatcggagcgttttctgggaagacccagagagttacttgtcaacacgtgaaaagggtctctacaaactgatgaaggtagtagagcggccaaagatggactgatccaccgagcttttgagcctatataatgataataaggttcacaatatttgaacgaagtgatcattaatcaaaaactgaaaaatcattttgtatgtatattcaagaactgtaacgaaacagaaatcaaacagtcgataatttacttacagaggattggcaagaccatctctctctctccacttcccgcttgttagcatttacttaggatgtccaagcaatgttttattaataaggtgcataatatataattaatgaaactttgaggggcttttgaaacgtggcgacacttaaacattcttatccaattgccaacttttcttttatagtcatccaaaccagtagttggggattgggttacgttacgcactagtctaaaacacactcttccatcactataggctaattacactttctaaatttttttggatatcaaataataagggatatgatgaaaaatgcctttttttttttatcaattaattaaagggattatttcacaaaaatataaaaacaaca

SEQ ID NO: 242268 - DNA, 2268 bp, Cannabis indica
tcaatatattaattattttttccttattatttttttttcatgccaaactaaatacaataattttgattacaatactcattccaacagtaaactaaatattataattaattaatattatcatttttattctattacattactattactattattattactattaacattatatttctactacaccacatcaaacatcacctaaatgtatattcaaagagaaacttaagataataattattataattttaagaaatcatttttatacacgagtctcatctattaattaaaagtgaattattgtataaatgtatatatcattaaaaattttacaaatagtgtatcaaatattaaatttggcatatgagtttacttatacatatggacacttcccttcttttttttttctctctctctttaattctttggtttaaggattgaacgaaagaccctgtaattaaaaaggtattgaatgtgtgttgatggtggagagctatggatgaaagataagagtggtccaatctgtagaataattagatcatatatccctctctgtttttggtatatcatcataatcatcatcaaacatccatacatacattcaaagccattacaacttgtaatactttttcttctttcttctattaatcgtcaattaaagtacattgtttatatataagttataatcaataagtaaaaattgcattgaatatacgatgctgtttggttgaaaggaatgaaaatataaaaataccaatgagaatagaaatctgaataataataaaatagaataaaatttaaaatacataaaaaaaaaatcattctaccaaaatagtggaaagggtatccatttaaatgatattccaatactttaaaatacaatcaactagaaaaataaaatgaaaaagatgtattttattgtcgtaggtagtacctagctattaaatattaatccattaatcactttttaacgatgtaatttcatacttacacaattttaaaatcatcacttaatctctctagaaagatgtgagatttgcaaagcatacttgatctatctctttacatattacgaaaatctgagtgtcacaatgctaataaaactccccccattaatatagtacattttgtaagaaaaaattattctaataatatcccaaaattgtgataaattaaatttgacacttaataaaaaatattttagtacacaatataacatatataaaatttacattactatttttatttaatttttgtatatttttattatttaattaatatatttagttatatcattaaattattgattttttttattttttttcattataaaataagataataataataatttgactgcataattattttaacataatttagtttgacgtttgttttatatgaagatcaaaattcttatttcataatatgtattacccaattaagctgcacacctcattcaaattttaaaagaaagtctattatattaatagtgttaaattgtaattaatagtgttaaattatataattttaattctttttcaaaaaaaaaatataattttaattttgttttttttttatttctatttctagggagtccaatgggcgtggctcatgaccttgcccatttggttcaattgatggataataatgaacatgtttaatcgataataaatgaaatttttcattttctttaaaaaaaaaatgaatagttttaaaaagaattaattaagattaatgataccacatatatattaaatctttttattttttaatttttaaaatagaaaacaaaagtatgttttataatttttatttttaattttatataagtcgaattcaggtccgggtctagagctggaagcatggtacgagtttgagactagagcctaaaaaaaatgtttaagaaaactgtgaaagttaattttttttttttatttttaaaatttttaaaattttgatttttaattaaaatattaaaaagtgaaaacagttttatagaatatatttttagaaattatttttactttttttaattaaaaaataaaacagattaatgtattttaatttaaaattttaaatgaatgaagtgtccaactttaatttgaattgatagacatataatatggaatagaaatttagaattattacataagaaatataaatttacactttatttacaaaaatactttcataaggtgtgaacaacatttatacattttatgtgattttaattaccaaaatatctcttacacaatcagacaattgttg

SEQ ID NO: 242269 - DNA, 1177 bp, Cannabis indica
aataataataataataaacaaagttcaagttcaaggaaaatagccaaagtactctccttttttatgccaaaattaaattgaagagcaagagtgcaatgattctttcaatctcttccctatcacatgacgatgatgctttcttttttaatttttcccatgaaatgatgcttagctttcggattagcatggttatacaatttgtatattgtatttcatattgtatatacactattaatttattataaaattgagagacataatttcagttgcctaaaaggtgggtgttgctggtcataatgttttggaacatgacactgcatcctcttctaagtagtattttatataagtttattatgagttaataattttgatttgaagtatgattaatcttattatatatcctcatcatctaatattattagtaattataacactttctgatacttatctttaagagtgaaataatgtagaaagaaccaataatactagagagtatcccacatacattttcttcgttatttatacttattaggaccaaaagtttagaattattactcttgagtcttactaattaagcttatattgctaagaagatcataattaggatagagttggagacaacaagcaatacaactacataatttttaacaaaccaaaaaaaaaaaaaagactttgattttttaggttgaaatattattttattatcaatttgtttacctgatattatattgtgttgctttgttcaatttgatgacaaataatgtttgagtaatcaatatccatactgtaattgaatttcggataactaccacaagaagccgatttttctttattgacactcatcatttgattttattttagtaaatagattatattatattatgtggaacagactgctattgaaattaaacgaaaaacgaaattactgaataaaaactttaagattgagtcgcagactaagttattctgtatgagtactgaattttacagtacttgagcttgagcaaaaataacaatggatgaaagaagcagagagaaagagagaaaaagagagaatggaaaaatatagctcaactgaaatgaaacaagtggcaaagcttgacatttatatagagaagagtacagagtggatttaaccgacttacaacagatatatataaccacttattaactaatc

SEQ ID NO: 242270 - DNA, 577 bp, Cannabis indica
tttttagcttgatgatggatttttcagattgtttatgcttgttatggtctaagtaggtgatctagagcttttggtaagatttggagttgaattctttgagtaatgaggtttcttgtgtttttgcagtaaaaaatgggcaagctttttttatacctttttggcagttagagacccgaaaaaatggcttgttgtttttaagaaatggcttaccgtttcttgtggtgtttttctaaaaacctcatttttcagcgttttcttgatatctaggctttagtcatgctatttatcaatggaaacttttagttttgaatctaagtcctcaaaaagtgatttagcgtatcacttattagttttgcgtatgctgtgccttaggggcttgtaaaccgtcgagcaacagttccactcacattgactgacacacctaaatttagaatcgaggtaagattagtataatagtatcatatgtgattacatgtttagtgtgcatgtatatgaatgtatgttagctaacatatcagtaatagtggtattagtgtacatagagttacactgaataccgatggatatatgtttggca

SEQ ID NO: 242271 - DNA, 1179 bp, Cannabis indica
aaaaattaatatttaataaaaattattttttatttatatattttttaaaataaataaatcaacggcgaatgacaaaaaattcgtcattaatagacttacggattaaaaaataaaaaaaaattgcttctttttgccaacgacaaagtcgttggtaattatttttatcaccgacgactttaaatgttgccagtgtaatctatcaccaacgaggtatcaccatcgacttcatactgaagacatgtcaccaatgatattcattactaacgaaatatccaccttttactcatgaaatttatcctcattaaaaggcatgattctagtagtgttgaaagaactccatagttaagaatacttaatttgacataatttcaagataaaaagcatgtgattaaggacaaaatataccgaaaatatttgtgttgattaatagaaccaataagtaaaacatacaacatatatctatatttttttttctttatgaaagctatactagtacatggattgtgtggaataatatattataaaaaactttttcctcatatatatatggtttgataactgaattgttataaaattgaatccaacatatccaaaagtttaggaaaactatttttaatttttgataaaaagaagtgtaatgaccgcattttagattatggattagtaaaagcaactagtgctaattattaacatttttataattacgcacgaatttattatattgtgggtcccatttttagaaatgggcactagagttataatttctcgattccaaaaattttattaaactatatggatattatttgttgtatatatgaattatgcaattttttatgattttcgctcggtaatgacggaaaatgcgatggatggccgttagagtcacatgggtaagtctagaacctttttcttaatgggataaatatttgagatgaatagaataccgagtttgaggagggttatagtttttgacattttacccctaggcttgaattagcgtaagtttaagcgtcaagggcattttggtcattttattagtgaaatgtggtggctgtttggaagcttgacagttggctttttatacttcaactcagcctaggtttatccaataatttgtgaaattaaaaattaaagaaaaaggaaagaaaaacctaatttcctacatttctctctctctct

SEQ ID NO: 242272 - DNA, 660 bp, Cannabis indica
gtagagtactaataagttgaaatattttgtgatgaagcactgtgttgaacatcatctaaagtctttccagggacttgacatgtccccttttccgagacggatgagcatattgccgggtagcaacaagggtttgataaaaaattgcacctaccaccagtttcgatacacccatggataggggcacaatatcgattctcaccccaaaaccattcgccttcacaatacagtccgctacagcaaatcttgccttgtgcaacatgacaatattcaccaggtaccatacacctgttaggtaccaaattcagatgaatatccggttgtagtcgaccaaagcaccctacaaccatcacacccactactaacgccattacaataatcaacttcttcatcattcttttcttacttccctacactttcgatgattattaatctttatatttcttttggtagtttattttcgttttgatgtaatggacactgtatttataggagaaaaaacaactcttcacttaattgaaaatgtttttcttgatgtactgtgtggagtataatggatatatattgagtggtgcagaatgtccttacatgtaaagcccgcttagttaatttggaaattatcagttggttatgattatttaagaaattatttatagctattta

SEQ ID NO: 242273 - DNA, 531 bp, Cannabis indica
tgttatgatcgccatcccgtaaccaaagttgcttcgaccgctgccgccaaaaaacttctcgcttagcatatatctcaaacagttcattttgagcttcttgaaacttagttatggaggctgcgtctcgacccttcttccacaacttaatttccttcttacactgttgtattttactcttgaaattaccagtgtaacattgcccccaatccgcaagagctttaccacacaactcaattttttcagtcacagaagaagaattgctgaattcccaacagtcgctaactatctgcgtacacaacggctccctcagccaggcgttttcgaatctgaatctcttcttagcataagtgacatcaggttcgtaaggggaaaggagaataggagaatggtcgctgctggaaaactccaaattgaataacttcgctgatataaactccaaattattattattatggctaatttggatttttttttttcccgaacttcgacatgtaacaaatcatgtcccctgaatttttttggccgttaaaa

SEQ ID NO: 242274 - DNA, 644 bp, Cannabis indica
aaaaaaaaaaaaaaagagtagtcatagaaaatgatagggggtttaggactctgataggggtcccttaaatcaatttttgtttggcagaattcataatagttataataatgataattttaaaaggaatgaaagcgatttagatttttccttttaacgttttggctagcaattaattgtaggagatgccttttttctctcttcttcttttcaaatagacaaattctcactggctacactagctgactcgattagtaatgttttgatgagaaaagacaattcaaaaatccctaccaaaaaaagaattttctatggcaggtacattaaaaattacaacatgaatttgaactgcgtagcatacctttttgtaaaattgaaagcgtttcttgagagggtaaaaaggtaatcaacatttctctacggacaatttccatttcatatgtgatgaattcatgagatgttattgttaagcaaaattttttatatttagaacattaaaaataaatgcaaaacccaattttacttatgctaaattcatagtataagagtttattaagattcaactcatccaaaatgataagaataatctcttaattacaatctttttgtttaaaggaaataccttttgattccaattaagatgatat

SEQ ID NO: 242275 - DNA, 1073 bp, Cannabis indica
ttgagaccatcttattatcttgcttggtctgttaatcagtgtttgacatctaattattttaagctaattttgtttatttaaagcttaatacacatatatatatatcctaattttaccttattgagcttatttatactttactaaaatggttcattataattattaaaccaatatttgtgttgtatactaaagaatataaaataaaaaattataacaaagtaatgttgatacttgataatttgatgtaagctgtgtttgtctgaataataataattattgaaaggttagtattattgacttttgttgggtactatttgatctttattcatcaattttggagtcatactctctatctctctcctttggcatgcacatataaagttttgttttttagaccaaccaatatgaaatgtgtgatttaaatttaaattacttgttaaagagattgaaatcaagtggttatataagccccaaatttaaatatatatgcttcatgtttttcatcctgcaattttcttgaaaaatcatgtaaacataaataattcttctttaattagtttttattttaattatatttttaatataatatgttttttaatcttttattttgcagtttaagttagacgctccctacagtagtgaggagatcaatacagtacgggatgagggcaaacactaacgaaaacacccttttctgtagtagtgaaacttattggatatggggttgaaggtggaatgcaccttgttcttgatttgtctccacatgggagtcttttatctattctttatggtttgtcctcctctatataatgtttaaatgtatatttaaatatttctatgtacaactaggtgattatgaatctatatatatatatgtttggtatataaaattataaattgttaaagaaataaagtgtatactaccactgttctaagaaatgaaatatacacaattagttagtttgagtgactttttactattattgatgttttataatttgataatgcagttggggaaaattacataaaaaattgcgatttttccttacctacatttatgtttcattttataa

SEQ ID NO: 242276 - DNA, 693 bp, Cannabis indica
aaaaaaaaacaaaaaaagaaagtaaatcaatacctgcatatcaatgacaagcagagctgtgcgcttccatttctcagactcagtcattattgtctctttcaaagtcaaactatcgttttcgtcttttgaaaagtaaagaaagtactagtcgtaataatcgtcgtacatatctctatctctatatataataagaatgaaaagtgctttccactccttcttttcacctgcttagaaaaaaaatatattttatgattgggccacgtaacaactacttaatattccatgctaattcatataattacaagaggcatcaacttgtgatttgttagtaatttgttttcttagtattttgaatgatggtggatgagatgggacattaggtactaaaatattgagattttataataggataaattaatattattttgcgttttgtgttttataaaaattatttattaaattctctgtttttgttaaatgacaaaatatactctatattttttaaaatggtaaaaataagattctaaacttaatttttaataattttaatttttaatataaccaattttaagataatttctaacacgaacagatataaaaaatataaccagttttatcataacatctctagaaaagattattattaagttttatttttacaaaaaattaattcaggatcctatttataaaatt

SEQ ID NO: 242277 - DNA, 2062 bp, Cannabis indica
tgactaaaagtcacatttaatcataaaaaattatattatgactaaaaagttgtcactaaaagttagcaattttttgccgtgcatgtttttgcttttcatgtaatcttagagaactcactttgcgatcattttggtattcactacaatgttatcgtcatataaacaagtagtagtattattaagttttaaattttaatttgacttaataaccttgctgaatttttaaattacaaaattaaataagtgtaataattttaaattaagggttataatatataataaaatttcaattataaaattatatatgctataagtttaaattataaagagttttgttataaatattttaataatttaaatctaaaaaaattgctaaaagatctttgttaatttaataataaattataaagaattaattaataattataaataatttaatgtaaaaatataattaatgttaattaaagttttataaaacaaatatcaagttactatcaagttacaagttatttttatttaatttttaaattaattataactatttaatagtgatatattgaatgactaaaaaaatataatcatgatagttatatagttaatgtaaccattgaaatttcttacatatatatagtactatagatctctaattctcaactcaaccctccaaatacctttttgtttatttgaggttattctctatttcttagagtaaaagacaatacagagagctaattttagcatttcttggttcaaatgttatacagattatggtatataatcacttttattttatttccttattatagagcatcatgtgtgtgatctcttattcttcttttccactctctcctgagtctcctcttatatataaaaattaaagcacacaaaaataatgtgtgatcatataaaaccattttattataactataatgtacgtgtgtgagaactactataattatgaaccgtaatattacttttaaaccattagaattggcctaatatataaagatgcccatgcagtggagataaaaacatatattaaatggaaaaagaaactatatacatcgaatatgtgtgattaatatttatcataaagtaaactatgggtacgtacaggtgattctaaagtatatatattgatttagcatgtttccttgcataatacgtaaactccatactccatactccataattagtattaatatttcctcttatcgttctcattttttgtggaagttaggtaagtatatttattagctttacttctaaaaaaagtatagtttatttcgaattgtatagtaaacaatataaactttttagggacaaagagttctgttttgtgtcaaaaagtaatttattattttaaagatgttttggacccaagagtaattaagcccatactttcggccttaaagaaatccactgaagattataaggtttttgtcaagcaattttgtttactttatttggtatcaattaattatatataatattttccttctatagattttatgtgcaagtagataaggcacatattaaatatttctatcaatacacacttattttggattaaacaaagagaatccatgtgcaccatcccattatttgattccttagtgtgttttttaatgtctgtattattatgattgtattataattataagttaagcaatgtttctttttgaagactagacctgtaaagtctaatccaataaatctaaacataaacctatataattgattatgcttatctttaattaggccaaacgaccaatcactgaaaaaacaaatatatactttttgggtatggagttgttcggataatgagtaatatataatatcaacgccctataataatcaataatggatacgatctcctatggtgggtcccttattactcaacctccaacaaaatcgattgggcctccataaatggacactaagtccaattaagaaggaccttgcacatttatttatggtttttacaaaaatactatatttttggtaaaattaataattttactaatatacggaattttatacaaaaatactgttttttttt

SEQ ID NO: 242278 - DNA, 4593 bp, Cannabis indica
aaaaagtaaataaaacacaaaagccataaactaaaaacattattctattatgccattaaaaagcaaacaacaacaaaaataccatatttcatgtaatttctacaatgagtttctataattaggcctaaacacatttacaactagaatgaactctctatactacgacactagttgctgaatcttcgcttatctcacatatatattgactaacattgagagtttttatatgtaatttctctggtcgaaaatgaaatcaatcacttatccaaattgtctaaatgcttaaacatatacatggcgatgataataaacttaaacttttaagtacaatttagcaaattaaatacatagcggaacctaaagcaaaacatagatacgttaaaaggaacagagtgagaaatatttacagtagaaatcctcaaaaagaatatctacaaaagcgtacaaatctaagcttcggacactgaatacaaaattcatccacgtgtatcttcattgttaatgctgcctggaggaacgaaagcaacagcagctctagatctactgttaagatatcaaacctgaagtcttccaaaatccaaatgctaaaaatgttcattcatcctcagatccagatgataaattgtatgtgcgcgtaatacgaatctggacaaaaaaagaaaatagattagataagatttctggataaaccagattgcattattttgttgatctttattttgatttttattttactttccgtctgcatgttaatgttcaaaaagttatcagattcaatcatgacccatgacatgattattctagctttgtaagtgcctgtaacatagatatgtaaaattcatgtatgaaacgaacaaaaacatgacagcaactccatcctaatgaataaggagtctcctaataaaggctgacaaatgtgtaacaatgatgagtgaaaaaagtaaagttacaaagcatgaaatgatgtaaatacctgggcaaacgcataaattgctcgtatgattctagcataatccgttcctagcatttgaatgacaacatcggccagaaatgttccccaaagcctgcaagcatccagacatgagtaaaatcaaatggccaggtagacataacatgtaattgaggacgaaaaaaattaaagcagcaaaccagcattcagactttgaagatgcagtctaacaaaatagcctagttttgacataaaaatcccttgttatgaagagagaaaaagggactgtaaaataagcaaagatactgtagaaaaatatcttgcaagccacttttgcttaaagcgaaccaaaatatccagcaacaaaataagatagatttctaagcaagaacaaacgtagtaataataatgttgagatgatttagaactctataatttcatatctttatcattccacatcatatacatgaatatgtaacatgatcaacatataccacctatctaagaattttaaaggtagtatgaagtacctagttgaatagtctaaatcaaaacacaaaattaagtgtgattctatctgaattcagatgcaaacaagtagaatttctaatgaagtaaaaatcacaatttttcagagttccactactaaaaggcatttctcaaattaaatatttgaaaataacaataataattactctacacaaatataaatctactatgttgtccaagagagcatcttcaaggatgtctattactcttagataattttcccaatgatatcaaccatcaaccgaacaagacaagaacatttggaaaattaagtgagcataataagctgttcagaagatgcagaacagaagagtcaatacattgggccaagtaaagtcatcatgcttctgagacctacgtatcttgatgcagcaccggcaaaaccctgtcaaaaactacccacagtgagaacttgtcaatgaaatttttccataagaggatgttaacatgcttgtgctaattcatgataataaatttacttgatatattatactgtaaagcattggacacttgaagcttgacaattcaaaattagtgtaaatataaaatgctggataactatataaataaaaagcgcagatgttataacgtaaatatatatttatatacattctcaacaataaaaaattatatacattaacaaagaaaagagaagaaataatgaaatagaatccaaccgcagagaaataaaagaaaaaaacatttccaacccaacatgactccagtggtactagtacagcttcctttctccattagcagtttattttggttctcaagttgcttggacatatacatgggaagctacttcttgttcttgtcaaacaggtttctgccatgaaaactcagctttcagacctgctgatgggacaattatgggactctaatttacttcctaaagttgcttgtatttctagctcaaaggttgggcagatgggtatgtgtaagtgatatgtattcaggcccccaataaaagaaaaagaaaaaggcagaaaagaattagcttgaattttttcatgttagatgtcggggtaattgcacagtagatggaagtttttgagtcaaagcttcccatggacaccaaaaagagggcttcagtttgtatctcaatatataagcgcctacaaagcaaaaggttgtctacagtggctctgataggaatttcctatcaaataactaagaacagcaagaacagtagacagaaataggaaaaacatagaaaaatattgtattggatgcctccctctatttattctaatttcctactgctggtgtattacataacctacaccttactacactcaaaaccctcccatttactaacctgctgactgggcatatatatacctttcaggcttcttttggtacagaatggaacttccttaaatctaacaatgagtgtcccaggaaaaaagggtttctatcgttattgttgttgtcaaaataagtgatctttagttcaaattatctatgattggagttaaatttttcctttttaaaataaaaaaataaaataaaataaaaaacaggaaaggaccacttgtcttagactggcccccaaccaaatatataaaaaccctcacttttagaggaggaaaaccgtgggtacacaagctttggcacaaaacaaaatttagagaaaaacatataaaatgcagttacatcagtgttttccactccctaatcagatctaagaatgattggatttaattggtaatgcctatgttggtaaatggtaattaaccttcttgtgatttggaacggcagatttactaaacatcaatcagtattcaaagactaaccataagatgttggagactctatcactacatgctgcattttaaattgtttatctttctcttatgaatctacatttacttgggtgtctcaagacttgtctcttataatcagtgcccaccgggtcacagtttacttttcacatccatatagaaaggggaagatgtagaaaactcaaaacaacgtaagatataaaaaatgtgcaaaatttggcagtacgagtaaatattatatttagcacaattttttttatcatgctccaatggacaagaacaaattaagatgcaaatttacataaaaagtaattatcattaataataataaatagattaaatatttttaaaaaaagtaatgacgatattgtaattgaaaatgcgtattaagtcacttggcaaaatcaacttttagcatgtgttaaattttgcacaacttttagcaaactattggagatattttatacaaaaaggctaaaatatgacatcgcatcacatattttgcatttcatttgagacactctaatacatgtataaatacctgttttgcagcaagcatagctgctcgagactctaaattaatcgctgctagctgtccaccctgaaaatcaaggaaatctgataaaaatccagtatcccaagccatttcaattgcaagtataactagatctataaaagcatgaaataaggagttgctagaactagatgttaaacgacagaatgcatacatttttctaaaagcataataaataaataacctcttcaacaaatacttacgatattctttgataaaaaaaaaaccccaatccctgtaaagagccagaaaataaaggaccactaaaagttgccatttagcctcttccacaacttaatcatattccagttccctataaaatcatcttcgatatctttaagcatatgagcattctttccaatcaactttcccaacacctaacattctaaattaacatgctttacttattagtgagcacatatatgccaaaataaattcctagttctttcaaaagttagctctaaaacctgtttacacaagaagaatgtgttaaaagatactacactgattcacccttatttatgaaaaaacaaactaggagacaatccataatgtaatatctgaattttcaccattaaataaccactcaataaacattaaataaccattcatctgaatttccaacataaatcaacctacaaaaggctgattgctcaagcgaagccatcgatgttcagagttttcctgtttctcactaccccttgatgattgtaatggccatgttcttcagcaaa

SEQ ID NO: 242279 - DNA, 1313 bp, Cannabis indica
aatctatagcttctatctagaaaatagaagtgaaatgatgatttccttcgagcttcgctaaacagagataaatggttgagtactcattttagttcgctgaaatatcatttaaaacgggccaaagggtttaaagaaaaaatacattgaagggtgtaacggtaatttaatccctatactatgtagatggcttctagaaaaaagatgttgatgcatgttattccttcagtgaaaaaatgagtgccttcttccttaacatagccgcccccctctcttcctcttcttcaccattgaaactgaagccttgagtgatagagtgagtgcccacacacatcaagttgtacctcaatcatagtgtggaagattgtgaagaatccagattcaagagaaggacattcggctcaaatcttggtgatactctgcgacaggatggatacaagggttagaaatctgagtggaaggagacattatattctgctgcaaccactgtaatgtttctcatactttatatgtgtttatttaatgtcgttttagaagttcatatttaggatgtttaaacagcatacttgttagtaaatctaagaatctggcaaaataattccaacaaaaggatctcacaatcgtaatccttaaccaactctaactaacgcctctacctcatattcaaatctttatgtgtaaagaagtatgtgagactcttatggttagtataaatttcacatctctctccgtagagataatgccgccaaattttcaaagcgaacactacaacgaaaagttctaggtcatgagtcgggtaccgctgttcataatctttcagttgtcgagaggaataagaaataacccgatcggcctgcatcggaacacaccccggaccctgtccagatgcttcacaataaaccacaaacttctctctatcagaaggcaaggctaacactggagctgtaattaatagctgtttcacctcctggaagcttgcttcacacttgtccgtccacacaaaacgctgattcttttagttagctcgattaagggtgttgaaattttagagaacccttctatgaaccggcgataatatctagccagacccaagaagtttctaacttctgtcactattttcggtctcggccaatccctgacggattctatctttcctggatccaccttgatcccatccttcctaacaatgtgcccaaggaaggacacctgagatagccaaaattcgcacttcttgaatttggcgtataacttatgttcccgaagtcgttccagaacaatccggagatgttgctcatgctcctcttctgattgagagt

SEQ ID NO: 242280 - DNA, 5448 bp, Cannabis indica
tttttttaaaaaaaaaaataggagtcatgacaccctcttcttatctacgtcgtgcaacccttaaaaatgtgtgtaccaaaaattatgattttgtactataatgttactagttaggctctttaagagtatcatcaacgcatgcaactgtaggtgttgattgcttgatcttacatactaatttttttattattttttttaatttaattaaccaattaaataaaaaataaataaatttaaaaaaaaaatataaacaaaaaaaattaaactatgttgcttactgtcagcaacgattttttctgctgtatatgggcctaccaatctgtcaagcaacatcaatggcattaccattgttgatcctcttatacctataccaagtccacaattcaagaatcgagacttagcaacgaaaaaattgtaatatttttttgatcaaaaaagttgagttttgaatctctattctcttgaatggagtgagaataacttaccacttgtgacgaaatggacaaagccagaaaacgagaaaacagagaaacaaaaagaaacgaaaagctgaaagaattgaattgtattattgattaagtgtttgattacaagatagagtatttatacacaatggagtacaaagcagatgaaactaacttgtaacagtaataacaaacacttaactaacactggataactaacttaatcgttggtatccttgacaggccccctcaaactgagtgtagccttggaaactacacacagtttgtctctaacatcaatgaaacgagagctggaaatgggctttgtgaggcaatctgcgaactgagcagaggcaggaacatgtttaacatgaatttggtgttgcagcaccttgtcaagaacaaagtacaagtctattttgatatgctttgtgcgggcatgcacaatgggattggctgcagaagcacactgctctggttatcacaccagatggaaggaataataggctgagagatgccaagttttgtaagcaaagattgtagccaggatatttcagagacaacattagccagacttcgaaactctacctcagtagaacttctgctgattgtaacttgtttctgtgatttccaagcaaccagattccctccaaaaaagatatagtagcccgatgttgacctcctgtcatcaggatctgatgctcaatcagcatcacaaaaggcttcaagggagtaatctggtgcaggttgcaagtagagaccataatccaaggttccatcaatgtatctgaggattctcttaactgctgtccagtgagcctgcaatggagtttgcataaattggcaaacattattaactgaaaaagatagttctggccgtgtgatagttgcatattgaagggcacctacgatagacctgtatagagtagcatccttaaccggttcactgccatagtgagagagtttaaggccactattcataggtatgttctgagtattgacattgtgcatgtcagccttagttaatatatcttgtaaatactttttctgtgagagaagaatgccatttgagtgtcgactgacctgtataccaagaaaataatcaactaagccaaggtctttaagagcaatggtgctgcttaattcttttatcaaatcatcaaccaaggtatcattaatgcccataataagaatgtcatctacataaactaaaatgtagatgcaactggttgatgaaatcttgataaacaaagactgatctgctttggagaaatgaaatcccttccaataaaacagatgaaagcttatcaaaccaagctctaggagcttatttgagcccgtatatagttgtagtgagtttgcagacatggtggggatagtttggatcaataaaacctggaggttgatgcatgtgtatgtcctcttgaagctctccattaaggaaagcattgtttacatcaagctggcgaattttccaattctttgtgacagctatggtgagaccaactcttatagtgataggtttcaccacaggactaaaagtttctgaatagtcaaagccttcttgttgatggaaccctttttctactaacctggctttgtagcatttgtggctgccatcagcattaaatttctctctgaaaacccatttacatatgattcgtgttctatctggtggaggcttaactagaacccaggtgttatttctcttgagagttgtgacttcagtgtccatagcattaaaccaatgaggttcttgtagagcaatcttaacagttcttggaccacaagctgccagaaatagtttcggcttccttataccagctttcaaccttgtcaacataggatgtttagatgcattggagaatgtggaaacatcattatctgcaggcaaactgttagtgacagcaatattatgagcagtaggaacattggtttcaggaggaggaatggcttgagaattgtcagattgagttggaacttctatgagagaagaagatggtacagcagtgggaatgggaggagagttgtcaacaggtgctgtatgatgtgttggtaatacagaaataggtgaagatgtagagagggctggtaaaatagtaggcatattcgaatgagtattgcacacaggaggaagtaagactggtatagatggaattgaagtgtttgagattgtagcagagtgtgaactagtggtctggtgtatagcagaggcagcatatggaaagtgtaattcatcaaaaataacatctcgttagatgtacagccttttatctttggaaagacacttgaaacctttgtgggacatgctatagcctagaaacacacaaggggtggatctatattgaagtttatgcctattgtatggtctcaaattaggatagcataaacatccaaaaacttttaactgactgtagtcaggttttgtgctgaaaagagtttccaagggagtagatccattaagtgttggggtgggcatcctgtttattagataagtggtagttctataggattcatcccaaaactttagaggcatagaagcatgagctaatagagtaagacctgtttcagcaatgtgcctatgttttctctctacagttctgttttgttcgtgtgtatggggacaagccaatttgtgaacaataccacaattttctaacagagttgtaaaagatctgaattcacctccccaatcagattgtagggctttgattttgtgacctagttgcaactctatttgggttttgaactttgtgaaggttggtaaagcttcatccttggttctaagtagatacaaccaggtatacctagaataagcatcaacaaagcttatatagtacctgtaaccattggatgagttaacagggacagggccccataggtcagagtgtagaagttcaagtagtgtgtgatagattgtggctgagttagaaaatggcagcttatgagatttaccaagacaacatgcaacacaaacatcagagaaagttttattaggtaatgaaatattacaatgagagagagcctgttttacaactcttacagcagggtggccaagcctgctgtgccacagagaaaaaataggattgacagacatctgatgtgtattacattgaggaacagaagcaatgttggaagactgagttgaagtgtggctgagatgaggagaatcaaacttgtacagtcctttctcaaaggtcccaaccaacaagatcttctgagaggctagatccttaacacaacaagaaaaaggatgaaattcaaaaaatacattattatcttgagcaaattgagagacactcagaagattctttgtaatagatgggacatgtaaaagattgtttatgcttagagattgagaggagaaaggagagagaagggaagatttaccaatatgctcgatgctcaatccagtgccattaccaacatctatctgctcattacctgtatatgaagtgcttgtgccaaggttggagtgatctggtgtgatatgatgagtggcaccagaatctggataccagccatcatcacagaaagattcagaggtggcatagagggcttgacactcaacaagattagcatttggggggaaattagcaaaacattcaggaccagtaatagatttatcaaaacgataaaaacattgctttacagagtgtccaagtttgtggcataattgacactgaattttttgacctggtgtgttgctgggccctcgattgtttctagggggaccacctcgacccacagaacctcctctgccatgtgggggaccatttcttaatgaggattgagatgggggaccaccatacatattgctagaaccatcaaaacgggagggaccacttctagtggaaataagggttctgggagccattgaaagtaggtctgaaattgttatatccaaatggtttcatgtgagagagattggcttctcctttactatgtcaagattcttggcattctgtcgattctcacagattgtgccattaaaagggcctcaatttcagctaccgagtaagtgtcttttcttgtagttacagatgtaacaaaaacgtcataatcagatggaaatccgttgaagatagcttctatatgatattgagtagattgcttatggccaatagtagcaagttgatcgactatgcctttaatctagaggagatagtcattgagagatctagtcattttggtatttcgaagctgagttttgtagaggctgacattagcagcactgagagctgtgtaatattcattgagtgaggtccaaatctgagctattgaatcacatccgatcattcgatttgttgtcttctcagacatagaggataaaagccaggaaacaagaagattgtcttgttgttcccaatcttcaaattcggggttgatgacattggctctatctgcttcaacatccagaaattttgggggagcacgagtggaatcaagaaacttttgaaggcgactgcctttgatggatgcaagaacttcatgtttccatggaagaaagttgtgttcttcaagtttaatagacaacgaatgattgaaagaaacaaggtaggactttggtagaggtacatgttgattgttgttcacatgcacattgttcaatcttgatgctccttcggtgttggctgttgaactttctattgttggacgatgagaagctctgataccaagtgacgaaatggacaaagccagaaaacgagaaaacagagaaacaaagaaaaacagaagctgaaagaattgaattgtattattgattaagtgtttgattacaagatagagtatttatacacagagtacaaaacggatgaaactaacttgtaacagtaataacaaacacttaactaacacaggataactaacttaaccgttagtatcattgacaccactgcaccacatgtagtatatcatacgcacgaacatatataagaatttatataaatatatagcgttaatattattttagattctgtgtttt

SEQ ID NO: 242281 - DNA, 811 bp, Cannabis indica
gtgtaaaagagttggaagagagacgtaagcagtccaacttctccaactttagaaaatgtgtttcagtgatattaccagtcaattggttgaaagatatatcaagaaaaaacaattcagatagctggcctaaactgtcagggagagtcccatttaatctatttttaacaagatctaaatatgaaaggttctgccatgactctaaagattttggaattgggccatgtagcatattatttcccaaactaagctcaacaagattcctaagttgacccaaccattgtggtaatataccaaccaattcattattgtccaaatacaagtagtttagactaggaagaggactctgagaatgacaactatgtgttccttcaagtaattcaggtaaagttccattcaatttgttatatgacatgtcaagccaattaagattgcaaagcttaccaatggagcctggaatccctccttgaacattattctcagaaagatctaagtaagtgagagatgtcatgttgccaattgaagtaggaagtttcccatgcagcatattatcactcaaatcgacaacttttatacttttccatcttcccctgaaaaattgagaacaacttgcactgagattagtattggagtgcagatgcaaagtctgcaaatttggtagctcggcgaaaccaaggggaatccttccatgcagaccaccataacttaaatcaagactcacaaggctgctgatattggccaaccaatttggtatttttgagttgaagttgttatcactgaggtctaaaaccgcaagtgatgttgttgaattaac

SEQ ID NO: 242282 - DNA, 3053 bp, Cannabis indica
tacaaagacaattgacttatacaagtttagactccctctaaatctttgccgcaatcctttgtaacacacttcacaaatctaatttctaaaccaccatcaaacaacaaactcccatcgtctttgaggtgtgagtatttacttcctcccaaagtaaggcttgaacaagtcttctcccaaagatctctctcttgttcaatcaagttgttctaactgaccatgagactagtaagataacacatatacaaatactaaaacctagatgaacaactaggttttcacaaaaagaactctctcttcaaaatgaaaatatgcaaaaaatgaaagctagaagagttgaatcgattgactgctctctaggttctatttatagagcacaggaaccctagatacagtcacaaagtcgattccacaactgtacaaattttcttaaacaaaaattctgttttgcaacatcatagacaggttttgcagcagcaaaccaaaccagaaaaaggaaacttgccaagatggtgtgcgatcatgtacaaggtcttgatacctgccaaaaacagtgtgcttaatctgattttatcaagaaacaatcaaacacaataaagagaaataactatagtcaaagtttccatgtaaagccaactttccataagagaatttcttctcttacaagaagtttccaaacttagaaaaaagacagctgaaaaaagattttttcctttgatagaaaagaacattaaaaacatattattaaggtgggaaaatcagtttattaactcatagaaatcacaccataaataaaaatattttgacacctaaattgcaaaaaaaaaaggattttacacaaagcttaaaagaatttttttctctttttataatgaatacaaacaagttgttaatagattttgataaataacaaaatttttcaaatatgttgtattatgttatttctaacagttagtacaggttgttagttctttgtccacttgtactctgttttgacagagtttgttacattctgttatcagccttttcttgtaatctttctctatataaatgaaaggttcagctcataagttttagagttaggaattgtattgataagcatctctttcatggtatcaggaagtcattgactagcgtcgttcatggaacctcgacacccagagcacacttcagcaacaccttccgccaccactcaaccaccacctgcacctctgcatcaatggaatccgatctaaaattccctcaattcatctcttacagttcgtctcgatcgcacgaactaccttgcgtggaaatctcaagtgattcccacagtaatcgggcatggacttgatgatatactcctcactggtgtggctcctgttcagcgcctcatcaccggagaaatcaacccagaattcacggcatggaaacgaaaggatcaacttcttctcagttggctctgctcttcaatgacagaaacaattcttggttccctggctcagcatgattcgtcttttgatgcttggcgtgccctgcctcaaagatttttcaagtcagtctaaggctcgtcttcttcaaatcaagtctcagttgtcaacaattcaaaagggtaatctctctatatctgattactatgataaagtcaagttgttagctgattctttatccactgctgggcatccaatggatgaaagtgatctgattatgcacttactaaatggtttgggacctgaatatgatcctatagtggttcatgttacaagtcttgtagataacctttcttttgagtctattcagtcattattgctaacccatgagagtaggattgaaaggcacttcaatgtgaatgatctttcctcaaaaatcactgcaaatctcaatattaaaaatcaaaaaaatgcttctggtgcccctcatcgtttctacaattctcagcaaagaggatcgtatggtaacatgaaccgagtcccaacaagaaatcaaagaactggccctccttcaattccaagattgctttgtcaagtgtgtcacaaacctggacacacaacagtcgtttgccattatacatttgacaagaactttgtcactcctcaaatgggagattcaaaggcatttttgactaaaattgaagagcaagacaatcctcaagcttattcatctaatactctaccagagttcatcgatgattctgatttgtatgctgatactggggttactaataatgttgcccaaggaatggaacaattggattctgaaatgccatactcgagacccgatgctctcactgtaggcaatggcaagaaacttgccatttcccatgttggtaacacttctttaccctcctccagtgttcctttaaagttacattatgctctaaaattccctcatattaccaagaatcttgttagtgttcttcagctcactaaagataaccatgtatttctagaatttcactctacttgttgttttgtcaaggacaaggtcacagggactgttttgcttaaggggagagttaaaaacggcctatacacattgtctcatcgatcctttgtcacaccagaagtcaatcttcaatgtcatgttgctacttctacacttaggccgccaataacatctattattagctctagatcagaaaaagaatcaaattgtactaatatagctgctacatcagctataacctttcgtaataactcttccattaataaagagaatactttttcatgttccaatcctactgttcaggcctttactttacaaaagtctaatgttaacttgtggcatatgaaacttgggcaccctgcctaaagaactcttgccaagatcctaaaccagttacatataccaccaaatttaaaagccttgcagttttgtgaggcctgcaaacaaggaaagagtcatatgctaccttattctctctctgagtctagagcatcccaaccattagaattggttcacacggacttatggggtccctctcacatataatccaaagaagggtatagatactatatccatttcctagatgactatagtaggtatacatggatcttttgttgggttttgtgccataa

SEQ ID NO: 242283 - DNA, 740 bp, Cannabis indica
tttattttttaatattaaatatataatgacaattttattctttaaaatatatcttacaaaataactaccatatattatagtttaactcaaaagggcaatttagtcaatttaagcagtccgattacgttttctaataaagtaaacaagataaatcacaactattctatttccaaaaaaaaatttagtaaacaacatattacaaatattgattccgattatttttcatttattccgttacatttctccattaatttattacgattttgaatactgtatagtaaacgtgccattagctttagtaatctcagtttagcgggatcaacttatgtttagtcactattcgtggcgttcttattggtagggcattacaaaactcatctccgagaagacgacaaaaggattatggaaaaagttagaagaattatacttaaagacatcaattgctagtaagattaattttctagaaaggttatacgattttagaataatttattccctttctttagatgataatattgacaagttaatgagattattgtaggattggctaatataaatcacaagattgatgaagaaagtcaggccatcctttttttgagatcgctcctaatcacatatcaagaagttaaggctgccaccaagtatggcaaagacataattgcattggaggatttcttgacgcactcaagtagaaatatttcaaattacaattggagaaggaatctaagaaaaaggaagtg

SEQ ID NO: 242284 - DNA, 590 bp, Cannabis indica
tcttcaatcgtattgttccaatccattttatctgacagaaattgtcgtttcccattaagataactcctccatcaattcatcaaaattcgagaactaatgtctgtttaggcacatatgataggagcattcaaaatcaaggatccatttgtttgaatacatatatgatgatgaaactgaaaaggtagaatcttcttcgatgtcggccttctgtgcaacatttgcattttacttctccttgtttggaaatttttcttctagtaccctttttgacgacaataggcgcactcgtctttcacaagatttcttcttgatgactctcctctagactttgattttgatcgcccctattattcgatccacctaatttcttgttattcaatttgcctttagttgcagccaatgcttctggcatcgagtctctgtgatcatgttgatccatcttctgatactcattgtttaccaaagcattataaacttaacctcatctttaccatataacagagttgtggttaaatgttcatagcttttaggtaatgaattcagtaacaacaaagctgtatatttattactaatttcaacatctaaatttt

SEQ ID NO: 242285 - DNA, 770 bp, Cannabis indica
tgtagaatcaccctataatattatatttgaacattgaatttgttactttgttgaatatgtgcgttttaatttatttaaatttgaaatgaaatattaatagagatttcaacaactaaagatcaagaagaataataaatgaaataaaaatgtgtttttgcttaagaacagaatattgaaaaggacgacgggctttaatggtggatcatgtaatgtgaggcacttagtgaatgtaattatttaagtgcattgttattaaatattagtagtgttcagtatcttctatacgtaacactctacattttttaaaaattatttttttgaaaattatacagtataacactgaaagagtgtgttaggctgataccttttaataattttctaagtatcaagatatgttttgatgccataaatatggtttaaagatttgtataattgatttaattcctttaatcattgttaatttaatattatctttggaacatcattaatttcttaaaaatggaactgtattttgttcttcctctttttttttggcaagagttgttggaggtctattggcaaagtgggcctgggttggctctaaaaagtggttgaacaatagaaattgggctaccaacaattgggtcttgttttgggctagtatatagatgggtcaggtaagtcttactacaatagatcaaaatgaatgggaaatttacattggtattaatttttgttatttttttacaaaaatactgtcagacagtattttttacttttttactgtattt

SEQ ID NO: 242286 - DNA, 1948 bp, Cannabis indica
ttctttaggtaaacaacaattgaaaaattacctagctacaagcaatgacataggaacaaacaacatgaactatttcaacaacaattgaaaaaattgaaaatttctgacctttaggccagtcagcaacgattctctccttaagcattgcaacggtagaagccggcgagtatcggaagggaccaatatctgatccatcataaagacgaaacttcagctcaaccaggtcctcctccggcatttgaaaccttcccccgattcaacgtttctttcagcacaaaactccacaaacaatcaaaccaaaaaataaattaatctcaacaataacacaattctcaattgaccttcagcataaatcgcatccaatattcaatacctcaaaaagaaaaaaagtgttcagcaaccaaacaagttgactaaaaaataattgattttgtgtagaaaacataatcgttatataaatatcagaaaaatacctgaaataattgcagaaaggaatcgagggttttcactgtaacggtttcagacaaagagacaagaagagattccagtgaagatgagagaaaccctaacccgatcttgacgttttttttttctctgttgtctattttttttaatttaatcgaaaattgattaaatatttatatgagttttttcccttcaaattacagtttatttccatatataaattttcttatttaagaaattaaaatacaaaataaattataattagaaagaaaaagtaagatttgggggatttcgaatcttgtcagtgtaaacggtagaaacaaaatttgtgaatttgtgtcagttaaattcgtaatcccaccgaaaatattgactgttactctgtatccgcgaaggatttcggtgctgataatgaccaataggatttcatcacgtgagtcattcgatgacgtggcgtgttataattggtgaatgagaattgattaactgtggctgcggatgtagcgtagtattgacagtaacaggtcggtgaaagaaggaaagcaacgacaaatacaaagtctggcttattgggtggtcagtcagtttgaccaaataatattaaatacacttcttttcatgctctttttttttaatttttttatttttacttttaccacttttttttataattcttttcagaaatattaggcacgccatgagaaacgacaatatagagttgtgtactgtttttattgtacgggaaagtttgatgaatgtgcttgtaataaacattattaaccattattacccatctttaaaatgtgtcttttccttaatgtaattatatatttaggtaactatttgagaatttggtatcttatttgcatcgagttaactagtcaaagtaagaggttagttatgaactaatgtagctcaccaataaaatatgaaagaagaaactcatttgtttcttattatttgaagaagaaatgttcttaagtttggtagaaactttattttaaaattgaatagtttacttttaaaacaagttcattataattgaaattagaataatcgataataaataagtgaatttaaaatatgaaataattaaaaataatattttattatattatttatttaattgactaaaaaggaaatcaaacttgttttattttgtttatataaatgaggaaggtaattaatttttttaatttagctaaaattattttttatttataagtttttttaacatttatttgtctttagctaataataaaaattaaaataaataatgtaaaaaacggaatgtttcattctaaaattaaggactttttcctttcttttatccttaatttatgtgtatcttactaattttttctatttacaaagtttaggaaacaaattaatgagaattaattctcttttttttaaataataaaataactaaatataatattttattatataatttattttttttttatataaaattattata

SEQ ID NO: 242287 - DNA, 977 bp, Cannabis indica
ttttaaaattatactttttattatgttttactttcttaaaagcaaataaataaaggaaaatttttaaataatgatataatttataagccaatgaatattgcttctctttatttggaaaagtactactattgagctaaaaaaatatgtatgatagaatggagacttaccttcatttcttacagacctaagagcaagaagagttgcactagcaaaccgggttaattatgtttcccatccacagctagagtagagcctctagagacttaaggatccaccagtgcaaaatgaagtgcatcactgtgaatgttccaatgaatacataaccaaatttgtcgagccaatgaacaatgaaagaacaagacaagaaaagagtcatcatgacactgcaaatgatgcagtttaaaccattgccaaatattgcttgaagctgctgacctatagacaagatatttctcccaactttccacaagaataacttatgtggcgtaatggggaaagaaaatatttttattacattcttttgttagtattagaatgacattccgatggaatgctctttccactattttggtagaatgactattccattttaaaaaaagaaggaaaaaatattctaatgtaacaagagaaaaaatttaataatttgtttatcattttttttttatgtcattttaaattttatttccatttttattcccattttcatttctattcttatattttcattcctcccaaacaaacgccaccttaattctttcatggatggggctttccaaagaaacttctgaaagccatcacaaagtccaactccaatagagaccaaggatcgataggtttgtttcacaaaaaagttgtcatcgacaatgtccttccaaatcaaaaaatgattgttctctacggaaagtcgtttattgaggttatggatccactcaaactcatcacagattaattatgacattcatcacttctccatgtga

SEQ ID NO: 242288 - DNA, 712 bp, Cannabis indica
tatctgaattcctaaaacaaaagaggcgtcattaatttcttttatctcaaaatgcttagatacatatatcttggtttcgtacaataagattatatcattaatggcaaacaatatttcattgacatgtagacccaaaaatatgtacttactctagttactcgcactgaacttatgatatgcacaatcatcaataatattcatctcaaaaccaaatgagacaattacttgatgaagctcgtgataccattgatgagaagctggcgtgagtccatagattgtttttttttttaatttacaagccatattctttgggtcacctcacgcaaagttttctagttgctccatataaattgtctcatcaatgtcaccattaaaaatgttattttgttgtccatctgatgtaacacaagatcaaagagagaaataagtgcaattattatcctaaaagagtatttcaataaagctaaagagaaagtctctttataatcaatgtcttgtttctgagtataatattttgctacaagacgtgtcttatatctcaccacattactattttcatccctcttggttttaaatatctatctacaaccaattggttttacacctagtaatgggacaacttcccaaaccttattgtctttcatagacttattctcttcattcatgacatcattccacttttgagagtcagaacttttcatggcctgatgaa

SEQ ID NO: 242289 - DNA, 774 bp, Cannabis indica
tgtatttcaaaaatattattaaataataaaaaaaaaatctaatgcacctaaatgtaaaatattattatacatatactcattattagataaatatctatgactttaaaaaaatacactaccatatgaacaaaattaatgtccctagtctaaacatattaattcttatatatatatattgatgaattttgttttgaaacaaccaaaaaaaaatagaacaaattaacttttatgatatatataatgaaaaaacttgaaaaaaattgacaacaataaagagcttcttctaaaactttggtatataagggcatcactaatagaagaattcacaacattatatattaaaatggataagcctactcctacataaattctcacctagctttttttaccaaagaaggcaagatttgttgtcattgcttggcaatattgctggtcaggtttttctttccttaatcatatttaagggcgcgtttggaaagccacctgggaattagaattagatgtaattggaggtaattacatagtttgacgtgtttgtgtggccacgtaattacatggtaactatataattagaggtcattgggaggcctcaattactctctccaattctcataccccatgagaattgggtgtaattacactgtgtaattacataccaaaaataaatttaaattattttaattaattgatatgatattttaattatttttaatgtattgactttccctttttctatcaatcatcaaaaaacaaggttggattgtattagcatgt

SEQ ID NO: 242290 - DNA, 604 bp, Cannabis indica
gcccgatggttctgtagttttttaaagttggggaagatggcccgattaggcccgatggtgggcctgatgggggccaaataattgggttaggcccgatagggcccaattgcaggcccgatgggtgaccccgaatggggtatggtccgatggggcccgattgtaggcccgatgagtgaactcggatgggggatgaccaaatgggcccgatggggcccgatggtccagatgatctgagcccgatttggcctgattggtaaagccgaattttgtttggcctgatttcattggctataaagtcatactagctctagctttggctgatcctcgtgaaccattattacactcttagcattcttgaacaggaagtaaagtatcatttaactaatgcgaagaaaaaaccccaatgcatttggaagctctgtataatataagataaaaaacaaatatattaacaaatgatcagtcaaattagtaataatattattatttttatatatatataaaaaaatatacttacagctacataaaagtttttaactaacaaaccataaaagaaccatatgattgcccctagtgtgataaaaaatgacaacagaaatggcat

SEQ ID NO: 242291 - DNA, 806 bp, Cannabis indica
tacaaaaaaaaaagtaaaaaacgtatcctccctcaacttaaactggttatcacaattttgttttgtatttaaacatcttcgattcaatttttttttattattattttttttattgatgaaaccgttgatttaacaaatttgaggaatgagatgtcgttttatttactgttgtaaaagaactaacttcaacttgttgcttctcacggtcgctttcttcaacgacagtctctctctatggaacaaacaaacggcacgtcacttttcattcttaagttctttcaaatagaatagtaaatcactacagaagccaaacgatgtatacaaaatcttaatatttaggggggaaaaagtattaaattgacaaagtaaaaggaaaaaaaaagttgaattgactgaaaaatgaaattgctataattctgtaaactgttttttatgttgtattaaaagcaatcctgagagaaatcaggtttgtttgacaattttatgtaaaccagctttatatcattgagataaaatcagctgaaatattccatctccaatataaggaagcgaaactattattgttcgagtcggagggaacacctatggtgttcaactaaattcaggatccaaccaaacctttgtgccgagcatacgaaattattagtacgaacataaaggcacaaactatcctgtcacaatgacaacctgcagataccagaaagcttgttcaattatcaagaaaacttggcaaccgaaagttagagcagaaagaaacaggttcatacccatttgaacatgtatccatggttgtcattccacgtgta

SEQ ID NO: 242292 - DNA, 723 bp, Cannabis indica
taagaagactttaggtgagtttttataagtgagattttggtgagattagagttttagttttgggcttggcaaaacacatttgagagaagtgtttttgtttgctttcatggtcgtgttagacctttatatagattcttgatactttctatttacgaaaactcactgttcttcttttgcagggtttcttcgttgttctctcctgaatgcctgtttgctttaactttgtcagaactaaaacttattcttattttgtgtcatttgttagccgtatctagaagtattttgaaactcaagcaaggtacttcatagtacaggtgtttcaagttaacctcaggcatgcagcttggtttagtgctgtttcatggagtgggatggcagtcatgggatatcttgctggtttgtggtcggacctgttagtctgtagtggtacatctatcactttaacgcggaagatcatgcaggtatggagttcttgttcattaacagccatgttttgtgcaagaacgttttattcatgagctgttatgtttccttggtttttgactaaacaattagttttcactatagtacactacacccttaaaaaataccaaagaaagaaaattatataaattttctggaccatatagaattaattgtggttcttttatctaaaaaaccaaaagtagaaaaatcccatcaggggatatttttcttcctattcctttggtgcatgtgcatcag

SEQ ID NO: 242293 - DNA, 701 bp, Cannabis indica
ttaaatagaaatttatttttttatatagaaatagatttccttaaataaaaaatattcttacaaatattgcatagaaaatgcaacgaaaggctgataaaataatgtgtgagaggtcaatgcaaaaaaaatagagaaccaaaccaagtttatttctttgaccaatgagacccaatatgcctctattttttcaattagtttagatttatgtagtgtatcttagaataaatatcagaatttaaaagtaaattttcattatcatagtaaaatatcttaaaataaaaattaactgcaaataccaaaaacttgacacgtaaatttttattttattataataaagattattagattaaattatttttttaataatataatttataatatatattcccacaatatcaaaagtttgttaagttatcaccttcgagctttttggatgacaaatatctatgtggcgtcctagatttttttcattgtatttttaaaatttggtgatattttcatattttatttaaaaataaacaactacacatacaaatatcaagtcccgcatggtttggaaacacttaaggtattgtccacgtaagttataaataacaattttgctatgctactttcctttgtccaagaaacattttttaagggtaattgatttatgtcttacccaataaattttaaattttatttaataaataatttatcat

SEQ ID NO: 242294 - DNA, 1839 bp, Cannabis indica
ctccggaattgagaaattataactctaatgcccatttctaacaaaggggcccacagataattaaattcataaataattataaaaatatcaaaatttagtgctaattaccctttattgatccaaattcctaaagtggtcactacaattatacccctgttaaaaggatttcgtgctcgaaatctaacctgaatagctctggatgttgagtcctcatgtcagattctaattcccaggtggcttcttccaccttactgtttctctagagcactttgaccaaggcaatggtcttgttccgaagaaccttctccttcctatcaaggatctgaacaagttgctcttcataggataagtctaatcgcagttcaagggcttcataactcaagatatgagtcgggtctgaaacatatttccttaacatagaaatgtgaaatacgtcatgaacagccgataatgctggtggtaaggctagccgatacgctacctgcccgaccttctcaagtatctgaaatggcccaatgaacctagggcttaacttacccttcttcccgaagcgtctaatacccttcattggtgaaacccgcaggaaaacatgttcccctgcctgaaatgtaacatctctacgcttcggatcagcatagcttttctgtctgctttgagaagtaagcatccaagccttgattttgtctatagcttcattggtcctctaaactaattccagacctaagtacttcctttctccagtttcgtctcaatgaataggggagcgacattccctaccatataacatctcatagggagccatccctattgtaaagaccgcttaactttaatttggaaattagcagataatgagggttaattatgaaaattagttattaatattgaatttattatttatgataatttatttgaactcagaatgcagtttatatgtcatatatagaaatttcgtatttttgcatgttcagtgcccggcaacattggaacgcggtgtatggcttagtagaatcacatcttagtatttttgtatagcggggtaatttagttagacattggaaatttcccaaaatacacttgttacctcttttatgttgttttagtgtggaggggcaaaatggtaattttgccccatatgtagtttgtcctttactggactatgttactcttactaatgtgattttttaattaagtcttggctgaaggtattttaataaaaccaatttcataattcttattttacaaaaattaagaaaagaagcaaaaatcatttctctcaaagctctctctctcgaaaattccttggcctgctagggtttgagttttcttcatcaattctaagtgatcttagctcaattcaagtgtatccaagccaaggtaagttcttagctttagtcgttttagttgcttgaattgtatgaaaatggagttttgcataaaatgttgtttaacttgctgttcttgttgctgtcgttagattatgttttctatagctatattatggtattgtagagtgatttgagcaggttttgttggttagtttgttggatgagcaaggtttgagtttttgaactcaagcttggttcatcaatggcatttcttgtttctgagtttgggtattggttttgctacttgtaaattgttctttgggttatttggagcaggtctagagagtttgatatggtttggggttgatttggtggagatataaagtttttagtcattcctgcactgaaccggaattccggtccagagaggtctataggaaccggaattccagttggcttccaggaatttttttcccagaaccagaattccagttggggcaattttgggaaccct

SEQ ID NO: 242295 - DNA, 729 bp, Cannabis indica
attgtgactaaaagattgtcattaaagctggtagttggtttttgtagtattattttatatataaattaaaattgtagtgttcaatgtgtattctaattttgtaagagaaaaatatgatagtcagagtctcgtgatttgcaagggaaaagactggtagctgtgtaatcccacatcacttgggaaaggttaagtgtgatgattttaagactgtgtaggtatgagactacacagttgaagagggtttaaatagattgattggtactacctatatcaacaagatgcatattatttttggtagcccatcatgttaaacgtgtttgacctgaggtaattttaattagtatgggtgacctcctaagaagttttctcaagaagcagtcgagtgaggacagtacgctggaaagactcgtgttggtctacagggttaatcgtaattttgtgaagcaaccaagagtcatgtaccacccgtgtataagagtcattagtctgtgggagaaggcccaatggaagcttgaaacgaggacgttaaaaattgtaaagcccgcttagttaatttggaaattagcagttgtttatgattaattatgaaattatttatagctatttaaataatttattatactgttatttatgttattcagtatcttgcatattttgcatttccggtgcccggtattttagaactcggcgtttggctcagtagaaatcacaacttagtatgttagcagt

SEQ ID NO: 242296 - DNA, 507 bp, Cannabis indica
atatataatcaaatttccctttagtaactattgagtgtaatataaataccacaaattactcacatataaacattaacgtgggagttataagataaatcattaatttaatatttttctcatcatgtttctattatgtcattacatttcttttcatcgatcttattatatcatataattctatatggactcgtttggtaggcagtttggtaggcagtataaatgtcgaattatattaaataacaagtaatattatatttaaataaaatattatagttgtattaattattacggccataaattttaatacaatatggatcgtattatttaagtgatccgcaatagcttttattataatatttacaaatagtcttgggtcggagacccctaccctggtctcggtcccgaactccggacctggaccgagacccaaggctgactctggaaatatataggtcaaaggctatttaaattttgaggtcctcactcttagaaatatatatatatata

SEQ ID NO: 242297 - DNA, 1108 bp, Cannabis indica
aatttgtataaataaggtaaatatacaaattagtacaattaattatatgaaatgaattaaatgcaaaattaaagaatatacttaatggcagattatcaattaatttaatcaataaattacttaattggtaaataaatataataattgcgcacttaattgtagaataattaaatattcacattcttaaaatatcacaattattgtaattacatgtaaaaataaagcatgtaattaatttaccaaattaaaaactttccataataatttattactaaataacatataatatatgaagatatatgttaaataagaatggaaagtttaaacaaatgtaatttaattgactaaatcaacaaaaataaggaaataaaataaaattccaaaaataaatcaaaataataaaatttcggaattttcttaaatttttcttaattttcctttttttttttgaaaaatctgccctgaaaaacgacacgtcgtttttagttatgaagaaaacgactatcttcagccgagtcacttttgacccgtttcctacacgtgggtccgataggcccgacccaaacctgactggaaaagagaattttgacgaccaaattacgtgtttttaaacccgaaatgatccaaatgaaaaaataaagagatcaaagtgggttttatacatctaaaacacgtaaacgtcaactttaatttcaatgaaaaattcgggtccgaatgtggattcttcagtaaattttctagattttgatggttttcaaaaccttttcatgcatatattgaatgtataacatcatatgaaaataataaggctattaatgttaaaaaacgcatcaaagatctgaagaaaataaacaaatttttgaacccaccatctcgaaaaatatgtaaacacgtgaatatatatatacatatataatcgcatatacatattaaaccatataaaaatatataataaattatgataatcaattatatggaatcaaatcaataacatatgtataaactgttagacatttatttgtataaactgaaacatatgtatgtgtatataacatgcagaataaataaacatatacactatatgaatataggatcgaaatacctccag

SEQ ID NO: 242298 - DNA, 611 bp, Cannabis indica
agtaatgttataaccaaggcctcctaggaggcattcactcggaaatatatgatttcccctacatgaatttattgtgaacagaaccacaagattttcaatgggactaagcttgttgtcttttaaaaacaagtattaagtgttaaaaaataagataaaaacgtaatggaagtgattgtggggatcgagtcttttcacttatctaaaactttacatatcttatactccttattaccaattctacactcaataccaccgaatttactagtaaaaatgcatttatgcaaagaggccccaaccatgcctcttcgttcttcttgaacagcactcctcaaggaatggttgatgtcaccagatgcccaagcaacggatatgtgaggacgtggatcctataacaaacatgaaaaacatccaacgttagccccaagtaataagctccatgtaaaaaacttcttaagatttttatcaaagctaagcttttgttcagaagataatattcacaacagagttggctaaccttataaaattcaggtagattatgaagcttataaacctcattaacagcttgaatctgttttgttatctgaaagtaattgaacccaagcagattggaa

SEQ ID NO: 242299 - DNA, 542 bp, Cannabis indica
ggattgtcttttatttttatttctaaaaccggattgttatttgtttaatttagagcatcgacaaggttactctctatattttagttaaatttgagttaaaatagctaaaatattaaaataaagaactatttttttttaggttatttaagatttttgtctcccaaattatgacatatacattattatgtctctaaaacttttcagcatgttacaaaatgattcataagctattcacagtattgtaagttgatctttctattaaaattttgtcacacgtggcaaaacaaacatggtcgtcttaaaacaattttggaggttctgttctaatttaaaaatttgggccccctacaaaagaaatgcaatttattaccattagggtcagcccttacaaacaaaatgatgacatgactacttagcaaatttcacatcagcgccacatgtataatttaacattaaaaaaattaaaaattaggtattttcaaaaaattattaaactaaaaatcaattaatggttaaaaaaaattacgtaaaactaaattaaa

SEQ ID NO: 242300 - DNA, 3771 bp, Cannabis indica
gtattgactatacttataaatttgactattaatatttcctattttatcgtgtaataatagctttttaataggtagaatgcttatttattttaaaattagtatgttatttttattttcattttaattacattacattattttcttataattattgttattttaatcttaatggggtaccccaatcgggggagtttctcctatcctgaacccatcagagattaagcgaggtgggggagagaatgggggcataaatggaaaataagaacggggttgggagatgcattacccgcttattacccacctaatttccatccctaatgtgagttggacttttttgcaaaaagcccagaaacagaacaaaaatcaataaacaccttatatactttcgaacaacactaagggaacctttgaagaaaatgaccaaaccatcaacaaaacagagattaacaagtttaaagctcttgcagagaggatgaaatttaaaaccttcattgaaagaagcttgttgcagtcgtctagttagataatccaaatccaacataaatagtaagataggtattggatcacctagtcacaaccctttcttcctttcaaaatatattttttgaatcctaccattcatcatgagaagagtaggaagtccctcgtaaactaatcataatacaattaataaactcgaaggggaaacaaaagccttcattaaatattccataaattccactcaatggtgccataagctttcctcaatcagccttcataatgcaacaaggagaaatattcttcctgttgtaacctttaatgagatcttgaaaaatcaagatattatatgcaatagatctccgctcaataaaagtaccctgattatgactaattaagaaagggagaacttctataagtatggcacaaagcatttttgaaatacatttgtaaaaagtattatagtaagcgataggcctataattaattgcactgctagaactatcaacattagggattaaggagatcataatatcatttaaagaaatgagaatattaccaattttgaagaaatcaagaatagaagcaaagacctttgtaccaatttccttctacatttctttatataatctagaatcatacccatcaagacccagacttttaacaaaatagcgccttcttgacattgcccacagtaaaatcctcaatcataccacattattgatctagatcaagtttgttgccaaggtcaatacatcgagatcaatctttgttatttctgaaatctgactatgcagagaacttttaaagtgatttagatagtgagcaacaatctctttgtatgtgttaaccagcctcccattttatcaataaagaagtgatcatgttatcctccctcctttttttaagactagatgaaaataagaaattttttatcgtcgaattgaagtcaggtaaacttacttctttgctttaaatagttcgcaaacatactggcttgaattttaaactgttcatgagaagtcttttctacctggtgtaaaaaattattattttgatcaacttgcaagtgtaactgagcctcatggtagctagtttttgctaaatagtagccttgctcaacattcccatcaatattcatgttgaacttctttaaatcatgcttgggtcgaagaaatatccccataatttgcttcaaacctgtgctcttcagctctttactccagtcatgctgaacaacaccctgaaactccatatgcttagaccaaaaatttaagaaacataaaggtttaatactatggttccccacttgcatagattttacaatgcaaagacaatgatcagacaccacatcccattgaaaaatttatttagtttgagggaataaatccatacaagtttcattcttaaacacgttgatcaattatagaaaagatcttatcaccattcttatgcttattacaccaagtgaaaaaaaaaactcttaactcttcaacttgtttgcaaagcaaagtgccaaccaattcctaacattaattagctaagaatttgtgatgtttcaaccctaaacacgatccttagtttccaaaatagtattaaaattacccagtaagaattaaggttgatcaaaaacccaataagagccaaggttgatcacaaaaagcaaaattagctaaactctatcataaatcaaccctttccaccacaatgttaaatcatacacaaaagtgacaaaaacctcactcttatggccaaacattctcactttacaatggacatattggatctccacttgaggctccccaagtaggatttggccaaaagtggttcttcgatctccacttgaggctccctaggtgggatttggtcgtcggtgttagtcctaagagaatttgatggtggccttggaggaagagttgaggagttagtttcgagacttgctcctggcacttgggacgcaggaatagtcccgattctaactccattaactggcatgcccctagttgattggccagctgtcaagatttctctgttaacacttgtagaacctgttccaaccatatttctggtaacttccttgagtcatggctctcaatgaaagcaccaaaatattgaatcaaaaatttagactagacttctaagctacacccactcactaaattggcaagaacgaaaaagtttttaaataattataagagagacacattaaatttatagtagtttactccctgtatcacgacagtaatggaactacatcttcataattacgattgaactgtgagacatgacttgataaatcattgaattagctttgaaactcaagttgaatcgtgtcaatcagatcaatattgagtgagttatgactattttactgaaggcaattcatgacccagcgcgcaggttgacatccagcacccaggttgatattccaacactcaagttgacatatgacgtcaacctggacagtgggtaagtgtaaaaattttcaagggatgtactttaagatgcctaagtgatattttgacattatttagcctatatttgtgttatggcaaagctgatcaccagttctcggagatgttgcttttatgcagaaatgagagactcaaaactcttcatttttgagcgagtttcccatgttggaaatgagaaatgtgaatttgtgaatttcacttctcagaattgaaaactagacgaacggttgaaatggaatcaaaattgaataagcaaaaccaagcgcactaggccatttgtcaacctaggcattaggtacgctattctcaagctcccaggatctcgttttgctacttctaaagtttttgaacttgagaatgaggtctcttaccctgtttttgaccattccaaattcattggtcaaattagatttgtcatttgagcaattgaaggtagcgtcccagaataattgtcatcctgggtgctaggcccagcaccaagtcaacctgggcgttggtccctgtttccaagggcttcagtttatggttttctcctaaatttctcttgaatcttcattatttcttatgacaaaaaaaatgctcggaacactttttggtgaacttgattggaaataggccaggttaacaatatgttaacctgggcactaggtcccaattctggccctccaaaatttttgtttagtccttggaaatagttgaatctcaaatattttctaaaaatggagaagatgctcaaaagagttcttgaaaaaacttcattgaaagtgcccaagttgacaaaatgtcaacctgggtgttgggtctgttgggttttgtgccc

SEQ ID NO: 242301 - DNA, 2384 bp, Cannabis indica
tcatcttatgtaactaaaatagttaaatgaaggtttgatttctaaaggaattgaatatatataagttagacttagagcgctcattggaatatgcggtgccatgtgataataaaactgaaaatacttacataataatgcaaatttatagtaaaagtatgttataataatgttataaagctttcctaaataataaatatattagttgtataaggactaacctaacttgtcaaaaaagtcaaaactgtatgcagttcaagacttgaaaaaaaaaaaaaaaatcatacttaaatttatgcttattgaaaaaataaataataataaattgatgagaaatatttatatatatatatatatttaagaatgaactgaaaaactaaaagagatgagcatatcataaaaaaataaagaattataaattaggatgcctcaagaaaattggtaagtaatttactaaaaaattctaaattaatttgttaagatttactaaaaaaatattgaatcttcttttatttttttttattttgaagagggtacgatttgataattgtcaaaatttaaaagataaaattgctaatttacaaaaatacactagtattttaaaagaataatgagatagatcatagaacctaatttaaagattaaatttatgtaaatataaaagtcaggtagaatttttaacaaattatgtatttcaaaagacagaatcaatattatcaaaaaaaaaattgagagaataaatttactaattattttatttataagttgttgtaacatacgttaactattcttgttctcattgaaaaaattaagatcatacccatagaaaaaaaaaatcagaaccgaaaatattattattaagattatagagaacggacttgtaataaataggcatccaaaaaaaggaagaaaatataggaaaagtggataaaattgataagtaatgtttgaacaaacagatgctattgcaataagttttggccaaatactaattaaagttttctgagaaattctgtcggtggagtgtccaaataaaaatcacattgaaaaaggatcaaaattttgcaggtcaaaatatattttgagattaatgagacacagcaattctcggttcactagtcaaaaagtattaatacaataataaaaaggcaacgaaaataaaatacacaattggttctctaactatttatatattaaattaattcattattttgtgactaattaattaaggtactaattggtagacagcttgataataataataagttttaattaaaaataaaataaaaaacaatggaaggtaaggggagctaattagccaattaggtgcttcattgactttttattgatgttttaatcattgtagaaaaggaaagaccaaaataaacacaaaattacaaactatgctagcttgcatacgaaattttgagcaacattaaatttaatttttggggtttctaaaattctaattctttatatatagaagtacatttttttatatagaaatacttgttatgaaacccataatttttgttaatgatgaaagattgttggattggtgtgctgaccacgtggaacccaggtatggaattggagagggttacagatcacaatcacacgtggacatcatatatgggcccaacgaggagagagagtcggcccaatagaggtgaggtggagacatctgtgtttggttaagaaagcactgttccaacctcatttgccgcgtttctctcactctaatctaaatttaatctcatctattacttttcatatctttaacctgctacttctcttccatatatatgtatctaatataataataataataataataatacgcattaaactcttttattaaaatattcacgttaacaatttgcaatatttatttcttacgaaacacttaacaacctacaatcaattttgtcgtattttccagtgtacatgtaaatatatatatgcactaataatttgctagtttcttaagattcttcatattaaaacaatatgcataataaagacgtattattattattattatctcaaaaatagctaggctcccatttgcaaaatcaatttaatcaaaatattaatttggattgatattgaaaatttgaggataaattttagaataattattgaaatacaattaaattaaacatatttttttacatataatataatgatgtataattaatcttaaatatagcataatgtttagagcgaggctgttatcaaagaattgtttaaggctgttataaaagggaaatttgattttctatgcttagaaaatcaaaaaatttgatttttaaaccaataattaaaaccctaaaaaaactataccttttttttcaaaaccccaaaaatacccccaaactaaaact

SEQ ID NO: 242302 - DNA, 1229 bp, Cannabis indica
taactccaaaaaaaaaaaaaaagaaaaaaacaatcagatcacttttctacgttttgaatcaataaatgtaaaattaattattctttcttattgtttgaaatttagataattaatttttcattagaaaatggataagaaaaaaaaaagtaaagcaaagtaatgttgctttattagtgaattaagtacctagagaattataggcataggcggacttaagggtattgagagtgagttttgatttaaaaatatattaatataaaattgttatattttcataaatacatagtagttaaatagaacaattagttaagatactttaaatttatatgagaaaccattttttgaatttttttgcccattttcttttacttgtatctatattttttttttattaaaaagaataaatgaagtataaggttcaaactaggatcaaacttatgacggctatgtaaggccaagttcttgtctaacctatcatttttatatttagattgattttattttgatttatgcttgaatagaaaaaatacaataaaaattcaacactagaactttacaagcttgatcatctgccctagaaactcattctaggcggctagtgcttgggtttcccgaaccagaataataacttatgaccgggagatgctgctaaaccatcattctacttaaatttagttagttattgattgatttagattatattaaatgtataactaagtccaccctaaaattcaatccggattccgccactcatgacatccttatttattttttttacagctccaccctcttctcatgctatttggcttcattgtcctcggaggtgaaggtatatatattatacttctaacaaaagatttttgtgaatcacgaacatatattgcttcaattttatctcacattaatttagatttagatagttcaccttattattggcagatcaataagacaaaatctaaagctctatgtttattatgtttggtacagctataataagttataaatcacttcctttgacgaaggaggtgaagaaattagttcacctagtactccatgcacttgccttgggactaggcattattggcatatacacagcatttaagtatcacaatgagagtggcattgctaatctctacagtttgcactcctggcttggtattggtgttattgtactctacgctattcaggtatctatgcttatatgcttcaaaaaaccttttatttaatag

SEQ ID NO: 242303 - DNA, 957 bp, Cannabis indica
ttcatttcgaattagctcaataacatactgctttcttttatcttctttgtctggtaaatactgagtttcttttctgttctttactttttgggaaatggagggtataactgaaaacatggcccatgttctaactctaactgataaggaagccactgtccatgagctcttagatgatgaagggggagatcaacaaactgggaaaacattctgtcttgtgtttagagtccttactacccgaactatcaaaatcgagtggtttgaagaggctatgagaaatgcctggaccactcgtactcctattaccttctctgagtatggcaatgggatgtttatggctgagtttggatgtgaaggcgacatgaggagagtgatcgagggccagccatggaattttgatcactgtcttttcactagtgcaaacccagctggccttaatacccttctgcctaaccagcttaggtattctcccttttggatccaagctcattccatccctttcgctatgaagtcctataaacttgctaaaatgattgtgggtaataagttcacttggaaacacagttcaacctatgaacggctggactggggtattgccaatgacaagtggcttcaccagtatccccaagccattctccatcaccttagtttttatggatcggatcatagggttttaaaattagttcttgttgatgatagcatgagtagggcgagaaataaaagatttaggtttgaaaatcattggcttactgacccttctttctttactactgttagtaaatcttggcgttgccctgctctcagctctaataattgtcctttgtctaatttccttagtaaacaggttagttgtattactgctatcagggcttggaatgcctcgaataatagtttagctactcaaataaagtgtatagataaaaagcttaatgatactttttcttcccttcctgcttctaa

SEQ ID NO: 242304 - DNA, 1139 bp, Cannabis indica
ccaagacatatttgtctcggtctatttgcgaattgagtaaattcatgtatatctcttaagtagtcgtcatttcatgggttctcttccttgttatgtacaatcttcctccatggttagtgatgaaaatgaaatttaatatgctttctttaatgatatcaggcccgcaacaacctggacataatattgatgtatatttggaaccattgattgacgatttaatagaattgtatgagaatggtgtttaggcctatggtggttctaaaaagaattctttaatctgataacagtgttattatggactattagtgatttttcagcttacagtattttatcaggcttagcacaaaagattacaaagattatccgatttgttgcactaatacatgggcttgtcgcttggcaaatgaacacaagatgttttatatatggtcagagttgaggcaattagaattaacaaaccaagaactgactaatatgagattgatagaggattaagggggaaaggaacaatggtgactgtgtctaagtttgaactagatcaagctcaattagtcgtgatgaacaataatgcagaggttcaaccatgtataacttaagttataggtagcttttcctttggataacctttaattagtcaagacgaacgataacttgattaacattacatgttttgcagtgaccataaggagttatttcaatcaatggttcaaagacatcataaaaataaacgaaaatgggtaacagacgagcattgtcaaactttcattgggtggttaaggaataccattctagcaaagttgaacgaacctaatcatggagtatccaatgagttgagtcatattgctcttgaagcaaattttgtggtagcaaagcataaaacgtacattgtaaggggtaaacgttttgatacaaagtcaagagatgatgctcgagaggttcaaaatgttggaatatattttaccataatctatatttactaacaagtacgtttaataacatcctaaatatgaatttgtaaaacaatgaaacgtaaacacatataaagtttgagaaaccttacattggttgcagcggaatataatgactcattcctctcatatctctaaccctcgttcctttctgtcgcaaagtattatcaa

SEQ ID NO: 242305 - DNA, 1381 bp, Cannabis indica
aaaaaaaaaactttgataaccaacctctagtaattgcaacttgtttcatattttgtattcttcttctttgatacttgaattgggagaaaagaatagaaagaaaaaaaaagaaaaaaatggagtcatcatgtacttttactactaccactgctctgttattattacactatgaccaaccaccttctgttttgtcgtgtttcagtattgtttttcaattctaactcttggggttttggtggtgtaaactgtaacttgtcttcatgaaaattaaatgcaagtttctccctcttatggagatgattagattatgatgtatcatgttattatgtaattagttcttagtaaagaagaaaacaaaacgaaaaaaaacattgccctcacgcaggatcgaactacggaccttcagtttacaagactgacgctctaccactgagctataagggctcttcttgtctaactttagtttcattataatttctaagttgaccattgcactatataaattaaagctcaattggcaaggcttcaggctttaaagcataatatactattgatgtgatcacgtataaatttaagaaatttttgcaccaaagaatcttattttccacttatttacgaatttggcctaccgttttctttgttttgctttttcttcatatcttatatgtgtattacaggtttataagttttagctatatatcattgcttttttcaattagcccaatcagttacgatcatttctttctttttccttattttttctctctcattgatcagcatactcaagtttctctcccattgcttcaccactcacgatctcagacggttcagtttcttctctctctatatattttgagttgaatcagtaagatatcttttcttttacatttcattttgattttatttttttctttgttgttcttcattgtgttttcgaattagaactgattttagggtttgttttttgttctgtaagagtttgaatgtgttgctatggtgattacgagaagctcgatttctccatcaccttctggtttgaagagaaaagatgttggtgatgaaggaggcaatgtgaggaaaatatgtttgggtgatgataagagtgatgattctgtgggtgtggatgttgtgaatgagaggaggagtaagaagagtaatgattctgtgtgtaaggatgttgagaatgagaggagtaagaaaataaacgagaaagttgctgagaatgtgaaaaagagttcagtgagttctttgtcgaagaaaaagagtcgtgtgcttgatatttctcctgatgatcgtaaatcaaagaagctaaagttgaatagtgtggcagaggttgatgaaggagttctagaatctgacgatgaaagtagtattgcgattc

SEQ ID NO: 242306 - DNA, 800 bp, Cannabis indica
attaaatatgtgtaatatattaaagtgtgtatgataaaaatattataatcattttataacatatgagagttatttattattacgagtaacttttacaattatcactaatattaagagtataaaatgtattatacatcataatttaaaaattttaaaaattattagaattatagctgtttgagaatgagttttatacttattttttaagttaaaatttcaaatagtaatatcatatacactaattaaagagatctaaaatattcatattgaaataaaaaatttatcaaaaaagtactttgttaaaaaatcttaaggcttgataatttccaaaactatttactagacaacagtgcttagagatatgagaaaataagattttgaacaaatgtgatactacatgttcacaagtcatggtaatctccattaatttatactcaaagttgtgagtgattgtatatatatatatattattctcttattatatatatgtgttatataatatattttgtgcatctttttttttttttactatttttatttgtatatatatatacataatatatagtgtatataattgtaatatctatttaatcaatttttaaataaaatctctaacacaatattctattgttattattatatgaattatataaactagttgattaagtcttatagagctagcttagtggtgagggtagggatgggaaaaagggagaggtcgatgtcatgggttcgaacctaggaccttgaaactattaaatggttgtaaaataccattacgctacactacaaaaaaaaaa

SEQ ID NO: 242307 - DNA, 523 bp, Cannabis indica
ataatatttgttgagggtggagcaaggacggagtgaggtttgaacgatgtaaaaaatggaaggggaagggcggatgaaaccgaagagaaggggaagagaggggaaaataattctgaaggatgaataggaggttttatataggtttaataccggttagggtctgttggtagtagtttttcccgccactattaataaaacggtcagagaatcttttgtatcagtagcgggtctctgctagtaataacccatcgctaatactctttgaaataataagttggaatttttctgcatttattgggttaataattacaagcgggttgtctgccgacattaaatcttcctgttgctaatactcattttttattattttttaaatttttttattcaaacactaatacatgtggtcaccataagtctgctggtaacattttttttggaaccaagaaaaaatcattcattcaataacttttaacaagtacaatagatttaagagcagaagaagcattaagctcattaaagatac

SEQ ID NO: 242308 - DNA, 1669 bp, Cannabis indica
aatcctacgcttttttaaagtatcaacattaacctactcaaggtagttatattactaagggaataacattctaaggctaaaccctcaaaacaaataaggtaatgtatcacattactattcccttgttagcattaacccgttctaaacacccccttaaggtatatcaacgaaaggaaatatataatttatatatgatcgtaaggggttttttttaattttttttattttatttataattttatgatttaaagtttttattcataaaactataattttaaagttttaaaattataaaaatacgattttctcaacaaaaaatataataaaacaactaaaaactaacaaaaattaacttcaaaacaactataaataaactattaaataattaaaaataacgagaaaaaatcaacatcatgacaactataactctattataaaataataaaaaaaaatatcgaacaatttactaaagtttgtatttttgtaaataaaaagttcaaacagcaaaaataaaaatttctcggtgtaaatatattttgtaatttttttaaaaattttaatctatgtaaaaatttctataataaattgctagcaaattatttccgtacataatgctttgtagagagtatatactacaacaatatatttggagcaatgcatgattaagatgcaatggtcttgatcgatcgatgttaggtgtgtttattcaattcttttttttttttttgagtgtatcgtaatggtattttacaattatttaatagcttaatagcttcaaggtcctaggttcgaactcatgacctctccctttttcctatccctccctcaccactaagctagccttagtggctaagtgtgtttattcaattcaattcgcactattttgctcatagtatatccaatccgcactatgtgcggatttcatattttagatccaatctaatctgcacagtagcaaatccaatccaatccaatccgcaaaaatacggatggaatcggttcttttggattggttacttttaatattaaattatttgatattataaaaaaaaatatttttttcacataactagcaacaaaataaaataaaaaatattgttattttatatctccaataacaaattaaaataaataaaataacaaataacaaatttaaaagaagaaaaaaaatatatatatatataaagaaatgtttaattttgttttaaattatatgtagaaaaaaaatatatatataaaaatggaatatatatttgatctattaaattttgaaatataactgtactatatgtattagacttttaaataattattttctttacattaaaatattaattgtatgtataatttttaatttttttataaatatgtgtggattggattagatcgattacttttacatgtcaatcaacattcaatccgcacaagtgtgaattttgaattttccaatccaatccaatccaatctgcactttgctgattaaattggattagatcgtgcagattaaattggacagactattttatgaacaccctaatcgatgctatatcatcaatattgatggatataaactaactagtaaaaagcacatacaaggcatgtgcttattcagtcaagagactaaaaaaaatctatgcaaaataatttttttgtgaaaatataaatagga

SEQ ID NO: 242309 - DNA, 1031 bp, Cannabis indica
gccttcaatgttccatctcctatcctcactcaatgaactggcgtcgctgctcatcgaacacaggttttattgcagtacagagatcctcctgatcatggtgcatggtgtaagtatgaccttgcatgagtccaagggcgtcatgaaggtttttgaatctcaatgtcatccctcaccatcttctaagcattggttgtgaatgggattctagtgctaggaatgctttgatcggctacagaactggtattcccagtctcttgcacacctggtgtgatcccaggcagaagggaaatcacaccttggcccacataggtggttgtgtgttaggctgctcgggattggttcttggtaagactcttgtattcccaagggtttgcatagcacgatctatcaccattgggtcactttgatcaaccaagcctctgcgagtttgcaacaccattctgtgtgcctgttgaaacataagacgaagaacacacttggatttttttctctcaatgaaagcaccaaaatgttgacctcgcttttagtcaacgagaatgagtcaattatgaagcgattagaaatataataaaaacagagcaaaaaccattaagcaataaagaaaactaggttttaaattggttcgacccctttagttcgataatagcctactccccttagattgtattaacttgagaacaaagaatatagtgttttctctctcaaagctctcacaatgaaatctctgagtgtttctcttagatctctctttaaagaaattcttttgatcgtttttacagtgaagcttgatcactatttataagggcttaatgcatgaacgaaggtttcccttttgcttgcataattggaaagaacatttcttgcataattagaatacatgaaatgggggattgagatagcctgccatattcctcagattcaatcccatgattgtagagattgccttcgtgcttgggcttcacgataccattctaagtagtcaagtctttgtacaaaactcgaagaactaacctcattctttgctcggataa

SEQ ID NO: 242310 - DNA, 682 bp, Cannabis indica
tgtaactaaaatagaattcaaaagagtcaattaaaaaaaaattaattggtagtgaaagaagtagtccatgcaccttatgtatagtatttagttttcacatattatcaatgtaagactctctaatattcttcctcaaagttgtgactatttatttgctcaccaatcttgcacgactcgattacaagtaatttttctttgtctcacagtggcttttttgggctaattatttcctaattacaagcggctcttttgactcacttttttggattagtttttagatttggatcggttactcattagaattttagtttgagtctgataacatattagaatatgaaagtgtatagttgatgaagtaggaatatgtgagtatatggtaaagtgcatgagatccatctcaaaattaattaataatgaaatgagtaattcatacattttatatatgatatttagtttttatatattatcaatacgagactctctaataatctaatgtactatatttataatctatacaattatatattgttagaatttgaggataagatgaatgaggttccatcccaaaaccaattggcaatgggaggagtagccctttacgtgtcggtagtcaagtcacactaggtctaagcatgcatgtggactaactctaatacaccctcctcacgtttgggcctggaaa

SEQ ID NO: 242311 - DNA, 1754 bp, Cannabis indica
  modified_base (1700)..(1700): a, c, t, g, unknown or other
aatggcttaaaaaaatgtaaccatgatggttacaataaaaatgtaactattgaaacctcttccatatatatatttatattgctaaattgggctatatgatgaatgcatgtctacttttgtaaagagagatacaagcatgcaacaactatttacatttaagagaccaaactaactactatttttgttctatattgttttgtcaaacgggatagtacgcactcacagctaaccattattatcatttattatctttcaagaaaaatttactttaatttccttagaacaaaaaaaaaaaaaaaaagaaaaatttactttcacttttttttttatttaaaaaatcttagaaaatgtatatataatgatcgaggatatcgtttttatatggagacaattaacttgatatcgatttcatcagttaatatcctgttattaatatataagtattattttaaaagatattatttaaaatgagagacattatgaatatgtatgatccctactccctagttgagtcgttgtgtgatagagtttacttttttattttttgaacaagttgtagagtttactttgttcacacactcattaaaaatatatactatactattaattgcagaagatatatcaaaaaaaaaaatatattggacaactttaaagaattttgggatactgagattttgatggtatcatgcattacaaaattcatatagccaactggattaaaatcaattatatatataagtcgattacatacattaacatatacatatcactgcaatttatttataatgatatttttggagagaacatatacaatatttttaacgaaggttcacactgcgactataatattacagctgaaacctcttcgatttgaacctggacataatattaatttaagcacaaagagttaatacatttttattccccttgacggaaaaacaaattttcaagcagatttaatttgattttcttgttgtaaaacgagggagcaacgtgttaagatatatattccctgttaataaggccacgtgtatttgccttattatctcccgagttagggtatcgttttcaatagttttttttttattattatcaaaaagggtttctaattagttaattaaatacactgtgtggagtcaacaaaagataattaattaatcacggcatcttgtcaaagtctaagctaatttctctgcagttccaaactatatacagttcaatggcaattattgatcagttcatagttcatacataatgaaatttgacatgcagtataattaatcgatcatatctaacttgtgaaaaaatattgaactccatatatcattatatatatgcatgcctaacgaaaaaacttgcgccccattttaatttcttttactttttctttggcttttaattagattttgtccttaattatattcatggttactttgttaggatatcgtcagcaatttatctagagtaagagtttcacttaaattaataagacttttaggtacttaattaatttcattgctaaagacattattgcgggcatgggagaagatcaataaagtatgtttgtaatatctagggtaaatgtggtaatatttttgtttttgagaaacaaaaaaaaatatttcataattgatttttttttatttaaaattaaaaaataaaaataaaatttaaaaaaattaaaatagtttattaaacanattttttttttgtaaatatttaactttttaattaaaaaaaatattataaaacac

SEQ ID NO: 242312 - DNA, 510 bp, Cannabis indica
ttttttcaagggttcatattactttgctatcacctttgattttgttgagccatttaataagaagggattaatggtcaatgccacagtccttcacaatttattatttacatgcaaaagtaaattgaacattatctctatatttcttagtactaatgcatgtcactatgaatttcgctaataattttacttaaatatgttgaaataaattcttaaccaagtttaatatacaagtagagtaaatgttgaagacacatcttactaatggatctgtttttgccattaatttcatcaactatcaaaacttctataaatagaaatgtctctcaaacaagtagtgtagatcacaggctgagcaagattgaactccaagaactcatttggtaggtgtataagagttgtattatattaaataataaatgacattatatttagataaaataatgtattgtattaattattacgacaaaaattttaataacaatataagttgtattattcaatacataacaa

SEQ ID NO: 242313 - DNA, 1254 bp, Cannabis indica
tttttaaaagttaaataaataattacattaataataaaaataataaaatcttataattttaaaatagggtatataatataatagataatatataattaacatgtcaatatctactactgcacattattaattacaaaaataaaaaatcttatcattatattttaataaaatgtgtcaaaaaaaaactaaatatatgtatctaaactacaatgcaacacacatacaaacaaaaaaaaattcaggaagaaaataaaaatatataccaaaaacaaataaacataaataaaaaataactaaaaaataactattgaacaaaaatatattttgaaacccacttaaaaataattgaaaagtaacataaaaataataaaacaaatacacatatatacaacaaagaaattgtgtggaacaaactaaaatatacaccataaattttttacataaactaaacaacaactgtacaaataaacacataaaaataatagtataataattataaaacacttaaataacaacataagaataattataaaataactgtaaaataataataaaaaaaacaataaaaaaataatcaagacaataactttgtttattttttttttcttgaaacatgacatcaattttgttatattatccaaatcattcataaattgaatgtgaatagactacaaaatatctaaaaaacactattttcattaatcatgtaaaaaaaaaaaaacttacaaagatagagaaagggtgttgaaaaaataatgagaaaagtaatgaaagtgaaagaatcatattttagtaaaggttaaagaaattaattaatgagtgtgaatagtaagaaaatgtaatagaaatatgataagtgtttgtatttttttttttaaataaaactttgaacgagaacaaaaaagttttaaaagaaatataaaaatatagacttattatatatatttttatatataaagacaaaaaaaaattgtgtcgagaggaaaagaaaattggaaaaaaaaaaaaaagataaacagagagaaaagagaaagagaaaaaatgtaaaccaagcttaaaaaaaaaacaaagaaagagctatgaaaaagaagagtcaataaaaaaaataagaaagagatatacaaaaaaaataactatataaaaattgtaacaaataaaagagttaaaaaaaatataaaaattcactcaaagtatagatgtaaatatccctaaataatttatgtctatcatctatttcgaaataataataataat

SEQ ID NO: 242314 - DNA, 931 bp, Cannabis indica
gccaaacatgcacttaatttttacaatttataaaaactattcttaacacataaccagaaagtacgtcactcatatttgttgcatataaatatatatatatgtatatatatcgtttttttttttttttttctttgattcattcagagtttgaaaacacaagcatgacatggagtgatgaggttagaatgattttagagagttaattagaatgttgtaatcaatgcttttggtttgttaatttggtgctatggtaatctaccgcatgttcattcatcctaccaaatccagttaatttttagaattgtcattattgaactggaccactaatttccattttagtttgtgcatttgtaaaacttgaagaatccgctacataattttggcattcctcttcttattaaacacttatatcagcatatctactttattctttaaaatatattatcaaaatatctttttttatttatttattttacactctatataagtttttttaatttattttctgtatcatttaaatattatatttataaaaatatttattacttttatttatacttttaatattaatatatatataattaaaaataaagtaatgaataatgttctgtaaatatagaaaaactacaattttttttttactcaaatcggtatttttattaattaatcaaattgttaaaaacaatagaatgttcttcaaatgaataatcctccaattgaagcacacgacttggaaagaaacaagaatctctggctaagcagtgagccggcttgtttgcagatcatttgacaaaacacaattcaacattgtctaaagataaaagcaacacatgaacatgatacactaaaagaccaaaagaagatgacatagagattttactttgaatagcttgtatgcataccaagcggtctgattccaaaattacttgtc

SEQ ID NO: 242315 - DNA, 744 bp, Cannabis indica
ctaacatattcccacaattgttttaatatctagggttggtccctgacatatatcggggtttcaggtcaactaatcctggttttagttttttgactttgactgtttctggttgatgaccaactttccatgtggcagcttgatatggcaaccatagtgggccaatatgtactcacgtcgcaattcttttacaaaatatctttaccggattaactaccccttgtctttttgtcacttgctccctctcgagataaccgaggtgtcccttcctcctgtagaggagggttataatccctggtcgctcgagttaatgggcagatcgagctgattatgggcattgccctgcccctttatatattgttgaaagtgtcctcgtgctatgagaccttctatctcatccttcaactgacgacactcttccgtggtatgaccaatatccccatgatattcacaccgtttagttgggtcccttttacgtctcgcatgtttcataggctttgtcttgctaaaaagcgacttcctgtatatgtgcgaggtagatttcttttcgagtttcattgagctcggtatattcaccataaagagggatatatttgttgtgtttcttctgtttcttatccttgggcagccttttcgaatcgtcttttctttttgatcgtgaggcttctctcgaactctttaatagaatcataccccggttgtcttctgggttccctaatttgatgtttctgaacttatctctaactc

SEQ ID NO: 242316 - DNA, 656 bp, Cannabis indica
attccaaatagtgaactagaggataagttatacatacaactataagaatttccctctaatattagttaaaatatacaagattaagaagtctacctacacattaaaataaacatatcaaaaattgtatttttatcatatcttttcctttaggtttgaaaagagcattatggaattaattgtataccagaaggtcagtgggagcaatatttatattatatatagataaatgtataaatgaagtcaagatgttctttgaggagtatgtcacacaagaaacatacattcgggcatcagtgaattccctgaggactgcccttcaataatcaagcgtctgagtgataacatgccacaaaacacaaagatcaagtcaaacataacaattattttattttgaatgaaagtggttatatgttatttctccgctatttaattaaatgaaatgtaaagaatgtccatgtttcataaatagttatgtaaatacgatcaaaggtaattgctatttcaatcctataaatagtagtgaaaatattgtaaagacatgacacaatttctggcttagaaaaactttgtcatattgtaatctcaacccaaagatactaaaaaataatatagaattgtggaacatgcatattttaactacaaaattatgtaaaaat

SEQ ID NO: 242317 - DNA, 946 bp, Cannabis indica
acagttatgacagttagtgtcctagaacatagggaatagtattagtaggcacactagagttaacaatatatttatttatttggaatatttttaactagaaaatatactattacatacattagaaatttgaatatacaattgcaaatattaagtatttttcttcttaaaattggttgtcaattcatgtattatataattattaataaatattaaaaaattatgagtacttctggccaaaactccttatgttttatttttatacaaattttttgactttttttggcaatatgatcccttatgtagggaatggtggcaaatttaaattttttgtctaattattgtaatctttcagttttttcaggccacaacgtttgaatgttcaaaaatttacctatatcttctttagtaatgcaagccaaagcattcaacaggggatcgcagatcgtcttgattttcataagctcaataaggaggataatttttttgggaactcgatcatctggtcgaagagtaaggtgaaagatttcaagtttattaaggaggagatttgttccaagatagaaagttggtgttttgttgatgtcatctatcttttcatttcagagagtaacattttgttgcatgttcttacttgatgtcatttggtatctttcgcaaaaaaaatttatgttgagattgattccgaggttgtagttgataaaattatatgtacgaacttgaatcgatctcctttttcaaatgtaaaatcatcattaacttatcatcgttcttccctaaaatagtaggttttaggatattgcctaataacatagcaaataattaagaaggttctagctaggtgtaagttggtatggaattggatttattaattcaaacctatcttaaaattatgtaactttgtacatcttgttctatcaacagaagttggataactctaaaaaaaatt

SEQ ID NO: 242318 - DNA, 587 bp, Cannabis indica
ataaaaatataattaaaaaaattgtatatgtatgatcaattgatgataaccgggtttatatgcattattcttctttatatattctcaattaattttagagaataatatataggggaattactttgtatactgtttttatttaagtttttttttttttaaatttacgatttgggtttctaaagtaattgcagtgctagttgcaataagggtttccatacgattttttgttgcgatttaagttgtagcactagttgcaatagagatttttatttaaatatgtactcttcttattagaaaaaagtgtgattatacttaaattaggttaatttttttttctaaaatttgtgttataaaaataatgatttatacataaaaaagatggttgaaagttattaaaacttattgttattgataacatctttttttcttttcaaccaaaaaaagagatcccgctaatttagtaataatctgttttttttttttataaagtcaacttcaatttatagaaaaataaagataaaataatattaaaatttatagcatattctacaacactttaatattgggacctaatacaataggtattg

SEQ ID NO: 242319 - DNA, 586 bp, Cannabis indica
atacatgtaacattcaattcaaattaatggttcttttttctatttacaaaataatttccaagcttatagaagaaatactttgattatttgcataacctccttgtaataatagttgatctttgatatcttaagttgaaatcatcatatttttttactataaattcggagtaaacaagtgttgaaagatcttcataaaaagggatgccgattagaaactgcactaactaccaccgctaactcaaaaagttaaaaaaaaatactaaatgcgagatgcagggtaggcctgaattttaagggatgttatacaaaatattagtttttttttttaatataaaactaatttatatatagtgattaaatttttttcaagcacacattgctcagacagatccatgtcaatgatctgatcttgcccaaatactcatttcttattcagatattcaaaccaccaagactaattaatatgaccatagccttctatgctagatcattattgatttgttgttatctgaggtggtagcattaacatgattattggatgaagttccattcagcacatagatgcactactacaaaaatagttttt

SEQ ID NO: 242320 - DNA, 750 bp, Cannabis indica
ttaagttttctttgtctttttcaattaattcaagttttatttgtgattgattttagttttgaattttgttttttagacattattactgttgtaataacttgttttgagggtgggaattcacgacaaacttattcactaatattttgtttaaagaaaaagttattggagggaaatggtatttatgtttgaattaattaattatatgattgaagaaagatattaatccagcttaatatgactcatattatatacataaaactctaatcaactttaatttctagtaaattagagaaagtgattagttgcatcaaattaaaaggtataagtacaaaagttattagctaaggaaaaagctttcctcacaattgaattggccatttggagtcattcaagattaatccaaatgctataataattattgttcaatcttgtgactttgtgactcgaaatagtctaaaaagtgtacggaattttatacaaaatgcataattttagaaaaattacaacacaaaaattttgtagcaccatcttgaattgtactattaagatatttggattgaaattttttgtgtaaaagctgaaagtttaggaatacgatttgatagatattaaattttggaggtacaatttagtacatggacattaatcgacatattaataaaattgaacagaattggatagaagtctttaaatttaacaatctcaatatttgaagggaatttttaatgaaatgagaagtttgaggacatg

SEQ ID NO: 242321 - DNA, 594 bp, Cannabis indica
atatataaataataaagaaaataatttaatatgagatataccttcttctcaagagatcaactcttcatgtcgccatattaccaaataccacaaaattcttaatacaattttgaaaaagaaaaaacaaatcccaaaatttcttcaattcctaaaccccaaatcaattatccagaatttaacacttgttttttttcttgaatcagcacacagataatatgtaataccgagcacaagattggattatggaacgtaaggtatacaagtagatcgatcaataagactaaaagttaaaaccaacaaaaaatcgaagatcaagccaaaaaaagaaaaaaaaacaatcaacaagccaaaccctagacgtcaatttttgcagatcttcctgaatgcatgttttcaaaagtaaagaaaagccttacagagaaagagaataaaacaactgagagaatttgagacgaaatgacttctggtgctaaagcttcttcttggtacataagtccaaaggtggtatgggatttcgcaacttccatgactttaacttgagtttgctttgtaaacaaggatggagattgtttagtcgtctggactcacttgtca

SEQ ID NO: 242322 - DNA, 1785 bp, Cannabis indica
  modified_base (1770)..(1770): a, c, t, g, unknown or other
aaagacttcaatttagtgaagtaggaagagacagagttatcaccctgttgaagatgagtcaattgagtctgtaattggaagacctgaggaccattaccttcattaaagcgttcagctaagtcgttccacatatcggtagccaagtcaaaatataatatgctttgagcaatctcaggagacacagagttaactaaccaagacatgaccatattgttacatcttaaccaagaattgagatagatgttaccaggttccgggcgaggaagggagccattgatgaatgcaattttgttcttggcattgagcgccatggtgatgcctcgcttccatggctggtaattggtgccgttgaggacggtggagacaagcacaagaccgggatgatcaccggtgctgaggaagaaagggctggaatgatcgtcagccacggatcgagaggtgagtgcttggtgcgagttgtcatcaacaatggcgggaggatcttgagaaaggggatctgtgttctgagttgaaaccctaatttgtggattacggggaggaatcgctgaaggattggaggctggagtgggatcggaattgatctctgcagctgtattgtcgatcgatgatggaggatcaccattctgcgatcgagttgaagggcgcgccattgaagctgtgggcggaattacttctgataccatatgagaaaagagagaacagagcaaaagcagagaaaaacttttattaatgctcgattgaagttttacaatgagaaggattgagctatatatagctcagatacaacaggtcataaacagttggcaaataaccgactgtaacagaaaataagctacttgaatcaagactctaacaaccaaagaaatatcctaactaactaattcaacttggtctaaaaatgttagtcatttttattggactatatattttgtagcacctaaaattgtagtcactaatcattagccttattgttaggcaccactaatattcaagtctaagaaattgaaatttaaggcaccattagaaagccaagaataagttagaattgagtgtaattagatggtgtttatttaatcacataattatattgtaattgcaaattataagtaatggaaaagtttgaatgacactatcaatcgagccttgctagctaaactagcctggcagctggcttcttctaatcctaaactggagtatttgtttgctccaaaaatactgctcgagaacctcatttttggaagtttctatgaagaacttagactcgtatggatggtagaacatactcgaagctaggaaggtgacctaaaagggttgccttactctgattggtaaggatgcaccaaccgtggattccttggttaaattttgtggaatttagtaaccttatggagagctgtcggatccgatatcctctgctgaaaacaatagctgatttatcaaataacaacacatgggatcatgaccttacttgtaatgtttttggtgaggagattggctctgaaataactaaaattccccggcttccattagaggaaaatgattgcctaatatggaagaacaatggtgcaggtttattctcagtcaaggaagcgtatctcaccgatcaaggaatcaggtttgaaggtcaaagaaatatctggagatggatttggaaaccggatatccatcctagaattagtatgaccttatggagggccgattcaagacatccttcctactagagacaagcttcatttgtcaacgaataaggattagaatctgctttgctanctttttcgggactgt

SEQ ID NO: 242323 - DNA, 640 bp, Cannabis indica
tgacttgtctttaattgtttaaggtagttttatggtacgattattgggcaagagaagtgatttattttgtactcataacttctatttcaacgacttttcaacttttagtcttttgcaggttagtatttcaagtctttatatttgatatggattgttttatattatattatgaatatggattgttttgtcatcgttctttcacattatttaacttttattaaatgttgttgtaatatagttttatttattgttatttaatttgttgcttggttttgtggagggcctacaattattaagactttgccaataagtttaatttaatataatcaaaatcatacgtgttttgctgagtgttcttaaattattacttttagcctaaagggttatacttttggctggttctctgtaggttttagtcaggattccgttttgtagttgagttttagtttttcaattaggtgtttaaatttgaatttagtctattaagtttaattcaaggattttcttttctaatactttgttttttttttttttgtttggttgttttttcaggtagtatttctgtattataagtcgaaactttggttctctagtaacaattatcaacaaaggaaatgtattttttaatgagctggaagtg

SEQ ID NO: 242324 - DNA, 836 bp, Cannabis indica
tcttgtttgtcgagatcaaaatggcgactgagcaagtattgtgcgcccgctcctagaaggagcggggcaatcatggcgagagaacccgtgtggaaggccttagagccagtacggaagactatgcttaagtccatcttgactccacttaagaaaatgaacattgtgtatgcaaagagtgagattgtgcccaatatgtcttggttgttgagtcgaaatatcgagttgtaatacttttctatgaattgtgctgcgacaccttggcctaggacaattccagcctagttatatgtaccaaaaagaaaatttcttagttgttatgtatacaataaattacaatagaaagtagttaactttaactatattgtttttttagtttgttaaattttgaggccctttttcctttatattgattgtatttgttttgctccataggacaatagggtgatatttatactttttctcctattatttattaaattaaaaatgagtcaaacttaatggtaataataatttaccatttttgttgtcatttttttcatttctaaataggttttttttttttgtttaaattttagtagtaatttattttataaattcaattacaaaattatattttattggttaatttgtccatccaaaagcaattgaacctagctagactattttgtaaaagaattacaattatctaattaaataaaaagtagatttagctagaaacttttcctcctttatcaatactttaaattctattattaccttcactctccataaatatatttcaatgaaaagaaaagaaaatccaaaattatattcataagtcaaacaaattaacttac

SEQ ID NO: 242325 - DNA, 803 bp, Cannabis indica
ttcatcttcttcattctcattcttttattttctctggtttatattaatttgataggaaaatcctatcacactagttcctcatggtgagcacaagttctttcaatgagagcttgagctacttttgcctgaacatgagttccttaagtacaagtgtcaacttaacaagctccgaaagcgaaagtttcatcttaatgaattcccaatgcttgaacttcatcttaatgtgattctcatttgcgagtactagttctcaaaattaaaagattttttttcttcattgagttcctaaaacacgaatttcatcttaacctattcctcatatgcgagcacgagttcccgaaagagcaaaatctttctcaagtgtgctcctcatgggcaagcacaagctcccaaagtgcgagcttcctcttaacacgccatgcactacatgcaggagcacatgcttatctatgctatgcgaacacaggctactcttttgcaagcacaagctccatgtgagtttcggctcaatgagtgaccaatgcgcaaacttcatcttaatgtatatgcttattcttaaagttcttctcatgtgagagcacaaacacccagtgcgagctccatctcaacaaattcccaaagtgtgaacttcgtctcaaagtgttccaaaaagcaaaaactctatacatagtgatcgcaagctttaagtgctaaagcacatatcctaaatattattattataagatgcagataaaacacttgtatgcattgatttgcatggacaaaatctttgatgaagaaagctttcaacaaattaggggcta

SEQ ID NO: 242326 - DNA, 528 bp, Cannabis indica
ccaagcctataactacatgatcctaaaaaaaaattcggttttgggttaaggtaggacaagcctgcacctaaaactcacccactccaaaggtaaaaaaacacaaaaacaacaaaaaaaaaaaaaaatgacaaagatacggtctgtacggaagttttaatatttttacagttttttagattttatttacataaaatatggtatttttatgttatattcttgttattttttcatgattttttttttatttgtatattattttttatgttattttgatattgttttgttgatgttttgacgttgttttcttgttattttcatatagtcttttttgtgtgtttttatatgatactgtaaaaaatataaaagaaaaactttaaacgtaaaaatgtaaaattttacaaaaattggtgctttatataattatccttaaaaaaaatacactacaacaattttcctcatttgcggcaaaaattataaagcggcgggccgactatgcgccgccgtaataaaggcagtattagcggtgga

SEQ ID NO: 242327 - DNA, 3804 bp, Cannabis indica
aaatttcatatgaacttgaaataacaaacatcttgaatcaatggctgctgaaatttaattaacagtaacatcacttatgagcaagaaaaacaaaatcttacattcaatttgaaccaatacaagtaaaactggatcatcaaaataagcaagaatacaaattttccgaaaaacaccatttatcggtatttcaaaggaaaaaaaaaaatctgaactaaaataatgcagtcttcccagaatcaaggcaaattcattccaaggcctcaaaaccaatgaaaaccattcaaaatttcagaagaacttgaatgaaataacttagttatcttgtctaattcatctcagaacaaacatcatgattcaatggctgctgaaatttgattaacagttacatcacttatgagcaagaaaaacaaaatctttcatccaatttgaactaatacaagttaaaaagaaagaaactgaactaagacaaattcaaggcaaattcattcaagaccataaaccaatgaagattttaagcatattacattgaacacctttcaaactattcaaaatttcacatgaatgaacttatctcagatgaatggctgctgaaatcaacagttacatcacttatgagcaagaaaaacaaaatcttccatcaaatttgaactaattacaaaactgaataaccccaaatcatagtttaaacaaaaaaaaaaagatcatttttttaaaatctttctcagtaaccaatatatgggtattaaacaagaaggtctagatcttagactaaatcttcaaaattcaatatctctgcacctaaaatgaaattgaaaacaagaaaaaaaaacccttttgaaaaaaagatagatcctttcatcaatatttgttcagataatagctccaaacaaagttcagaaagatacccatgtctacaaattaacaaagaaaacccattaaatcaaaagaagagagaaaaagagagatacccgactgaagcctctgaaagacatggcagcaaacaaagtgtttggctatggaaccaaagaaaaacagtgaaagaaagaagagaagagaagagaagagaagaagattacaaaatattattgtaattagcttttgttaaattctgaagagaaagaaagaaagaaaaaaaaaggtggaagattcttattgtaaggagaggaaatgaacatatatgaagaaagggtgccttaataccattcccatttctcttctctttatcttttctttcttatgtgtataactttcttttcttttttcttttgtaattttacttctttttgttaaagataaatatgtatgtaaaatatatttttcaattaaaaaaaataaattggtctaattttggtatcttaaaatatttcttaaaattattttttttaaaaaaaaattgttataaaaaaatctgaaattttagatggtgtggtatagatttattgatttgatataaattataagatattaaaataagagtaattagaggcgaaagtatctggttttcaagtttatagcacttagatttctattttctcttttcgactaagatacttctatttcaatttttggcggtagtaagtccttaaatgttaattgtcatgtcaatcgtggatagagaaaaatatctattaaatgatttttttaacttacagttaaaaaaaattactgattaattggttaaagtttagctttaaattttagatttcttgcgatttttattctaaaataaaaaattaaacttcatgtaaagtatttttttcgcttcgctataatgattaacttcttcttaaagtactttttggatttagcggttaaattgtatggttaatctaattaaattttaaaatgaaatttaaaagtctagccaactaagatctatattatcagggtggttgtttgattagcacaatttttgaaaattaaaccaaaaaaaaaagaacattgcttatttgtttagaattgaattaggtatgttggtaaaacattgttgaagttttagggtaatgaaattaggccaaataattcagattattgtgagtggtcaaatttgactataacaagactaaacatatctaaaacgtgtagcccaatttcatattccctattaaatattttcctatttaagacaaaatacataaaaaaaaaaaaaattaattattacctcaattaatataaacgttagcattatgtgaaaaaaaaaactgaaatttgtttactattgaccattgagtagtataagttataaaataggaaaaaaaaagaatattattgagtagttttattttctaaaaaataatttaaataaataaagataagaaaagaaaagtcggtggaccaacaaatctaattttattattaaataaataaataaagtagaggtgagattgggaagggaggtgcgttatactaacgcttgtttaagttttttttattttttattttttattttttgacttgtgccaattgtttctttgttgaccaataaggggctaagaatctagtgtgctacttgcacgtgtgagcgttcattggaccctacctcctattagagttgatgaaaataaaaatgttaaatttaatcgacaaattaaattttagagaattattttatatattattttttaatttttatagtttgggctgttttactgatttttatgtgagttgctatgtgaatttgagttgcgatttaaatttctgttaattgctatgtggatttctctaaaaaaaaattgcaaaaaaaactactttaaaaatataaaataaaaaaactccttaaattttaattaaaaaatttgtatttttaagtgggtcttactttttaaattaaaatgatgataatattaatagagtcttgtattttcttaatttaaactctttcaaactctagtccatccaattcaaaactcacgtaacaaaactcgataatgtttgacattatttttagaaattaaaagagtgatattattattagtaaaatttaatattaaacttgatgtattttaatttaataattataaaaattattaattattcaaaaatttatcttggtatcaaatacttaaataatattagtatctaataataatattcactattaataattatcgtctctaatatcatataaacaactttctataaatagttaacaattttttatttatttattaaattaaaatatataaaatttaatattagattatcaatttctttattttattaagatatacaagtaattatttcattttcttcttatcatcatttattcacttttagcctacacctttccgtagaggataagaataattggttcactgggtcccaccgtctccacgtcagcagcgttatctgctaattctgctcgccgcgtcttcgtcttcgtttgtttattaccaaagtcaaggtaggtacaattgggccgacaattctaagtctaggcccaaatgtcaacaggcccaatattaattttatttttattgaaaaaacgacgattttcgtgaagtcgtatcgatttttgactatctcctccgacgaactaacatttttttttttggacggaaaataaccctagaaagcaaaattgagtaaattgggaaagccctaatttcttgagaagatttgggatttagattttagggtttatgcaaagtttgtttctttgaagaatcttgttttatttcgtaagagaaaaatggatacagaaggtactgatttgaaatctttttcaatttatattttttttaaaaaaaaaaaaaaattgattttgatttttgtttctttttcagcgcaaaagtcttcgttgaa

SEQ ID NO: 242328 - DNA, 636 bp, Cannabis indica
ttgtttagaaaacttcaaaaactattttttgttttaatttctaaaaatacttttttgaaaacaaaaaacagaaaacaataacaatcatgctcttaggcatgatataaaaagtataggcttaaacacagggctacatgaaagcacgaaaacaaagcacaaaatgaaaagtaaaagattttttatttttaaatccacaaatataattcatatatattttttcaaaaaaaaaagtatttcaaaaaatataaaattacaaaaatattttcatttacatttcaaaaattaaaaattatttaaaaaaaaaagtactaatacttgccattagcccataatagccctactaaaaaaaaagggtcggaccacctaacaaaaacgggctagcctggtatagctcgacacggacataataagggcccaacacaaacaatttgtgcttatgggtcatgctaacctaaactttaaaaaaagtgagttcggcccaacacaacgcgccatatttcttagggccaagatgcaaaatgaccctaaatctaacaattaagttaataaatgtctcttttttaaaaaaaattaacaaaatgtccttttagttaaaaatttgatgataaaattacaattataaccttgaataattaa

SEQ ID NO: 242329 - DNA, 721 bp, Cannabis indica
aagggctttcgaagagacatctcagaagccaagctgaagctgatgtggcgattctctgacaccaaatcccactgtattaggggttgtcccctatgtcaaactctgagagtgtgtgtgccacaaaaaggaacatctcttttttcctacggacactactctaacactacaatatgtaaaggcagcgcacgcacgacacctatcaacctcaaatggtcctctatcgtacggagcataacagccgcacgggctgggcctcaatccgcatgcccaaagtctgtgtattttatgtatttaccccattagtgagtcaagtttacatgccaactatagagggtcacggatattcccgtacccggatcttagcttataaatactaccttatactgtcatgcaaatggtgagaaaattcatggtgtaaacactatagcaaaaagttaaggttcttaagcttatcaagaacattggggtaatacttcaaggcttcttagcctaataccactgttgctttaaattattgaatactacgcaagtatacgcagtcaagtagtagctcacgcaagtgaggttgaacaacagggaattggattaattactactaaagtatacttataattctatttggcaaatcaaaagtatttatgatttaaaagaattaaagtaattcagaaaacttaataacacaagtgaaagttgagcaagatgagataatagggaggagaat

SEQ ID NO: 242330 - DNA, 555 bp, Cannabis indica
aaaatcaaaatcaaaatcaatttagcaaacgatcaatcaaatcaatttgggggaagaacgaagtttaacaagaaaaggcggtaaagtaccaaacggcgaatcttagtggcgggagaagagagagagaagtcggagaaatcattggtgagatcatcagcttcctttctcttcattttggcagttctgacagtgttggtctccatacccatgaatccaccaccaaccatattgaaatccctagaattagaaatgagattgagttgaaacaatgagagagttgttgagaaagaaggaagaaatcgaagacgaagaggaattgagaagattgaatgaagatagtaatagtaaaaccctaaaggtgtgatctttgattagataatatacagagagaagaatagagaaagaggaaagaagtttcgggacactacctccagatttctccagaattctaacttttatttttcttcttcttaatttatcttcattattattattattattattattattataattatggaaattatcccacattatttttttattgttttttaa

SEQ ID NO: 242331 - DNA, 631 bp, Cannabis indica
cgttcgaagaatcggctgagaattatttcaaaactctccttgatgccgtcaaaaaacctgatgatgacttctacatctcccacgggcgtgattctattttaaaggatactactatctcaagaataaaggtattttattattttgcatgtgcctcgatccattttcggttttgctttacttgctattattcataagtatgtttacttttgctagccggctttgaggtgtgcccatgctatgaagtttgccccacagactgacagagagagagatagtttggccaagggttattctcgctacaagaagaattacaaagcggccgctgctgcgaagacggctgctcttgccaaaattagtgctttggaggtcgacgttaagattttgaagagtaaggccgacaatcttgagtcggagaagaggagctgggaccttactcggtcgacccttgagtcaaaaaggggactctaagcggcaaggtagcctccctggaaactagtctgtcagcggtgaatttggagaaggccactttgttgcaagaacgtgatggttctcgttctgaggctgagacagcgaaggacaaactttcttccttgagtggaaagtgatctgaagtcgagaaggcgtcggctga

SEQ ID NO: 242332 - DNA, 3787 bp, Cannabis indica
atattttgatgttttttgttttttaattttttaaaactcaattttaaaattctatttttaaaaaatagtttttaaaaattattttaattttaaaaaataaaaaataattttaagttataaagccaaacaacctcttaattttaattttaagaataacattttgctaattctcgttccaacactccgtcatgagagaagtgcgcccttcaatttacatcgtgtattaaagatatcaaatttagcaagtcgaataatattattggctacttatttatttttattaccctaaattttgtttatttaatttaatttaatatgaacaaaggaataaattcgaatcaaggaatattccaaacttacaaagtcttcaagtaaataaagcttttgaacttatcaaaataaataaattaggcttataaataaataaataaataaagagcattgttattggacactaataatatttagtattttttaaatttatcatcttataattagttaataatactttataaaaattattatattaaactagatccgatatttaattatatcaatcaatatattgacaaccaaccaccagtaatgtattttagtatttctcataaataaacatctagttgcgtagcctgatctttagttccacgtgtctacctcgaagcagtatccagtagagtttctgtactaaaatctttaagaggtttctttagcttaaagacactctccccattaattatatatttttcaaatattccttagaatatgccatttttatcccttggatgaagccagaatcatatgatattctcctcttatgtttgattttgaacataatgatctgacagagttagaggtcattacaatatagatcagcttagtaaggatgggagtgaggtgggagtttgatgttgtatttactcttttcttgttattggggttgaacatattgtggctttcacaagtttgcgaaggtggattcacaagtacttacgttagaaatgatcagttatcaagggatatgccattggacagtgatgtttttcgggtgccacctggttataatgctcctcaacaggtaaaagaaacattgtgttggatgatgggtcatcatggatttaattagaattgttattttcttacttttggattataattttttgtgggtgttaatgaatgaatgtttattaaggttcatattactcaaggagatcatgtgggtaagggtgtgattgtatcttgggttactccagatgaacctggctcaagtacggttctttactggtcagaaagagtcaactgaagaacagtgctgagggcattgttcttacttacaagtacttcaattacacttctgggtacatccatcattgctccatttacgatttggaagtgagtattgtctaaacattgttaaattaaatgtacacttcattatgttgtttccaaattcaataggatcttttgggttcactcacgcatattcatcaagtcaaaactgataacaattaattctatgtaaaaatgcagtttgacaccaaatattactatgaagttggtatagggaatagcaagagaaagttttggtttagaacccctcctagtgttggtccggatgttccctatacatttggactcataggtaatcctctttctcatatgtgtgattaaatcagaaaaacactatcgtggtcttactttattgaatttttggtgcaggggatcttggtcaaactcacgattcaaatagaacacttacccattatgagttgaaccctgttaaaggacaggcattattttgttggggacctttcttatgcagatgcttatccatttcatgacaatactaggtgggatacatggggtaggtttgtagagagaaatgctgcttatcaaccatggatttggactgcaggaaatcatgaagttgatttccttcctgatattgtaaggatctttactcttccataagttgtacttcttaaattgtgatatgtcttgagctttacttttatcctgaaatgctttgttatttccaccctcagtattgccattccatttggttgtaattgctcttaatataggaccaaattttggaaattttattgcagggtgagggtaaacctttcaaaccttataaaaacaggtatcatgttccatacagagcttcaaagagtacatcacctctgtggtattcaatcaaaagagcttcagcatacattatagtcttgtcttcttactcagcctacggtaattatttgtacctcttgcttcaagttttcatttcaccttgtagctgatttcttagtatcaactgtttgtgttgtggagaaagatttatctaatccataaaattttctttgtgtaggcatttacactcctcaatataagtggcttgagaaagagctactgaaagtgaaccgatcagaaacaccatggcttattgttatcatgcattgcccattatatagtagttatgtacatcattacatggagggtgaatctatgagagtaatgtatgaacaatggtttgtcaagtacaaggtagatgttgttttcgcaggccatgttcatgcctacgaacgatctgtaagtcctttgatttctctacaaaacgcccttaactctcgttaacctctcaaggagctgttgataacaatcttcaaattttttcgcattacaggaacgtatatcaaatattggatacaacattgtcaatggaatttgcactcccataagtgatgaatctgccccagtttacataacaattggagatggaggaaatctggaaggactggtgaccgagtatgtcaatcatttacagtagttctgttttatagctaggctgaggattagtgttttattgttaactcttttatgatgtgttgcagaatgacagagccacaaccaaactattcagcttatcgtgaggctagcttcggtcatgggatttttgacatcaagaacagaactcattcatttttcagttggcatcggaatcaagatgggtattcagtagagggtgattctttatggctgcacaacagattctggaaaccatcacctgaagtttcaacaaaatctgcatcatgattaaaaacttgctgctactcaagtgagagtttcccaaaaccaagtctttcacatcccctgtttcagtttataatattaagaagaaaggttaaaaagagctatttgacaaattcatcctggaatgaaaatctggaactgagaagcaattaggaatttggaacacgtaatgatgttagcagtaatgtaaagacaatttcaaaagaccaatctctatataattattatgaggtgcaccatagcaatgccctttaaaaaaaaattgggtctttgtttattaggatgtaggagttatatttatatgcaaaaatattatagggacactaagtaaaatatttaattctatttatgaaaggaaaatttgaggtattatgtttaggcctacccacgtactcttgtctcttcccgtttcccccttcggtcaaaagacattgtaaagcaccgcatatgcattcatacttcctgcagaggctgaatatttcacatcagattatttattttattatgaactcttacagttaaatacattttttaatattaactcttataatttattgtagtttgaatgatttattgtggtaattttaggattactcattaaaattaatcgtattaattaggttacttttagtaacacttttgtttttaaattttttaattcacaaaattaacagtagtatttttgtttttaaaaacaaaa

SEQ ID NO: 242333 - DNA, 521 bp, Cannabis indica
taataaaaccaataaaacttaatgtaagcccaaataaaaagtctaacagaatacccctatgaaaataaaataaaacataatggaatctatatatctatatatatctataaaagaaaagtatgaagcggtgatgtggcggtctaaaaatactttaaagtcatcgttctttactctaaagtcatcgttctcttttctccttatttgtctcaattttttaattttttaattagttaattaatctcatatttcttttctcctttttttctcattttttagtaatattaaatataaattaattttttaaaaaaaataacatcacaatttttcacgtgattgaacgagctatcacacatttttttttaaaaatttgaaatatatataaacatacaaaattaaaatatcaattattttcaaaaaaaaaaaaagaattaaaatatcaatgataacgtaatcgttttttccaatttgatatattaaaaatatctatacattcttaaattttaaaaataactatctaatat

SEQ ID NO: 242334 - DNA, 978 bp, Cannabis indica
accatttcaatttttttttttatttattttttattacattttaaatttaatttaattctaataatattctcttttatttgtatgttttcattttttccaactaaagccacattaaacttaggaaaattgatctaaaatctaattattacaaaatggaataagacttagattcggtgtgccgttttgatatgatataattaattatcttgtgtttttcttcctttttttttttttttttttttttttttttttcactttttgcaggttgagtttcacttctttgcctggcaaaagctcgtgaagaagagactgacttcttatcttaatgtataataagaaattcacgtaccaagttttttaatattattattctcatttctagtacatttttcttttttttttttacaaaaaacatttatttttctagtaataattattagccaagagatttccattagaggaaaactaccttttatgtgctggagggaggtatctggactgtattgtttgtttgtttttttttcaagtaatgaaatataatttttaaatgttaaagaaaatataaagttactagatggcattaaaatgttaaatatataattttgatttcaagggtaaaaaaacattttctcctaaaataaatttattgttttttttaaatattatagttaaagtaaaactttataataatgggttatttataaaaatatgagaaaataaaaataagttttgatatatatgacataaaacttaattatattaaatataatatttttttaaaaaatttacaaatatgagaaaaggtcatgaggaatgtcataaaaaattttaaatttgtgttttttttttattttattttttaaaaaaataaaacactaaaataaataaaaataatttcaactatagatgttatttttttttactagaaattaaacttatttttttttatttagactactatttttttctttgtttttt

SEQ ID NO: 242335 - DNA, 516 bp, Cannabis indica
aataccccccaaactcattaaggcaggggtcgagaattctgggtttcataagaactagagaggaaaaatccaccaagaacattctctgtaataaatacactcataaatacagagactcgtggactaaggctcattaatgccccaaccacgtaaaaatatatcttattaattccttatagctttcttaattattactattatattagttgccgaaatctcggtcaacacttaataaagtaaccatttcagtactactgtctaatcagacaatcattttaataccattgtctaataagagaaccattacataaaaaatcttacaacaattttacgtagggttataaccctttcttgtatacagtaataaccgtgtcacacgtatataaatatgttttgaagtaaatttgtacttttcttaccttaagtctaaattcaagtgtgtcacccaaccggagtgaaaattgctcgacaattcgggccctatgtcgcattagtggtaatgttgggttttatgcc

SEQ ID NO: 242336 - DNA, 655 bp, Cannabis indica
actttcaatattttttttaaacagattttttttttaatcaatattttggactccgactagacccggacccaaatcccctacccacggccatggcgctgaactcggcttctaacgcgaacccgaatccgacaccggacttagacccgaattaaataaaatgaaaaaatgaaaataaactttatagaacacacttttgttttctgtttttaaaattgaaaaacaaaagtggttacggaacacatttttgtttttcaaaaataaaattttactttcattttgtgattaaaaaattaaaaaacaaaagtgttaccaaacggcaccttagttttattttagttgtttttttttttctaatttttcaagatcgggcttgcaaatatacccactattgcatctggtgttgaggttgtacagaagatggttagtttgttttaatccttttgtctttttgttttgtttgatttgatttagtattgttttacagttattttgccattgttatttatttgacgtcgatttcactatttttgctcaatcgtaccgaaattaatggttgttttttgagtatttttgtgttgctgtagtggttctgtgtatgggtgtggaagatggaggcattgttattgatattcggcatctacaatataaaagaaaa

SEQ ID NO: 242337 - DNA, 1424 bp, Cannabis indica
acaagtatctatgtgcagcagctaagttcatcttcgacacttttcttcaatctaaatcccttcagattcagatgacgagatgacactgacacctccagtctaaactcagtagcaccaggctctgatctttctgctatggatatccatctctaagctatgcaatcaaaactcaaaaatagcaatgaacaatacaagatacaacaaacaaactcacatgatgtatctgtactaaccaaaattatgaattagctagctaactcgtttacagaatgaaattagctatttatagacaatagttcaaccgatctaagaacaattaataccaacagttaaaacataactggctcaaaaggacattaacagaaaactggtatgcagttataacagattaaaaccacagatacgactggagtccctattaatataatctttcaaaacaatgacttatacaatctcccccttgacagattatgttcaatgatcataaaaaactaaacaaaataaagactataacttcaaaagatatccagtaacacagaactatggaactatataatgtctttggaatcataaacatagcaaaccgtaaaaacatatcaaaagaaaaacttgatactatagaaatctcccccttcattgaacatgacctgattgctcaacatattagtcagactcccctagggacattggcacagaagacaccaagttaggtgtagtggttactggagacgagtcagctgtaggaggcagatcatgtggcactagacgtgagactggggcagagacagacaacttcccttgcacatgtgcgttactaccagacccatttgaggatgcaccaaacaaatctctatgaaactgagggagagatatatcaattgatggagttaaatgatccccataatgattttgcagcacagtagacttgatgatgagaaccattttgtacatggaggcctcaaaagcaagctgctgcttttgatccttcttatatcttttgacaaaggatttattctttgaaaacatttgcacctaccagccgaagtccgataaccctttgaacagaggagacttgcctttgctcatctttgaaatagaaggatttgtagaagagggctgcctgttaacaactgatagaaaactcttactgagaacgggatttggaacttgatagtcatgagttctaagaggagggtgcaccgctagtcgacctgatatctcagtgttggcctatgtgctagctatcaagccaaccctaaacagtcacatctttttgccgtcaaacgaatttcaaatatctagctaggactgttaactatggtctctggtatagttgtgacacaaataccaccttggtgggatatagtgattatgactgggtaggatgtctagatcataggaaaagtactttagggggatgtttt

SEQ ID NO: 242338 - DNA, 583 bp, Cannabis indica
tctatatctagggttttttttttttacaaaaaagtaaaaaaaaaatcaaaatttaaaaatagtaacaataatatgatgacaaatttcttactctttctttatctatcacttatatagatcaccttttattctccttttttttttcaatctttttttttgaaaaattatcacccaaaaatagatatataaaaaatcatcattttttttaattcaactactaaaatctatatatatcttaatctatttctcttaatttcacaattcaatttactacttaacttttcttctctcttccgagtgttcttttcttaattagagtttgtagaatgtgagtctctttatttttgagtcaaagtgaaaattttatttaaacactttcagccattacaatagacttaaaatcagcagaaacattatgctgattaaaaacacaatctgacgaaaaacaagactctctagcaagacaatgagcagtcctatttgcagatcgtttaacaaactttaaagaaacattatttaaagacgagagtaagacccgacagtcatcaacaagtaaaccaaactgagaaggcattaaaattga

SEQ ID NO: 242339 - DNA, 560 bp, Cannabis indica
tattgtcataatattcctcggcagtaacatccccgatcacccctgcaagaaaaaaaatcagctaacaacaatatagaaattcatatctgctagataaaataaaattaattttccacactatcagttgttcatggtagcaagtattttctttatgtcagcttctaattttttttttagaagctcctcattttgttacataagattctcattctactgtagaattttcttgttttgttgcaaaactttatcattctgttgcagaagcttctcattttgttgcagaagctcagtaatgttgatcgtgccctaaactttcctcgatgtctctgcttcttcttcgtttttctcattgaattaagcatctttgaattcaaccatgtagtgttgcttcgattctacatttgttggtatcattgtttgcaaaagaaccttaaaataacaaaatacaagttaattactcacatcacatattacacacaagcaatatagaattataataaagttaaaaagtaaaagtgctatgtttggtatcacttacatcgagatcatcaaatacatcg

SEQ ID NO: 242340 - DNA, 654 bp, Cannabis indica
ctttatccattgaaaaactatttgaaataagaaagatacttaatctttcacaccaagctttaagggcttgctttaaaccatacaaagccttttcaatttataaacatggttagagtatttgtgatttgaaagtcgagtggttgagagacataaacctcttccacaatgtaccgatttaagactttacttttttatatccatttggtacaagattaaattattgtgacatgaaaaagctaacaacattctaatggactcaagtcttgctactagagcaaatatttcctcataattgattccttcttcttgattgtaactttgggtcactaatctagccttgttatgcacaatgaccccatgcttatctatcttgtttctatagacccattttgttccaatcaccgactgatgtgacagtccttgaactaactcccaaatattattttttataaattgatttagttcttcttgcatggctagaagccaaaattcatcgaattcggtctctttaaaattctttggttcaatttgagagaataaaagcaataaaattgcacaagtttctaaaggaatttctagtagtgacaccttgagaatgatcacctagaatttggtctataagatgagaacttttgaatttccactcatgtggaa

SEQ ID NO: 242341 - DNA, 1330 bp, Cannabis indica
tttttgttttgatataattagatttgagaaggggttaagtgagctagtaaataaaacccccacattaagattaattcattaagttttgaatgattaaattaactagaaagttaccaaaaaaatcaactaaaaagttaatatggatctaatttatcactatcacatgcaataatcatatacaagcctacacatcacactaataattaaatatatgaataatcatacaatgtaaaattatgtaaatagagatcttgaaatggaaccctaaggtcttcatgaaccaagcaatggcttttttagtaataaatttcaattagattgaaaaaaaaaaaaaaaacttaaggagcaacaaaacaatcaaaagaaaaccttgaagaccttaattaataattattattgattaattcaccatcttaaaaagacatatcgatacacccttataagccatctgttcagcattcataaaaaaaaaattaacttttttttcatgatcgtatatattataattatataagataattataaattttcaaaaattttaaatagttaacaataccgaaaataagatttaaatattttagttataggcatgattgatttttttatgtgcgtgaaaagtaattgtttgaaccttattttaagcattgtatattaattagaacttttttgaatgtgttcctaactatattaattataaaatagtaaatccaatctaatcaaatccacaaagtgtggatatccacacttgtgcggattggattgaaaaattcaaaatctgcacttgtgcatattagatgtcgattgaaatgtaaaagtaaccaatcaaatttaattcacacatatttatataaaatttaaaagttatatacaattactatttcaatgtaaaaaaaaataatttaaaattttaatacatataatacaaatatattttaaaattttaatagattaaatgttaattatttgaacaattttttaataaatattaaataaattaatattaaaaagtaactaatctaatataatcgattctgtacttttgtagattaaattagatttaaattattgtacagattggataagatccaaaatataaaatccacacttaatacgaattaaatgtactgtgaacaaaatattgcaaattgaattgaataaacacctccaacctacagcatacacaatcatgaaaaaaaattaaattaaaaatctcacataggagggaggtgtactgcagattttgtgttagcattttaaggatttgttataattaatattttttaaaagaaaaacacacaacctttgaatcactattcactatttcttaagt

SEQ ID NO: 242342 - DNA, 656 bp, Cannabis indica
ttgttataaaatctctaacaaaaatacgagtagtatcaaaaaatttccaatgttaacttttagtaatagacgagatgacttgataagtaaacttgtcatatatttaaacgaagtattaaaaataactacattacagtaagttattggtgatacacaaactattgctacttgaagtataacaagtaataagaaatgagcattattgtttaaaaaatgattgataaaattatttgaaaatggtgaaactcaatataaactttcacaagtataagtgaaataaataagttacttgcgagcaaataaggttaagtaaataaactgttcaaaaagagtaacaaaatatttaaaagtacacttggccttccaatcggacaaagttttttaaaataaatttaaaatataaacaaaataaaatatgattagctacctaatcatataaattatctcgctcaaaagctagtattataaatatatatacatatgagtgactactcaatggttacatttttcttttgtaactatgatggttacatttttgttgatttgtaatagcaagttatcaacacgtaaaaattcattttttaaaattaaattaactatataattaactattttttaaataattaaattttaatttgaatatttaataagactct

SEQ ID NO: 242343 - DNA, 805 bp, Cannabis indica
aggagaacccagtaagtattaggtccatacacacaaggagtttttcttcttcctttaatctttgtagtgtagaaagaaggaaaacaaaaatgccattcataccataagagggtttgtttttgctttcttctcattatttatttattttcaaaacccatttcatacaagatgatgtatgataataataataataataataataataataataagaagaagaagaaaatgataaaagacaatgtaatggcaaaaattaagtaatagtttctagcaaaaagataaaactaagtaatagtttagttagtaactatttttctctctaatgaacacaaaaattctccataaaagtttttcttctctctttctgtttcatttgtggccatgttaacttctgttgttgttctttttttttttccttttctaatgatccttctaaatgggttttttttttcttcttaaagatcatagatttctccattaaatgtttcattttctgttggttttgctataagaatctactaactgaggaaaaccctacatgggtgttgctcatttctcagcctaaacagattcagagtaatgggtatggtgtagtcaagctttattgcataaaaaaaggtcagtaatcactatcacacacacacactctctctcatactaatatactattcttcttcttttgtagtttgtgattgaacatgtatgtgctgtgctttattgtgggttttggaggttggagttattgtgaagaatttattattaaaagttcatccatgcagagaatatggaatataatctttttagt

SEQ ID NO: 242344 - DNA, 2959 bp, Cannabis indica
gagttttcatcttgattctccatagactaaagtcattagtcccggtaaacttatccacctcaaaatttgttgatgtcatctttgagtagagttctttaaaccttcaaacaattcttaaaatctttgagcaccttcaaccaaactctgatattatttgttgtgatttctaatcacctaaattcaagaacaacacaacaagaactcgagacacaagatcaaagatgaatttaacttaaccaacaaagcacaacccaattaatacacaatgagaataaacaagaattgaattactagagacaccatacacaaaggaagatgaaaacaaaatgattttattgatcattaagtaaattgagctttcgtacaactaaaaaacggaaagtaaagaaacaaaattagggagctatgacaattatttctcacatgaggatttggtgatcaaacacacactaaaatcctttgacatccctccaaacactctccgtttgctcagtggggtgaatgagaaatgaatcacccctttataatttatatagctattggtgataccgagatgccaaactcatagaaacaggtgagttggcagtttgaccaactaacaaaaactgtcactttttatatatgtggtgactggttaactaaacataatattagtactacactatgtaaattaactaggtacattattgattacactgttgattaactgttaagtttgatttaattatcatgacaacaatacattgtagatacgacttttattagtatagataaatggtttgaaaatatgagtatgtaattacatttcaaattctctttataaggcattcatctctctatatacaaaggagagtaaaagaactcaaaatttaatcaaatctatatttcttaagagataaaaataaaaaagaaaggattttatatttagctatcaattgaaaaatacaactgaaaaagtaaaacgggcttcaagattgtaatataaatatctaggtcttattttgcaactaatcgatctatctttctctttgaatgtataaattagctgtttgaagcagccttataaaaacagattgacaatgttgttctgtgcagaatataacgatggatataaaatctgcacttttgctgagaagaaccacaattgtgtttaattcactccacctttcaattcattgcaataacaacctgattctcatacaaattttttgaccaagggaaaagtcatcatttatattatgtttatgtatacacatgcatcaaaggacaggtctcctttagtatgtacaatgtatatatatacacaaataatagatacgcagatgcatagattaaaaggagccaatgagagatgaggaaccatgagacactgttattaacaaaaggaaacgtatttaattactaaacatttcaaatttcttttcatcagatttctgtgtctggtcagctctatctagtaactcttgagccatgttcagcttgtcatgttttctaaaggcttgttcaaaagtttccctcacataccctggtgggcaaagacctttgtcaagcatggacttgagcttctcataagcatcctctaaccgacctattttacagagtttctgcaaagcttggctttccaacttcctctctaacttacaacacatatccatcttcccagcttgtgacaaaagtctagagactatatcatatgtgtgaaaatgtggagaccaacccaaacccaacatttccatcaacaagtcataagcagcttcacaattttcagcctcaacgtaggcatggatcaatgcagaataggttatattattggggagacatctgtttctgttcataattttatagaccctttcagcatcatccaaactccctatcttgcatagcatgctaataatagagttgtaaactgacagcttaggcttctttccagaggagagcatcctcccaaacaaatggctagcttcctccacacaacgatgattacacatagcattcatcacaatagagtaactttcatccaaacaactcagcttcatgtcctcaacaacttttaatatctcaagagcctggtccattttacccagtcgacaaagctccgaaaggagctcgactgtgacaaacgagctaggtatcaaacccaaaccgtgaactgcccaaaaaaccttaactgcaggctgtatagacccactacttacaaccacatttggaactaggattgtgtaaggcctacgattattagccactctaaccttttctattgccccttctttagcactcaacgaacataacttaccaataagaacattcactgcagatcgagtaggaaccaaaccggttctacccatttcaccaaacacttcaagggcagtctcaattctatcgaacttacataaaccaaccacaacattactatacgaataagtatcaggcaattcaattctccggaaaattgtaattgcaagatcaattaactgctcagatgaattcttcttacatagcacataaagcatattattgtatacaagattatcaggtttgcacctaaattttgactccatttcttcaaataagcaaagggcttcactaatcctcccctgtctacctaaatacctaatacaaattgaaaaagtccggcaagaaactcgaccactatgagaaaccacggtcagcagaagacacttcatatcatcaaacagtttcctcctacctaagaaatcagccatgtactcaatcacgcaatcattaaactgaaaacccatttgtattccagcccaggaaaagaattccaaggtcttgattcgacccaactgcccatagttcatcaagatttgaagcacaacatttgagttcaacttgtctttataagtactcaacaaatcctcaatgcttgttgttgtgtctccatggttagcgagtaaagaacaaattgatttagcagtagaaagacttacaatgtctg

SEQ ID NO: 242345 - DNA, 670 bp, Cannabis indica
aaaaaaaacagtatatgaagtaattccgcttaaaaaatgtaacattaattagcaatataattcccacaaacaataagaatagttgagattacaactcccataacagtgcaaacaatattacagtccaaaccaaccacaatattactaattttataaaatgttacttgtgactaaacatagcatttagttgcaagttgttactaatttagttttagtcacaacaagtattgtgactaaaaatacatttatcacaacaaattgtaatttttgtgactaatacttttagtcaaaattttttagtcacaacataagaatcataatttataattagtcacaatttttttactttcagtcacaagttttattgtgactaaaagtaaatttttttgtaatgtagtcatcatttcagacgctcccaattttgtttcaagctcttgaaattgtcgttgatttgttgtgaatctcaaagtgtgttgggtttaactttaatcacgactttttttatattgatcagtgtaatagatttttttgtgactaaaaattatcactaaaagtaacaattttttgtactactaaccagagcaccattggagcccctccattcatagcggttgtcaacattcaataataacaaaataagaaatgggtctcaaaatcatgaagctcacat

SEQ ID NO: 242346 - DNA, 746 bp, Cannabis indica
aaatttttttttaaccaaatgtaagtataaaaacttaaatttccctcttaaaatttagattagaacacgtgtcgtaatttggacatatacatccggtgtcttaggaccataaaagaggaaattactatctcagccgtatatgagatttattttcttaatagacttaatagattttttttaaaataatatttgtttttatttttgccaaagaaaataatatttgttgggtggataaaattatgaattgtatcacatcggtctccttctccgtccttgtgaatggggaagttagtggtcttattcaaccctactgtggccttcgccaaggcgatcccctctctccctatatgtttctcctctgctcggaaggcctctcttgcctcattcaagaggctgaaagagcggataaaatccacagtataaagtttggaagagagggtatcaaattatctcacctcttcttcgccgatgacagttttgtgttccttgaagcaactccaactgaatgtagatgtatgaagtccatattagaagaatactcgtttctgtctggccaacaaataaatcttatgaaatcggagctgtgtgatggaaggaagataaagcaagcagatggaattatgcttgcggctgatcttggggttaaattagttgactgccacactaaatatcttaggctgccggctacaattgggagaagaaaaaagaagtctttgagtccattcgcaccagattcgggataaact

SEQ ID NO: 242347 - DNA, 1473 bp, Cannabis indica
gccatatataattgtgtttacaacccttatctgaaacccccctgaacacttcatctccaaagttatggcactgtatacctttgtttcaatctcaatatttttcttcttgtcttcatgaggttcattgcttctatattaagagctttttagattccttgatgaattaggattaccttcatcttaatcctccataaattgaaatcattagaatcattgaacttgtccatctcaaatctagttgtagacatctcaatcttataagttcttgaaagtttgaatggagatcttgaaacctcttcttggagcttgtagctctgataccatttgaagtgaaattgcttctgttaaaacaaagttatattatgatgaataataataaatcagaactaacaaatcaaacagtaataattgtaaaacttaaaaataaataaaaaagtagaaaactcagttcgattttcaatgacaaaatgattcatctttattaattaaatcaatacattacatcaacaactcaattatggtagatatcactaaaatctcacattgaggaaaccttaatcaaacacaaagatcctatttacaaacattattcactctaaaattcttgaacataattagacttatacgtgtctaggcttgaaagagatttgtctaggtgttgaattctttgaaaaaaaaattgagtgttgatgactatttataggcttaggtgttagtttgtctgagaaagtaactaactagctaaatccatgtcccataataaacatagctaacgtggtatctatttagtgagctaattctcaacactacacatacagtctaattaaattttttttataacaatttaaataagctaaacatttttattgaaagaagaaaaaaaactataatatataatcaaagcaaggtttgagtggatttattattagtttatattataatagaagagtgccaaaagttatgtagtagtataagtatatataaaggctacaagacaagtttttatcaattgcacagatacacagaacatatacatttgattaaactttagaaagaaagcacagaagttgagaaatacaatattaaactgtactgaaaacattgtgatatacttggcttattctgtctaccttaacctattatattttaatttaagccaaaaagaaatacctaaacaaaagaataattagttggtttaactggaacaagaaaggaaccataccacgtgcccatgtgaatgccttgtagggattgacatgggaaattcaaaacagctagacaaaacacagagtcacacgaattctctcccactaaataaataaaaaacctcatatgtaaaagcttgtttcattgtactctcctctcccacacatatatatatatatatatatatcataattaactctaaaagtctacagaatctcactatagctaaatacataacgtgaaaatttctctctctctctctatata

SEQ ID NO: 242348 - DNA, 551 bp, Cannabis indica
cttcctctctcaacaaacatatttattttccatggaaaaaagtttagatgtgaataaaatgaatctacaaaagagtgagaataaagaaattatatggctgaacttcgagagaacatatatatacaaacttattaggcggtgggaactgggaattgataagtgtaaaataagttctttttgtttgtctttgcagaatattgttgagaataatcgagtaatgaataacataaaatttcaagactaactcagtaatatctaaataatggcaataaaataatcagaaaataactgatataacataaaaatgctatgaaatattattgtagcgtaataatagaagagacaagaatttaatgaggttaaatcatgtgggaaaattaccactaaaaagttcaagttcagaatcaaatcaactaaactttaaacaattaaataattaacaataacaagataaacaaatcacaaacaataatccgaaaaataaaaattaacagagtatgaaaaaatcagaaactaattaaagcagtaaactaataaaatcaacaccaaga

SEQ ID NO: 242349 - DNA, 552 bp, Cannabis indica
tattttaagaatattaaaaaatttacattgcctaataatataatattttttatttttctttaacaatatttttgatatttatggtctaaaatattttaatggtaagtacttctagaaattattaaaatattatgacaaaataataaaaaaaaaaataagaaagaaaaaatataaataatgttattgcataatattgtttttggtatttttttcactttaataataaacatctattaaaatattaaaaatgtatttatatcatcaaacatttaaaatatctttgttaaagatgctgccatttaaaattaatttaaaaagtcgatatgacattaaatcattaattgagcttacaacacacctaacacaatacgaatataacataagaaatcacatgtttaacacaacacaacacaaaatttatgtgaaatgcattcgtgtttctaattattaaaattttaacacgatacgaactcaacaacacaaattatcatttctctaagtaatcctactagggaaatacagtgacggacccagaattgaaagtgaaggggg

SEQ ID NO: 242350 - DNA, 533 bp, Cannabis indica
ttataattttaaaatattttttagtttttattttattttaattatttttaattaaaattattatttggaccaataaggcttcaacacgtggcactcttgaatgaattaacggagcagttaaatttaggactaacggacttacaaagggtgcgaccttgaggactattgccgctatttatcgagcttgaggattaatctgtaacaaagtgaattttttgaggacttttgccgcaaatttccctttttagattgattaggatttttacttttaaattttataatatattaaattatgttgtttgaactttctatggtgtaaatgtggctcactttttttaaataatggggaagaggaccgcaatatgctattaaaaaattctactgagacaaagatagattgtcaagaacgtagaggaggtaggatgagcaattggttagatctagtatggattgtacatagatgatagttggagtcggtaactcttagggttccctcatacgaaggtgggtaaaaagagaaaactgattaaatt

SEQ ID NO: 242351 - DNA, 1199 bp, Cannabis indica
attttgggcttaattaaatgtgactgtatcttatatttaggtgaggatattctaattttaacaagtgtttcactcaatactagattagtactaataaacattatgcatggatgtaggtttgacctccggtattggaggagctctgattgtagccaccatcgttgccatcctctacaaacgtcatagacgcatcaaagaagctcaagaccgcctaaccaaagagcgagaagacatactgaatgccaacggtgccggaggaagagccgccaaagtcttcacaggcagagagatcaaaagagcaaccaacaacttctccaaagaccgcctccttggctccggaggctacggtgacgtctataaaggtttcctcttggacggaaccaccgtagccatcaaatgcgctaagctcggaaacaccaaaggtacagaccaaatcctcaatgaggttcggatcctctgccaggtcaaccaccgcaaccttgttcgtctcctgggctgctgcgtcgagctcgagcaacccatcatggtttacgagtacatagagaatggcactcttcttgaccacctcagagaaaaacgaggaaatttgacatggacagaccgtctgcgtgtagctcatgacactgcagaaggtctatcctaccttcacttctcggcggtaccacccatataccaccgagatgtgaagtcaagtaacattttattagcctacaagatgagcgccaaggtttcggatttcgggctgtctcgactggctcatacagatatgagccatgtttcgacttgtgctcaaggcacgctgggttaccttgacccagaatactatagaaactatcagttgacagacaagagtgatgtgtatagttttggtgtggttttgttagagcttttgacttctcagaaggctatagatttcacgagagaatcggatgatgtgaacttagctgtttatgttcagagaatggtaggggaagagaggttgatggatgtggttgatccgatactcaaagaagggactactgatttagagagagatactatgaaggcattggggtttctggccgtgggatgtttagaggaacgcagacaaaacaggccttccatgaaggaagttgcggaggagattgattatattatgagtattgctacagccaaagttgtagatgtataactaattaaatactatatatatatatata

SEQ ID NO: 242352 - DNA, 525 bp, Cannabis indica
tattgtttcatcatgaaaattaaggctaaattcaaatttatagtgttcttaacatcttttacttttggtactacaacttcaatgattcacactaaatatctcaacaaataaatacatacgcgatcattttcaaaatgagcaaacaatgattatgtaaaaaaaagagttcaccaagtatttcaaaaatatcaagattctcaaaatatttaagtacatataaccaatgtttatttttatttatcttgttctttttagtttaataattaagttatttttattttatttaacattagtatatttgtattttcaaatatgtccatgctttaaatcaatttttttcgtaatacattttaacttgagtactaaaatgttacattgttttttaaaataaaataaaataagagttagaatatgaagaaaaagttttacattaaattgatgtagattcaaaattcaacactattaataatgtaaaattttgtacataatttagtctattattatagtgaaatagtgtgaagattc

SEQ ID NO: 242353 - DNA, 517 bp, Cannabis indica
acttcggatatgaaactttaagtattttgagatgcttttgttattctcaataatatagctgggtaacaaattgcttcttcaaaagcacgccccgttcgttccactcacaacaatccaataagttctccgggtaaaaaaacatcagacattccatcttctgaaaccaccacttttgatgttatttgacagacaataatttctatttgtctattatggatctacacaccctgggatcgataaaccttttggactcatatggccccctggaattccttctaaagcctgttgaataatttttatggattctatcatttcaccaatttaaactagataccaagctaacaaatccccttctttttgccaatgtacttcccaaaattcatcataacattcataatgatccactttacgaagatcccattgtattccagagctcgcagcattgggcctgataaaccccaatttattacatccaactctcctaataataccaactccttcaactcgttctaaaaaa

SEQ ID NO: 242354 - DNA, 445 bp, Cannabis indica
gaagatttaattcaaaaataaaaaagaaactcacctcctaatcgagtttttagtccaatccaaaagaggatctgagatatcattctaatctgatcttttgttttcatagagtaatatatttcttctaaacgctaccttaattaaccacaaataaattacaaatactcaaatagaatagttatttttataaaagaaattaatacaattcgaacaaatcacagaattaaaaaaaaaaaaccacattcttcttcttcttgaccttcatcttcttctcgctagttctacaatggagaggtccacgacgtcggtgattttacagtattgatttatatttatatacattaatatttataattttgatattgtattttattaaaaaaatacttattaaattataattaattcataataaaatagataataaacatttatcttttaataaaaa

SEQ ID NO: 242355 - DNA, 972 bp, Cannabis indica
aatgaccttaaaagttcagggggcatgatttagtacatgtcaaagttcagggagcaaaaatcctaattagccttaaaaaaaagtccctatctaagaaatgtacctagctatattagaattttccatattatatattacaggactaattaaatattagtactaataatcttttctatgtccctttttaatgtccaataaaaaaagcgttagacataaaaagaaatttgggagatttctagtccaatattgatggacctagaaaaaaaaattatcatgtccatcaatattggactaaaaaaataggtgggaccggatgtgataaattaaaaagtaagaaaatttcttctagagaggcccaatgtccattagagctggatgtggcccacgattcaagtccaatacgactggacaggaatcgtgggccacgtccaaccctgatgttggtagaacctaaccccttttcttacaagaggtcatcttttcacgttgcaccaccagtatagtcgaaaactccaagtgcacaacagaggaggtcgatcgagcttggaaagtttgtcataaagtgcgagaagactgaacaactccttagggactgcgttggaaggtattcttatcctatcacctttaatctctttctagatctcgtagcttttttcttgattttttttctgtcgtccatccccgcagttggagccctccattgaaatcgacgtgttccatcgccggccttggctctatcgaacaaagctctagacattgtgagtctccattctctttcatttaattttttgttgttttttaactgggaattttttattgtcaaggttagattttaattttagagatgggaattttcggtgggtttgcacatgccattggattcgaggtggagttttaatggaccgaggtgtagtttcgatggaggaccgaggtggagtttgggaggactgaggtaggtggagtttcgaatga

SEQ ID NO: 242356 - DNA, 1627 bp, Cannabis indica
aaaaaaacgctaagtgttagcagatggttcgccttgtaaagtctctttagttagaatcacgaggtgactgtctcgatgtacataacccgaggttgctttgtgtgattgtattcattctacttcgaataaatgaattatcttctttggttgtgtacttcgaggcaggtacatgtctcgtcaatataagtttcaatagcttttattcttacctcgcttaagactatttagtcagcgagttttgaatattttctattaaacctttgttaatgagttatcttatcttgtatttaatgatataactttattatatcaggtggttcatattccactgcaagacgaatataacatattaagtaactaatttcgggtgaagccgaatttcgggtataacatattaagtaactaatttcttaattttacattatgacttggttgtttcaggtaattagttttcatgtgttaatttttaatttaactgcttcacgtaattgagttttaagtttcagttttgtaaaaaacttatttttatctgctagtttataagaaactagttttcgtgtgttgcttaactaggcagtttttaatttgtttactttacgtaaataatttttttgtgttagatttttaattgggtgtttgatataataattaatttttgtgatttaattttatatacatttattaaaattgagtttatttagttagtgtgtttatgataagtttatttgtattgtagatttgtcttttgtgtttatgaaaatttggtaaaggtgaaagagctcaaagacattttcaaagaagaagataaacactgtcagcttgtacatttttatttgatttaaaaagtatacattaacattgtttaatttgatttaaaattgagaaaaaaataaaaacaaaacaccacacagtgaagttctttttcatttattttttttctcgtaccatttcactaaaatcttctcttacattaagaaactaatattttgattatatatgggagatgatgttacatacataatcatctcattgagatccaatatagtatgggttgggatctaagtgtataacatttatctagtaattacttatcatatcttagtctttaatttatttattttataaaattggtttctttatgttgtattttaattagttgtttacgtcattttgttaagaatttttacatgatgtcttattttattatatattttttaaagagactggattttatgtgggtcttgtaattgattttttaattggtttctttgctttatatatttttaattgattgtctaatgaaattaatttttataatttaatttggtaagttatttgttaaaaaaatgggttataaatatatttttgattctatgtttcatttttttttattattatttaggtgtcttaggtaaatagtttttgtgtttaattattggttggttgttatatgtaattgaattttaagtttcatttttttttatttggttatttcaagaaactagtttctttgtgttagttttaatttagtttgtacgtaaatggtttctctgtttaagattttaactgattgtttaatataactagtttctgataatttaattttataaactatttgttaaaaaaa

SEQ ID NO: 242357 - DNA, 1751 bp, Cannabis indica
attaggaacatcgacgtgatgcttcaggaacttctcatggattcacgaactaaaggaatgaatagactgatatacctgagacatctcgcttgaatatagaggcgaggcaaccacggccataaaactaggaaattccttgtaatgatggaagaaatcctggaaaccaacctagatttggtggtcgccccccaagacatccacaaaggccttatcgcatagatagagagaacatgcacacttacttgagtaggagatgtgtatctcatctctttcaaagaagacaaacacgaaatgaaatgcatgaagctagttcaagtacaggagaatcacgatcctatgggcatagtaggtcaattgaaacaaataaacaaacgcgagataggagcaaatctcgacattattttactgatcgagaaagtataagtaactcacgtaattaccggactaaaatttactcggggactacatctgtgagtaattatgagcaaagacatcatgaacctgattttcgtgatagattaaattgaaggcagccagacctccgcgagcatttgaatcaaaatacacctgatttgtgtaaccaactgaatcaaaatgtaaaccaacagccagtgtatcccattcagttgtgagtaatacaataagaagacaaatttaggaaatatcaagatggagaatatggaaaactgttaggatacaactcagacgaagaaactgagccattccacatgtctcgcaatatgatgggaccactaatccagtcgcccatttaaacaattttaataccataatgcgagcaaccaatatttcaaacaatttgcgttgcatattgtctctaacttccttgacaagagctgcgagcaattggtttgacaaatttaccaaccattccataatatcctgggaacaatttttgagggatttcaaaaagcaattttaggctgcgagaattgtcgactagaggcatcatccttgactagcatcaagcaaaaaccaggggagtctcttaaagcgtacttgagttgcttcagtacaggtgctgcaaaagttagaaactggaatgataacattcagctaacagccctttaaattggaattacaactgatttatctactgtagggggtgaattatgggatgatttgcaaggtcgtcctatgaggaatatcaatgagttaaatgtaagaacacaaatttttgtgcataaagaagaagcacgggataaaatgaagttgttaaagactatcttgggagacaaacccagaaatagtactataatagcgaacaccttgacaacaaaggtggaaaatccagtcgtatcaaataccaagagaaaggatgaatcaaaggatatatccaagaatgaaaaataaaagaatatgagaagtatgtacccatttactcaatatatactaaattgaatgaaactcacgagaacatctacctcaccaatgaaaacagggtcacatttcgcagaccaattactaatgaggcacatgagcaatcatcaggattcaactaagtactgctatttccacaaagatattgggcataccaccaaataatgtcgtcaattgaaggatgaaattgaaagtctaatcttgttgggatactttaggaaatgcgtgagaacacaaggaaatgagcctaatcagcccaataacctaaataactcgagattgcaatctcccctcgtacagggtgaggacatctttgttatttctggagggccacacctcgcaggaaatagtaa

SEQ ID NO: 242358 - DNA, 466 bp, Cannabis indica
ttcactcttctcatggtccatttaggtacaattttcaacaaatgattatcaacgtctagccgtctcttcttaactggggtggttctttcattagtctctgaagatggtggaacaccaatgtcacaatgacccgcttttctcttaattggtccttgtgaagcgaaagcagccagttcttgaagataacctcttgagcttgaaatttttttgatagggacctcttctcatcaagatgatcggaatgatatttgcctagaatagacagtttcgaatcactttcaccatctgagtttatcacactatttttatctctaatattgatgtcattcggcccactgcctcccatatcattgttattctcagaaaaaatctgagtgttaatgtttgtaagatcaattctcagcccacttggtgttggaatttattttaccaggatcttagatctactcacaagtatgttgtttaa

SEQ ID NO: 242359 - DNA, 925 bp, Cannabis indica
tttttcttcttcttctaaatcccaagtgaatatctaatccccaccccaacacatcctcactccaacatccattctcagccaaccacaatccatccccacctcacaatggaccaccaaaaacccactcaatttaattttctagttattttaaaaaaaattaatttaaaataaaaaaagaaagctctaatttttatgaggttaaacttacttcactctctttctctagcacatctgtacaagacttcccacatctacattttcaaaattttatacataaaaaacattttccgaactaatcattaaatgggcattaataaaaggccaattaggatttttcccctcgaactttgacatgtaccaaatcatgctccctgaattttttttgccgttaaaagttccccttgaactattgagattgttatatttaaggacttttgtctaatttttataaaaaaattccaacatggatgaaaattccgggggtatgatttagtacttgtcaaagtttgaggggcataatttggtagatatccaagtctggggagcatagtttagtacataaacaatcactgaaacagtaaaattgaatgaaattagacaatagtccttaaatctaacaatctcaatagttcagggggaatttttaacggtcaaaaacgttcaatgggcatgatttggtacacgtcaaagttcaggagaaaaaaatcttaattagccttaataaaatattgtaaagattgaaactcaaaagaaaaaattcaaacttaaattttttttacttgaagagtatttcagccttgttatcatagctaacattgctctgtgttatctcaaagcttagaaaaatggccaataagcatatcagagcaaagaccaagtagaccaaaaatttaaaaccccttggtgtcgaaacccaaaacccaat

SEQ ID NO: 242360 - DNA, 713 bp, Cannabis indica
tatatatatatatttttataagattgtttcagtagtagtgcatattcgacaaatttatatctatcgatcttagcaaatggtatttatttatagactatagctattcattaacgaatcatatttatatatatatatatatatatatatataaatgatgggatgtatgtacttgtttggttataggaaggagtgacttcgttgggagcatatggtggcacaggtggtggcccttggagctacattctgaattctgaattgaaagagataatcatccatgaagatgggaatatcaagtccatttccttcaaagaatccactggctttacctctgggacattcggtggcaacaaacctaattataatccctttaataagggtgaagagagaaaggtacgtacgtacgtacgtagtcatatatatatatatatatatatatttaatttctgatcatatatgatcacctgatcaatatgatcatcatcatcgatcatcaaattaattaattaatgtactgtatgttgtagattgttttgaacgggcccgttgagtatttgatatccattaatggaacacatggtgagtttgatggtaaagatgatgttatcctttcactatctttccaaacaaatctcaaaacatatggaccattcggaactactaccggtgagcctttcgccatccccttaagcgaagacaacgtactagtcgggttt

SEQ ID NO: 242361 - DNA, 682 bp, Cannabis indica
aaaaaataaataatagattgtctctattatatagtggcagtcggccgaattgatttgttactcaatatttttcttggctttattgttatcttacataacaataaagaagatttggattaaaattcaggaacaccccaacgaccaattgtcgtttatctgttaacattattattgtggagtattctctagagtaacagtaatgatatggaaattgagtgaaaacaacaccgcaaatattgaattgttaacaagtgtaattaaatatccaatcatatactttaattcaataactgttacctttaatgatgagcattattataaagtatgagtggtgcttagtactttctcgatatgtcactttgtgattggttaactattctccctaaaaattattaaattaaattatatatgttagagactctatatgagtcaattgtacattctgttatttctgttattttgtacggtcataattagttagagttagttatttactgtagcttccgttgcttagtttgttatactctgtaactaacttatctctgtatatatactgagcttgttgctcacttcaataacagaataatcattcagctctttcttgttgtttctctctttctcttgcttctctcacatggtatcagagctctgctcatttttttttcgatcatctagtttctct

SEQ ID NO: 242362 - DNA, 3584 bp, Cannabis indica
ccctcaaaaaaaaaaaaaaacctgctaattgaaggagaaaaaccaacattgtccactctataaagaatgcagaacaattaatgtagaaacaaaaagtaaaaatgtaaaatcttgtacatttctttagggagcggaataagaaaagagaaagatatgtaaaaatacatggagcatttaatgacacagcataaaagcaacaaaaaattatctattaaaagaatcaataagataagcaaattttggttttattaaagtgagacatagaatatgtcttgacccccaaaaatccttccttgtgcagccaagatatcatagaaatgtcaatgattaataattttcaataaaaataatatgactaattgtgttcttcacctactccaggtcagcatccaaagatgattattctagctattaaaactgtcaataaacaagtagacataaacaaacctttacgtatgcaaaacagttctttatttctggttgatcaccaacataataggaatgaggacgtcgccatccaccacaaggtatttgcaagacctgctcatatgtgaactacattcaggcactaataaaagtaaaagtaaaagtaatttatgtttgttatatatatatatataattatatatataaaagagtaaagtggcccaatactgtgatgaagttaggctcctagatgtgttgtgcttgggattagattgcatcttataggccatttggaaatgtatgatgtatgaccctcttggtgatttaaggttttccccttaatgaatgaaattgttctctaaaaacagggtaagtgataaacaaaagtatacctttgtttcgtttttcaaattccatatcataaaatcaacagatgcaaaaccagctgcaaagtgggcaatagacgaatcacaatctgatttattatcggagcaaacagactggatcaaactcaattccttcacttgtttcatcccgataaattccaaattctgcctatctatgccatattccaaatagcatatgcacccatctccaccagtctgaagatgaagcaatatacataaacatgtgagaagcttagttactaaaatactacagtctatgctagtatttctacaaaatattcttttattgcatccacagaaatgtttatatactgaagcgcatgaattttcttttcctttgattagaatacacatatccagcagactttacaaaagttaatcataccgatcgcatttcaatctgattggaatttaggctagaaacagaaacactggtgacacttgatattccatgtgcccctttgaagtaagataatgcagctattttcatatctgatacagcaattgtgctctccaacacactttttaataaaggaaataaaacaagatttccacgtatatctccacatacaagcacctacaaaagtagagacaacaatcgtaaagaaaactttatagaaacaagatacaatcagctttttgtctcaccaagttcacttaatgacttacaagcttatctatagcaagagcatttctcttttataatgataaacaagtttgtaggtggtcctcagaagcagttaatgtgctttaaaacagtgctctatttattctttcctcaaaataaacataaaggcttttcatctcacttcgtctcaccatcatctaaaattatttatttacataacatgattcaacaaaatttcctttaaaaagaaaaacaataagcatatatgtgctagtgattgtatacgcattccaattacatatcttattaataggaaaagaaacacacaatgaatcacatccaaaataattacaaaggaaaagttaacaatgggatacctcatcctcaactgaggcgtccaaacacattattcgcattccaaaacaagatgtgaattcagctataagagagacattgctactggccgaagaattataaggaaaaggttgtgagggatcccacagcctccatagcttcaatgctcctctggggtcagccgtgaaaacatagctaatgataaatggagaaaaaataaatcattaaaccttacatatcaccatatattcttaacacaagggaaattaaattcactgacacttttagagaagaataaatagccatacttgtatcctaatggcttacaccaatgtgtacccaagagctgtctctctttttccgctgaccaagtaagggtgatgtctgcattaggagaagcaacattactaactctgacaactgtcatgttccctttaccatctccaacagcaatccaatccttgtcctcatagcaaggcttggatggttttgatagcaaatccatacaaacaatgggcaccttttcactagcccgcacaatctttgtccaacatacatcaccattatcagataatttagcatggtagagataaccattgtttgtggaaacataaagggtgtcttggtgtgaaaatcgcaagcaacgaacatattcacttttactgcaacatgacagattaccaggtaacaccaatgtaagcataacgagtaaagtacagttgttaataacaaaatttgatgaagaaaagaaggaaacatgttcaaactacataacaccaccaattgcagtttataattgaggctattaaaggaatagccgttaaatatattagtcatatcaacatcctacggcacaactgattcttcatgatcaaagattcaaaatagttacaaatacaaaactttcttccagaaaaggagcttatgtaattctttttttaaaaaaagaaaaaaaaatggttgtctgcgatgtaaacaggaaccaggtaatgactcacagcaaaaaaggagcttatgtaattctgggcctaagataaatacttttggaagtcaagaatgattacaggcacacaaactcatattctcctaatccgaaagaactacctatctgttagcccaatatgatccgaagatctaggaatacaaacagagaatttgtttgttctgtcaatttcctttgcctcagcatgtccctccggacttccagagagtgaagtctgcagctgatgcactttgattgaagagtcaaatccagcagtaatgagtatagaaaattttggatcatacaaacatcgccatattccccttcctctggataacaccaaattaagaagagaataaaaaatcatggttttgtaccccttcccaaaaggtcatagaagactaaaactataatgtaataatcttcttccaatcatgggaataaaaatgaaagcttaagttgtcataatactacatccacaatctgaatgatcagttcctggcacagtttaatttactaattatgttatatcattccgaatatttaacaaaaagaaaaaccatataaaccacttacaagtgctccttgatcatatggagttgttttccatccagtccccaaacacggcaagtgcaatcttcgccagcagtgacaatcaactgagagaaataagagttagaaaattatagttattacttttgtttcagaacatcagtacatattttctattgttgttctttacttgaccccaagacatatatgaaaacgagtgaaataaaaaatgaaa

SEQ ID NO: 242363 - DNA, 603 bp, Cannabis indica
gtggagctacaatgctccatccaactgcagttggattggaaaaagattattgaagccaaagacagagtaagacaaattgttgatccagtgcaatttgcaggggaaagataccatattgcagctggttataaactgttgaatccatctcaggagcacttctattggagtaaagaggtacggtgtaaactaattccaaagcatagctttgtgctttggttggccatccaagatagataaaaaatgagagcgagattatataagttcaaaatgatagatgatccaatgtgtatactctgcaacactgcagctaaaacaaaggaccatttattttttgattgtgctgttttgattcactgtctttcccaggtgaagaggtggctgaattggaatgcaaaggctggctctctacaggggttgctaaaatggattgaaggatccaaacaaagcaagtttaagaaacaagtgttctctcctactgttgcaaatttagtgtattaaatttggtatgttcaacatggcaaaatttggaatttaaatgatgttaacatacttagaaaatagagaacactaggttttgtgaaaatgcagctcaatgagctttga

SEQ ID NO: 242364 - DNA, 1060 bp, Cannabis indica
ttggatatccaatgttaaacagtgagttgctattagattgaatctttatgcacaccctattttctataacttctagtgtagtgagctcacatgagggcttgtcctacattagaaagtaaaaactgaacaatcgaaaccaacaatcaaattgaccacaccataatcgaaattttggttccatgttatcaccgaatttggtgattggtttcgattataatttttttgacatgacgacggattttagattttgaaaccttataaagttaggtgaaaaacaaatagataaattacactatttttagcattgagatctttttctttttctttggaataattagggattatatattttgcatttatacaaaaattatagactgagataattcgtaaatagtagtttctaacagttagagagagagagtgaggtcaaggctgagctacaaaaagtctacaaatcccaaaactccatcgaagccgaagaacaagaagaagaagaaactccactccattgctagatcttcgccaacttgattatctacctacctgaaatggactttgcacgctttgatctatgcggttggagttgaaatgcagcccaatttgttccccttcggtactgttttaggtaacccctttctattcaatggcgatttgagtgagggctttgagagctctagggttttctttttggttccctttctattgtcacaaggcggtggaatggatttatctaaggttggtgagaagattttgagctccgttaggtctgctagatcgcttggtcttcttccttctacttccgatcgtcctgaggtatatatacttactgattcttgaatcaaatttacgcaatgtgtctaatatttatggttatcgttattgaatcttgctaattgagtttgatgatcaaactgttttaggaatgttgaaatgaatcttttcaatttaactatgtttcttgtttaatgagacctgtttgagtaagctactggaaatgtgcttaatgtgcttgaaattcttatagagatagataatgagttcatatatcatgttgcagttg

SEQ ID NO: 242365 - DNA, 903 bp, Cannabis indica
ttaccagtagcatctaaaatggacagaattctattgtgacactgtctctctcggatacttgaatgaaacagagccaagttttcatcaccatcaattaccaatttattctaaacttctgttgtaagaaagaacaatagtctttatggattttaacatacagttcccttgcctcctgttctctattctgcaaatccatatctaacgggttttggtgaagaatcccttgtataacttctaaatcctgcttagccttcctctctgctgtctgaatatcaaagtagttaactttatttagttttctaaagaaaactttcaatgcctttagcttcaagacaacttaaaatatttttgttcctaacacctttttctctcagattatcttaacttcatgatgataacttgggtgcgaagtccacatgcgaaagtatttaaatggttttttcccacaagaaaaatcaggatagatatttaatattgctggggtatgatcaaaagctccctcattgagaaaaatagcttcagcccttgtaaatagatccatccaagattgattagctaacacacgatcgatcttggaatataaataatttttttttgaaaacagaatataaataattttaaatatatataaatgtaattaaattagatcgatttttaattggatttttaattcaacttttaatatatatgaaatcaaaaacatgctcaaaagtaaaattatttctactatagaatagagaaattttgaaagaaaaaaaaatttaaatctaaaatatcctgttaattgctattggctttgaatactagctagtgaatctttaatcgtcttataattatgattaaaaatgtgtagagaggggagtgtcatatattggttttattatatgactagatatatagttt

SEQ ID NO: 242366 - DNA, 1060 bp, Cannabis indica
aactagaaaacataaccgcgctttgcgcagtttttctaacaattgagaatcgcatatatttaaagaattatatatattttaatatttctcttaaatttttttaaaaaaatatatagtttatacttgaggctacaatcccccattattattatttaaagcaattttactactctataaaaaaaatgattttactactattgaaattcatggtgaactttatggttatggtattaacttaaattttttttttttttgtaaatctataacttaaattattataatggtaataaattgttattttttttctcccttgaacatttgcccaataaaattgtatttatgaactattatcgatactaaataattgcgcacattataatatttgacagatgaaataaaatagttgagttatatatgatagtttcccaaaaataaaatggatgtttaataaaaaaaatgtataaatattatatatatatatatattttttaaaaagttaacattatatatattgtttatgaattttttatgcgcactcctgtcttaggcatatagattatttttttttctttttgtgtgcaatgatataaattgtagttatttaaaatattttgtaaaaatattaaaataatttaaataattcatatgccaaaaaagagtataattagtataaaatgctggtttcgcactatgaagttcaactatagacgtgcttttggtcttcttatagattagacattcatgaataccgcaacaaaaagactttacaaatttataatgatatataaagttataggatgatatttatgtgctcctaataaatcaattattatcaactataagtataattattggttgattacctatttattttttagtaaacttaaagataattaaatgagaaaaataaaataaaaagctaataaattattaaaaattgaaagaagattaagaaataaattcacataggctgtacatgattctgtttgaaaaatcatgatatgatgtcaaaaggcattagagctagtcctttggtgttttctccctccccttaataatt

SEQ ID NO: 242367 - DNA, 605 bp, Cannabis indica
attgattggtactggtcttgtaagcacgcggtggccgtacaatcgaagcctttttaactatttctatcataagttgctaactcgaaaatgttgaaattctaagtgtcaaaaaaacacttagttggataaaaaagaataacaagtcaaatgtcattgttgagacggattgcattttagttgttcaagttattcttggttcggtctctatgccttctatatttagtttatttgttcaggattgtcagtctattttatcttctttaactaatgtttctattggtcatgttaaacggtctgctaacaaaaccacacactatatggcacgtgatgcttgttattggtcaggtcgtctttttactgagggcgatgttccccttgctctttagtccattgtattaacggatttatctgtctaataaaaattttcctttattcaaatatatatatatatatttacctttaaatacatcatcaaaattatattttctttattttacagcacacttttacattataccgtacataatttctttatatttttgtctgcatcattaaattaatattatttttattttctacactattaaaataataatttttaaaca

SEQ ID NO: 242368 - DNA, 1178 bp, Cannabis indica
tgggaactaacatagcaacagctcctgggccacctcctcctgccacgaatggctcgttcagaaattcaaatggatttgcaagctccagactgtatgtttacttctatcttctcttagtgtttcattttgttactggtagctgtttaagcccccattcatgttttgctgaataagtctgtataatagtttgatttcttgctttataggtatgtttgcatcagaaagaattatgaagtttgcaagtgataggaaaataacatacaactgttttcagttgacattataattatgcaatattgatgataaacatgcttttattctctgttagaatctatcatttgatgagtgagagaataggtggaagttcagtaatttgttgctgttttaacatatatgaaattctattattgcagaaacctggaggtataattgctcttctggatgaggcgtggtatgtattgatatacaagtttttatgaaataaaatctttcattcgtttgtttaagatacgaatgttaacattacctgtagatggtattgttttatgttgttgaggtcatgacagctcgtaattgttaattgtagtatgtttccaagatcaacaaatgataccatgagcagaagctgtatcaaacctataaagaccacaaatgatttagcaagccaaaattagcccgcagcgacttcacaatttgtcattatgctggagaagtaagtgtgaaatttaacaggattattgtaaaatactttgattatttaatcttgtggaagaggatgcaaaaaattgtacaatatttatatccatggtaacattgtactgtcaggttacttatcaaacagagctcttcttggataagaacaaagattatgttgttgctgaatatcaagaacttttgggtgcttccaattgttcttttgttgcaggcttgttccctcctttaccagaagaatcatccaaatcatcgaaattctcttcaataggctctcgctttaaggtctgtttttctttcctaatatttatatcttcgggtatattagtcagatctattatggtgacaatctttcttgtactttatacagcaacaactgcagtctttgcttgaaacgttgagtgttaccataagatgtgtaaagcccaataatcttctgaagctctctatatttgagaatagcaata

SEQ ID NO: 242369 - DNA, 783 bp, Cannabis indica
taattaggtggtatattaatatgccatgttttacatttaaacatgctaagtgaagttttccttctagaatcactttctggtgctactactacaacagctcacacttgtaacatgggtggcagcacttgcgttgttaatgccttaaggatatcagttgcaagttcattgctacgcatgattagtccaattaggtctgatcttcgaactgaaattcccaagagacatcaacaaacattggatagacctcaagattttaatgggaacatataatttatgtattctatcactacctgtgtctgatctgactgaagatagtacagaagacccatatcaatatgactaattggtacctaaaaacggacatcaaaatccacttaaattagaaatctaatgtctgagaattaaagaataatgtaacagattcatacctctcggacatcaaaagcgcatagtgttctgtagatgactacgcaaatatcaaagagaggaagaagacataaatcaatagtgttctgtacaacagacaaattttgtattcttctggaattaattgcacaaattttatgaaactaagacttacctggccattcagtgcttttccacttttaaattctaaaggcatcacattctcagttcttccattttttgtttgattctacttcaactctaatagaagaatcaatcatccctttcaaaccatattttggagcccatgttatctcctcaatatcaagtacctaaagcgtatagattaaatattaagaaaatatgaataatttccta

SEQ ID NO: 242370 - DNA, 1423 bp, Cannabis indica
gtaaaatatttccaacaatgtgatctatccccaatcaatgcacagcgaacactagtcaatggaggagtcaggggcggctagactttacccaatgtagctctggctggccacgtagacatcacggactgccaatccctaccctttgtaggtttggcttgccatggaggagcactgggtggccagaccctgcgtaatgaaggtttggccggcgaagcacagcaaccaggtgtaaacctgcaaactagggctaactcccatacctgggaatggccggccaaggtctgcacggcatggctgattttcacaatacacccctcagggtatggccagccaacccctatcttttcagaatctacaacctctcgaaggagggccaatcaatcatgtccccacagaaacagatccttctgtgcaagcactattggaccaacttgtggacgtgatccaaggcatagctggaccgaagcctttagacctccaacttgatcgctcaaggggatcaccattctcggcatatataaatgccatacctctactggacgagaagacctggttgctcacatcaagtacttcaagatgcagctcgacctccagaaggtcactggtgatgcgcattgtcgcatattcccagccacactgccagagagagcgcaacagtggtactttaaactcaccccgaggagattcaactcctgggttcaattctcacaagaattttacacacaattcacatccttgagacttgtaccatcgcagttggaagaccttgtcaaagtcaaatagtgaaaaagggaacctctgaaggattatatttagcgatttatggctgaggctaccaaagtcgaaggccttactgaagaaggttgatatacgaccatactgcgggcatatactcccgctatgcgacttctgtaaagatatccgaaggatatttagcaacaacatgaaggagttcctcaatagaaagacatcaaacttgaagaagccatacaacatgcccaggcggggcatgtcaatagtaggcagtcatgaggcgcccaacagcctcatgacccaccaggcgcacaggcaagcaacagcagtgctgtccagacctctagtggtaaaaacactagaaacacgcacacacaaacaactttgggaggaacaatggcaaaaaggggaagcttaacacgtctcccacaccacaaaagaataaggaggagaagtacagttgcttcaacctcctaagtcagaagccagataccatctacatggccacccaaggaacggtcccataccgaaagccctttccagaagggagatgggaaagaggggcatggcaaagttttgtagatatcacaatgacttcggccatgacactaatgagtgtcaaaatctgaagagggagattgagtacataataaggcgtaacaatccccac

SEQ ID NO: 242371 - DNA, 440 bp, Cannabis indica
cttcgtttcttttcatttgtatcctcacttaatgcacgctatatgtttgataaacaaactcaaacaaaaaaataagacaatgcttgatcttggaatgaaaatacattagtggaattcattttaagtgactcatacatatatattgtttatttgaatatgttacctaacttttgctacttgtgaagaatatccagcttcttgtgttatagctaagcctaagcttaagaatacttttggggatctacagggcgggttgatgattttaatggtttggttgcagcaaattaagtctaagaacatttgggcaaatgctaattgaaaatttatggtttgtgattcaattagcaagagttgcattcagtgatactccgatcattatatttaagacagtaagtacttgcacttgtttccatttttttttttttttttatttttgagaa

SEQ ID NO: 242372 - DNA, 562 bp, Cannabis indica
ggagattgatacatcattttgttaagttgagaaaaatactgaatttaatggttcgcattctagaagttaatatatatcttatgcatcaataattatattttccttgatctatattttgtttattctaaaatcttgtatagggtttgtttattctcaaatctcttatgtacgtggttgcttagttagtttaataaatagtttgaaacttcataatcataagaaagacttattagattttaaaattaaggagtgcagatatttcttggctacttcgatagtaattgaaaggtgttgatgataattttttttatcattggccataaaaaatataatgggaaaggaagattagggacttttatatattttccactccagaaaaaagcttcatgtttgttgaattgatgggctcacgtgaatctcaaaggataaaagaaaaaaagaaaaaaaaaaaaaactactttaatgaattacgtggatgggctgaattattattagaaatttttacatgaaaaattcattttacacaatttattacaaaaacacccctacacgcctatatcaa

SEQ ID NO: 242373 - DNA, 2039 bp, Cannabis indica
agaaaaattaagcataaaaacttaaaattttttaattttacccattcatgggtaatacccattaagagtgtatatatttatatatatttcgatgttagtttggtgtcttttgaaagtagattttagttaataatatatataaatgctaatatatattgagttaaatatttttgtatgaacatatttttgatatattgtaaaaaaaaaatatattttttgatatttttttaattaagtagttaaattaagcgtagaaatttaaatttgtgatttaattattcgttattagatcaaaattcgatagtttaaaattaatatttataattaaatttatttagtaatcattcatggataatactattaaaaagtgttacatatatttggtaaagataaaatacctaacaaatgatttggctaattggctataataaatatgcatttaggaagatgaagtgtatatatttttgtttgcttaagaataaagcttctttctttctaactttttttttgtaaaaaaaaattgagtaaacatgataagccaaatggacatctcctcttggtagtttttctcaaaggaatctcaccgtactatctccatatccaaccgtagatatttgtttttttccctttctttctttctttcctgtctacttagctttgcttgctcctctattattacctcttctcttcaatcaatttcactcactatctctctctctctctctactatattataaccgagggcaatattaaagaaaaaaaattctttacatagagaagatcatgacgttagaatcagcagaacttccggattgtaatttgtatccaaaccaaccgattacagttcggccaaactcaccaactccaaaccatactctgtatcttacaaatctagatgaccaaaagatgctgagattctccatcaaatacctatacctttaccagaaatcggccaccgtaaactccgacactttgaaaagatctctctccagagttctggtcgattactaccctttggccggaagattgaggaacgccgacgatgatcagaagcttgaggttgattgtaatgcccaaggtaccctctttgctgaagcattttatggatatcactgcagatgactttctccagctttctctcaagccaaacaggtcttggaggaaactcttgtacagggttgatgctcatctcactttcttggatgttcctcctcttattgttcaggtaataataataatattaatattaatatatgttagtaactgtaatggatatataattaatagttagtaaattaatttgaaattaaaacttcttttctttgttagctttagtgctccatagtccgataaactttttttcttctctcatgtaatgctataataagatgttttaatttaatttattaagtttaattgaaagaagaaatagagaaagatgcagttaacaacatcgtaccattaatttttcactcgtgtaaaggctaaaggggtgttcatttctaatgtttttaggcctatacacatccgattcaattatatattagatattagattttatcattcgatctgattccattaatttcagtcggccaatcgtaacaacattcaagatcggatccatctaataatttaggtcaagtatgtattggattggattgatccaatctaaaaaaaaaagtagaattttaatattaatttctatatatacgtatatattttacgtataacaatataaaatttaattactaattcaaactaaatgaaaatactaattagttcgattagatgttggataaattgaatttttgaacattccaaatccgatccgatccaattaaatattaaaaaatactatctgatcggtacgatcacaaatgaatgttgagaaatgaaaaaggaaaaatatattcaatcaacaatcaacatttctgaaactaaaattttaacaacaaaacatttgaatattaagaataggtactagtttaagaatggtttacagtgtcaatggggggtttgcttagagcatgtttggtatt

SEQ ID NO: 242374 - DNA, 985 bp, Cannabis indica
atatatatcgatctagattaaagtaggaaatttttactttatggtttttacaatacattgttgtacaaagtatggtatttttattttttaatttattttatggtaaaattttaaaatagctaattatcgaaaggagtaactggttacttatctattttttacattatttttaaagtttttcttgaattatacccataaagtaatttttggaaaagagccatatttttatatatatcttataaaatttataaaatttgtaatttcttcatagaacaaaaacataagcccaattagttgtaattgaaaagtttctatttcaagctagttactttcactaaatactttttttttattattattttttacaattttgtttgtgaaaattacttgatgggtttaggaagtcttaagtttcattaagacctttttcttttatatcttaaagattaaattcacctgtcatcacccatttttcttatttttcgtttgtgttaattttgggaatggaaagaaaaaaactttatcacattcacaagttaggcaagccgttatttataaaaatcaataacttagaagatttaaaatttgtgctaaatttgacacaaaaaataaatttgtgttatattttaaactaattatattgattatttttctttaatacacaaaaaataattaatattttaatagtttaaaaaaataataattaattatattgatagtcatttaatataggataattactccataactatttttttgattttttatttcaaatttacggtttgggtttctaaagtggttgcagcgctaactgcaatagggatttttatacgattttttattacaatttacattgcagcactagttgcaataggggtttctatgtagaatttcgtaaaaatgtgaaaaaaaaaaactgtttgaaagtgtaaaaatgaaaaatgtcctttattattttgttaagaatataccaaaattattattt

SEQ ID NO: 242375 - DNA, 2589 bp, Cannabis indica
gttcattaactcttatctttcttttattattattttttttcatcaacacgtattttactaaagtgtctttaatgttcataatcattcatggagtcacctaacaatatattagtattgctataaggcaccagtggtgcttagcactttctcgacatgtcgcgttgtgattgactatcgatacttcctaaaaactattatattaaattatatgcgacctgatacttagttggaccaataacaatattgatacataggagggtgctaggcaccactgatatcgtttagcatttctctatataaatttattagaaaaaaaaaataagagagagagagagaagtataatctctacatacaaaagcaaacactacacattacttcattatattatttatttcataatcttttgtaacatctcataacaacataatctctctactatataagagcactttagactaaacatcaccataccctttcatacttctcaagctgctattttaacaaacatgacaaaaaacaaaaaataactatatatttatataaaacagaaaaaggagaaaatagtgaagaaaaaagaaaccagttttaccagcttatatatatatatattcttgacacactactcacttgagagagactttagatactactacatatatgtttgtatactacaatcatgggattcctataatagggaagaaagggatatagtagcttgaaggagccaaaccccattgtggtggtaatggcagatcaacagtcttggaagaatcccacttcttattggcctcacattttgcttgagttatggttgatgggcatgagttgtaaaatgaaagtggggttgaaatggtgtattgatcattggtttggacaagctgagataccatggttttggatgaagcatagagttgatttggtccaccaagaagcttggctaggcaattcaaaggttttgggggtgtttttttgtctgtgggaatctctgtttcaaaaaaaccattattttcagttgtagccatacccaactttttcaccttgtcacacttcactagaactttaatacctgaaaaaattaatgacacataacatataatcaatataaaaaaaataggttaattaattaagatttttgtcacctaaaccttgacatgtactaaatcttgaatttagacaaaatgtttaaatccaacaacctcaataattggggaaaatttttaaggaactgagagcatgatttgacatatatagatatatcaacttcttgtgtgttaaggcaggatcatgtatacctacaaatatatgtgtgtatatatatatgtatagtacaaacctgagagatcagtttcagtagggcagtcaaggcaagaaactttggccttgaagacttggcatgtagacatgtcaatcctggccaaaagaagaacaagaaagaggactgagagtgagtgaggaagtgccatagttgaatgaaacaagcaataagcaaagtttagagactaaagaactatttgtgatgacatagaagacatagattgaagcttatataaagaaaattaataatgtcaggtaggtaggtatgagagcaatattaaatgaaaggccacaatattattactgagagcagagtagttggtgttaattgaagttgctacaataatttctgtcagactttccagcaagatatatatgactatattataaatgtggaagaagatatatagtatatagtcttcttaataactattcatatatgatgagtagttataatttgaaaaatgataagttattgtacaataattattgtctctcacagggtaatactaaattatattagagaaatactaaaagatactaccagtgtctagcaccctactcggtatcatactgttaattattggtgtaattaagtgtcgagtctcatataacttaaaaaaataatttttaaaaaatattgttaattaattagaagatatcacctataaaaagtgatgggaatgtagccaataacaatgctcaaattattaagtaagcaaacatttgcatgtacaatacactagatcaaatcctatctattagagtttgagttgacctcaagacaaaattgctagtacaatatttacttactagtctttatactgaagtagtagtggaagaaaagggttcagattaggtaataaaaataaagacaaaattgtgttatcattttttaattggatgattattaaacatatttttttccacctagtgtttaaaatatctgaagaaaaataaggcaatgctccaatatgtccttaggtttggtgcttattattttttttttctacatagtattgattgaaatatttattttatggaaattcctttttttttttttttttgttgtaaaataagtctattttattgaaagaaagaaaaactaaaacagattcattgccacagagggggcaatgtccctcaacacaccttgagaaccagacttagaccctctagcccaaccggctaaggcatcagccacactattctcagcccgaggacaaaagcaaaacacaaccttgtcaaaacacttacactaacatcgacaggat

SEQ ID NO: 242376 - DNA, 1060 bp, Cannabis indica
attgataatacgcatcacataatctttaacatcatcaaaaataggacccccaatagaaaccttttccttaacaccttaacactcacccttatctaattgcctcctaggaactttgacactctcaaaatcatcatcatgacaatgaaaaataagaaaaattaaatccagtaagatcaaatttctcattctcctcagtagaaggaaacaacggagtaactgaaagctgcaaatacaaacaaaacataactcaaaaacagataatgaataaaaagctcaaaataaaacaaaataataagaaaaaagccaccataccttagatgacaagtagattttcctctccacctcacttgaagtaacttcttttgcactagaccacatacatacccgatatgtcgaagaagggtcaaaagtacaaaagttttgacttttaaaaagaggaataacctcatacaaccaaacttagaagatgaaaggaaacccatccaatttgtttgttttagaatttgaatcactccccttcttatcaattccttttttcttagcaagtgctttgaatttagcacccttctttcctttcaaaccaagcctcaaatagtacaatgtaatatcataaacaaccttcccttatgggaaactatcaaactcacccgattctatcaaatgtaacaacccgttactaacatgtttatctggaggtttgcttaacaagtagttagtaaccaaatacaacacatccatcctaactacaaactcatcatctttgaaagtactactcagaaaacgctgcttaacagctccatgagtcacagtcatatcattaaagtacttgtctacaaacacatctcccttcccggcatacttaagcatatcaatatcacccttacacaacaaaccactaataacagcaaactcccctaaaccaaaacgaaccctatcacgaccaaaatcgaaccacatctctttagaatttggttgatggacttccttattgtagtgtgaaaaatctgatgttgcaatttataagactgaatatgcaataaatgcccaaaacaagttgcaa

SEQ ID NO: 242377 - DNA, 549 bp, Cannabis indica
catcttttgtaaatgaccaaaataaaagtggaacaaatttaagattccatcaatggaggaatcatcctactgttatgtatttaaattcagtatttatattgttattgtatatgcaatgcatgtgtgttaataattgttatttttttttgtttctcataataaaaaagcgctgttttttaatttattgtaaaatttttattcatatatttaaaatactttcattacagtagttttacaaggaaaaaaaaatcaaaataggacatcttgttcggacaacgaaatagaaagaagaggatgaccattgttaaagtcgaaagacataactccggtgataaccatgccggagctaacagagatttgaagaatcaaaatttatggagcccctttaataatctaaataaatatctttctgaaatcatcaaagtaggttagaattctatatttttttttttcaaaaaattcttctctaagttgagaactctaaaattaacttcttacatttaagaatttattgtttatctatatttgagatgtttggatttttcgaaa

SEQ ID NO: 242378 - DNA, 625 bp, Cannabis indica
tcattggacaggttaacttttttttaatttttaattgggcgggttacaattaaatatatgcaacctgatatttatattgagttagtaaaaatatgctataacccgaccaaattaaccgacttacgtacacctctaatataaacacttacattttataaggacaattaagactcttaattaataggacaaaatattataaataagaagagcaatttgttgtatatagtattaagtttaatttttagttaaaaatttaagtttaatttctggttacaaaatttaagtttaattttttatgttaataatatttaagttatatttttaaaatttttgtcagtactgaccgttaagtgttaagtcattattcatgtatcgtttttttttttttttgatatatttcagtgaaaaaacttgtgttaaaattatcatcatttttatgttattactaataaatatatgattaaaaatataattcacaaaacttacaataaatatttttttcttgcaaaaagaaattacaactaaaagttctttttgttatcgtagctgatcgaatttatcatgatcgtagaagttcattttcttcaaattatttgagatagtttttgtaagttttttttttttt

SEQ ID NO: 242379 - DNA, 1200 bp, Cannabis indica
gaattgaattgagttaatacaataacacagatcaggtctcaagggaaatgggtcatagaggaaaacagcaggacttaccccatccgtttacccttcccacctgccagaagaaccaccgaaacgcttttcttttccacaacaccaggcttctacattgttatatgtataatataatataaataatagaacctattacgacaaagagaattacattttttatatctgatgaaacataaatcattgtttcgaaaagaataaattttgataagtcatagaattcgtatgtctgaatcttacttggccaacatttgcagagcagcgagcgaaccttatcttggaaattctgcatttccccctgaatcccacctcatggactaaacacccaagaagataaaaaggaaaaaagagaagaaaaagtgatcgtaaatacacttccagacaaaaatgagagtgcaaaataagcgaagtttggtggcataataaaaacaacccaattcccaattcgtgttatgatgaaaacagtgatcatgtgaactgattttgcggggttggagaagaagcttgaaatacttgcctgggcatcgaacaatggattgagaggatgggcgaatagaaggaaatagtagaggagcagcattgtaggaagaagaagaaagagaagcagaagagaaagtaaggtccattgcaagtaacgccatgttgcgtttttctctactgacttttttcttttcggaaatggagaaaagtgttataataaattaaggtatggaagttgggcagccacacacacacacaagcatttaagggcctattgtctaccctattattgctgctctaagttttgcccccgcaaaggtttggtttcgattaggcattccattcaatttaatttttgaataattagtaattttgccttttaaatttgggtcttttttatttttacacatcaaaacaattttttttttttgtatttttacgaaattttacatagaagcctaattgcaactaacactgcaacttaaattgcaacaaaaaatcgtatagaaacccctattgcaactagcgttacaaccactttagaaactcaaactgtaaatttgaaaaaaaaaaattataaaaatagtataaggggtaattcccctttaaattttgaacaatattaatttttagcgattaaaatatgcggcttggaagaattaa

SEQ ID NO: 242380 - DNA, 569 bp, Cannabis indica
ttacaacttgcggattgttaattgtcgttaatgatttttcatgtctgccatttgacaaattttcatgtactaagttttatatatttatgctcttgctttctggagaaggtccgtgttgctgctatgcttcactgccatatcagtttgaagttttgatagtgtactttacttgatgagaataataaaaaatattcaaaagaatgatattgtccagtaaacaatgtcttaagcatcaaactcttggtgatgctgtacagttcttactacttagttatgatgtttctttaacctattatagtagcccctccattatactgtgattatgtatcatttcagaacagtgaagcaaagttatctaaagctattgtatttgacaaaaagaaaaaaaaagaaaaaaaaaaagaaaagaaaagaaagactgatattgtcaagtcaagcttttgatgtttatctatattgttgggaaggaggggcaacaatctttagaagtaatatgaagtgtacacgtacttagttttgatgagtaatatattatttatggggctttttatggacacttatgcatgttt

SEQ ID NO: 242381 - DNA, 596 bp, Cannabis indica
aaaattttaaaataaaacgttaatgttttctatttatttttatggaaaatttacaactttatactttatagtactttttttttaatagtcaagagatttattaattaataaacttgctcaaaacaatagaacgcacttcagaggaacaatcctcaaactgaagcacacaacctgtaaagaaacaagagtctcttgccaagcaatgagccaacttgtttgtagatttaacaaaatataactcaacaaaagataaagccaaaactaaataactaacatcttgaacaataagaccaaactgtgaggacataaatactttaccttggactacttggacacacaccaaactatccgtttctaacactacactgtcacagggatgagtcgcaatccaactcaacgcttctttgatgcctatgacttcagcaatttcgtattggacatacccaacctttcccttcttgaaagcttctaccatggttccatgatgatctcgagctacacagcccactccaaatcggctctcttgttcaaataaagccccatcaacatctactctaatcttgtttaacacaggtgcaacaacctcacagttccgc

SEQ ID NO: 242382 - DNA, 2672 bp, Cannabis indica
aaacccaacacatgccacatcatataggaaaaaattggaaataacatttgcccctaagtccatgtgcagatgtctgtacgtatagagactttctagcttcagtttagactgatagagccttaaccggagagattttgtaatatatttagtcttgaaacatttgctcttgcttgtctgatcacattccttagcagaaaattgataatatttctgcatattagtttttgcatgctgcatggtaagtgagagacgaacccaccagaagctatataagcttattggtgtaactcacttctcattccacacttctcattctctcttcaaaaaaggcaactaaagaaagctcttcacatcccattgaggccgacgcaccctagtcctgtaacacctgagattatcgctttgtttcgatgatccaagcttttcaccgtcttcctcaaaggtttctactagtgggtaggctttcaaatctcgttctgtttacttagatttgccattgttgtatttgaacttttccatgctttataaaatctctgattctcaattagattttctttttggtattttgatttgcatgatagttttaaaatgcaaaatgtgtgatttcttaatgaaaaagattcgtttttggccttcgttgcgattcttgactcttgagtaatgaagagtttgagttttgaaaaacacacattttgatccaaaactaaccctgaccgaccctggggtcttgtttaagacctggccggccctaggattttttaatgagggttgacccgttttagggttccaccttagaaagttggccgggtcatgcctcgttatggtgacttcggccagttcctacatgggtcatgggaccctggccgtccctctcaaagctttgggaccctagttggtctatgccttggtcctaagcgggtggctagtcttttgtcctcttttgacctcggctaggatcctgtcatggcctttgtgggcatataaaagtttagtctcatacatggttccctaattaggaattctgtatgaaacttaatggtgagtctattatagtcgaatgttcaacttaagactcaacatttgtccaagctgttacccttaaacctatatttcgctaatacccagtcttgtacgataaattatttggaaagtatccttgggtacggttgaacaaagccttgtctaattttgttgctttgtcaggttgctcacctccccttgtcgtttgtgtgcagataatcctaagtgattgttgggggaggtgacaattgtgccgacaaagatttagttggtcttccctttgaggactagtgtctagttcattctcctcgtagctcctcaagtgatctcaaggttagtggtggttcattatgccaaaggtcaagcaaacatatcgtagggcactcccttatgaccctcatatttccaggctggcgaatagaaggagagtatgtattgctaagaaggctacacaacctctacatgacagatagcaagggttggccaggctaaggcacttgtggccgagcttgtggctgaccgagatgtagagagctcaaacagtgtgtaaagccctaaaccataggaacaccacgtgtttgattttataaaactaatttaatgctaatatattaattaattattaaaaactatgaggatgataaaaatttgactaaaataaaacactaaaaacggatattataacgacagtaaaagggagttctggggatccctgttataaaagatttatccaaaagacgatatacaacaacaattcaaaatacaacaaatgcagccagtctaaagaaactcctggcaactcaacacgtaggctggtggggtcaatatgtacattgctggagaagatcgccatctcatggctattctaactttgccttgcccttacctgcaccacaaagaacctgtgagtattaaactataacattcaacagtaggtatataatcagtccatgcatagaaatagatatgctcatatattttgcattgcctaatcaggcaagcccgtgtcataatgcaatatcatatataatatcattgcgccacctaatcaggtgagccggtgccacaacttgacactaatatatcacatcgtctaataagacgatctcgtacctacgctcggtactcatcatatgccactgacgcccgtacctttgcctggtacgtcgctagatatattgcatcacctaatcaggtgaaaccatatattgtgtccatagtatcattatattatcattgcctaatcagacaatcgataacttcagaacctgtcatgccatgtggtatattatacttttcttacctcaagtttcgaatcaggtatgttgaccgaccttcttagagaacgatcgataatctcaggccctatgtcataacaataatagatcaataagtgtttatcccaaaacaccacttaacactcgcgtatgataatctaagattttctaccaaactctgtagtgtaaatacactaaaataaaacttatattttggctctatatgatacattttatcgtagagctcgtcgcaagcttcgaaacggtatatagaacgtccaaaacggacacccgagtgaaaagttatgataaaaatacgatttgtgatctcctatgaatttctaaaaactatgaaacacgaaaatctcaattttc

SEQ ID NO: 242383 - DNA, 539 bp, Cannabis indica
aaatattacgatgaagcggttcatagcgcaaaaataaaggaattcacttagttgactcagaaggagaatatgtccgttactgaaatacaacccagtttgataggttggctaggttggcctcaagaattatgccaactgactttaacaagaaagaaaagtatctggatgggttgaatctcaacatcaagcatgactttatgatcaacacaaatgataacaccacctatgctgatattgtaacgccttaacaattagaaatgctacactaaccaattatgaaaccctaatcccctaatttaggattactacaaggataagcgcaggaaatttaaacttaatttgaaatagaatgaaataaaacttgtaataattttaaactttacaaataattaaaagatacatatttcagaatcccgtaaatattttctcaaaatattacaagtctatttcacgagccgacctaagcagtaaaatcagagttacacaatacatcaccggtagatcctaacccgcttcgtttagtgtggcccgaacatgta

SEQ ID NO: 242384 - DNA, 765 bp, Cannabis indica
aatattttcagcaaagcataaaaaataactctacaccatagagttatcacaccccaaacttagagtattgctcgtcctcaagtaatgagaaacagaaagaacgaaataataagaacaaaggaaaaacatgacagcaaccataatacacttgcaacagagaagatattgctcatttaaacttggtttagcaacaaaatgctctcagaattagatggaatggaagtgaattggtggtagtgaatatgccttgaacttgtgtgtttcaatcgagttttacattctatctatgtcctttatacttatcaagaataattcaatcaataaagtgtacaaatgcttcccaccaacaccttgaagttctataacaactaccctcgatcctcaagtttaaaaagtttgcttccataagttgaattagcgcaaccctctccactaatgtagcttagctttacatcctagatcaaaaggactttaataggcttgtaatgtgaggcttaggttcaagtttggtaaaagatgacatttcgtaggctcatgacctaattaccacaatttatcaaggacttttcttttcctctcaaacactcacccaaaatttcatcctcaacccacaatgatcactcaatccaattccaattctcttgctatatgtatataatatatatatatatattcaaaccaactagataaagagagaaaaggcaacaatatgtttcttcgattagggggtggtacacccaaacttagccttaaacttgccttttt

SEQ ID NO: 242385 - DNA, 640 bp, Cannabis indica
tagaagaataggcttagatcgtcctttatttgaatggttggtaaccttctttcacttaatatttcagttacagttgagtgttttctttgttgcattctagcacttgtttcaacttgtgtacaagttcttcatattttcaatccattgagatgaattcgctactagctttgtaatttatacaacttattccttgatcaaattgcctattgtaaaatatgaaaaatagaattacgttcctttcctgacattttgaaaattcatttatggtcagtctactatgagaaaactataaggaaattgcaatgcaacagttatatttgcgagccaactaacataaaaccatataacaactaataatttcacatatttaacacaaacgaatattatacaacaatcatgttttatctgtttaggtcgtatatttgacaatttcgaaccatatttttataatactatgatgttgtagtagcaaaacagttattcaactaacgtgcaacttaattgcaactaaaaatgttaaatgtgaatttgtatatataagaaactatttgttagtattttttgtcactgatcgataattaattgtaccttaatagtaatatgtgaagaaataattattagacctctataaactaacttt

SEQ ID NO: 242386 - DNA, 435 bp, Cannabis indica
atttgttaattctttatttatgtttaatggtaaagtaaataagtggaaaaactaaattcatgtatatgtgaatatatacaaaaacaaaaagtgatttatcatcataataatgcataaattttctaaaatcataaaagtgattatccaaatagtttattagagttgttaaaaaaaagtttatcaaagacttgcatatctaaagtcattgatcctagatcaagagcctccttctatagtcttatgctcctatcacaatgcacacttattaaaaatcacaataaataaaaataaaaatgagtatatcacaaaggtcaaaattgtctctcttaattcataaaggtaatataaaatcaataataattaagtcagaaaatagaaaataatctactagtaaagtcttaaaaatgtctattcaaatcaataaaatcaatctaa

SEQ ID NO: 242387 - DNA, 4842 bp, Cannabis indica
actagaaaagcattgaatattttttagtttaattatctcattaatgacaacccaaaacgaaagaattcacaggcagatgcatttgtggtggggagagtgcatttaaagaaacaccgacaatagaaaagactaaattggtttcaaatagagaaaaaaggtcagttattcttccattcttagtgggaaatgtagccactttgtttatggctgacttttttaagtaaccaaactcaagaataatgtagtaaattccaaaaaaagaaaggaaaaaaaaaactacctggcacatgtaagttgatgcaaaatcattaattgcaactactccgcagcgtatctgggatgatatctctctggcacgtcgctggctgccagagaaaacggcacagccaagaccatattttgagtcattagcaagcttgacagcctcttcatcggtgctaaatttcattattggcataattggtccaaatgcctacaaaaattttaaaaaaaatatattgctttatgtgagtagatgtaagataccgttcatttttagctacattctatattctatcagtaagagtcatcttttattttcagcatatacataattttatagaaacagcctaaaaatggaaaaccaaacagggagtaaaaccatcagccaagaagtcgggaggtattaaaagaaaattcttgcgctactatactgataacgatcattaataaaattgacaggaagtgtaaattaaagagcactggagaaatttataatccaaatgaaagaaaaccatttgcagtacctcttcctgcatcaacttcatcgagtgatttacatttacaagtacggtaggagggaaaaactgatccactgcaccctcaccaatatgaccgaagcttccacgagcaataatttctgcacctttgtctaaggcgtcatttacaaggttttgaagcctttcagaatgctcttgcaaacatatggctcccatatcataccttccagcaagaggtgggccctgaaacataagacagatcatgtgtataaagagcgaaaatgtttaggtactcgccactcctatattggaaattaacttcatcttttatgttcagcaatcatgagcatgctcttcttgactaaagaaattcattaaaaggtataatccgctacaaagacacaatccaaattcatttacactaattccatgttgcaatgaatacaagctaaagaacaaagtgaaaagaaaaaaacaaaatacaagctaaagaacaaagtcagtcttattcctcacaagacaaaaaggaaaacataataacgaactatcctatttcaaacttgtaaaaatttattgttctctttttctttttcaaattaatataactgaacctgaaatactagtccatgtattaaaacaaagtttacagccaacaataaaattcatctacagaagtttcagagggaacaacttacagctgcaacggattttacaattttggctacttgactaacaaaggaagaataaatgtccttatgaacgtaaaatctctctgctccagcacaattctgtccacttgattgaagaacacctctaacagcaatttgtgcaacctggattgaatgcataaatctactattaaaactgaaaaacaatggagaatatacttactgcacatttgacccaatggattacatcacaaaacattagtatggttcggaagaatccatacatgatccacatctgcatcttcgcatacaataaatgaatcttttccaccaagttcaagtgtaactggtataagtgtctcagaagcatttctcattatctgcatagatagccaaggaataatcaagagtagcatgattagcctggaaaaaactaattcacaacctcgaaaacaagtattaactgaaaagggtattagtttgaaatgaaagcaatgcacaaaaagatgaaatgaacaagacatcatatagtgttctgtctagaggcacatctttagtaatgatggttactataatagagctttacgattaatggttgcagtcttaaaaataccaaaactagagtgttgtgctctacacaaacacaaattaactaatacgctcatgttgggaggtaatactaatagggttaaaatgaggacagttaagggagctgtagattaagatgagtaatcagaaccatggaaaattcttaaaaaagcaaaggataaaatttaaaatcaaccataagaagatcataccatcttacccacgccaggtgaccccacgaaaataattttgtcaactgaagacaccaaagcttctcctgtttcaccaaacctgacaaaagatgtttgttagcaaaataaaagacaaagtcaaggaccaaacaaactacacaaggatactatttcgaaaaattacccagtgataatttcaaccaaattttctggggctcctacagcagcaagggctgattggattattctaaagtagaaacatccagaccaacttgcatgttctgaaacctacaagtacgacagtatggtctctgtcaagcgtcaaatcaaggatcaaagctcaataccactcgagaaaataggaacttgaaaaataaggatttctaagttgaagttctagcaaatttcattatatatgtctatatgaccaagttatccacatcgatgaagaaagataggagcaactacatgtaccagtggcaagatacaagaggcaatagaagaactagacagatgtgccattgtaaatttccattaaagctacaacatatacataaaaagaaatacaaattacatatttgcataacaataagcaccttaatcacaatactatttccagaaaagacagctgctaacatcggattaaaaatgttatggaaagggtagttccatgaaacaatagcaccgataacaccaagtgggtgaaattccactctggatctcttgtgaagcatggctcttccagaagatctgtaatcagggagaaacaacacaaactgtgcttacatagagtttcatatcatgtaaaaccaagcagagcccagaaagtgatcgaaactatcaattattttgccgagtacaaaaagaaaattaaatggcctagagggggctcactacatgatgaaatgtattttgtctccaagatatttcattaataggaatagcatcaagcaaaaaatagtcattaacataattgaatattattgaaactgattcctgagataacccaaataagaccaaaataaaaataaataaataaaaagtagcttgatgataggtataaatacaggctttctaatggagaaaataccggtattcgggcttcagccaccgctcaccctctgagagaagccaagtgatcttctcacaagttgtcattatttctcctaaagacgcatcaatcattgtctttccagtatcacgtgaagaaattctagcaaattacaaacaaataattatactgtatacacgataatctttacttccatcttctaggtccaatcaaagaaaaaagagtggagaagaagtagaagaagtttcttctatatccagtatccaaacttactcgcatataagctcttggtgttcaatgatatacttcaaaagtatacggagaaattggcgtctttgcttaaagctactcttttcccatgttttctgagctttccttgcctgtgctacacggtcccttacctgagaaacaaaattacatggtgattttagttcataataatgatgttgtcatgtcccgtatcactttttccttagtcaaactgtgtaatccaacagagaatagtatatgataaaaactaattagcagaacaagttgagcaaactaatccaagtcacaaaatgcacacaacattttcactaacctcgtcaggtgttaatgcagggaaataccccaggtacttcattgtcgcaggttcatagcactgaaccttggtatcagattgctgggcccttccccttggaggtatctgcacgaagagaaagtattatatggagaaacaaaagcttcatccaactaaaaatactgtactaaaaccctcatctaagcatcaatttcgataccagcatcataaattagactgaaataagtctcaatttatccttctggaatatttttattattagcttgattactttgctagatttgagagagctaactgtactataaatggactaaaacagaaacaaaaaagtcattcgttagccaatctaactcagatcaatcaaagaaaatcaagtcaatttgcctcttagtattcacacggatcaaacaaaaacaccaatccaattatttctcattaagtggaattttcaaagatttcacacccaatttgtactcattacatggtaaattccacaaaaagagaaaccaaatcaagaatgattagtatggaagaacttacataaatgaaactgttctcctggatctgatttcgatcatccataactgtattgaatcaatgaaagtaaagtaccagtcactcttataactaatagaatcattaaataagttcattcatagtgtcaaggttacatatgaaagtagatacaaagagaaaagcgtaccatcagaagcgtcgacctcgatggaggggacattggggggaataagcatgaagaggaacctacaaatagcgtaagcgaaggccagaacgatgagaggccaccaaaatgccatggttgcagagctcagaagcaaacccttggttagagatttttggaggatcgtagtaatagtagcacatgagaagaggatgaagacgaaaggtagtgaagcaactcggtaactcagtaactcagtgactcagtgagtcatcattggtatctgagagagagagagagaga

SEQ ID NO: 242388 - DNA, 848 bp, Cannabis indica
tatatatatttgatattggattggggaatttgaacttgaatgttctttgttgtaattaagacacaagcaaactgttagtttgccacatcagcaactaacttacctaaccaactgaattcaattggtctcgagtcagctgcaacctactcctataaaagggactctggtctattgttttaggtacagttttgatgcattgtgagttgtctagagagagagaaaacaaagagagaaaacacatacagtgagagaattgattgagggatgttaaagggattgtccattcatgaaatggcttccctcatgtgaggattgaatgtaactcgtttctggttgtgtaacagattgtttttctggtttatgtctctctctcattgattgtaatcaaagataattcagcaataaagattcttcttcacattcaaaactttgcctcattaattcttgatgaattcgattcaattcattctcatttcagttcatagttaattgattgatttgatctcttgtttttgttctgttattacttgaattgtgttgtttctagctgtgttcttgcacaacattcttttatttagaaaaaaatatactatactatatattaatgttcttaaattatacctatgattacattggaaaaatatatattaatcgtttaaattgatatttattatttttttaaaataaataaataaataaagtgagaaatgttttaatttatttttcatagatatacaattaagatgaatattaatattatcatatattacaagaaaacaaaaacaccctcactcggtcttatctttcccaaaactcatatcaggataagataagatccaactttatat

SEQ ID NO: 242389 - DNA, 780 bp, Cannabis indica
attaataagaaaataaaataaaatcattgtttaaagttttgaaagtaaatgcttattagtaatttataagtaatgtttataatgatgttttttctaattttctatcgactcaatatagagaataaaaaaaattgtatttcacactttttaatttattgtagcaactaatttaacttttttaaggagtttgtgaatgtaacaagaagtagaaggaaaaaagagctagaaacaaaaatagtgtacactgaattctaaatcgtgaagctttaaggagtacaaggtgcatgctaaataagtaagaaaataaaattgaattttgatgtggctatggctcccaactttcataaaggaacagagaggaccacttgtatacacctgcaagaaattagggagtacgtgaagaaagaacaatagccaaacaaatctaatttacaatacttataagtagtcatataaccaatctataactcaattcacaatgaagactcacattctttttttttttaattaaaaatcaataagatttattaattaataagttaattagttcaaaacaatagaacgcacttcagaggaacagttctccagttcaagcacacgacctgtagagaaacaagagtctcttgccaagcaatgagccaccttatttacatatcgttttacaaaacataaatcaacaaaagatagagccaaaagcaaatttagaacatcttgaacaataagaataaactgtgaaagcataaaaataccgctctgaatcgcttggacacacaccaagct

SEQ ID NO: 242390 - DNA, 1328 bp, Cannabis indica
atggtcggtggagaacagcaacggttttcaactatgctgatacgaactataatatgaaaatgcatttaataaagaaatattcattattttgtgacctgtcacagggttaattttgccctcaataattttccctgtgatggcctagattcccataatctagttagccaactcaacacccatttacatacacccactcacggttttatttgcccaacgtaactcaacaacactctcttttattatcaagtaaatgaacataaaacatatgaatcacacacaacatacggaaactgcccactcttgttattaacacaatattaagaaatacaatgttcaagggttggacgtcacactactcaaacgcatttaacctacttataacctaacattagggtgcggttaacatccccaaccacataggccatgctggaccaaccagccaattacacattagcatcacatgttcaaatcactaacgcacccgtctgtcagccattcaagccttcagcccgaatcattgcatctgttcaccaacagatgtcttttacctacgtttatatccttggataaacatagataactcccagtaaccgtcattcacgtgtgtcatcttcatgcacattgtctgagtaatcgattgtatgcatccccatgcattatcacgtaacccatggaatcacctcgtagactaatcaagccaacatctcacaatgttgctgcaggattatgatgttgctgcatactcccccctgggaggtacacatcactcggctgttgccattcaaccatgcaacaacgagtgatattaaggttcattgagcgaaccctagtgagggtctcacaaaccaccccactataagaaattgatatcctcgtcgatacaattttgatatagtcgttcacctcatttttgaactgcaacaaggtaacaactttttcccatgtagcatcaactacatcttcaacttcccattaaaccaagtactatgtacattgattctttttacttgctccaaaagcacgttgatctagaaccttaggtaatttcttttcaaattgctttcttacagtaggtagagccctcaccacccgctgccctcttttggacttgtcctcatgaaacttttttagaaatctgacatgaaaagttgggtgaagcttaatacgcttgggaagcttcaatttatatgccattgcccccactttttggacaaactcaaaaggaccatcatatttctgaaccaatcctttatgataccgcttattgatgatcttctttcaaatctggggagtgagtttcagcaacactccatccccaacaaaaaact

SEQ ID NO: 242391 - DNA, 2158 bp, Cannabis indica
aggctagaaaggaagagatgggtgatattgttttggttttacaatctgttgggtgaaaaaataatgagtttttggtggaatagtctgttgtctcaagaaaatggccaaggatcagcttcggacatggtaagacgaaagagagttaagcagccttcagagagaaaatctggtatatttgacatattactcgtcttcaagctgactattccaatggctgcaatagcttaacttcatcaaaaagatgtaaaacagagtctgcttctctctgtaatatctcttttgatatcgccggagagtggtggcgaaagagtagagaaagtagttgtcttctttaggtgtgtttgtatgtgttgattggttatatataaaggggttttggtgaatcgaccgaagaataaaaagcccaaaggaagataagaattttgagagagtcaaattgggcgaatagagagaaagagagcaagtggaaatctttattcttcggagattggtcgaccacgcgagtgtttaaatagaaacacagagaaagagagagaaaagtcaatggtcagatcaatcgacggtcagatggtgagccttagccaagtccagatagtgaagatgtataagataggctgaatttttttccatttaaattttttttagactattcacattactcttataatttatttcgtgtctaacaaaatgtatggttaaataaaaaattaattaaaattttaagaaactcattttttatcaaccattaataataaaatatacttttttttctataataagaaaactataaatttaaattacatatattatagctgatacgaaaataacacaccatacacccatgtttatggtaattggataaaaactaatttgataacacatcatacacattaacattttaatagctacatacatgtataaaatttaagattagaattagaatcctaaatagatatacacacccatagttaacggtttattgggtgatttgggtgttgactagtactctattagccactattaaggtactcatttgttatttgtctgtgacaaaactatacgagctctcacgtaactatagcgtgtcctcactcaaaggaaggttcaatatgaggcattcctttaccatgttggttccaagaaattgtaaagacggaacacgtacgtagccctttaattaatggtactttgtccttataatagaaaattaaaagtggtacttccatataattaagacaaatttatatattttttcaagggtaataaagacaagaactgaccaggtctcttcaggttgataactggtataactgctatgctgttacagggttctatttaatatcttgcaactgatcttttgctaggcacgtggccaacatgtggcatctttggtctatttattttatttttatttttaaacaaaactgtcactaacatgattacctgtttttcagtactatatatatatatgaattgaagtgtgcctgtgtgtgcagagagaatagaaatatatatggtatcccagttacaatgcccataatcacggaaatacgtcagtgattgttaacctaataggtgtgaaaattttgccattcaattattatgattactttttttttaataattattaatttcaacaaaatcatgtcatttcaatggtaaacacatcgtcctttaagatgtggtttagtaataaccatttgtcaatctttcttttgtagtgtgagaacaatgtataattggattcatttgaaccctacatactattcaaaagactataaattttgttggggttgtcccacaacagattttcaagtcttttcttcctgtgaaatcctaactgatttatactatccccacgttagttatctatatataattaggcactattgtatgtgtgtaggagttgaaaaaaaaaatcttacaataaattttttaataaaagtttgtttggtatagaataaagaagtattgccaattcgaatctatattagttatgagtgcgtattttgataatattatcgtgcttaaagatgctccgccacgactctcaaattacatatcatctcagcccaaaagatttttagtttgttttcaaaaatttaatccacaaaaaaagaataatatacataaaataataattcgtaattattcccaa

SEQ ID NO: 242392 - DNA, 1940 bp, Cannabis indica
tagagtttaataaatctccgaaatttagaaattataactttaaagatcatttctaatatcggggtccacaaataattaatttcataaataattataaaaaagtcaaaaattagtgctaattgcctttactaatcccaattactaaagcggtcattaatacaggtgattttgagtatcgcttggggaggtgacaaccgtgtcatcataggttcagtcagtcttgcctttgtggactagtatccagtcctttctcgcgcagctttctgagtgatctcgagaatgatattgatacattatggccagaaccaaataatcttaccacgtggcaccacctttcgaccctcacattgtcaggctggctaccatgggcaaggttggtatagtagaggaggccacacaacctctagacggtagagatccggaggttggctaagcagaggtgcttgtgtccaaccatggtgtggagagctcaaacaacgagtccgaggttgaagagattgtacttgtccagaagatatagtaaaagacctgcagtaaattcagcaacagccctttgggctcgtacaatgttgataggaagcccttgaataggcttggccaacctttagtggttggtgtagaccatgttctaaatacatgctacaaagccttaggttctcaatcagtgttgagactctcaataggattagagagagtagactcgtaggaggtgtacattttgagtggcattgagggaccaatgagttcactagttggccctcaactatatagagtggttagagcaccacattcaacaggggcaatattgcatttgcacccctacttcaaagaaatcatagcatactttggaatatgcccaacacaaattaccgcaaaaggtatcaactactttttagtgatgtttgttctttatgccgagctaggctggcgttagcctactccttatgagattggatacttctttgaattgaagtctgctctaaaatagaatcaaataggatacttctacttcagccgggttggctattagtggttgggtgataccaacagtacacctttgttgaagctggggagatatacccaaaactatttcattgcttgggatatccaacaagtccaccactgctgatttcagagagtgcccacttacaagtgccccattcctacccttcagatgagagatagagctaaccacattctatccttcccagtagagaggaggaatatactaaggttggcctatacatctaacttccagagatacgacctgtatccaatagagtttggagttccaagggttgagggcccatcgggtggtccagacggagcctcaattgatgaggaggcgtgtgtactcacaatatggacaacaatgttcctttttcctggattgccaggaacttgtagaagagagaaagagccctccatcgcagaggtactattggtgacattacactacggattagacctggcggccaaaattttgccaggcccactcaccccttgcttacatctagaggaaagggaaaggcagctgctgatgatagtttagatgattcatctttcaaaaaatgatggtattttataattgattgcaccatgttttctactttcttcttctattaaatatttataaatgtttgactttgttactttctttttgcaaatatggcctctaggctcagagatctagttggagggccttcaggtgaggcttcaagtttccctaaggccaaggtggctcagaccacctatttaagtgatgctgcaagttcttctctccctcctcctcctcctcctcctcctcctaggccttcactacctgagcagcccatgattgttgacagcccattaaggaggactcagccttcaggcaagggcatccagaggcccaaccgaggggcgaattcggtcatggggcaaagagccatggaggcagc

SEQ ID NO: 242393 - DNA, 784 bp, Cannabis indica
tttatttatttcttttcttgtaaagatgtttttattttttaatgatagtggaaaaggacaaaagcaatatttaatatagccgtttgtgacggcagaaatgaccaacgcttgacttttactgtccatgcaaaaaaaaaaaaaaaatcattattttgacttttgtaaggatagagatagtggctatggctgctttagcaaactttaattccttacccttctctcctgttccctccttttcatttcaactttagagttcacctatatcatttctcaacacaaaaagttaacatttgccatgtacacaaggggatgagttgcttactagacatatatactttagtttcatactttgtttgcatgaaaatctgtaacgatttaaataatattgaagctcggttagcattaatcaatccttgatatttaaaaaatgtggattgtgatgattgaatcatagttactttttaattatattatcactcattagtttcaatttaattcattcctcgttcttcccaattttagttactttagtatgtacatccaaatttttggtacccgatcattaacaaaaccaaataataactatactggctgattatgataagacactcataatggaatattttacagtaggacagtctaatttaggtttttttattataattttttttaatgagaatgttcattgttttttaacattgataacgatgattgttgtcatagcactctaaaattttgaataatatacgtagtcgatatacaggatagttatatagtttttggg

SEQ ID NO: 242394 - DNA, 1896 bp, Cannabis indica
ataataataataaaaaaaagcagtgtcaatttttttactaaaggtgtctcaattatgtgaacataaaatgtaaatcataaaattaacaattaattttattttacaaaattttcgtaagtataatttttttttcagcaataactataatacatttttaaaaaaaaaataaataaagaaccagttaattcattcaagcacgcccattaaattaaattaaattaattaaaatatgcaagaaatattagtagaaacttaacaatgtgcttaatttaattattcaacaacttaatcgctaagaaaaaagtttaactaatcttaaattcaagaagcgaaaaccttgccaaaaacaaaaacaatatcttaactaaatgcctacgtggctcaacctaactggtcatcaatttctcttctattctcttctactagttttcaactcgtcgttctgcgaaaccaacggtcaagattctgtccaagtcaaacaggtcaaataatcaaacggcgtacaatcaattaagcattaaacaccaccactagatctccacactcctccattgtcggtgccctaaataaaataaaatatatatcttttattaattattttcatattaaaaataaataaatatttatttccatcgtcttctaccttgaaaaatcacgcgttttgaatctctctctttataaaaaccccattcgagaaaagatcgaatttttatccaacaatggcgtcttcatctcctccagtgcttccgatctcaaattctcagcctccagttgtcgctgtttcttccgcttccagtggtggttcggctcaatctcaagcaccgatctcaacccctgctgtccgtacattcataaaccacatttccgaaaatgttcgcaacggactctctcagcgtaggccgtgggcggagcttttcgatcggtctgctttcgccaagccggaatcggtctccgatgctactctacgaatccgcaagaactactcttacttccgagtcaattacatggctgtcgtagctggtatcctcgccgtgtctttgcttacaaatccgatgtccttgcttgttcttctcggtctcctctgttcttggctttttctttacctattccgtccatcggatcagcctctcgtcctcttcggccgtacattttctgatacccagactctctggggtttgatcgggctcagcgtcttcgtcgttttcctcaccagtgtcggatccctcctgatctctgctctcatgatcggattcgctgtagttttcgctcacggtgcatttagggttcccgaggatcttttcttggatgaacaggagaataatccagctactggatttctatctttccttagcggagccgcatctaatgccgcagcagccgctggtcctgccgtcgttgcagctcgggtctgagaagaccgcatttgggtaatacgtatatagaaaatttcgtttcactgttcattttaaaaagaatttaactttggtagaaacaataaagttaaaattatagtaatggatttgtatggatctatgttatacaagttcggaactttttgaatctggatctagttttttcctttcttttatggatttgataatatcatacatttcatttgtaacttttgttttgatgacctatatcattatgttgattctttatgcactatttcattttctgttgtatgattaatgcaacaagtagatctgcatgttgccttgattatggactttgaactctttgtctttctgttaaaacttcacttacattatttgatgatagttgggtatttgcagacatatgaatagtagtaaattattctagtcttggagcatattagatgttggtatgagatatttatcttttatctttacctttgaattgtaggcttagtac

SEQ ID NO: 242395 - DNA, 641 bp, Cannabis indica
tttttcctgttgcaggtgccacttttccatgatgatcaagaaaatgccccagatccaacctcttaagctttgctttcaaatttattatgtctgataccaatgatcatgttatggggttttgtacgtctgtactgtgttgtaataagaattggacaattgccttctcttaagtatatttataaattcaagtaaaatatgcataatattttacttcatttatctttttcaccggtcttttatattattaaattattaatattatatgtatgttgcaagggggtctctccatgttatcattttattattcaaagatcgatctacagtaattgatttttgttttagattaaacatcatgaatttcattaataaggcatgaaagtcaaatacagaataaaacaagcaaacatcatcactattcacttaacgggcattaacatgttggtaacccattccaccataacctaggctgaagagccaatttggccaaggggaaccattccatcacactcctgtgaatgatttccgcctataatcattgctattgatacattttaatactcaatctcactttatatttaattgaaattattaaactacacacttagagctatgttgaatggcagtctacttacaatcactta

SEQ ID NO: 242396 - DNA, 2280 bp, Cannabis indica
aataaatatattgccacaatggaaattcatgacaatttgtgaagatatgtagcattgctcaaatataattgtattaaagcacaataataaatagaacattgttattagacgcctagcattttctagacatgtcactttatgattagctagtgatactctttaaaagtcgttactttaaaatatatgagactcgatacttaattgcaccaataacaatagtaatacataggagagtactagacactattagtacctttcatgcatttctctaatagatatatattgtaattataaatatagtatttgttgattttttgtattaaatttagcacattggtataataaaaattattaaaagatactattagcatttggcaccttactcagtgttatattacgattagtataattaaatatctagtctcatataataagaaaataatttttaaaaaatattaattaaacactactcatacctaataacaatattattataataataccttaacttttttttctatacattccatattacaatccccaatacatagtaatagtacatatactatgtaacggtcaacttttccagttgactttgacgatgagtccacaacgtaaagtaataataaagtttatggaatcaaaatgaaataggaaaaatatttgggagtgtgtcgtgtatgtactatgtaggctagtcaaatttaagcatgcttaattatttgtagaaaaaacaaaagttaaaaagaaaaaaagaaagaatattcccaaaagtaacaaattgactatagtaatatatagtatagatgatcattataattagctaacttttaacaaacatgaataagcttaatcagtcctcatatgaaacaataattttgaatggtatatatattatttattttctatatattttcatatttaatttatttttttcattctttgtccaccaaacaaacgaacgactatgggagaaaactagaaattgaagattagagaatattatattatatatttatattttaaagagtattactaagcacgttaaagtacccaatattatctaatatgagtagttagtggtttttcgtattatttgttaaattaaaatatttaagattgaatattaaattatactaatattaatatatatcatttttttatgatgcttgatacattaaggaacctcttaaatttatctaattttaaaagaaaaattgtaaaagacactagtagttgctacatattctacatgttaatattgctcacgtgcaaaaaataactacctttagtgataactttttaaatcacaaattttttgtaactaaatatgatttttagtcacaacaaaaaactacttgtggcaaaaatataacgtttaaatacaagttatttaggtttagtcacaataagtattgtgactaaaaacacatttaataataataaatagtgatctccttaattaatatttttagccacatagtttttagtcacaacataagaataataattataattagtcatattttttttttacttttagtcataagttttatcatgactaaaagtaaacatttttatagtggatattgttacaattaattcattatcaaatcttatttataattttatataataactttaaaaataataatgttaaccaagctagaaggataatatccaattgcaataatcattttaaaagggtctatgtaagtaaggacttatattgttcattatccactcaatggaatagtcaagctagccataaaagaaaaagttagggaatttaacaatgactagagcaactgcatgtattttggcaattcaaatactaagtttggcattatataacatatatgtggcctaattgaaaagtagaccaaagaaaatcctagcaaaataatagtaaaaaaaaaggttattggatccgtaactattaggttattatatatttattagtataaattttcttttttatttttcagacagttgaaaaatgaaaaatgtgagaattttttagttatggttggcaacttgtttttaaaattatataaatatataaatttatttagggtgataaaatgtgataatacattataaaattgggagtctatatatatatctcttatattaaatttagttatctaacataaattattgtttaattgacgattcttttttatttttcggtaaatttaacggttaaaactaatatcgttaaataaattaatcaattatttttaaaatatttaaatatttaaatttaatttatttatt

SEQ ID NO: 242397 - DNA, 2858 bp, Cannabis indica
tgagttactacagatgacagattcacagttgctggatattgccaagttttgcaatcgttttcccaatattgacatgagctacgaagtattggaaggtgataatgtgactgctggggatgttattacattgcaagtgactcttgagcgggatctcgagggaaggacagagttggggccggtagatgctccacggtatcccaaggcgaaagaagaagggtggtggcttgtagtcggtgatacgaagagtaactcggtgatcgccattaaaagggtttccctccaaaggaaattaaaggtgaagcttgattttacagttgcaagtacagaagttggaaagaagaattacacactgtatttcatgtgtgattcatacttgggttgtgatcaggaatataatttcagtgttgatgtgaaggaaggaaggatggcctgaggaagaagagtaatgtttttgacactaatgtgttttctttggatttaaatttgtaatgttgtactagatagaactagttaatgcaaccttgcaataaatgaattttcttctacttttgcaaacactaactgagaaagttaaaccacatcttttatatttcattatggcacttattttttgagattaagcattggttggactggcaatactcaagtattcttctttcatctattttgaggtggttaactttctaagtttaggaggcaagttttttctacagttatttgcaatgtcgaaatgaagtttttttctagagttattttgtatagaattaaaatggatgtaaagggaaaaatttcacaaattcttcctaagaaaattaagaaggaagatcttggttggtttgacaatattgtaaggatagatttacatgtatagcaggttttacaagcatgaggctgattaattttatatatatatatagatatatttatatatggggtgaacatataaacaatagaaataaaaaacataaaatgatgtcactactaaagaagaaaaaaaaagcaccttgaaccagctaatatagaattagcactttacatatttgtttcccatttcattagtgccttattacattatctcatagattaatatataattatttactctttattacaatgccaagagagagaagacaaccattaataattgtcaaattaagttattaaaatattacaacttattcattgtaaattatggataaacttcaattacaaatcttaaacctaaaataggagtaatcttataacgagagaaaccagcatctttgaagagtttagaccattctttctcatttctctctcgtccactaaccaaagccatcatcaacatatcaaaaaaaagctgagtttcaaatgaattttcattgttatcatttttaatattcatgtctattataatcaactttccacttttctttttacttttgtatatggcttctctgcaattttttagtatcttcacactttcttcatcgttccaatcatgtaatatccactgtttcaattatcaaatataaaatttataagaataatattacataaatatttatacttaaattttattttatttttattttacactatttttcacttttgaatattataatttgtaaaaataataataaaaaaaattagattacccaattattatcaaaatattttgtgatattaaagtttttctaatttttcttcaagtaacaaacttttaatatctaatcatatttcaaaaataattgatcacaattggatctaggagttattttaatttttctttttacaaaacagttcaaaaattatttatttttttttaaaatacttagtcaaaatgactaataatagtacaaaataaagagtttaaagtaagagtgcacctgggttgggttgagagttttagtgacccaatccaaaatcggcaatatgagatataaaataaatcataaaaatggaaaaaaaaaaaaaaattaatttggagagaaaaaaaaaacaattaagaaaatatttagaaatgctttaaaaccttctccacatgtagagaaagaataaagatgctttaaaataaaaaacactttagagcatctattggaaagggttttaatgctttcttattcaaatttttggagaaaacaaacatttaaaagaactcttgggagtgcactaagacttatcgcatcactaagagcactctcattagttaatctactatatctttcaaaatacatttccaaaattttatattttttattttacttcaaatttttacattacactatacattaacttctttaaaatatatcacaaaaattctacattttttaatttttaatatattttattcatttcaaacatataatattaatattacacatatcttcatataaaaaataaaattaaaatcccaaacaattaataaaatatgtttagaacaataaataatattctataaatgtagagcatgaaaaataaattctaaagaagctttaatatagaagagtttagagtatctaatgtaaagtgtttttaatttagtgctttaaatattttagagattctttattttaaatcatttgatgtgagtgctttaagagcacttccaacagtttttctagtctatcctttaaacacaccacaaaaactctactttctctattttacagtagacttaaaatactcccaacaacttctttactccgtcctttaaaatacatcaccaaaattctactttttttattttacaacacactttttggagtgcatcatacatttaattttttttttttaaaatacatcaccaaacccctacttttcaaaaaaaattattatattttaggctaattagcaattcccccccccctccccccccg

SEQ ID NO: 242398 - DNA, 893 bp, Cannabis indica
acacatgcaataggtgttatgtttatacatatcaggccccagccccactctacacccggctacccaacgacattctcttctctccctttctatatgttgctttgattaacaatagtcaaaaaccaataaaaataatattcgatatttgtagttgaagtgcttaaataattatttatttattattctgaaatgtaagtgcttaaattatttacatgttacaaatgtattaacttgcatactaaatttcagataagaataatgataaataaataaaagagaataagagataaattgatattgatctagtcaatttgcacatttctcattgtccttcaccatccccgtcagctcctttaaaagagcataatctgtaaaaaaaaaaaaagataagaatgagctacaaagtggtttcgctgtaacaacagagcatttttattaacggtgtaagtatttaaaattttaaatttgtaaatagcataagcttaatatttattttaaaataatttgtggcataaatacttaattttaattctcggttataaataaatatgtaaatttaattttttacagaaataatacttaaattatatttttaaaattttttagttacttgactaataaatattagtatatttaaactaatttattttgtaaaataaaaatttaataatttaaacaaataaaaaattgtcacgtacaatatacttaacactaaacaatttttttttttgaagtgacaaacttaacaaactttgttataaatataataatgaaaaaactccagaaaaatatatataatttatatttaatattaattgtacaaaacaattctcacatatataatagctataaatatcttcaaatagagcatataatccaaatcaacacgtacc

SEQ ID NO: 242399 - DNA, 545 bp, Cannabis indica
gcaaaaggctttcaacaaacacccggtatcgatttttttgaaacctatagcccagttattaaaccttgtactattcggctcatgttttctcttgcagcaactcataactgggatatccaacaaatcgatatcaacaatgcttttttacatggacagctccaagaaacagttttcatggcacaacctcctggtttcattgatccacaatatccagatcacgtttgcaagcttaataaggccatatatggcctcaagcaagcaccccgtgcatggtttgacactcttaaaacagccttaattcagtggggatttaccaactcaaaatcagatactagtctcttctacatcaacaccaacaactctctgttattgctcctggtgtatgtcgacgatatacttatcactggttctgattcacacaagattcaccaggttattactgctcttgaacatcagttttccttaaaacagcttggacccgttagttttttccttggttttgaggttatcagagacaacactaccatacatctcagtcaacacaa

SEQ ID NO: 242400 - DNA, 760 bp, Cannabis indica
tgcggtgcggtgcgggttgaaccgcatattacaattcaaaactgcaaattacaccgcaccgcgcagcttaggaaaaattcaaaccgtgatcgcaccgcaaagaatttcaaatcgcatttttttttgcgctgcggtgtggtgggggcagtttgagcggtttgataaacgcccctaagtgtaagtgtcataatccaccttcttactctattactaaaagggtaaagaacctagtacaactatgctcttaagattgcttcatttatgtaagaattattgcagctctcataagtaagcaaactaatagtaagtttgtcaacttacgagaatgtgtaaggaggcatcctgaaatctcaactaatgaaacaatcaaataagtaatagctaaaaaaagtcctagatatttttaagaagcgtatttacgagttcttactaactcagtctcttcaaacgggtctacggtattttatggttgtgtaaaaattaaaaaaaaattactatttgataatacaaaaacaattgtcctatcatatctttaatttataactaaaaagaacaaatgaataatttcatcttatactattttacaatgtattatgtcatttcttgtaattttatttaaattaaaatacctattttttaaaattaataaaagtacttcattaaattttaaaatacatattacatatgattaatttataatctatttcacttattattttagtttattcattatttatttaatattaaaaaattatcaatt

SEQ ID NO: 242401 - DNA, 4696 bp, Cannabis indica
tatagagtgtaatttcctcaaccaatcctggattaagacaattttagatccatgcctaagacctaggttaaatagacttctttttaaattaagtttttttaaaaaaataaaaagcttccaaattttttaagatatatcattttatatataatagtttcaataatatcatgctttgccttggacctctataagttaagacccaaccctgcctctactttctcaactcttggaatagatgaagttgaaattagtttagatgatgattccaattctatcctttgatccaatgattatctttacttagaaaatttattttagtaactgggtaaaaaagtatatttctccaaacaatgaaactaaacaggtaatcttagcaaaatatatcattatttgatattttcccattaaaaaaaataatgcatttgggaattgtgaattagaaagggtgtatcaattgtgtaccaaaataaaataagaagatattttgtaagagagaaaaaatatcaatagaagtttgtgaatttaaagtgaggagcctaatttttatttttatttttataaaaagggtaaaattaaaaaaaaaaattatggaatttgaactattgatctcaaccatatatgaatattgtttaatttcaaagttaatattatgtttataatattatgtttataatattatctattattataaatatatattataattaattaaaatatataatttttttagttttatacatcacatattaaaattttaaattattttactttctattattttggggtggatttttttgaaaaaaatactgtgtaaatttatattgtatactgtgttaagttttcacggttgttttatagttgttccaccgttgtttcaattgttctattttattgttttacggttattttataaaaagagtatttttataaagaattctgtgacaaaaaaattataaatttttatctaaaattcagtatttttgtaaaaattctcattttttttttttcaattttttttcaagagggtcgatctcgcctctatgtaggtctgcccatgataaaaccgctaatgctctgagaaaaagaaataaaatttatgttacactacaattaattaattaataatttgttcaaaaacaagttaattaatacataataattataggaagactaagtaagttattaaaatattaaatgtaacatcgaaaagtacacatcttaaacaccacatgtaatatgtttagggcttcccttaattaaatcaactactgttaagatttagactttctatttttgagaaaaaaaactctatttattaacggtagagaagaagatgcttaaaaaagaattacaaaattaaaatattaaataaattaattaaaaataattaaacttttatttatttatctatttattatttatttcccaatacaaaaccagcatagcagtttcggattccttttcagttttctttttctctctgattcaattcccaataccaaacccagaccctaactttgagctccatcaatggcggtcacacgcgaagacaatgtttacatggccaaactcgctgaacaggccgagcgttacgacgagatggctgatttcatgaaaaagctcgtcgctggagatctcgatgttggtgagcttacagtcgaggagagaaacctcttctccgttgcttacaagaatatggtcggagctcgccgtgcctcgtggcggatcgtctcttccattgagcagaaggaggagacacgcggtaatgccgaacacgtctccaccattaaggaatataggtccaagatcgagaacgaactcgcctccatatgcggggatattctggatctgcttgagaaaaagctcgtaccttccgccactgccgctgaatctaaggtcttttacctgaaaatgaagggtgattatcacaggtaccttgctgaattccaaaatggttccgatcggaaggaggctgccgaaaataccctttctgcctacaaggctgctcaggttaggccttttggttcgattcgattcatttcatttggatccatttacttttggtttttctgattcgcaacttttctaatccatgttgttacttcagattcaaatattatgaaaatatgacattttgaacaaattatgccgtttttttttttccaattgaaatatgctcactttgtgtttttgttacttttcttttaatttcaggacattgcaaccactgagcttcccccaactcatcccatccgccttggattggcactcaacttctctgtattttactatgagatcttgaattctcccgatcgggcttgcactcttgcaaagcaggtaaagaaacgaaactctaaaccgttactttatttcatgtttagatcttgaattcttatggcattaacttttggactttaaatctggggatgatcatagttagattgtcatgggaaaattcgatcgcaagattgaattgacattcgatttgacaaccaaatctaaaatataattcaaatagcaatttttgtgaaacggggttttgttttgaacatgtttgtccaagttcctattggaataattaaacaatcaaattcctgtgggaagataaagaagacaaaatatagctttattctcccaactcatcctagagatttagttgtgataagacaggaggctatttggttcctgtcgtatttcttagggatcttgttatttgtcgtttgatgtgaccatttactgacctattttagttggattattcacacttttagatgctggctctttttgttaacaatctactttgtctggataacctcatttaaagtggctaaagtgttttggttctttattttttgacaacttaggattttaagaatttctctgcttaatttcttttttggttctaattccatttgttgtaaaggtcttctgttagatttattggattttccatatctaagtgtttttattttctttctgttctattctaggccctatgtataactatttctgttaagcatctcatgattttttttttccttttttatgttttacttaggcttttgacgatgcaatagccgagctggatactctaggagaggaatcctacaaggatagcactttgataatgcaacttctccgtgataatctcactttgtggacctcagacatgcaggtttgaattgaatctatactcttctggcatgttttgatgcaaattcttaatgttttgattttgttattgagcattatctgctggcatgttttgtaggatgagggcacagatgagataaaagaagcagctaagccagagggtgagcagtagcgacaaaaccgccttttacgtgcttaggagtattctgcttctcctttgtttcattttggagaagtggcttggtccttttaaatctatgactagtttgtaggaattttatttatccttgtatgcatttataggctttgccttgtacttgagccaagatgtgctagctcaagctagagaattgaactctttcagattgttggcatgaatggctgcaaaaagtgttgcttaagctatatttctttagctattcaataatattaggagtttaattatttttattattattatttttgtttgtgtttttgtttggttggttgtaatgaaatggtgattcagatcattttatttattgaatgaattatctggatttttatgtttatttatctctttggcacacctgtatactgttgatatatttcccttatactgttagcataatgtttaaataaggtcaatttggagtttagtacgattctgtccaatccaaacctatgtaaagtccaaacaagatgtgtcaaactcttattgatacaattgtaaatcaagttctacttaataaataatataatatcaatgttcatgtaaacttagggggcttgtaaatagaggtatttgtattagggcatgtttggaaagaaagagggagaagagaaagatgcataacttaggaaggataaagaaagtagaagaatggaaaggattgtgatactctatattgtttggtgagctatgaaggagagaaatgattgtgggtgggatggagagaatattaattgtaaaattactatattatttaccattataaaaaatgtttaaattttaattttttagttattacattaatacatacaaacatatacttgtttaatttattttattataaaatgataattgtatatttttttaataaaatacttgtatttagttttttttttttttttgtaaatggaattcattaaacaacaacactaaacaggattaggcaaatcaagcaaaatagcttgattagcacaagagggattaaccccaatccacatggcactaactttgtgaaccaaagcataattggctaaaacatgagcaactttattgacctcacgaaatacaaaagagataccaatcacactatcatgagacaataacaatctaatctgatctagcaaacaatcaacatcacggcagccatcttccttttttttggattaattgaatagcttccaaacagttcgattctatgctaaaatgcattatatgtctctgtagcccagcttgtatccctttcaaaatagccatcagctccaattgtaacggcgagtattcccgtggtatagcaatcgaagaagcatagatcacctccccttgctcaccacg

SEQ ID NO: 242402 - DNA, 751 bp, Cannabis indica
atttttgtaaaaaaatagcaaaagttagtataccatgtaaatttcccaaataaaaatcgtccggtccaaattttctgtctcccctctgtctttcttataatagcttgacatgtatcttatttattttaatctcacgtgattgttaaaagaaggaaacttttgttaacacggttagttatttttgggctgctacttatcataattttcgtccactaaaaaatttgttttcctttttatgtttataaatcatcagtgcaaggtcagaattttgctaatagattgggagttcgtcttgtgactcatcatgctaagtatttggggctgcctagttttgtgggaagaaggaaaaaagaggtgtttgagatcattaaagataaagtatggaataaactaaaagggtggaaggcttccatgttctctcaagccggccgtgaaatcctaatcaaagcggtggttcaagctattccaagctatgcaatgagttgcttccgtcttccaaagaaactcattaagaaccttcatagcttggctgccaatttctggtggggggatacaaaaaacaataaaaagcttcattggtgcacttgggacaaactttgcaaacccaaagaggaaggaggtctcggattccggagtcttaatgaatttaatcaagctcttttggcaaaacaagggtggagactaatccataatccccaatctttgctagctcgggtgttgaaacatagctactaccccaatgtttctttca

SEQ ID NO: 242403 - DNA, 670 bp, Cannabis indica
attttttaatttaagaacaaaattttaaaaacaaaaaaaatcatttactttacaatttttttaaacagtttttttaatcaatattttggacttcattctcaacttaaaccttaaaaactgaactcaaatctaaccctgaacatggactcgcctcctgtcttgacttcgaactgagttttgacccgacttaaataaaatcaacaaataaaaataataatgaaatttacagaatatattttatttttcattttaaaattaaaaaacaagttatagaacatatttttacttttcaaaaacaaaattttaaaaataaaaatttcacttatattttggaaaaaaaaaacagaaaaattccaaaaagggtaaaatattacaaaaatacagtgggccggcccaatcaacatttgtacagcccacattgaatatattacaaaaataccacttgaccttaccttcagccgcacgtcacaaacggagacgatgaaggaacctccatcgatgcagtcggctacgcaaccagaatgaaaccagatcgagcgtagaacaaccgtaaattccagcaaatttcgataggaaacgaacaaatccaaggatctaaacagaaaattaaaaaaaaaaaaaaaccaggaaaccgtaggagaaactgaaattaaacatttgatttcggttt

SEQ ID NO: 242404 - DNA, 1128 bp, Cannabis indica
aaagctaacactggtgctgagatcaaccgttgcttcaactcttgaaaactcattttatagttattagaccaaacaatctgttggttcttctttgtcaactccatcagtggcattgaaattctaaaaaagccttctacaaaacgtctataataccctgaaattccaagaaaacttcgaacctttgtaattgttctcggcctcggccaattcttaacggattcaatcttccccgaatcagtcataattcaatctttcttaacaatatgccctaagaatgaaacttctaaaaaccagaatttacacttttttaatttcacatacaacttatgatccctgagtcattgtagaaccattcgaagatgttcctcatgttctacttctctctaagagtatacaaggatgtcatcgataaatactatagcacaattattgaggaaatccttgaacactctgttcatgagatccataaaatctgctagagcatttgttaacccaaacgacataagcaagaattcttaatggccatatctagtttgaaattccatctccagaatgtatttctcttgaattcttcactgatgataacctgaacacaagtcaatcttggagaacacagttttaccctaaagttgatcaaacaagtcatcaatcctgggaaatggatacttattcttgatttttagcttattcaactcttgataatcaatacacattcgaagggatccatccttcttttccacaaataaaattggagctccctagtgcgatacactgggtcgtgtaaaccctaaatccagcatcccctgaagttgtacttttagctccttaagttctaccgaagccatttgataaggtgcctttgaaagagttccgctcgaggtgtcaaatcaattatgaaatttatctctcattgtgacagtaattctggtaactcattgggaaattcatctataaactcttttataactctgacattctcaggcccaaatgtctccggtctattggatttaatcacaactactaaaaatcctgcacacccactgtgtagtaaatccttagcctttaaaactaaaatgattgggatccaagaaccttgaatagatccaacataaacaaatggatcctaac

SEQ ID NO: 242405 - DNA, 612 bp, Cannabis indica
agtataagaacaatgctaaaaaatataaagatttttgtttacccaatgacatagaccatagcaactataacaataatcaatacctgatgttgcaagtcaaaccccaactttccaattcaaaccttccagtccgaataaacaatgggccaagttgtgaaactcacccaaccatgaacctagcgcaaccgagcaatagagaaagggcagagaaaaaataagtgatcatggctctcaacaaaaccattacaaacagacaacaaagagaagaaatggatagttgtaaccttagaagcttatctctggtcatcatctaaaagtttaccatctgccaaataatgaatctgtgtttgagaagcgagtctactccatatcacatgagcataattaaccttctcaacatcaaagagagagttatagaacttattaagcctaaaccttccatttaaccttagataataatcctgttatagctgttgttgtaataaaatgagtagtttagaaaatgaagaagagggtaacataataagaatgattatattatagagatgattgaaaaatttatagttgataaaatcattatctgtttcgatattcataagagatttttaagtt

SEQ ID NO: 242406 - DNA, 769 bp, Cannabis indica
tttctgtttcgagcaatagtgggcttagaaaggtgattctagttgaagatcacaccactccatactcgttacatttgggtacttccaagatgtttctattggtattttatgctctaaataaaactcatttcaatataatcttatttgccatctgtaatatcccaaaaatataatggtaattaattggacatattttattaaatatgtgattgtattaatgttggtgtaagattatgatcttacttaagctatatgtatgataattattaaaatttagtgagtggtaatgtaatatccgaaaattacaatgatagttaagtaggtgtattttattaaatatgtgattaagggggtatcagagtaggattataatcctacttaagctaattatgaatttattagtgaaatgcaattaaaggaacaaataaagcgtaatttattaattacggagattttattgaaatatgtgggtatcgtggataccattttttggaaaataaaataaaataaaatatttttgggtccggtgactatggattgtattggaagtatccagactagttagaatattaggatgtcaatttggtgggaatagctagaattaccaaactatccctagatgtgttttagggttaagggtatcataaggggtaaaatagcttttggggttagataattatttggttcacaattagatttagtggttgatcattaaggaaaaaaaagataataataataaatgaaaggatatataggaaaaagggttaga

SEQ ID NO: 242407 - DNA, 627 bp, Cannabis indica
gaagaatggtcatgctcgtatcgcatatataatgtaaagctcaattagcttttccgatagtgagtgattctataaacctgagacctaaaccaatgttgagtaatcattatgatgttttcttgattttgaatctagttatataatataagtatgtataatggagatagacaaacagatgtatatatgatgatgaaacattgagatggcaacggggtgggcacataggtctgtggaccatgaaccagctaagcctccatattctcaataaaaaaatctagctttcttccaacaaaaatgaaaggaaaaaaaagtggttaacatgatttgtacacaggcacaggcacagctcaactaagcttccatcatgttctgaatatcttgacctttcaaccacaagcaacgaattaatatagaagaaaaaaaaaggttggaaaatttggcaagttgagaaaggatataataatactaacaataaagcttactatatgtattatttagctagttttgattggtgggcactgttcaatttttcattcgattgatggagttgaataaaggcctaaggtgtctcattgagagagcatgtagtttgcatgataggctcaattgtgagattgaacagagcat

SEQ ID NO: 242408 - DNA, 1217 bp, Cannabis indica
taaaatcaaaaaatcgtaaaaatgtttaaaattccgtaaaaacgtatttttgttatttttgtgcatttgtgaaattaacccttatttaattccataccaaaaatatttaataataatatctattcctattagagaaatttgcagccaaaccatgtatgtttcacttgttacaaacttaattttttatcgctctttttagtagtaatacctattttagtttaattttgtttgcaaattcatacttttgttaaatttagatgttaagtgtcaattgaacatgtgagtgtatacacatgtatacatgtgacgtgtttttattagtctaaataattttaataattcaaatattataaaagttattttaaaattattaattaatcaacatataatataagtttaagtaatctcatcatgccatcaaccaaaattgcttatcaaattctatgatgagaaactaataattatcaattttacattcattttaccaatagtatcttggttcatgtctttaataactttgttttttatgtcttccaaaaaaaactttcattttatgcgtttataatttgagatacatgtataatttgcatatttaattttatcgttcgttattatattattattattagtataattaaatattgataagcatacaaaaattacattagcaaagccaataacactactcatttaattaacatcgtcataacaaacaaagtcaaatttgcctagtaattataaaatgaatacaagtaaaactacatgttcattggtcattgtttacttgtacatgaatgttccatcactggattctacttgtttattatatagtatattattctaataattttatatattttagtaccattaccaagaagataatataataaatagtgttaaatatatattgtataatataagttcttcttgttgaattcctttaaatgcatcaatggtcaactttgtagttgcaaatttaatatttttgcatttgatttgttttgtatcttctatttttttctagatctgccattattagcatttaattctcaaatatttttctttcaagaaaattcttaggtaaaggcaacatttttgtcgttcctataaaagtattttttattttaggtatatgaaatgcattaaaagctatataacaagttccccataacatttatcatattgaaattgtaccaattaggttagatgtgcgtacc

SEQ ID NO: 242409 - DNA, 586 bp, Cannabis indica
tagtgtggctcacactttagctaagttaacactctctttgaatgatcattatgttttgaggcctggccacccaaattgtattgatgctgctttgcaaacattaatgttattgtctaatactcttttttctcttgaggtttctccatatgagtttactcttgaggttttaatgagattgtttttaaatatatatatatatatatcgttatacatgtcaaactcaacttcttttattttttttatgttgatttttttttaattttttcaaaatcgatggaacaacctcaactcatacaatataaaataagagattttttttaattagataaaacaattaagcataaaaactcaatttctttaatactatccatttatagataatattcattattaaaagtgcacccatctataaaaataagttttaaatgctcttgtgttcttattatttaaaagctaagagaatgttatagttactaatttttttttaaaaaaaaaaataataataatttagattgaattttcgaagtgttttgtttttttggtaaaacacagagggtccattttatcatttaataaaatagagggt

SEQ ID NO: 242410 - DNA, 882 bp, Cannabis indica
atgctctaatattaaaggagtgtaatcattagtcaaattaattaggaactctctaacactgtttttctaagtgtcaaagcactaactgataatgtcccatgctaccgtccacaaaaacaccacacaaacatatattataaggcaaattgctcattaatattttttcagaaggttgacaaaccatatatatgcatcaatcatacctaacttggaaatatctttactaatagccactaaattttttttttggaaattggggtatacatttttaattaatatgagtgggagacacacgtgcagacacgtgtatcaaattaaatgttgatttatatataaattttaatagttttaaaaatttacaagtttgattttttttttttataataaataaaagacacttgtataagtaaatgtattttttttattattaaataaaataataaataaattatttctaggattgaaataaatttttaattttaaaaagaaaatattttaaaaatataatttaagttacaaagaaaattattatagaagattataagaaaaaaaaaaattgaaaggattcataaaattttgtagtgactaaattaaagtaaaaaattttgtagtgatattaagttatatagaatctgatagcagattagcagtataacacaccgataatgtcttttaacatttttattattattattattatttagtaaataagatgacataatattactttgaaccaaatatcacttacaaattttaatgggttttttttttattattaatatagaatttctgaaatgcattttgaaaaatatagacatttaataaaaaaacttaaaatttgaaaaaaaaaaacttaaaaaatggaaaaaatagaatacctat

SEQ ID NO: 242411 - DNA, 547 bp, Cannabis indica
gagttgacaactcacctgtatctaggcacacgcatccttctctaccttaagctcggcctccatggcatccaacttctttcaatgaataccaaacgaaatcaaacgaaatcaaacgaaaaatcacgttataagttaaaccaacatggctagccaagcgagtctactggtcggccagcttctaatggtgttgctctggtcggccagaagattctataggccagccagccagcccctgtcaattcaacattgcgtgtaaaatcaaatatacaacttaaaaatgaaaagtccctgatggcattggatgttaagcacaataactcctcgacctctagctcctagagctccccgtcaaggctagcaaagttctactaatgtaattctgagcaaccttagtcatcctctcactagtgaatgaataacgctccccagctaaacctctggaccccttgccccgaatgcctacgagagggtggagttctcctagaaggagggtccataatcacaggctggtcagccagaacaaggcctagaagagggggagcagtat

SEQ ID NO: 242412 - DNA, 1189 bp, Cannabis indica
tgataatataaatagaatattatcaatataaaaaattatggctattactataaatcttaaaacaccttattaaactaattctaaataaattagtggacaccttattaaactcattttatatatacaaaaatatttgatttccaaatacgatttgacagtattcttaaaagagtatttgtagaaaatctctaaaatctattgatgggttcttcccttgccatcccacttcttttaattgtggacataaaacaaaaactctaaacaatattctatggagctttctaatttttttaggatatagaaagaaagatccaaatttacaaagacttacaaatgataacagagttaatgaacatacacaaaaatatctattcaaaccgtttaaataagagagaacataccacaaattacatatgataataatataatgttacgtacaataataagtaaagcaattcactcaccacaacacattatcaagaaaatcatcatagaaactaaaggcaaaaaaaaaaaagaaaaaccttctgtcaaaattacaaaattgaaaaaggaataaatgacttaaaatagagaaaatagaaagaaatcaccttaaaaatgaatgacacatgttgactcaattttgagggacagagacgacaatggaaattcctctctataacttcagctttccaagcgacaaagtttaattgagagagatagttgtagaaaataatgaaaaatgggggtcttattgaagacattcttatgattgaataaataccatgttgttatgagagggaaagaccaataggtagaaagatgaaaaggaaaaaaatgttgggagttttatttttaaataataaattagcaataaatgatgataaatataatacataaaaaataatattttttcaattaaaaaaaaaagaaaaattagaatgcttagaaatagtgaagatgttcatagagactggttgcatcaccgtgtttgtgctttcctttatttttatatatatagatatagataaatagatgggcaatttattgcatttttttttttttgttatttttgttttgatggaaaagaaaaacattttaattagagagatataataaacttaaataattttgaaaagaactgttgttgaagcttgcttgtttattattagccagcataacttacgaatgtatgatgttacgtcct

SEQ ID NO: 242413 - DNA, 860 bp, Cannabis indica
gctggtgggatgaaggagacatcgaagtgatagtagcatttgctagcagggtggcctggtttgctacagagttgacagatgacacacccttgattaccacgccccttgccatggccacggccacggaacccagttgatctgccagagttgggcgagggctgatttctccttccacgggcagcaaagttggctgaaggagctgcaacatctgatgttgtggtggagttgagctgatcgatgcgcatttcttggctttgtaggaggaactgaacttcggaaagggtgagttgatcagccctagacgtgagattgatgaccacggagtcatattcggagccaagtcctcccagtatgtaaaggatgagatcataatcgctgaaagtttgtcctgcagagttgagaccatctgcaatagacttcattttgagtatgtaatcatggatagtcatggaccttttttttagggattgcaattgaaacctgagttgaaggattctggcacgagattgaatggtaaacaaattttccaataatgaccatagttcatatgaaacacgacagcgaaggacatgaccaagcatggcctcagagatggaatttaaaagccagcttaaaatagcttggtctgtgcgaacccagaccgtaaattgaaggtttacctgctgtggtggttcttgatttacctcattgggtggagtttcgatgtatggggtggaatgggccttgtgccgaagagaaacccatccaggtcgtgagcgcgaactgctggaataacctgggagcgccaatatgggtagttgtctctgtccaggcggattgtgataggagcgaggggctgtaacagcggtgcaggcagtggc

SEQ ID NO: 242414 - DNA, 841 bp, Cannabis indica
ttttatttagggcatagaatcccaatagaaatggagtacggaactaagctcctagaacaaggttcataggtagaagatagtgtggaaacagaagacaatgcgcagacggaaactattatggagttggaagaacaagagagaaaagaccaaacagaggtgccagaaggatttagacagacaagtctagttagtaggctcgtgataatacacggagagagatccatccttcaacaaggtttgtagaagcagacataacagcatttgcactggagggagttcaacaaattgaaattgaagagcctgaaagctataaagaggaaatttcaagtggaaaaatgtctaaatggcttcaagccatggatgaggagattgatttactccgaaagaataagattttggtatttgtgccaaagctatagaataagaagattgtagagtgcaaatgggttctcaaggtgaagaatgaaccagtgagtttcaaagccaagttagtggctaagagttttaccgaagtggaaggtatagactacagagaaatcttctcacttgtggtaaaatataatacaataacgttgatgttgtccttggccgctcaaatggagtttgagattgaacaacttgatgttaagaccgccattctaaatggattcgtggatgaagagatctatatgaagtaaccacctgcattttaggtggaagagaaaggagtagaattagtatgaaagcttgatatatccctatatgattgaaatagtccctcagataatgaaataagagattcgatacgtatatgactcaaattgggttcgaacaatccacatacgatcactgcttatatttc

SEQ ID NO: 242415 - DNA, 629 bp, Cannabis indica
aatcaaaaatataattttttgtgagctgtttgaactgaaatctccctttcctacctagtgcagtcaccttgatcttgcccttacaaggttaaaaagagttgtcttgaattgatattcaactgttctgagttgaaagaattgatctcttcaggccatcatgcctcgtatgaaggtaagttgaagaatgtctaatgagtatgatccacacgtggcccagtacattagggccaagctcacagtgcctaaattcaagaatctagacaaagcacgtggtagaaaagtgatggcaactgagcttattaagactgccattaagagtgatgactcgagagatcgatcttttaaattgagacctcttgtcttcaacaccatctctgaacgctaagttaagttaatcagagatgactatcttcttccagagactgttgtccagaaaccacgatctagatgtcctaattgttcccataattcttattatagtgcttggtctcggtttcacatgaatgcgggtgtttacttacctttacacttgtggtttattttgattgtggattactttggagtttgcccctaccaaataaatccaaatagatacaaaatgctctcaactttcttcaaggaattggcct

SEQ ID NO: 242416 - DNA, 1051 bp, Cannabis indica
atttgcccaataatcttgaataaggacttctccccccaatacttcaattcaagatcatccaaatgtacccaaattgccaccattcagatatcttctttcttgaaattcaccattggatcccaagctttcatctctaccgatctcttattgaagaagatatatcctcccttaagaacttcatccctatcttcaattgactgaaatcgaatcagaaatatcccatatgaaaccatgcctactctttccaccttctctttccacattcttctagcaaaaccttccaaaacttgcaaaggagggtttgccccaagcacataacaaacaatggaaggcatccaaaactcaacttcctcatgaatatcctccttagtgatcttaactctattgacattctcattcattgcaaaagatttctccaagtttttttggacaataccagatcgcagagtagagggattagggttacctttcatatgcgaaggggtatgtcgagagttctgtgcttccagtaaagccccaaaatctttcttgatatcctcctgctgcctaatcaatcgaagcaaagtcgttggcgaaagaggctcttgatagagatcctgagggattcctgtttcattcgactctgaaatcaactcgtcatcatcatcagagaaaacgattggttccacaccaagaatagcatccattgatttagttttcctcacgtctgagactgaagtcggacctttcttcttcttcttagccgccgtgaattgcttcccctgaaccttagatctagttttagccatggctacagctcgtgagctgaacagagcaaaggagagggaaaacttaacatctcaggatttatatcttttgatctaagatcaactagtgatattgacttggaaatatacaacggcaagtattataatatcttaaccaagttcaatatcggtccagtccaatgtatactccatacattcgaaactagtatactttaccaatgttctagaaagaacataacacttactccaagtgtaagcacacttcatcgctgattatcacatca

SEQ ID NO: 242417 - DNA, 1608 bp, Cannabis indica
tttttccttcttggtagagtgtggttgggtcttttcttttttctttgggcttaggcttctctgcacctgctctttggttttttttttcggttttgctttttgttcctgtcctttgttgtcttgggtgtggggttctcctgagaagtggggtaggggttggtcgatgagttgagtgtgttggtaaggttgggttgtttgtttgtgtgtttggtagcaggtcatttatttgtttgtttgctttcaatggctttagttaatgccaccaactcctccactaatggaaagtgttattcttatgaggaagcttctgtcaaaattagtccttgtgcctcttctcagcaggcattatccaccttttgtcttcttgggaaagttgtggccccaatgaaagttaatgaggccactattattgactttgtggaaaaagtttggaagtttaatgtgactgtggttgctttgaatgatggtgctaacaaccttaattgttttgagttgggttttttaagtactgaaaaccgcacttgggctcttaaacatggtccttggtctgtacgtggctacacttttatcttgaaagcatgggcgcctaggaaggaactttttggtgtgtttgatcacgtgaaaatctggttacacatttttaatctccctagagactatttctccattgttaatggcaataccttgggggcaaaagctggaacagttcttaaggtcgatttggatgagagcaatccggccctgtggaagaaatctctcaatgttttgattagcctcaatgtcaaccttcctttgttttcgggttgttatttaactctggattcgggtgtccaatggtgggtacaattcaaatatggaaaactggggattttttgttataactgtggtacattgggtcatcaaagaagagggtgttctcttacctctccagtcacggtttcaagtgagaatggggttcctttccccttgtttgggtcatggatgtcaatggattcttcatacaaagatgtcttctcgggtgcccattccttctctccagcttcatcttcggcggctcaggtgggcactggttcaattcgtggggggagtcggccgttggctatggtccctggtgtgatgggttctgttcgacgtagcccaacgtctcggtcactgagtcgctctatgatggtgacggggcgtagattgcagggaggtgtgcagggtcgcatcagggagtgggttcccaaagcttcccctagatgagagaaagtcgcctgattattttccattttttaattcaaacttggctgaacccagtaaaaagagtgggaaagagaaaggtctttttgataaggatgttgggccggctcactcttctaatgggccggtctcaaaagtgggctttagtaatgatggagcttcctcccatgggccttatataaggtgtaatgtctccaatttacctattcatgggaccgagcccaatttggagaaccaaaattcagatttgcctttgattaatgtaagtgggccgtgtgctaattttgggccgagtgggcttcctggtttgaaaggaaaaaatagtgcttgttgtgaaaggccaaccaagactatttccattgagag

SEQ ID NO: 242418 - DNA, 878 bp, Cannabis indica
aaataaaaaataactaatttaaagatatttagcaaaaatataataatttaaaacttaaagatagatgtatatatatatttttagtaacaaattatttcaagaaactaaaacgtgtgggaattcaggaaaaaaaaaaactaaacgtgtggacccacaaatataaataagtaaataaatatctttgtaaaaaaagaatattatattaattagtgtgacaataatataaataataaaaataaaaaattattaaataataaatatatatttattgtttcaaaaaaaattaatttaatttattgaaaaataaaataaaattttttaagtctattcactataaatgatcttcattatattttctttattatcatttttattatataaaagtgtgctataatttaagtaaagtaaattggtaataaaaaataaattaaaaattaataaataaataggtgtaaaaaattgaaatgtattatctttatatttcgaatattaatttaaagttgttaaatattgtattttatccgttgttatcagtgtatttcacttataatcgctactattgtccttctcaagaaataaaaaaatagatcaattttgagaatttgaatttgcttaaaaaagataaagaaaagtattttgtataccaaacaacaatagattaacattaaaagaaataaattatttattattcatactgaatttaagagataaagccaccaaattcgagtaaaattgagagatacagccaaacgcacaaaagaatgagttatagtattttgagtctttttacaatgagtgagagaaataaaaaagaaagaagcccaaacatataaaatatcatgaactataatatcaaactcaatctagcatttatcctt

SEQ ID NO: 242419 - DNA, 749 bp, Cannabis indica
ttttttttaagtaaagttatgatattgcgttggcatacatagcataataaaaaaagatgaatttattttaagaagttattttagttaagaggataaaagagtagaatacattataaatcaagaaacttatacaattaatttttaagattataaatataggtatatcaccttcacatgtggtcgatatgcgtttaggaaactagaaggagaacatcatcaataattcatcgactctatatgaccattaatcacagtcaacttagtcttaacctcttactttgccactcaatgtcgaccccatacaccactgatcctacaagaattcaagcaaacatatagagagagttagctcaagcctctatactcacattacaaaaatacaaatcaatacataaattaatgtgcataaaaaatattttaatttttttaatgttaatatgcataaacaaaatacaaaattaatactaacgaaagtaattttttttttaaaaaaaaagatattagctgctacaccacttgaagtttaaatttattaacacttgactacaaaaaatgaatttttggaggcaaaactacctaaactcccattccgtttttctctataattctccgtccaaaaatcacatttaagtgccacagtggatgacccacatgtacacacttgtacacgtggcaaatttttagtggcccacgttatattaattattaaaatattataaaaaataattaaaaattataaaaataaaaaa

SEQ ID NO: 242420 - DNA, 1642 bp, Cannabis indica
gatcggatgaacacccctattaaacaatattttttttgtttttattaaacgatttactaatatgactctgcacaattttgctagagcgacatattctttttcaagtcgagtttttagtgggagggataatttagcaaattaataaaattccaatttgcattcaaaaaaaaaaaaaaaatagtaatattcaaatataattttataatatattttgagtcaaaatttaacccaacatatacacgtctcttagaagtacttttggcaaataaatcatctttttaaaccccccaaaaaaattctaccttttatctagagctaggaagaaacttacaagaaaatttataaaattgtattaaccagaaaaagtacagttattgacattataattgttaaagctatgtaagaaacattcagaaggaaaaaaaaaattataataataaacaaagtgaacttatttcagatgctgagatttttaaacatagcagttttgggagtgaaatcttgaaagcacgttgccagttgctacacacattcgcaattaattccttcgggcaaatgccgcggcaataccaccggctataagtccaactgcagtagcagtaatgcctattccaataacaccatctgcaattgaaaacaaaaacaaaagtaaagaaaaatgttggcggcgatcacttaatcaaacgttataggcttatagaaccacatattatactgaaaattacccttagcaattcgttcttcaactgtcttcttaagggtcagagcctgcctccagtcgggagcaatctacatgagggacaataaagccttaattaaatgccaaaagaactccaaaaaacaaacttcggatatcaattgttatgtcatattaacaaaaggggaatttcatttctcgtaagaaggatggttaacagaagagaagtcaagatgataatcaattacacgtccattacataagaacattccctattaaatcaacattattcttgtaagatacctagcctatagtgcagaaattaaatgaatggacggacaaagtgttctttcagatatcaaaaatagtcttagtattattttcatcattaataggtgaaagatattacagtttctctcagcagaatatggataaacaattagacggaataaactagaaaatgtgtacaaaagttctataacataaaaacattccctatgacaagttggtaacaacactagtgttgtaatagtaataataattaactcattcaacttcactattctaacaccataatcatatgaattacggaaccatatatcattgactaaaacatgcatgaagaagaaaataggataccaatgctataaatagtaggttataagttttctggttatggtggaacccatgggaaacaaacaaacctctaagcattgctccagaagctgccgactttttgaatattcactgcttcggtaatatccaacagccagaaggtatagcttctctctctgttccaaaggtgaactagtatttgtcaaagaagctgcagatgtaaatttatgtcagaatttttccacaacataaacagatatagaagtgcaggatgaactcctacattcctcaagataatataacgatggaaatgtgggaaccaggggcaag

SEQ ID NO: 242421 - DNA, 972 bp, Cannabis indica
accgaagagcatgttttgccaaatcatttgctgcagaattcgcattccgagccacatgggacaaaactgctctcagaagtttagacaataaagctatgacatcctcaagtagcacacccagctcgttgaaaaagacccttcctttgtttatagctgtgactagagacaaagaatcggaaaaaacctctttaatttaaattccgcatgaaagagcccaattaagtccaaccaagaaggccaaggtctccgcttgtaatatagagatactacctgaaagcataacaaactagaaaataccacaatgataagctattagtataaactatagcagaaaataccacgagaaacacaacccaaataaacgataaaaccaacattgcaaagaaaagataaaggaaaaaactaggcaaagggataaccctttggctagtgaaagaactccataaaacacaatacaaacatttttctcaaaaggggcaaaaacatataaagcttgatccattctagcctgatacaaatgcgctcaaaaactaaactacctatggctaactaatctatctaaaaacgcctatccacattatataaacaccaccaagtactactcaatcacttagctagagcatattttaaaaacttgttatgtcagacctcacccttttagcaattaaaatataacagtccctacgtcatctgaaacatgtaaaaccagacctaatactgttcaaacataaaactgccccatgtttatcgtgttgaaatctgttcaaagcattatgctataaaatttaaaggcttatacaaatcaaaaaaatttccttaaagttaaagaactgtataacctttgagaggcttgcaaactgctgccctcacccttttatcttctgaaaagataatagcccctaagcctacttaacttgaattattcaatactgctgcatcaaccataagtattgtatgtctctgttcttcttg

SEQ ID NO: 242422 - DNA, 561 bp, Cannabis indica
ttttaatataataagtaagcaaatatttttttaccttcaccaataaagatgataaaaatatatgtaactttttaatttttttatatttgattaaccacataaagaatgatcaaagtttaaattttacttaaatttaataaactaaccaatttcacgagctactaaaaattaacatattgtattttttctaagtttgtgttatagaaaaatttcagtaaatttttaaagtaatttataaaagataccaaatagtatttaattattattatactaattttgttgataaagttaaaaggtaacacttacatataaatatatatgtgattattacttaatagtaacttttttatgtaattataattattaatttcttaaatatacttacaattaacgtgaaaatttacttaaaaaaagtaatctagatacagttaaataagtaatggattagttactaaatcatatatatatgggtgcactcttaatgggtattacctatgaatgggtaaaattagaaaattttgagtttttatgcttaattttctatctaattaaaaaaatctc

SEQ ID NO: 242423 - DNA, 906 bp, Cannabis indica
aatatagcataagaagtgattttcccttcacaattagggagacattgctcgaagcatattaggttccgaaataaagattccgtagtctcatgaatgtggagtggtggaatttcaaggaccctttttctaaattgaatatccaagagggaggccttaattgtcgccttgaacttaattccagcctctcgcagaattgcagctgatggcagcggttgccaatttatattattattattattattattattattattattatgattatcttttttaacaccaaccattgattttcttagcagatcaagaatgtgcttgggtttatgttccataaaatcaagtattgattgaagcatggggtcttcatcttgtagtaagcccgcctttctcgagaaagtgtcactaaagaaagtaaacactagcaaatccaacggcagctgatttattacttgcttggtgatcaagtactcgtacaaacaggcaagcacaacccaaggtatttggttctctaacaatatcaaatcatgatgtagaacttgaatcacggtattcacactgaatattgggtcatcttcacttctaagattcccctcttccgactctttatacctgtagaaaaactcaataaggaagcaaccatcaagcaccaacatctgaacgaattcatcttactcatattaataggccctgcgtaacattcgcgagcctcttcccaaatttcactcatagcctctgtgagatccattaatataatttcttttcagtgtacttgtaccttgatcaacaaaacgagagaccaggtcgtacaagtactctaattaatattttgagtatctcttagatgttctgtccatgtggaatggtccgattgaaaatgcatttggtgtataagcttttggattatgcctc

SEQ ID NO: 242424 - DNA, 1333 bp, Cannabis indica
atattttcttatatacaactgacatttgcaaaaacacggtttttcataacttacagtacaagaacttaaaatatctcagacccaaaggcttgcctcaccaaactctcaaacggacactatcacaaaaactccttttcatggagatcgaagcttgatatgaaaaacattttttgtcacttagttgttggacatgatatctagcaccataaagttgtatttatgctaaaaaaatattggacatgaaaaaaaaattcatgtccaacattgctggagctgataatggaacccacgtcaatgctcgtttcatgcccaacaaagttggatatgaaatgtaataattttatattattaaatgttaaccacaaaatttcactaaatgaatattcacaaaggacaagagattcttgagacaaacaaaaagtccaaagaggagaaaaaggcagacacctttttcctttcttttaattgtttctttcctttgtcttttattccctcatcattgtacctcccccacacacccatacccctccatgcatacaactccccctgcgcactcccactccccgcgagcacccctccccacatgcacatgttctgcgttaccactcccgcgaccacccctcccagtgcgcccatgctctccgcactctctccccgcgagaagcccctccccgtgccccctttattttcccctcataccacatctccccactccacttccccaaaggcccatgcacataagctcaacatgaatttattgaatgttacataatattatgggcatagggggataaggagtaataatttagactaaggccatttgagaaagagcccaacagatgagaaagcgaccatacagcaagtacgaacaatgaagacaaagcttacctcactcaaagtacacatgaaagagagaactattgtcctattaatagtgcctgagacaataaagcatctgacattttaatcttcctattatgaaagcgaccttgcaccctaaaataaggggaccgcaagtaacaccctaactaatatagacgtgttagcgttatttttaacgtactgtgcagctcgttgctaattagtgaggttattgaaaatcgtgaataattaaaattttcttaattaattaaaacataacatatgacatttataaaattttgggatcccgtttacaaaatacagttacaaaagtttactattcatatacaaaatatttgttgcctactgactaaacagcaaaatccctgatgtctcgaggattgtacgctccaggcctaatcgccgcgacatgtacaaccttcacctactcgctctcacggctcctcaactt

SEQ ID NO: 242425 - DNA, 3498 bp, Cannabis indica
gtacatgactgtaacatgttatagacttacatagtaaacttggataacaatatatgcacttgtcaaagttttgaatatgatgagatgtcttgctcacataaaatatcttgctcatatgttcatttggcatagatggctatactgcctatactcatacatgaaaaataaagtaaggagtttattttgatatattgaaacaaattttcattctttgtttacatggtagcctttttgtatttctatactatcgtatatgctaataaatctattagtttattttggcaatattttagactcccaattttttaaaattattattttgaaaaataagtcatttctaatacactctaacagaattaaatttgaaaaagcagaaagctagtggcagaaaaaatatgggtgcgtgaattaagcaagctttggaagtgatagacgtgataaacatggacaatggtgatttcatcaatgcaaatcatgtttcagaagttatattgaaaaaaaacaattctattgaaaaatgttatagaaaaacggtatatattaggtattaaataaaaccacaatatttttgaaatttaattgcatttaatgttctaaaatgtaaatttttcttttaaaattttatgggcaaggaaaaaaaagcccaagtaccaaggtgagacaccactcgagagggagagccaacatgaggagatgcccaagcacaagtggacctcaccacatgagaagctcactgcttcactccttctcccctgctccctctttctccccgctccctctctctccctactccctttgtctccccgctccccctttctccccattcgtagtctctttgtccctgctctctatctccctctcctcacacattcactcccctagtcaccacctaataccacttgctccataaaaaggagcaataatacttaatagtatatagtttgtaatggactactataaagactaagtctaaagactactttaaaattagcctttagaggcagttattttagctgagtaatataagaagggtagccaaagcctttaagtctcatgaaaaagtctatggagatagttattatgaaataaccgactctatagaggacacatgtatttttgaaggacctacggagtcggcgactccatagggaacacgtgtatgtgtgctcctatggagccgattattacataaccgacttcatatgaccttaaaattccttcagtaaaccccaatgaatcacttcgtctcctccaacatctatctcctcaaaaaatacccaactaaaatcttcaccaaccaccgcccattcagccctaaattctaatttctccacaattttctttcatgtttttgcaaaatttatcattttcaacacccaaaaagatattaatagtattagaataataatatttagtcctgtcagcacaaagtgagtgtgctggttgtagctttgacaaacgaatttagacataaaaatattaaatctcaacgtttatcaatgtaaaaatttaatctttaataattttattgaggtacaatgtattatttttggtctcttaaattttattattatttttattgtgagtttcttgggattacggtggtggaattttcgattggtattggtggcaatttcagttctaaggtaaaattctaatagttttattataatattttttttattattattagtgattgcgtttgtcttataataatagttttgttacaaatttaatatttttctatgatattaatatgttaaatattactattaaaagataaaaagtaaaattgagaatgagatacgagagtattaaaacaaatttagaaattaggttctaaaaatatgatagtgagatataatttattataaatatgtaggtatttttcttttcaaaagagatgtaaatataaaatgagaaaaaattagtaactaggtactcataaattatataactactaagtagttaaataattaaatttttaattttgtaatatttttttatgttgtagattttgaggttgatttacaaggatccgacttattaagtattgattgatttctagcttgctagtggtatacattcacttattattattattattaattcattattgatgcttagaagagtttgaatatcttaaatattaaccctcagtgaagtagttttgcgatatattgtactgtgatcagataggtagaatagtatgtatgttagataagttagaatatcttaaatattcatccgtagtgaagtagattttgcaaatacatgtactgcggttggtgttgggattttatgccctaaataaaatctatttcaatataatcttatttgttatcaaaaaatgattaaaagacatatgtttacatgtaattttcatgcttattgttagctatacattttctgtcaaaatcagaacatatagttattcacaattatagtgatgtcaatacagtggaaggtaattgtgataatatacttcaaaattttatgtcccatgattcattagtgcactagatttatattgttgtgatagtcagcgataaaatttacttacataatggataagtgtcatgtcctttttttatacccaaaattcggttggcacttcagagaatgacacgcgtcaaccttagaaaatacaaatcaacaaatataattgcaattatattaaaagatattaaatcgaataactcattaaatgcaaagtcaatagtgtatatttataactcgcagactacacaatccttagcgagacaaggatgtaggaactgttaacccatgtatttaaaggaaacaatttcatattagaagacataatcacaaggacaatattgaaaatacatagcgaggcattaaccttgctatgtgtagagaagtgctgacgaggcaaactagctgttaaaacacatagataacacataacgagacatccatctctctataggacgaagggacacctcgattatctcaagagggagcgagtcacaagagtaaaaggggcagttactccggtaaagcaatttttttttaaaaaaatgcaacgtgagtagatatcgacccgctgttgttgccatatcaagctgccacgaggaaagctggttgtcaaccagtagcacccaaagacaaaaccaagattacttcacttggaaccccaggatatgttagggattgaccctggatattgaaacaattgaaggagtatgtgaggagttgaccttgaacatcaaaacccgttttatcaaaaccagatgctcctagaagattgataaaataaatgattgaactggagaagttcttgtgagattaatgattgtaaatcacattgctgatgaaatattttgaacttcagttgtgaataaaataatcatttctttcaaacaagtaattgtaaagcgtaaatcctttaaaattacttgaggggcatatatgtatgattaaccggaattaatctagaaatacatagtacaatgcaaacccatcatttcaaaa

SEQ ID NO: 242426 - DNA, 531 bp, Cannabis indica
tcgcacgttaactttttactagtttataaatatatatatctcgtagcatatagttagaacgaaagtttatccttctaactgacaaaaattgcagcttaaaaactgacaaaaaatacatatgcactgaatattttcttacaactataatgctaattactaccaaagattcaaccgttcaaattgcaatcacttcctttttctaattaataacattccattcaaatataaaatttcacacaaaagtcactcatttgaatatgtttcaattttcatatgcaagcaaaaaattggtgagacagccatggtttatttattataactatcagcttcaaatatattgatagttgtaatggtataaatcaatttaaaaacaactaatggtataaataattcagtgtacattcaagatgacagtacatataaatctcagtatcagtatcaatttcatctatgtaagttaacgagattatctatataatgtaacataaagttatgtataatggtaattgagccctacttgaaccacttttc

SEQ ID NO: 242427 - DNA, 1271 bp, Cannabis indica
attatttttgtgtatttataaaattatcccaaaaaataactgtgtttaaaaatatcattttatttaacatacgttaacatgtgaagttttcttttatctttttggaccaccaaaattaccagcattacaaaatgatggcgccagatttgttttagaggaaattacactctatactcactttttgtttcatattttaatttttacttttattttactattctttgatttatacccacttttataagttatatccccattatgtgcattagaaagtctaattttgataagttttgggtgcatttgggatagcttttaagaaagctagaagcacttttttaaaaagctatcattcaaaatgtgtttagtaaaattagaaaactagcttttttaagaatttaagaaaaaattttagctttttgcaaaagttggccaacatcaactttgagaaaagcttgtacggaaagctattttgttggtttaatgaatatttcacttgacaaaattaccatcattctaattataaaattctctttttaccattttattttaagattctcttctccccaatatatctttctctatcatctttatgtaataaataatatttatgtaatttttattattattattattaataaaagtctaacttattattttactacatatattttttaaataaataaatattataagaaaaaaaattattgtaattggtaataaaataaaaaataattataaatatattaatatgtatgaatttatataaataaattagataacaaatatcatacttatattggtaattgtatatttaacagctattcaatcatctagcttaccaaatacttacatacaactttttcaactcacaactattttaaaattatatttaccaaacactcagcagttttttctcacagcacagctacagctgctttttctcacagcgctacaactgctttttttagctgtgccaaactggccctttgtgaggttatatttagtactttgattataaaagaggatatttatcaattaaaattattttagagttgtatttggttaatgtgtaataaaaaagggtagttttcaacttatccctttattttagttattttgggctcgtttggtatgccgtataagggtcgtattgtattaaataataaataacactacgtttggataaagcaatgaattgtattaattattacaaccaaaatttttaatacaatgtatgttgtattatttaatacataacaaatggtctgtat

SEQ ID NO: 242428 - DNA, 585 bp, Cannabis indica
aaaataatttttaaaagttgaaaaaattgaaaaattggacaaaataggggagtatgcaccgggcacaagaggtgtcatggttgaggcttaaggctgcacttcaaggcgcgtgtgtggcatttctcgatcagtaggtagttcagacaggcccgtatctaagaaatctcggacaacccttgtctgaaactgtgtctcgaccgagtgagacacttgaatccgcaagcgtaaggggtaaaaccctagcccgatatttttaaaaatttcaaaaaatcacaaatttttcaattttaatttaaattaagttctgtaaaagtcaaaattagttaatttttcaccaaatttctaaataaaatatttttagaatgaaattaaaattatttttcatagaaaattttgtaatacacaatcaatcatcagatagtcacataaaccaacatgagcacatccaaatcatccaaacattattttactaggatctaaatttactaacatgtttgttgattataaaactataatctaacatctaaatatgaatttcctaaaatagtgaaaaaaatgttatataaattaacaattaacccaaga

SEQ ID NO: 242429 - DNA, 761 bp, Cannabis indica
gaaggtggtaaatcatgtcatgccgagactgaggcggcacgatggagagagagaaataatggtctgggaggaagaagcttcatttttcctcaaggtcgagagtcaactgggtccttggtggcttctgttcgagccctcaaccaacgatggtagctcatcatagtcgtactaggaaccgcgaagaagagagggtgagataggtcgagaaacagagagagaaactgggttgagagagctggtctggtagagagaacgagagagaggaaaggtggagggtgaggcgcgaatgggaaatagggttttggtttggggaagaagacaagagaaatgagatgaggcggtagggggggtttgttttgattttggattttatgttttcattccctttggtctcggatttgtaaccgagatttaagagaataagtctcggttataaaacgagaccatataggtgttgtttttttaattcttttaaatctcagtttaggctttagtgttggtttactgaccgacacaattgaattttttaaatctcagttttaaaccgacacctaaaactaagagtattttttagtgtcagtttttaaaattaaatgaaacttaaactgacaccaaaagtatcttttgtagtagtgagagtaaatgtgtcaatttttgtgtggtctgtttgtagacaagaaaggttctttgttgatcttgtgtatttgactttttgtgtatgagtttttgtaggattattttaggtataaattttctacaag

SEQ ID NO: 242430 - DNA, 853 bp, Cannabis indica
gtcaaaaaaatgtcacttgtgattcggggatagtgagcgaaagagagccaccaaaaatctaaaaataccgatccaaaaagtagagcaaaagagccacttgtgatcaggaatagtgaagccaaaaaagagtcgattatgatcgagttgtccaagatgatgagcatataacatagccaccatcttgagggggggatgttagagagtctcacattgctattatgtagaaaaataatagaacatataagagggatgagctactcctcttattgctaattggttttaagatgtaacctcattcatcatatacccaaatacaatttttcaagatatttctatcatatatcgctacatcatcataaatttcttaagaaaatccaacatttgtagcaatattttattgtttttttcgttgaccaatgtgtgtccttagattttcttgtggtgggggattcggtctttttctggaatcttcacataagaagtttggaaatgtggctgaatatatagataggagtacctataagaaaataacttaggttaacttcatctttttttaggccttgtcgtaattgtttcgccaacttattttgctcactaattagcagcctgcttgctgctctaatttttcagtaattttggtcaattattgttattattgtggtaagtgatatttgaattttgaatacattccaagtcagcactacaaaaaattttacttttagtcacaataaaacttgtgactaaaagtgaaaaaattgtgactaattataaatcatgattcctatgttgtgactaaaaggtccgtggctaaaaatattagtcacaaaaattacaatttgttgtgactaaatgt

SEQ ID NO: 242431 - DNA, 2900 bp, Cannabis indica
tcaaccatatatacatatatatactaaacattttttatattatacatatgacacgtgaaaacattctatttttataatatgttacgaacagtaactcactactttatattaaaatatataatatatgataaacatgttcctaatcaaaaaagccttataattattatacttcaaaacaaaatagtgatacgaaagtgaaaaagaatggctaaaaatgaagccaaaatgttggcaaaacgcaaaaatattgactgtaaacagagaagcaaacagggttgtgggaaaatgacagccctaaatatagacaatagtagaaacgagactaacgtacatttactgggttttttgcaggcacagcaaagagaccccttccaagccagctctccatataacataaacgccgtataaatatataaatatatatacacatatatacatagtaacatcgttttaaccattgggtttttcactagctctatatacacctttactctgtcctttttgaacattcaaatgttgcaatagtaaaaccactactacttctactataataccaacttttttttttaattttttctgtctattgtacattttaattttaatacagaacaaaagaaaaccaaaagaaatatatatatatatatttgttaattagtacaagagttctcaacccaaaaaagaaaaagactatggaaacaacaatgaaatatgataataaaaccccattaaacaaaatatataaccgtgatctgagcataacctgtaagaaagataaagacaagagagaaagaaagggagagattgtatggtgtgccttgggcttgttgtgatcataatgagaaatgaggctagacttgtagggggagagggttgaagagacaagggctcggagctcaaagataaccccattggttgagtattaggtttggctggcagccaggcagagatatatatccatataatgagtgagatttgatagggataattttatattatataatactcttttctttcttgtaaaagggtttttcttcacacacacacatacacacttcatttaagcataaatatacttcactgcctgtctttcttgataatgaaagatatcatttttgggtcattcatcaacgtcatcatcactctctacgccgccgttttgactgctactacagccggtactgttcaacgacagctggtcaccagcgacggcaacaaagtccaagtcttcttcgtcctcatcatcagacacctcctcatgatcatgaccgtccaatatcttatgatcatgatcgtgatcatcgtcgtggccaatgggaatgagttgtgatgatgtcttattattattattgtttgttgtttggccagcgattgcaagtggctccgtcagtagcttcccatctcgaggaggagagaacaccactggcaaatagtggtccatttcgcatgggaactttgagttcttgaagtgctctttcaatgcctccaatcccttcatttatttttaattcatttatatatacatatattttctcttgaaaagaaaagatgaaagataaagaaatcttttgtcttttataacataaaaagtaaataaattataactcaaaagaaaaaaagagagacttttattagactttcataatcatcatcatcatcttaaatatttaatacctgtactctagcataggtaacttcacagatctttcttgagttgaatacttcccaatgttgaagatgaaatgccttgtataatctccatgttgcctccggggaagtcatgttcacgaacccatatccaacattgcacttgttactatacattaacataaaatacaaagaattaatcatcaatatcaatgtaactttttctgggttttgtcttatttatgcaaagattaaagaaattaaggcaaagatcataacttgaaatcaataggaaggtatacgaaatcgtaagaagaaaagggttgctcgttcccgccgccgtgatcttcattagcaatctgttcgttgcagtggatacagtggttatccaacatgttcaatagcagcttttgactgtaattataaaaataaattatattaatatttttatataaaaatactaaaaaaaatagtgagagagagagagagaatagagagaatgaccaacctgtacttgttcggtatgttttttatcattacagtagttctggtatctctgcaattcgattccgtcatagcttcttcactaatcaagaaccgcgaatcaaacttctttccctgtttcattccttttctagaacgactcctcagcaccgtcaccggaatctgttgttgagactgcaccaccgccggcggaggagaagacgacggaagtagctgctgcgtgttaatactgttatgggttttcctcgaaagcctcttgagaacagcccctccgccgtgagattccctatcccgatcagttgccactcctccattaatacatacattatcagaacccattttactacttgaacaacccttgttagagtttcccttcctgactgggaattgagcttgagcagcataagcacgcggtggtatattgccgagttttcgagccggcggcggcgaatacttgtgatgatgagtagtagtggtggttaatgagttaataaacttccgactgtggccaccaccgggacgactgaattcaattactatttgtttgccgttaatttctctaccgttcatttccataagagccttagctgcgtctcttatatcaaaaaactctacgaacttttggtgcttcttcgaaggagtttctcttaattcttttataggacctttagaaagaaagaaaaaaaaaaaaatcgaaagagacccatcaaatcatttttattatatgagaaaagaaaaaaaaaaaaattaaa

SEQ ID NO: 242432 - DNA, 2996 bp, Cannabis indica
ttatggaaaactaaaaaagataatatttgtttaaatactaattcatagaatatattataaaaagtgtccctacttttaataatagactatctttgatacatcaaaaagtttatagtgagatttttataatacttttggtattatagaactctttatttgttgtagtgatgaaacttataataattattgatttatcaaaacaaaattagtggtaaaagttttactaattatgaaaaaaatggtgcatcaatcataactaaaaattcaaacacatttttattttattaataattcttcaacttgtaatattaaaagcatatgatgagtctcatcgatatatatatcttattatttttggcttacataattactcatatgttaattatgtttccttattacaatataccaataataatagagaaataacttacaaacaacacaaccattaataatacttaatcttaagtataattaattaattatggataaacctcaataacagatcttaaacccaaaataggtgtaatcttataatcagaaaaaccggcatctttaaagagcttagcccattctttctcattcctttcttttccagtgagcaaagtcatcatcaacatgtcaaaaaagagttgagtttcataagattcgtcgtcttcatctttttcattttcgaccttcatgtctattatgattactttccctcctttctttttgctcttcattatggcctctttgcatttttttagaattttcacgctttcttcgtcattccaatcatgtaatatccactgttataataaccaaatataatatattttagttaattatatatatatatcaaatctttcttaaaaatattaattaatatagtgtaacatttgtttttacttaaatatattgaatattttattaaatatcattataaaagtatcaacatgagactaataataataattgtcaattaaaaaaattgtatgtagtcaattattgaaaaaatatgataaaaaaattaaagcatatctaaagtaggagatttgtctctaaacaaagtaaaatcaatggctaattaatatacttagaacttagaatatgtatgtatgtaccttcaacaaaactacttcagctgtaggaacttcaacaaacatgtctcccccaacaaaattgaggttattcccaccttgtaaatcagctacaacatgtggtaaatccaaaactgtacattgaatttggggaaaattagtcgcaatcgatgtggccacagtcccggtccctccaccgacatcaaccaatgattccactccctcaaacacccatttacacttttcgatcacaacgctcgtcaccaatcgcgcatcgctagccatggcatcgttgaagaatcgcgctagatttggctgatggctaccataatcccaaaacgtcatcccattagccgtgtcaaacggtgtaggatcatcgttttggaaccagttgctgagaaaatcccagggtttagtcatcacagggtcgagcatggatagcaagaagggtgtgacactcataggattgtccttgagtagtaatttggaagcgtcagttataacatagccttcttcttcttctccttctcctcctccttcgactttttgcagagcaaaaaagccagagtggatcaaaattcgcatgaggcgatagacacagggggatttttttggtttatggggagtgcaagtacgagttgagaaatggtcatgggttttctatagttgttgacgatatctggaatacctaattgaatggcacattttaaggacatggagttgatgaaattgaaaatttggttccatatgtggccttgagctcctagcaattctatgctattttcctcatttagaaccaaatctatattgttgttaagatgcctaaaactcttaagcttctccatgtttagactataaaggtatattctatataggcttttacactttgttgaatatgataattaattactataattaagctctatttatagagctgagttttggttcttaatgattctattgcatatccttaagaagacatgtggggtaaattaaattaaattaaacataaaataataaaagcatactttcatattatataattttttataaatgatttgttgtattaatataatttagatgacaataccagctatagtacaatcaatcaattaattataaactatttatttatcaatttaaagtaagtaaggattcatgaaattgaaataaagtaataaaatttgtgaattatatactatacataaatataattaaatataattttttcttattttgatacaatcaactataactttttttttcctattgctttagtacaaagtaactaagattttagaattgaattcaaatagtatttgtaaactattataattattttaatatttttaataaattgaaataacttaaagagttcatattatgattaaaaaaaaaacctcaaactttgaatttagaataaatcaagatatgagaaacttaataaaatatgtccaagatgccaaatttataaataataataaaaaaaaatcaaatataattataattaagctcattcttttttaataattaagtttgaattacaagatagatcctcttttatttcccattatgaattgtctcctcatatacttttccttaattttttatggtttgattaaaaatatatatataataaatgctaatataataacatattttcatatttgtcacatataaatttggattatggaaatctttattagaagattatttagcactcaaaataatatatttttggaaatctttagagattttggagattaattaacgaaaaaagaatgacgtgctcataaaaatatattaagaaatgctttaaggtagatgttattgggtaccagtagtctccaacacattttataggtgatgattcacgattggttagtgatatttcttaaaaattattttttttaagtt

SEQ ID NO: 242433 - DNA, 695 bp, Cannabis indica
tttttttagatgccgaaacaagtagggggtgcatcactacatcccttttaagggggtgcattgtaaaaacacccaataataattatcttatataaattgtcatctcttatgtaattttagataactatttattacaagaatactctaacaaaacatgaaaaaaaaaatactcggaaaactaacacaatcagtcatgaccacgtgcttggaaaggtacgcatttttatccttatattttttcttgctcttctgagattatgtttcatgacttagcttatatgatatacacatctctcaccaaaaaagatgtagagtcttttctttgcactgcttggtttatttggttcaacaggaataaagctctgaaaggtcaacccagcgatcaagctcatgcaattctcaatttggctcaaagctttctgacagactactggcgacctcagctcctatcgaccggccccgtcatcctctggccccctcatcttggtcacctccaccgccgggtctcctcaagctcaatgtggatgcttcagtttccaaggtcaatggaagagcaggtttcggtggaataatcagaaacagtgaaggccttgtatagtagctgccttggcacatccttacaaaggaggaggagctgtcgccatccttgaagtgaaagctcttctcaccctccttcgctggtgcatagacgaaca

SEQ ID NO: 242434 - DNA, 513 bp, Cannabis indica
tttttatttttttgcaattgttatatctttttagaagttacaatttttcttaaaataatgaaaacagaaattaggactgagcataaaattcagaaaatttaaaaaattgttcaaatcaacttgtcaaacacggttggaatcgaacaattaaaagaataagataattaaattttgaacaattaatttgtatagtttttttttttgagctgaaaatgcattttatattaaatgaacaatcataatacaaaagcatttaacgggggaggcatttcctccaaccaagaacaaatagagtccaccgagagagcatatttggcaagtagatgagccgccgaattagcagatatgtatacatgaccgatttgtactccagggaagtaggacactagatgcataatgtctgataaaagacaatgaaagtctgacactgaagtaataggggattgtagtcctttggccacaacaagagaatcagtctctatgtaatgagcattcagaccattatcaattaac

SEQ ID NO: 242435 - DNA, 2304 bp, Cannabis indica
ttaaggtcaatccctatcatatcgtcatggctccacgtaaactgatcctggttcgccttcaaaaagcttattagctgctatttgagctgcttgtctaggtttttcccaatctatacacactttgtgggatttcctgagtcgagaataacctcttccaattcgttgattggtttcaatagggttctctcatcttgaactcaatggtcaagatcttcaccatcaattgatgactggctttcctatgctacagctcaatgtaatagcaattgcgagctagcatctggtcgcctcgcaccactcccacgccatctggtgtttggaatttaaaagataggtgcttgatcaaactgactgcccctagtccaattagtgctagacgacccaacaatatgttgtaagccgatggcaggtcgacaactaagaagtcttgcataacagtactagataaaggtgcctcgcctaaggttaatggaagctcgattatgccaaggctagcgatgctgtctctggtgaattcgcaaaggttcaccatagaaggccttaatttggccttttcgagccccattttcagtagagtctctttataaaagatatttaccgagcttccattgtctattgacaccctcttgatccttttattggtgagttgaatggttatcaccaatggatcgacgtgaggatatctcacatttttctcatcttccttcgtgaatacaatgggaggttcctcggttttcaccttcttaaaaggttctggcgcaaaggccgactgctcgttctttatctctttcacatatcttttctgcgcattattgctttcccatgcgatatgtagccctcttaaaataacaaggatgtcctctccttcaagaggaataggttgtagcccctgcttgtttgggttattgggcaaactaggctggttatatccctggccctatcttttcacgtactattttaaatggcatcgagcgataagactttctatctcatctttcaattggcaacatttgtcggtcctatgcccaatatccttatggaatttacaatattttttaggatctcttttgctcctcgaattcctcatacgctcgggtttaccgaaggtaaccttctgctcatgtgcgaggtaaatattctctcgagtttcattatgctcggtataaataatatacaccagcacatacttataatgcttcttctgtttctttttatccttctacggttccttaactctgcctttctcttcgaaccagaagccaccgagttatcgattctcgtggagacagtacccgttgaaacgttgttgggtttgcttctcgagcttgttttcaacagattcatttcctttcaagcttcttcctttcgaacgaacacctgagccctttcattgaactcagtgatgcttctcactggacgtccttgtaagtcatcccacaacttgcccacctgtagttattggatcagtagagttccccgtttgaagggctataagttgcgtgctgtcatcgaaattcctaaccctagctgctgccgtgctaaaacgattgaagtacgccttaagtgtctcgtcaggctgctggtttatattggttagtgaggccgcttcgggtcgcctatccctagcaccctggaattgtttcttaaaatccctggagagctgctccaaggaagttattgaatgatgagtaaacttgctaaaacagctactcgctgcttcaacaagcatggtggggaaaatacgacgtaaattgttcgtcacattactcgctcacattattgtgttaaagttattcaaatgcgggaccagatcagtggttccgtcatatggcgagacatgcgggtttttgaatccataaggaaaaggggtattctttatgtctggatgatacagctcaaactcctcgtcagagtcgtatctagatagtttccctaattctcccacttgatatctcctgaacttgtcctccagctcatttatctgcaattggattggatcctcttgctttggactaagctattggcgaaggtcacgtttcttccgattcaactgctctcgcagatccggttgagagtaattgctggcagaccttgtcttaatcacatatcgcatcctactcacagactttgtctctgagtggctcgcgaatttgctggttcccatactttcttgatcattagctcgttcagtactttctactcttagagttgatcgactatgggttcttgaccgtcttgaagtcacacttgcttcttcacactctgttctttcatccccagagtggtttatcgtatttcccccat

SEQ ID NO: 242436 - DNA, 594 bp, Cannabis indica
atctaacacatgcattaatcttttatctttttacagatttaatgtaggtgatcactctattaatcaacaaacacccacatagtgtatctttaattttgtactttgtctgttatgtcagtgcagtgttagattgtacttgtacgtcaatttattgtttaccttgtgctagagatagttttccttcttgtcctgttatctaattttgcatatctgttctgccttaacgttatatgatttgaaattgtttttttgaatacataaaaatgatgcaaattcttgctttttaagcgaatgaaaattaggcaatctctttctagttcaaattgaacctatgctaaagtcaaataaacctgtttactataatttgctttagctttgggcctctctaaagttgcccaagctagatgctacttagtgaaaatacagatgaatatgggaagaaatgtggcgctgtgtttgttcattcgtttgctattcatattttatttacatataaatatgtaaatatatatttacatatttacatatttacatataaatatgtaaatatatatttatatttatacctttttgtttcttgctcttttgcagttt

SEQ ID NO: 242437 - DNA, 744 bp, Cannabis indica
aatcagtgctacaaaatattaatctatatatattatttgatctaaccagagagatatcaaatggagaaacagaactataaactttactaaaatgctggcacaagtttttcacttctctcttgtaacattgtacagattacaaaaacaatggactgcctatcattaccaaaaagaaaagaaaaaaaaaaaaaagaagatgtgaaatattctcaaaaagcagcttttagaccctaaatccatgacagaacaagcttataaaatatcactgcaatatggatggattcattatcatcacagtgatggaaataataaccttaatggtacaaccttcctacaatgaagtcatataagcagctaatatctaactaggagatgtgtaaacaacacattaaagggtgcaaagatccgtatcatgcactatagaaacttgtaactccatcagtataaagcaaggtaacggagaggactaataatcttcattgagggtatggatgtttaaaagttgactagttaacctttcctcaaaaaagacaaaagcaactaaaacatcataataataaatttaaaacatttggttgctaagcacatgccagcgcattcctgagggttcatcagcaaatggcaaacttagcgctgaaacatcacacctttatcgtatgacatactgagtttctatttcttatatagaaattttaacatattcgcaggagcataaccaaggaaaggcaattaaacaacagtgtc

SEQ ID NO: 242438 - DNA, 2926 bp, Cannabis indica
ttgatcgatcaaactcaacaaatacacagactcatttagttgttgaagcatgtgacatgtcacattagggaggatatccacttcaaattgttaaagtttctttattcagctttctcagcatagtatggcatgtgcaaatttaatttatcatgtagattcacgtaacatttattgactctcactgtccaggtaatatatgtggtatgcccattccccgagcctacagccgttctacaaactgttgttgaatctgctgttgctcttggttcggttgttttccagtcagaccgagaaaggagatctgtgctgcacaatcaggttgccaaggcattaagcggttctgcagctgttgatgaggcgtcaatatcaaatgtattagtgctttcaggctttagtattccgaaattggtactgcagattgttacggttgatgccattttcagagttacaagtccatcacttagtgaacttgcaactctcaaggagattgctttcactgtttacaacaaggctcgtcgaatgtcacgaggatcctctaatgatgtcatccagtcatcatcattctccactaggcctcattcggtcttatcacaaatgacttcccacactcctggaatgtggaaggattgcataggtcctcgaatgacagggcattccctgccaagagagggtgaaattgattctagcttgaggtcgggtgcctgggataattcatggcaaacaagaggtggatcaatagcctgcgatccaaacagaatgggtgattactttcctcatgatgaaatccgttacatgtttgagccacttttcatcctcgccgaagccggctccttagaaaatgggtatacaccttttagttccagtaattcagcctcggaatcttcaaaatctttgttggacgatagcagcggaagctatatgcagggtgatactgcctcgaactctcacatcgatggatctgatatgggtaagacttctccaagcttgcactgttgctatggttggaccgaggattggcgttggctggtatgcatttggactgatgctagaggtgaattgcttgatagccagatattccccttcggtggaattagcagtaggcaagacacaaaaggtctagagtgcctttttgttcaagttttacaacaaggctgtcatatacttcaagcttgctcttccgattccggtgttgtgagacccagagattttgtgattgcccgcatcggaagtttctacgagcttgaatatcaaggtaatccaagttttccacttattgctttctattttaaatatttgcttgtttatatgtttaaatatattacataatgggtttgatctcataatgttgtgttttccatctgactataaacagagtggcagaaagccatcaattcggttgggggttctgaggtgaaaaaatggcctttgcaattgcgtcgatctgtgtcagatgggatccctgcaaacagtaatggaacttccttgcagcagcaggagatgggtttgattcaagagagaaatctaccttcttcaccaagcccactatacggtagccctcacccaaaagcttcgagctttatgaaaggcggtttaggaggtcaaactgcagcaagaaagcacattatgagtggacacacagtgattgacaattcaaagggtctgcttcagtgggtgcaaagcatcacctttgttactatttcgatcgatcattctttacatcttgtttcacaagcagattcaccatctcctggtaaactacctctcgctttcttacttgttagaaaaagtgacactgctcatttacaaattaggggattctatttgtgtgtgttttgttttggcatagaacattatttgaaaagttaacttgtgcttcttattcggtagccagtcaaatgctttgattcagttttaattgtattcaaatatttcatgtaagtcgtatgtgttaattttgagctttgtccaggagcaacacaaggcagtggtctacatacggggtcctcgggatatctggaaggattcaccccagtgaaatctctcggctctacatccgcatcttacattttaatcccatcaccgagcatgcgtttcctctctccaacaccacttcagcttcccacatgcctcacagctgaatcccctccactcgctcatttacttcacagtaaaggctctgcgatccctctctccactggtttcgttgtttcaaaagccgtaccatctatgagaaaagatagtaagcacaacttaaaagaggaatggccttcagctctctcaatcagtctcattgatcattacggcggaaacagctttaatcaagataaaatcaccagaggtcctataaaacaagggagaaggagttcaaattcagatccaaaagaatttgaaaccgaaacacacttaattctcgagtctgttgctgcagagttacaagcactttcatggatgactgtaagcccgtcttacttagaacgacgaacagctttgccttttcattgtgatatggttttgagacttagaagacttcttcatttcgccgataaggagctttctcgacatttagagaagtcacaaactggagggtagaagtttagcggcttaccgatcggccattatctttcggtggaaattttactgaagaaaaaatgattatgggaatgagattatcacagtttttcttatggaaaatttgtacatgggagtctagcttggtgatgatctttagtaattttatttttctttttgaatttgtagagtaaaaaaatgaaaatagcttgagtagttattattactatagattttgagatatgtatattaaccttgatagaacttatttagtgaatttgttggtggggttgatatttttctccccagggtagtacaagtaaattatcttttttattttttagtttttcttttaaga

SEQ ID NO: 242439 - DNA, 2898 bp, Cannabis indica
tttttttttagtaaaaataataaaaaaattaaaataaagagttatttttagctcttatgaatatgctatctattttttctccatttaattattttagtaaatttttataatttaaatttgtcaaatataaattataatattataaaataatgaaaaaataatagtactttgattaaaatattattaaaaaattttagcaaaaaatagggatattttttatatgattgaagttcatcttttaaaccttactccctattttagtattttaactaagaaatatatgtttagagaatatgtttgaagactctaagcaagaagttaatgcacctagtaaaattaataaattataaggatatttgtgacaaaactcttataatatttataattgttacacatatcattatgataaaaaaaagtggcggcaaaagtactttatcttataattttagtgtagtcgaactcttttttagtcgttaagtgtcaactcaaaaacacgtaacaatattttattagataatatattaaataagttaataactaaaaaatagtataacggtaataaaattataaaataaaatatttttttgctatttttttattaaaatcgtgggtgtaataattataattattaaagagattttgctgctgatatctctaaattatattaattaaatgtacaaatcacaattaatttccagtttaacttgtttgaaaagaatagctcgccaaagatctccaataaggtgaacagaagacacgtagtctacgtggctatgacacgtggaaacaagcggacagtcaaatgcgctgagaaaaaaaaaactaaaaaggttaagactaaactcagactcagttcggttgggtttgagcgcttcaatgcaattttctcattggcaacgaattcctatgcagttaccgccgtttcagccggttacttcatctccacggtaacattctaagttctaaccctctcataatcctcttcaaagtccattcattacagactcagtcctctgcttttctttctttgaattttctgggttggtggctgtatatatcggccaacttgcattgcgttgattttgttactgttctgtttctcgattccgatctgggtttctcgcggttttaggatttcgaaactggtttgcttttcagttcctttgttagttccgttgacccttttgtcattttttttctcttcttgtttcggtatgacgtagctcgaattgagagaatcgaatttaaggaaaccgagtttgagtttgaggaagaagaagaagaagaagagtaagcggcagcagccatggatattacggaagtatcaataatacatcacgtggggattgtgctactcggtctatggtttcttgctaaattcaactggtgtcaccctgtggcctacttcatttccctggtttatttgtatctggtactattttcactatttaaaaaatttatgctttttcttcgttgattttctttttctttacaagttttgtattataaaattgacaaagtaaagtactatattattctctattgtacaaggaatattgtgcgaacttatttgtttatcttttaattcgatcgttagacttcgctttccaagtgtgatttttttttctttagcaataaatttatgtatgttcgaagtgggttttttctaaatttgtttcttttttagtctaaatggagggctttaaatgatcgtttgatttgtctttttaataggttcatgagcgctatgttatgcgattgaagaaaaaagtgcagtttgaggaaagaaaacaagctaatcagaaaagggtaagcttttatttatgaatttatacaacttaaattgggagttatgaatgatttcttgttttttccccttttctgctcttattgaaattctttttgtttattttaaattaggtgcttactgattctgaaacagtccggtggctgaaccatgcagttgaaaagatatggcctatatgtatggaacaaattgcttcacagaagatcctcctccctatcattccttggttcttggagaagtacaaaccgtggactgctgtatgatttttcttctgaattacaaggcccattttatggtttatttggctcattgattttcgtttcaaagtgcttgtataactattaagaattgtgctttcaagtgttgagtggtttttttcttgagcaaattctattagcttaatgttacctccttgacattagcttctttttattttttataagctgtgtttgtttcacattaaaggatattcaagtattagcacactgacatatgttattcaaattagctagtaatttttagggaagttttgtgaaacagaaatagtttgttttagctgtgcaagatgatatatgctctttattctttattaagctattttgaaatggtattgattttgaggccaagtatatgaattctttgaggttacgtttttgtggagcaggtaaaagatcatgttcaagtagtactacatgatgatatcttcctcatgtgtggtgctttaaatcacttgatgatatccgtttgttcttctctttcctttttctttgatcactatattttgatacattttggaatctttatgatcaaatgtgcagaaacaagccacagttcagcgtctttatttgggtagaaatccacctgtatttactgaaatgagggttcttcgtcagtctactgatgatgatcatttggtaagatttgtttttcatctttttgggatattggatcagtctctcttcttccttacttcttccgggtgttgcaattttcaatatgaaagttgacatgctctaacataaatgcaggttctggagttgggaatgaattttctgacagctgatgatatgagtgcaatacttgctgtgaag

SEQ ID NO: 242440 - DNA, 698 bp, Cannabis indica
ttgcacgtgtaacctcaactagtattgatgaaatattttactacacaatatctatggcacacatataaagatatatgtatattatagtaatatagttgaatatatgacatacatattcgtttaaacttgtccttgagctcagtcatgtgttggtttttggtgactcggaagtagaaatcaggataatcagcttggtagaaggaagtaggaggattggccgttccgatggctagcacggtggccggaccattggcacgttgagcctttcgaatttggtccacacttatggatgccatcatataataattataataatgtatatatgtatatgtattgtattatatattgcttagaaagatatctatatatatatatattatatatagagtgaggaaatatatatgaagtataagttgaatcaattattaggttaaatggacggtcatctgagtggccacgtatgcaaatgtatacaatccaacacactcacacacaccaactacgtacgtactattaatttagactttgatacatgcacgattgtaatttctttggactttaattaaacttcaacaacaattccacaaactttgatagttaatttcaatggagaaatagcacaacctagcaccttagctattagtgtaattaattaagtattaagtttgtataacttaataactataatggaatatttt

SEQ ID NO: 242441 - DNA, 1085 bp, Cannabis indica
taaatgaatttgagtgagacgctaaattaacccattattttatcttgaggcaatgaaacatttagtgaaataaatatgaagataatctgcccattcttttgttggtgcaatctggacgcattggagtcacttaatatcaatacttcagccgtattctcttaaccctactcttttatttgccattttctcttaattttttattcaagttgtactgaaattatacacctcccattaacaataacccggtcaaaacaactgtaattggttctaaaatattggttcaataaattgaatctagaagaaacattaccctctatttccattaaatattgagcatttcattttcgttgacatactttttattaggtagctgttcattatcataatttccatgaaattaatttatagcaaagaaaagtgtcctttttcttggatgatatgtatagccctccttcctcctcactctgtctcactctttcggataagattgctacaaacacgtgtcactgtccgttcaattatagcaattagcacactaataagacgttttttctcatatccgaacaagtttccaaataaggaaccaatttacttttgccttgagaaagggaaagaaacaacaaaagagtagagacgtggtaagagatggttggtgatgttagccgagtgaggtagagacagtgtgtagtgttaagggtacgtacgtaggcgcatcagcgcgggtcactggccatagccccaaatataggtcactatagccactctctgcctgcctctcttaatccaacgcgctccacctatactctctctctctcctttttcactctccaatcttcatttcatgctcttcaattcatcaactgatgtaatgatattttactaccttttcacctaaacaaccttaatataatttgagtagaaaagtatttaatataatggccaaaaaaatttttagggtaagtttatagcactcccataaaaaagttattttggtagattttttatctatttcgatacgagtagttttttagttttttttttaatttatttatttttttttttataatcgtgtatgttataattat

SEQ ID NO: 242442 - DNA, 885 bp, Cannabis indica
cgtgtggcagggctgcaattgggaagaaaatatttgggagcaggtgagccaataaggatgcgccatgtggcgcacgagttggaagggtaattggtgccaggcaggcgcttatgtgggagcagcgagaatgaatgccgaggtgccaattggcgctgacgaggcagtggtggcccacggctaactgggctgctagagagagtggcttgggcctgggctgctcctttttgggcttcttctttccttctttacaattttgctacttgctttcattttttttttcaaaaatacactttaattcctacaagaaagacataaattgaatcaaaatcaaatattttcatttataaaatatattacaataatttcatgaaaatatcaattaaaactcaatttattttatcatttaaaataaataaaagtgtatttttaaccactaatcacaacccccaactagcttattgctagtccctagcaattcaagcggagaaaaagaataatcgagttgaataaacaagtcaaatcacgcaaaaatatccaagcattttcaaaatattagtagagagttaaagattgctatcagtgttatttcagttgtaacaacagagttgtgtgtgtgtgcaccaaactgtatttattttatttcaagtcttaacacaaatagtatcgaaaaatctcaaaagtgtaaaggtctcaactccaatttttttcacgggtattgaaagtatttatattggaagggtgacactctttggagttggaaatgtaacaattaacgcacaaatgagagaggataaactttttaggacaagcaatttgaacaaatattgatcacaagatagacatatcaaaccaatagaattcaaatgacaaacaacctttgggatt

SEQ ID NO: 242443 - DNA, 2698 bp, Cannabis indica
gaatttgtattgaagttctctgcaatggagatttataatgaaattgtaagagatcttcttagtgcagatggtactccactccgacttttagacgatcccgaggtgaatatatttgtttggtaccttgtattttcaataatactcgtataatatttttaattttaaaaatgtacatatttagtacatatttattgatcaaatttaaatttaggatatcaaatgggtgttttttaacacatttaataacactgtttctttattgcagaaaggtactgtagttgaaaaacttactgaggagattttaagggatcaaagtcatttaaaggagcttctttctatatgtgaaggtaatgtataaaagtcctaatattaacatgttgaattttattatggattaaaaataaaaatatcgagtcatttataagaacacgtgttatttcactcatactcaaatcatacttgagttccgaacaaaaataaacgagcatattagtctccactatctttacaggaaacagatgttaaaatattgagtcatttataagaacatagattactcgattcataacaaatatttagttttgcgttcttgcagctcagaggaagatcggagagacatcacaaaacgaaactagctcaagatctcatcaaattctgagattgacagttgaaagttcagctagtgaatttcaacaagcaagacattccaatgccctaacagctagtgcaaatttcgttgatttagcggggagtgagcgtgtttctcaaacattatcggttggaacaaggttaaaagaaggaagccatataaaccgcagtttactaacattgggtactgttattcgaaagctaagtaaaggaagaaacggtcatgtaccttaccgagattctaagctaacgcgcatattacaaaactcgttgggaggcaatgcaagaacagccatcatttgcacactaagcccagcgcgtagccacgttgagcaatcaagaaacaccctctttttcgcgagttgtgctaaagaggttacaactaatgccaagatcaatgtagttgtatcagataaggcattggtgaagcaattgcaaagagaattggctaaaatggagagtgaattaaagaccttacaatcaactcctgattcacatgattcaactgttttgctaaagcaaaatgagcttttgattgagaagatggatgaagagattaaagaattgagaaaacagcgcgattttgctgagtctcgaattgagagtatgctgcaatcaaaagggtcaaattcagagtctcaaacccgaaatgaagaagttctttccaagcaaaacaaactacatcctctcctcactatacccgaagataagagcgcagaaaactcggttgtgaatgaagagaatgagttgaatgaagaggagaaagtgagctacattgtcactgataattgtagttatgatgcattgcaacaaaaagttcaagaattgcaaaaaacaattaactctcttgtcaattattacccttctgaggattctccttgttcatctgaagcttgtatgtctagctcaagaagtgttatgttgactagaagtagaagttgcaaagctgttctcacaacaacaagtccatcttgtgttggattgaatgaggaagaagaacataatgagaaagaatcgccatcaccagcacaaaacttttggtggaattcccatagatcagttcgcagtgcaaatttcgcgaagttgtcaagaaaagattccaacaattctaatttgagcttttcacttgataatatggatgacattgttgagagaaaatcacaacatggtagaggaaaaggaattaagcgatcgagcaatagtagtcgccatactagaaggttaattagaaacgattctaatgcttctattttgagcgcttcttttgaaccagacgagtttgatgaagaagagagtgatgagaatgaatctcgcgaaagagaaaatgagattaagcaacataatgcttctagattgaaccttgctcatcatcacaacaataagaagctaattagaaatgattctaatgcttcttcttgtttgagttcgtccttggagacgaatcaaacaaaggaaattcatctaagaagagaaaagggtttgcgagaaaagcttcttagatcgaagtttggtactaaaacatcaaaaatttcgaaaagacactctcgagcttcagtgctaagtgctcccgcgacaaggaatcattctaaggagtcagattcagaagaaagtgtcctcaactttatgcaagaagaactcgagaatcaacaagaacaagaagaagaagaaaccataaagcacatcaacgcggaacctttgattacttggccattggaatttgagaagagaagacaagaaatcattgagttatgggacttatgttatgtcccattaacgcatagatcttacttcttcctcatttacaaaggcgagcgatcagattctgtttatctcgaggtggagttaagaaggctacattttctcaaggatacatttactactaagagtagtaatgtgaagaaagacactcaaattctaactcgagcttcgagtttgaagatgcttaatcgcgaaagggaaatgttaagcaagcaagttcataagaagtttccaagaaaagatagagaaagtctttaccaaaaatggggtattaagctaaaatcaaaacaaa

SEQ ID NO: 242444 - DNA, 1076 bp, Cannabis indica
ctatatacatagaaagagtaataagacgacccacacatgttactaaattaacaagataaagttggtgtagaagagattgatgaactaagctcgcgtttaatgggaagaatgaaaatataagaataggaaaatataaaaataggaatgggaatgagaataagaataggagtagaaatataatggaataaaatttaaaatggaataaaaaaattatttaacttttttattgttacattggagtagtttttcattccttttcaaaatggaatagtcattctacaaaaatggtggaaaaaacattctattagaatgttatttcaatactttaaaatgtaaccaaacaaaacaatagaataaaaactgtttcattttcattttattacctccaaaccaaacgcgactaaattcttacgttttttttttctttttaaataaagcagctaatagtgttttattgttttcttagaaaataggaaactagttatcttgcacgacatatatattcatatttatcgaactatttaatttttgacgtcttcattgcaaacccaatgcgtatattatgctagcttctttccttgtttttcttattctctccacttattatgtactttaataaatacttgcataatttcgctggcttcagatattccacaccaaataaatcttcaaacgaacaaattaacttaaccaataatggggaattatctcactctttcgtcttgccctataagggatctctcaaagagaagaaaggctttacctatagaaactatcttcaagcttccttcttcaacaccttcgtggcctcaaggtacatacagcataagcagtttttcttttcccactatatattttaataaagctgaacgggaagataacatgattcttgatattcatgcacgtacgtagctctttctggttggttgacatttatgcaaaaaccatgattgtcgatcaaccgagaagataacatgattcttgatatactgctcgtgctgtgctcaaaatcaatcataaattaatacatatatatataacgatcataattaattgtcatgtgacatatatatata

SEQ ID NO: 242445 - DNA, 2658 bp, Cannabis indica
tataatttaaaaaataattttaaaaaaatattaataacaaattgtaaacaccacttattaaaaaaaaacttaaaagctcaataataatattcttaaataaacatcaccataattatcatcattaaagaagaataagagtcacacacattaaaatattaatttttgaaatcgaactacccaaagtaaaaagaaaacattaaatccggagcgcacgtggataactactgatgacatggcaagatatcgaccgttaaattattgggctcaaagatcaagaaaaggcaaacccgccgactctacatggatcccgaggaccgacttgcagacgggtccaaatcagatgacgtaagcagtgacaaaacaaacccatgtgctacgtcgacacgcagtcactacattccacgcttgccacgtgtcccacgggagctcacctgcacgaaccccattaatatcaaattttttttttttaattttaattattttatctctcacgtgtattctagaaaaccactgtattgacatgccacgtggcgccttcatttttctataaatacctctctctccctttcgttctaagtttcaagccccgtcgtagcttaaatccactagaacagagctacgagtcagaagataatatttattatatttttttaaaatcaaaaaaaaaaaaaattgtgtgaagataagaatgacaggcgagttggagttaccgccgggattcagatttcatccgacggatgaggagctcgtgatgcactatctttgccggaaatgtgcgtcgcagccgatctctgttccgattattgccgagatcgatctctataagtacgatccatgggatctcccaggtgattttttcattccgtgtataatttaatattaattattttttaattgattttattaattaatttgtgttaatgattttaggtttggctacttacggtgagaaagagtggtatttcttttcgccgcgtgatcggaaatacccgaacggttcgagaccgaatcgggcagctggaaccgggtactggaaggcaaccggagcggataaaccgatcgggaatccgaaaccggttgggattaagaaggctctggttttttacgccggaaaagctccgaaaggagagaaaacaaattggattatgcatgagtaccggcttgctgacgtggacagatcagctcgtaaaaaaaacagcttaagggtacattttctaattaaactccatgatattagcaggggtagtttcgtcatttcacagcatgtccaagctgtggtggtagtaaatgggtcccacgtgtgctatctgacacgtggcggcttatagcgctagattaacgcctataatttcgtgcttaaatgcctccaaaattttaattaattaaaaatttaatattctgtcttatcttttattgatccaacggttctgattttgacagctggacgattgggttctgtgccgaatttataacaagaagggttcaatcgagaaaaaacatcaatttaattcgaatcggaatttgagtttcccggagattgaagagaagaagccggaaattctaaacaccttacctccgccgccgcagccggcggcgaccaccacaaccggcgggaacgatttcgtctacttcgacacgtcagaatccgtaccgaggctccacacggactcgagctgttcggagcacgtggtttcgcccgaattcacgtgcgaggttcaaagcgagcctaagtggaaagatgattgggataaagcccttgattttccttataattatatggatgccaccgtggacaactcgttcggtccagctggcaatcaaatgtcgccgttacaggacatattcatgtacctccagaaaccgttttaatgggctttttcttttgatctcaatttgggcccgagatgggcttgtcccgatattgggccttgatgggcttaaagaccgaagacaacacgacacaaatccatgggtgtgttgtggactcgagctcatcggataatgaaggaaaaatgtaaaaattttgtaatttgtgggaattttacttgtggggtccgatcatttttgggtcacgggagtggaattgggtacggaaaggtgcacattagacagtagagcctatgtgtacagaaaactgttcttttttttagatgtagatatacatataatttatatatattattatatataatatgatattaatatatataagtgtttagtcaagggaacatttgattgattggctatgtgatcccatctaaattgaaatatttttggtggtagtagttgatttgttttgttatggtataggctaattagtttgtatggtttttagtttttgtgtggtttttgacaagtacggttttgttcatataatatttcatcatatgatctctttgaaaagtaaaatcttttatttaatgtttctacaaacatcttacacatcatataatatttttttctattgcattttttcaatggtgaaatttaccaaacaataatgttaaaaatacgaaaatttgtaaaaaatttcattaaaaatttgataacttttttaattttacaatcgaataaacaataaaaaattaatttaatttactaaaataatcgaaattaaaagaaaagaaggaaggtgccatgctccataataaattgggg

SEQ ID NO: 242446 - DNA, 652 bp, Cannabis indica
tatatagaaatatacatatttacacaaagattgttttatatctaaaatataaatgatacatatttaaattgattaataagtcaattttctttgtatatgatttttattagggtaaatattattttggaccatgtattttgtaaaagttatcaattggaccgcctgttttgttaaataacaaaatggaccctgtattttttaaaattgtacaaataggaacatgaagtgattttttgtcaaaataaaatttaattataatctaatctagagatgttatgacaaaagcggttacattttctgtatctgttcgtgttagaaattgtcttaaagttggttatcttaaaaataaaattgttaaaaattgagttcaggatcctatttttaccattttgaaaaatataggatttattttgtcatttaataaaatagatagtccaattgataacttttacaaaacgggtccgaaataatatttaccatttccattatcattttttattaatttgaatatgcgtgcattaccgttatatgaaattagagacctttaaaaattgtgtatatataatgattaaatgaattatacagtcatttagaagattaaatataatatatatactgattaaatttatctttcttgtaaacgaaaaatatc

SEQ ID NO: 242447 - DNA, 1284 bp, Cannabis indica
tcctaatccagaatttcatcaatcgcgatgcaaggatcaactgcttcctccggcacctgccgtacaaactgctgcaccaggatcttggaatcctttctccagttctttgtcctcatcgcttacggtcaagcttgatcgcgtaaacttccttttttggaagtctcaggtcattcccacggtgattggacatgatctcgatgagatcttgttcactggcgtacctcctcctgctactctactcaatggctctcctaatccagaatttcatcaatggcgacgcaaagatcaactacttctttcttggttgcgatcttccatgtctgaaaatgttcttgcttctgttgccaactacgacagctcctacgcggtctggcgcgctcttgaacaaaaatttgcctcacaaactcgagctagaagactccagctcaagggtaaattctctcacgctcacaaaggcaatttgtcgatttatgaatttgttgataaagttctaagtatttcagattctctagctataggaggttctccagttgatgatcaagacttggttcttcaagttctcaatggtctcggacccgaatttgattcagttgtgtctggcatcacctctagaagcgatgccctgactattggagaagtacaggccttacttctgtcccatgaaagccgtcttgaacatcatctggccatgaatgacattaatgtccaattgcaagctaacatggctcttggcagcaatagatcatcaagtgcccgatcttttgtcaacaaaaactccacaaagtcatctgccccttctgcaggccgtggcagaggtttctcaagattcccaaatcagagaattgtttgtaaagtctgcatgaagataggacacacggctgctgtgtgtcactatcggtttgaaaagaactggacaacacttaaaccaggtaacaatgctaaccgtgcttatcttactgaacttgatcttgattgtgatcctcaggcatatcacacaaccatgattcaagactttggagatgatagttcctggtacattgactctggagccaccacccacgttacttttgatcccaaaaaccttgatgaatcgaaacccttcactggccctgatgctctagcaattggagatggtaagaaattactaatctcccatactggttctgtttcaattccatcatacaataagtcttgtcctttacatatgcacactgtcttaattgtcccttccattaccaaaaaccttgtaagtgtttccaaactcactcaagataatgatgtttt

SEQ ID NO: 242448 - DNA, 1737 bp, Cannabis indica
agcctgccatcataaatgacataccaagctgctggatactgtagttttctagcctcaatcttatcttcgggtaggatttctttttccaagtaatccattattggagtcatccatgtgacttctctggcagtatttacctccattacttcgatttgacttactgttgggtgagttaacacatcaacatgaattacatcgagtaactcagcttctcttgttgaggccaaacgggccaaagcgtctgaatgagagttatgagcacggggtactcgagaaacaatcacttttttgaatttctgtagcaactcgcaagttagggcgaggtatctagccaaacatctgcctctagccagatactctccgttcacttggcattcaatgatttgggagtcgcagaaggcttgtaaatgctcgatcttcatctcaaaagtgagtttcaatctttcaatcaaagcctcatactcgacttcgttgttagatgcagaaaattcaaatctaagtgcagcatgtaccttaaaattactagggcttatgagtattataccacctccggagcctttgctgttggaggctccgtcaacgtataaagtccatccttcaccatctagtatgttaggatcaattttttcttctataagtgctatctcagtgcttggaaactcgagtatgaaatccgcaagggcccgccccttaatcgtagatttaggcttgtacctaatatagaactgactcaactctactgaccattttaacaatcttcctgaggcctctggtttcaccaaaacttgcctcaaggggtagtttgttaaaacttcaatgctatgagcttggaaataaggtcccaattttcttgacgctattaccagggcaaatgccagtttcttcatctgcggataacgagtttcagcgtctaagagacgcttactgacataatacacccgttactattttccttggtcttcgcagattagtactgaactaatcacgttttcagacactgcgaggtagatgaataatatttctccagacatcggttttgaaaggattgggggttgcccccaatgtgacttaagagcttgaaaagcctcttcgcacttctcagtccactgaaacttcttattgccttttaaaatttgaaaaaaatctttgcacttatcagaggaatgtgatataaagtagcgactttacctttaaggctttggacgtcctttggtttggtcggagatcacatttccaccaaagctttgatctttgcggggttagcttcaattcctcgctgattcaccataaacccgaggaattttcttgatccgactccaaaaacactcttgagaggattgagtcgcattttatatcgtcgcagtatctcgaacattgcttgcaagtgggtgacatggtcctttgcatgttgagattttacgagcatatcgttaacatacacttccatggttcaccaattagattcgcgaacatcatgtttaccaacctctgatatgttgcccctgtatttatcaaaccaaaaggcattaccttgtaacaatacaaacctcgatctgtaataaaagaggtatgttcctggtctggttcatagattgaaattcgtctatatcccgagtatgcgtccataaaactaagaagttcatgacctgcagtggcatcgacaagctggttaatgctaggaagcggaaaactgtccttcagacaagctttatttaaatcagtgaaatcaacacatgt

SEQ ID NO: 242449 - DNA, 872 bp, Cannabis indica
ggtgtgcaagctaattatgacctacactaccctaatctcttactttgtcctgcttaatggagttagaacaaaaaaaaaaaattctaacccaaaaaaaggccttagacacagagaccctctctcttcctttattttctaattttgccatgaggtcatgtctaagctgatttctaatgagaaattgaaaggaaatcttcacggtataaaggtctcaagatcggatcccccaatcatccatctcatgttcaatgatgacacaattctttgctcatacaaatgagaaaagtgaaagagtgtttcatggttgaagcaaaacctacgaagcttgttctagacagaaatgtagtaaattaaagtcgagtattttgttctctacaaacttgagccagcatagaaaaaatttcgtcctcaaaattctagaagcgtgagagagttcaaaagaaaaccaacatctcggtaacccttttatcttcaagcgaagaagtgagaaaactacaacaaattaaaagataagttgatgaagaaaatggaaggatggaaacttaaacttctctcattctctaaaaggaatactctagttaagtcagtggtgatgaatatccctttgtattcaatgtctacttgcaaagtctctctttcaacttacggagaacttgatgctctgattaggaagttttggtagacaagggtattgagaaggatagatataaggcaacagtaaggtgggacaagttgtgcctccctaagacccatggtggattgggatttagaaatcttgaggacaccaacaaggttctcctttctaagttggcgtagcatgtggccaatggtttggaaagaacatgggtgaaatgcttgaatgaaaagtattg

SEQ ID NO: 242450 - DNA, 673 bp, Cannabis indica
gtatttagatactatcactaatctaattttagccacaataagtactatgattaaaaaaatacatttagtcacaataaattgtgatttttgtgactatatacatttagccacagatattttagtcataacataagaatgataatttataattagtcacaatttttttacttttagtcacaaattttattatgactaaaactattttttttttagtgtataaataattaaggatatgtttaacgatcttgattaaattttatgtagtttggattggtggaattaattaaaatcccaaatgaaatatatataaagcaagattgaaaatctcatatgtattcttgttgagagaatataacaagttaggtcctcaacattaatatatgagatcttattccaattttacttcttttatatatatatatatatatatatgggtaaataacggtataaatatctaaagtcttaagtttgtaagtggcataaactcaatatttatttttagcggcataatttttcaatatttataaaactataattttcttctagttttatcaatacaaactctgttttgaatttattaaaagaatatttggaagtaactgatattacatgtttttatctagacccaatgatctagaattcaggcattgtatgtgtcctgtttaaaacaata

SEQ ID NO: 242451 - DNA, 645 bp, Cannabis indica
aaagttctcaataatcaataaataataaaaaaaatgggatttacttgaaaatctttacctttccactactaaacaaattgtacattaacaatattaccttaaaactctatttcttttaattcttacataaaattctcctttaagaacatttgacaaacacctgagtgactagttggggagtcaaaatttaactcatgtagaaggaaaaaatgatattgaaactcaacccaaaatttagtgtccccaaaggaaaaaaccaaagaggtccaaaccaaaataaccttaaacatgtcaaagaacaaaaacgaaagaaaacatcatacgagaggtagcaagagaaactttatattaacttaccaatggatatgggggaggctttagctcaaactgggcagtgactttattaaaactggccttcctagtacactgtctctgcttattaaaagtaatttagtaaaaaagaaactggaatattctcgaaaaccaaacgagagaaaattcaacttgtcccagtacaaaaataagggaaaagctcacttctttccttggccattgcaaggtacgagctgaacccaaatttccacgaagtcctgttgatattgaaatcccattaaaccatgttaagaaagaaaagaaagagaacaa

SEQ ID NO: 242452 - DNA, 1076 bp, Cannabis indica
agggtgtatagctcaagatactactctaatggttcttttttaagtgctaagttggggggaaatccaagtttcatttcgaaaagcatatttgaaacccaagagctaatcaagaaaggggctgctgtccgagttggtaaaggtaatgcagtacaagtgattaatgtgccatggcttccaagtgtggaggatccttatgttcatactgtaagtgcctctttacaaggcaaaacagtttcaagcctaatgaccatggatcaaactcaatgggatgaggatctaataaaatatattttcattgatagagatgtgaaccttattcttagtactcctttggctcccaatgaaccagatatttggtattggaggctcgaaaatttgggacattactcagtgaagagcgcctacagatagctgcagaatgataaggaggaacctataggaagagacaacagtgcatactggaacaaggtatggaatttaaaggtccctgctaaggtgaaaaatgtgttatggagagcttcaacaggttgtttaccaacaaagcaacaactcagaaaaaacatgttaatgtatcggctctgtgtcctttttgtaatctggaaaatgaatcctttaaccatgttcttgtcacttgttcttactcgacagcgtgctggaagcagttaaattcaaggctcaatactgaagtacacgacaatttttcatcatggttgcagtcggcgttcagcaattcatccactgcagagtgccaactgataactatgctggtgtgggctatttggaagagtcgaaacgagctggtgtgggacaccaaacatcgtgctgttggtgatgttgtagtattggcaaaaactgtccttgatcaatggaagagcgctcaggagaaaacctttgaagcttcatcaaagttgcaaatatctgatgttggctatgagcgttggcgaactccaacagatgacacgatcaaggttaacaccgatgctgcaattttttcacatacgaactgtttcagtttctcgttcgtggctcgtgatcagtctggttcctagtggcagctaagtcaaagtgtatgcaag

SEQ ID NO: 242453 - DNA, 589 bp, Cannabis indica
aagtaattacatatttaataaaatatgtccatttaaatattatttattttctgggatattacacctgatttttcaattttggtctcgtgaccattttaagtgtagggaatggtaaacgaatgtgaaaaattatcaagaatactccactatagccgactttttcaaacaatcgggaattctattagcgacagtccaaaaaaatcgattaagggatcaatgggaataatgcttttgtagtaatgaatatatatatgtgacactctttccactactacaaatatgtctatttttgttagtttttaactgacatttaaatttttttcatcgattttataaatcgacgtatatgccgcagacgcaaataaatattattttgtgtcatttttcatttgtcggtattaaaaaattgcctcattttggaatcgatgtaaatagagtaaaaattaaaattttaactatattcccatcagttttgtactgacacataccaaataataaaaaaaaaaatagtctagctccattcaaatccctccacacatcagaaacattgaaaatcaaaattatatacagtttttacaaaataataaat

SEQ ID NO: 242454 - DNA, 872 bp, Cannabis indica
ttggatgggttacaattagatatttgcaacccgacaaaaatcattaggtgtagtatttaaaggtgctttggggggtatcaggacacaaggtgatagggagcctcacttttcctattgggatgagagttgtcccgttgaaccctgtgagctgtgattcgctggccgaaaggtccctgttagtgagcctaatggtcgtgaaagcatctttacgtaacagattcatggagcttccattatccaccagtatcctagccacagatttattggcaatgggagtttctatgactagagggtcatggtgagggaaacgcagtgacttcgcgtcttcttccaaataatgggttgatccatgagcctgggcctctacgtcgtgagttgagtgacctcccatacttcgtcatgctttagggctcccacatagcgctttaacttgttcctagtggttcctccaatgtggaggcccaccagagatcatggcgactctcccatttggccggggtggcagtccgagtgtctgttgtggaggtaccccttcgggaggtacttgacccttgagcgtaccctcgacccctccctaaggtaaagggcctcccgcttgggccgggttcaaatgtggtggtctatttttgatccactcgtacaagtgacaaaatcggattagattttcattctcatccttcaagtttttacactcgtttatggtgtggccaatgtcattgtgatagtcgcacctcttgttggggtctctccgggagctatccctatattagggtggaggcttccaataatgagtattttgatgggtggcaaagtacatacgttcctgagaatctattagttcagtgtactgtgtgtattgtggggtgtacccc

SEQ ID NO: 242455 - DNA, 1437 bp, Cannabis indica
tttaatagtagccaagccaacaacttcaattagagccagtttaataatttcatttcacagatttttcattgaattatgcaaagggccaacaaattgtctcaaaatttctttctatccaaagtaaagaatgaattttctgtctccattatgaattactaaactcatagcacattccacagttaaaattcgataattttttaatttacaaaatataattattaaataatcatgaagaacaaacattctctttaatcatttcagatctaaaaagccccaaatttaaccaaaagatgagataatagaagaattaaaagaatacctagcaacggcatggcgaagcagttcatcggttccaaagtacccaatgttgagatcaacgagttggccacagctccggttgatgactttgcggcagatacttctcaagtccaagcctaaatcaggatcgccgatgttctgcatatcaatggttcgccacatgtgaggatccttacagatatcaaaccacaccttgcaaaccatctgagcactcatcattatttcgatcactccaagacgagaaagaatcgacgccattacatcacgcggcaagtccagccagttccgtacttctcctgacggagttagcttactcgatgacgaagaagaagaagaagacgccagatgattacctcgtttcctgcgacctgaatcagaacatagtttttcagtttccatacgaaaaattgacaagaaaataccaaaaaaatcggtgaaaatcacctccattgttgaagcagtttccacggccaccataccttcctccgccataaccgctacctctctctaaccaatctctagtcatgtaactgcttccataaccaccgtagcatctctggaaccaatctaaggccatacaatcaacatcaccacaatgaaaacaaacgcctccgaaattaccgccactactgcctcctcctcctctagcacggcctcggccgccaggtggaggtagtccctgaagaggtctctggttaggtccggtgacatctacggccttggtacgatttttttatctggacgaatgagaaactctacggtctcaccgtgagcgagggttcggaaaccaccgccacgaccgtcggggcagcgggatcggatgccggagcggtgaaggaacaactcttgggcgccattggaagggattatgaagccgtaacccttccggggatcgaaccatttcaccgttcctaacaatctttcgttgttgttcgccatttttaaccaaaaaaaaaaaaattgtgttggacaaagggatgcacatttggatgggccctgcgggacccgctttcaatgggacccgtctaaatggggaatgagacgcgaataacaatcttattatgttgggttttcagggaattttacagttattcaagctgagattgtagttattatggt

SEQ ID NO: 242456 - DNA, 685 bp, Cannabis indica
attattaatattattataagttatatattttataaatattataattaattactattttttaatttaaaaacgcaatactggtgggatccgcagttattgatgtgttagatattaattctgacgacattaatagcagccgtattaattgcggcggatgtgttagtcggttgctattaatgagtaataccgacgggtctatagcaacaggattcaccgataatcatctttattggccgaaattggccattttaccggtagacttctccgtcgattcatctaatgtttcgtgtagtatagtaatattaattgcatgaactaatcaacataatgacatccaaactcataagtagcccgacaaaataaaacattcgcaaattatatattttttgatggacattacaatatttcgaataagtcttaaggcatttttgaaaggaaaaagaaaaaaaaaagtctaagtagatttatcccaaaaactgtccaactttaattagttggttgatttttttttttgaaagaacctaggttcaatttagttggttgaagttgaaaagcaacataattgtgcttcgagatcacaaggattgcatgtaataatgtaacaaacaaactgtataataacaatattatattaaataaagaaaataatttaaaaatacttgaaaaatattgtattaagagtgga

SEQ ID NO: 242457 - DNA, 483 bp, Cannabis indica
cttccatcaaaagcacgacgaaaaacaacttatcatcacattttttctcgaaattcctaaaaatatcattctgataaccaataataataacaaataatatctcattattgttagaagattcccaacttttagcgaatctcataccaagtgaagaatcaaaagaaacttcttgatcatcgtgttgacacaaggataattagaattttctttcattttatttgttaacgagtttattgacttgctgataaactgtagcctcaatttttggagctggtaggtgtcgcaaaacaagattatatctacaataaggtaagagagactcttgccaagattgagaacgtggtccttaaaattatctaagctactgaaagaatggaaaaagtatctgcaccaggtgatttccttttgtgcaaaaaaaattatcttattttggtaatgtaatacatccattcacctttcaacaaacgataaattagactgaat

SEQ ID NO: 242458 - DNA, 1941 bp, Cannabis indica
tgatagtacgaccgctttcttgcgaacttgtagctattctacctccaagtgccccttcagagccctgttcacttccctctccctctacacgtcgacatgattaagaggaacactcttgctcgggaaagtgaaccccaccgggggtatttttagcatgaccaaaggacgagacggccgaggctggcccagcctcaattaaggatcttggcctacgggtgggccctcatcctagaagctggtgtctcgaccctttacttcttcctagttgaactaccacctgttgctttggaagagccaattctctccatgattcagatttgatacacctgccagaagtcgacacaataccaaaaaagggtcatcacatgacctcgaaattctcgaaaatggcaaacacagaaccaatgttcctaaaataaatgcaccctcacaactccctcaaaaactctacaacaagtaaatagaaaaggaaacttactagttattaagagaaatatgaggctagtgaccttcgggtagtgtccttgtcggatgaattagcgtctaactataaaggtgtcgaaaaggtctcgaagataggagaaaaactggaacaaaagaactctaaaatggcagatagaaaaaaaaatgtgaaatgtggaatagtcgctgaaggtatttattgggtaccaggaagaggcaccttccacgagaagttaacagttcgactcgtttgtccaagggacattcgacggttggataagtgggaagctgagagggtatctcacctattaacagttgtcttccatcatttcatgcactgtgtaaagcgctcagtaaatgagaagactacacaaatccaatcactgccattattgggcatcccacaaaacacacacacaaaactcaaatgttggcattgaaagccccaacaaggaaaaaaaagtagtaatcatgccttctaaataatgacacttcagtttggcggctgatgacgtaatgtaatgaaatgttcatcgtatgtgcccaaaaccactcaggggaagataatgcaagatcccagaccatgttacgccccggaagcttggggtaaatgttattcacattttcgtaagcatgacacatggattctaatcaaggaaggccgaagagtcattagctgctctaatccctcaattggtgctctaggaaaataaaggcatcaacctcgcagaatgagcctccatgttgtggagttccccaactgctagccacatgaagtggatcgatgaaccaaaatccccttcctttctaagagttatggcagtcagcctccgcgaggagcatggattgcccagaggggctaaggcattctaaaacacggggaactaggttatgctcttaacctgtggaagcttcacccatacgtgtcaggctacgaacctagggaccatgccttttcaagtacaacgtcagaggttttctcccacgacacgccatcatacagagtatgcttgtccttgcgtaccaaaccaatgatccaatgactaggcataagggaaatttaaaagggagaagccctgatatgacacgcgtttgaagcccagctcgtacgatctgacactcataaatgccatatgagaaatatgccacctaccaatccaatgataggatttcatccctacgatgatccatccaagatggcccatgcaaagaagttggctaaacaccccagaaaaagcacaagaggagaggggaccttctctttggattgaagacccattcttcatcatcccaagcaaacatatgtctgtaaccctactattaactccagaatatttctactaagcttcctattcttctagaggaacacgacggggaggagtcttagtccatcgtatctttatttgtataacagttatcgaccaatgagcttaataaaatagactcatggactaaggataattaacgcctgaaccacgt

SEQ ID NO: 242459 - DNA, 1487 bp, Cannabis indica
aacaataatataataccgacttgcatctaggcgcccatacacctatccacaaggcttaacagataagtaagaatattctttactagggtacagccactgtaccacatacactacgtaccattattgtacgagtgttggtagagtttgtttcatagctcgagtaccactaagtgttgtaccacacacacctcgtttccgtactagtgttggtaacaccataacatactctttaaacattatacactataccaatgcactctgtaccgctatcgtactagtgttggtagtgtaccaatcacaacaagcatgcatatatatcacacatacatacattcgcatttatataatatgttctatgatattcttacctcgtgtaggatggatgcctaaatcacaatcacataaacgggtaaacgacacgccaaaaccctaatccgggaaactcaaacctccaactaaaggttctgtttttgataactaataccacaataccctaagtatcaagggactaatcaaccaagtctcagaaaataacacgaatcaacgaattgaacagttcgggaaacctgtacctgttccggttaaccagttttataggacctgtcaaatcggtttaaccattttgcaccatgtttccccaaacaattcaaatcattctcaaaacatgcccaatccaagcaaaaccttccagaacacctaaaccaacctcaaataacataatacatgcaagaaaactcaaaaattcacaaaaaatcaaaacatgccattaatgatccaagtttgagttttcacaacactcaaaaaaatcagcatccagaagtcattctcaactcaaattaaacttagaaacccaactacaaatcaacctaaccctaacagccacaaaatcacgaagttgctatacaagaactaaaacttaagcttgaataactaaagaattagagtgctagggcttacctctaactagactcccccttgatttcttgttaaattctagaaaaatgggggaggatttgttggtttctttctggtcttggtggtgatcgagcaaaggaaagagagaaagaaagttctatctttttcttgaattttgggtttttctcttaattgattaattctaaattccactaaaatcaagttgaataaacaaatggccagttgtccaaacctcaagcagcaaccaaatcccactagccaaattaccaaaatacattttttttacttacaacttaagtaattttaagcctaggagtaaaatggtcaaaaagtataacctcgctcaaactcggtattctatttatttcaaatatttataccactaactatagagcaccacgagtttaattggattaggtgctgttatattatcagaagataatagaattcaagctgtgttgagcaaaatcctttaaaaggttagtcatagtgggtacattaaaaatattattcgttgctttaattttattattgtgattaatttccaaagg

SEQ ID NO: 242460 - DNA, 1232 bp, Cannabis indica
gtatgttctaatccctctctattccattaggttaaatttaatagtaggattagatctgttggtttgccaaatggttctagcactagagtatcttttgttggaaatgtcaaattattcaatatcatgcttactgatgtgttatgtgttcctgattttcatcaaaatctcatatctgcttgtgctttgtccaactcatctaactactcttttctatttcttccccaaaaatgcattattcaggatatcaccaagagtcaagtgattgggatgggtgaaagagttggaaatctttattatatttctgagcataaagatccctctgtttgtactgtttcctattctagaataaatgatgacaatctatggcattatagacttggtcatgcttcttgtgtaaagaaacatcctttgaataaaaatttacaatttcaatattcttactgtcatgatttccattgttctatatgtcctcttgcgaagcagagaaaattaccttgcattagcaaccataatctgtctaaacactgttttgacctcattcacattgatatttggagaccatacaatactcccactgttgaaggttttaggtatttcataaccatagttgattattgttctaggttcacttagattcatcttattaagaacaaatccgatgcccaatttgttatacctgccttcataaagatgattaaaacccaatacaatgtgcaagtcaaaggtgttaggtctgacaatgccaaagagttgcaatttccagccttattctcctcattaggcattatacaatatcactcttgtgtccaaagacctcaacagaattctgttgtggaaagaaaacattagcacttgttgaatgttgctagagctattcttttccaatctcagattcctctagcttattggggagattgcataaccactgctgcctatcttataattagaactcccactccttatctcaaacacaaatctccttttgagattctaaactctaaagctcctagttatgcacatctaaaaacttttgggtgtttagcttatgcctcaaccttaggagcttgaagatctaagttctctccaagggctactgcctgtgttttcttgggatatccacctggaatgaaggcatacaaattgcttgaccttagcacaaacaaaactttttgctctagagatgtcatatttcatgagcacatttttcctttctcaaataacagcagtttgtc

SEQ ID NO: 242461 - DNA, 665 bp, Cannabis indica
tcattacaaaccattaccataaataaaaatcaaatagtttaaatcttccctctatcccaacccaaatttcattatcatacacataaattctcctaatttctcatcaaatcaacatatatatatatatatatatatattgaaccatagtaagtcgagaagcccacgtcgctagtctgggattcgacaaacccaagtttctggtccaacgagttaaggagccggcgtcgttggtctgatggtccaccagcgagagagagaaagaaaccaagaacaagaaaaatcaactcagattattcctcacccaggtttggtcctcacttaaaaataaacatagatctaatctaaaaaaatccaattccatctgatttattttgctaaacccatatttgaacaaaaaaccccattcatcaatgtctgttaccccatcgtgagttgtcttcgtttcgaaatttaccaccaatcgcgtgtcatctgggttacaaacctcacgtcccatcgcgaaggtatccctgccactaagctcaacccattgcagaactatcctctttcaaaagtgttgggttatcaacccaagtcccacattggctaggaatgggaagaattatgggtatataaagatggacactactccattagtatgagaccttttgggaaggtgcccaaaa

SEQ ID NO: 242462 - DNA, 2973 bp, Cannabis indica
ttagtccctttcaccaacgataccttcccagtcaccacacggatcatctccgaccaagcacaatcattctaagtctttgtctaaacataagactgtctcatcagcctctcctagtattctatttcccaagaaaaccaaaaccattcacccaaggactacctctaaacctagtttatctgagtcaaaacatttgggtccacctttttactcaaatgacaagttgcttcgctttcaagacaatattttttttgtcctttaccgactcaagttgaaatatttccctacgattaaggaactaactgagtctcgagggtgggttcttatagtcacacatcttcaagaacctaataagagcctggtaagggagttctgtgccaacctcaatgataacattataaataggaaaagaaaattcaaatattagacttatattaggggtaattggtttcagtatgctccctctactgtgtatttatgtgttgaaaattccccggttagataagcctaattacgatgagaattttaagccttcatttaaggagattgggtctgagatcactggtacaatactgatttgtgtctggagtgggaaagagttgtctatcactgtgttttctgacttttatagagttcttcacaagattgctctttccaagtggtgggccaattcacatatttccatagtgaactatagcataggcaagttcttgtttgctttgagtactagtggaagtattgatcttcatgccctgatgtatgatcagattgtgtattatgccaaggccaaaggtgtgaaacacaccttgccctatccaagtttaattaacaaactggtgtagcgggccagttttccttatcagattggatgttcttgctgctctcctgcacaagtcattgatgtcttcatccattgctccttaagtgagacttccttgaatttgaatgcctctagccaacaagggaagtggtattccttggttcagggtttgcctgagtcttatgctcgtgatcagcattgtcaatatcattttgagaaggttgttatttatgttctcacagccatgactgaagtgctcaagtcctttgaagttgatcattctgctcccactggtggtgtttcttctagttcctctgatcatgatggtacttcatttgagcatcctttcgtgccatcaaagcatatgcttgatttatctgcaccagtcttagctccatcaaatctagattaagttgcatctgcactggtccaaggggagtcttaattagttgtgcctctcgcacatactggtttgattaatgaggagtctcactctcttccttataatactggtgtccagggtagtctgaaacttctcttgtgattactgctgttccaactgctattgatgcttttgctaatgttcatgttgtctccttcattattccacatgttgaagtttctgctgaagctcatattgatgtcactcctgctactcttgttgcctactccaacaacgaatgattatgatcaccaaggaggagatattccatattttttgaagagttgttccaaatagtgtccatattttgtgtttagtctcttggttatgttttgctaatattgatatagcttgttttggtaaagtccttttgtatgaacttggtaatttcttttgggttgtttttttgttggtcttttgttatttgttctatctaccttgatcataatttgtcaaagggagattgtaaatgccatattttatagtggaaaattatgttctttgcattgatgtcttttgggttgctagatgcatttggtctggctttcacagttggtcatctaatgctttggtagatgcatatatttttctacaatatttttatagtttcccaggtcagctttagtatctttcttttagttggaacaatccattgtcagttgtaatgacctagttttacagtgggataagtcagttgttaccgaataaatagcttgtcaagctttttctaactaactcttttcatgtttttcgaatcttcttgtgattcttgctctgctagcaaacatatttttctttttcatgtttgtgttgcaggtggttaatcattggatcttcaggagctgacgaatgaatgatgaactacattatttaaagggagttcaaatgaaactactgaagggatttcagctgagaagaagtaaggggatcttagcttcaaaattctaaggggagttagatctttaaacttgatttggaatcaagtgttagggtaactttagtatggattcctttctgtttactttgtatgtgatgtagttagaaataaaaaatctgtctcaagaaccaccacttcaaaagctcaaaaacttccctgatacatatcgcttccacaagctctagatctagcagcccatcctaactgcaaaaaaatccatgttggctagtcacccatcaagtaaatctatgttggctagtccccttgcaaatcaaccttgacctccattaatatctcatgaggcttcacccaagaaactcgcaccatcacttgccgaatcagtcaataagaccaactccaatggagtggctcatatagttgaccaaataatggtgggccacaattgtgagaggaaagaagaaaggaaagataattaacgaaaaaacgtcaaatagggcatcaatgcccagtatatttttaattaaaaaaataaatgaaaagttataattggctataccaattaaaatgtgacaggcgagactaataggtcgaaaactatttttgttgaacttattagagatgtcctaatggcgtagaaaatgcacataagaactaattaaagtgatcactacaagaaatgtcacttttaccagcatagttcgctaatgcgctggtaaaaaggtcaaagtttttttctatgaggcacttcatgtcccatctacaggttctccaattctatcgaggaagctctaaataggtgaatttttcaggatcttt

SEQ ID NO: 242463 - DNA, 986 bp, Cannabis indica
tttttttttttttgttttttttttttttatatttatatatagatattagattttctaataattaaaataaaaatttaaactattggaataaaatatacatcaaataaagaaaattatttattggacatagaaagttgcataacaaaagtgttatttataacctacatggataataccttatgtgtttctaaaccatgtgggactttaagtagatatgtgtagtagtttatttcttaaacaaaatataaaaatatcaacaaaatttttaaaaatacaaataaaaaaaaaaatataagatgccagctagactcctttgtgctttcctttatatttatatatagattagatacaaagattaagattattattatcatcaatctctctataaatatgtataaataaatgtatatatattttgatgaacaatatatatagattaagattactatcattatatgtataaatatgcaaatttattatttaaataattaaaatcatgagtagcattttattaaatttgtaaataagggtgtgttattccgtaaaatttttgtttttgaactttttaaacaacaaaaatgaaaatattaatttttttttttcaaaaaaatgaaaatgtgtttgataactactccttttttttattattatttttaatacaaaaaataaaaacatgtttcgtaacttttatttttgtttggggtcgaggatccaaggttcgggttctactgcaagtcgaggttcgagtctgaagtttgggctacgggtcagagtccagagtgggttggggctaaggtaattagggggtctggtccgggttagggccgaggtatgggggcccaagttagggttgagaagaggtatgaggattgtgttaggggcaagggtttgtgggtccaggttgggtcaattcaaggtcacattgtgggtgtggatatgggtgggtgcgactcagactagggttgttcattggatgacatccaatg

SEQ ID NO: 242464 - DNA, 584 bp, Cannabis indica
tttgttttcttgaaaaacaagttatctaaatttatggttgttttgcgaccataatgatagttgatggtcgtataatctaattcatagtcgtttctgtgactaaaaagttatttgatgttcatatcaaactactctaagctatgtgtaattaaatatataaatttgaatttagatttcatataattgatcatagtgatgaaatataggagtttttctatttttacacttcaaaataatttttttttgtatttttataaaattctacatagaaatttctattaaaactagcgctgcaatttaatttgcaataaaaaatcgtataaaaatcctattgcaactagcgctgcaaccactttagaaacttaaataataaattaaaaataatatatagaataattctcctaaatttattgatcatattaagcgtacctacgatttcaaaatagaaagtatgataagtattaataatactttaacatgtatttagataaaacaaagattaccaaccttttttcattattatgtttttgtgttgaacagagtgatatatgaattgggtttttacttgttttttttttttcttt

SEQ ID NO: 242465 - DNA, 2243 bp, Cannabis indica
aaatggggaaattacttgaattatatataacgtaccccaagataaacttgataaaccaaatcatcataagttcccctagaagaattcacaaatggaatgaactcgtaatcaatcttgtagggtaagatttccattacggctttaaatatctctatgcaaaatccagtgacattacttttgtcactgctaagattataatatgagacattaacgaattctttgaaaccatttctcaatgggacacccacttttaatttcgtcttgttttttggaatatcccatcctttgggaatatttaattttgatcccccaggccacataatcggatctaaattgtccttgaaagtgttgtatgtcgtgcttgctgttgttgtgttcaataatgtcaaattccttaataggccatgtttatggttccaaaatccaatcccattttctccactaccgttcacaacattgatgatttggtatgttgaagactgcaattgcccattagcaagactgaaattccctgcaagcccttcaaatcttatgcttaataaggcttcacgaagttcagaaccactcaaagataccccaaatgagtcaagatccgttgatgaagcatttttgttcttattgtggaagcctaatgttccattattatggtttccaaaaacctcttctactgccatggctagagccttagcagcatcataagcccataatccaaaaacattcaaatcttcgtttttaaattcaattttccacctttttctaaaatctgtaaccccttttgactcaggaacataagtctttattcccaatactccattcatagaataaaccacagaaggcgccatggtactaattaaattagtcatggtatttgtcataatccaaacatagccttctttgaacattccaatctctccggctttagtgaaaatgttggctccaaacgacatgtcgtttgtatgaacaataaacactctagtttccatattcatcaacttgtgaagctcttcagcaatttggtcaacggtcggtgaaagaggaataacacttctgtaagggacacgagcgttgacttctaacaaggcatcggtcaaaatggggattagcccttctccatattcgtcgtttgagtaaattggcaccacttgtttccatccaaaggcttcaactagggcacttatggcttttacttgggacacttggttttcagtggctcgaaaaaaataagagcttcggctcagagttggactcgaagctgaatatgatattatggggacttgagcttgttctccaagttcaactacaaagttggcctcacttgatgtttctgggcctataatggcttggacttgtacgttttttataagatcagcagctgtgtttcaaaccgaaaaaataaataattatatatccataaatcaatttcacatcacttatagcatggaaaattgttgaaattaatattttgaaaaatttatcatatataaaagaaagagtattcttattacacacccgtattatctactaggtgacacgactccatgattggttatcaataatccttaaactattttgttaaattatacgagattaaataattaattatagatactgatagtagctttcaccaagaaaatcaacaattgacaactattaattaaagatttattatttatgcgactgcattaattctgtattttgatcttaataactagaggatcaccttcatttttgtaatgtagcaacaactatatcatctatgcgggaaataaatagcaatgcttatgtccttattcgagtaatgccaatttaaaatctacacattaattcattttcaatagtacttcgaaataataaggtatttcttcaaactatagctagggactatatatgtaatgtatattatatataatatatatacactggaccacaaactagagctatatatactggaccacaaactattataaagacggaaatagaacctttcaaaaacggtgactttgaaatagaccagaagagtagcaacttaattaattgaatgcagcaaatacatacaggactttttcatcaactatattctttgtttggattttggaaagagctcggaattttcattttgtttcagtacttactagacgtcaaagattttcatttcctgtaatgcttttgattaattaattaattaattaattctagaataattaataattaaaatttgagaattaaactaatgagaatatata

SEQ ID NO: 242466 - DNA, 816 bp, Cannabis indica
aatatatatatatatatatatatgatcctttactttttatcatttattattattttcctttttttttcctacaaaactataatagtaaaaattaattttacagtatcttttaagattatcttttcctgatttagtttaaaaaaggaataatttcacaaatacacaaaaacaaaaaaaaaaaattataaaaatatggttttacggaattttaaatatttttacgaattttttgattttatttacagaaaatacggtctttttatgttgtattcatgttaattgttgttgattttttgttatatgtatgttattttttgttgttgttttgatgttatttagatgttattttcatgttacttttatgtagtttttttgttgttttcgtgttatttttacggaaaaccataaaaatgtaaaaaaaaaaaaaaatcattaaacgtaaaaatgtaactttttttgaaaaatagtgtcttatgtaattattcctttaaaaaattaggagtaaagttattttatgggtatgatattaatgagtttatagtttttttaacaaggatataagtgtgttataagttcgtttgttaaaggtaaagtcaccagtcgtcctatttatatgtaagctcatttaattattttctccattattatgtaataagcaaaatttagataaaaaataaaataataactaataaaaatttatgaaaaaaaaaagaagaataacagcacaaaaaagattaatatcatatgcatgcttatataatttttacactattatctatttactaataaacaaataataagaaattttttttaaaa

SEQ ID NO: 242467 - DNA, 711 bp, Cannabis indica
ttgtgcttgaatttttcaaatcatggaatctttttatttttctctaagctatgttcattaatcaacctttaaggaaatgttagcaagttttcctatcacaaattcaatccctggtctagtcaaatcttcagctagctctgctgaaatcatctttaattcacaaacttaccttgggccctttcgacttagagcatccgctaccacatttgcttttccacgatggtagagaatctcgcagtcataatctttgactagttctaaccatcgtcgttgcctcatatttaaatctttcttaatgaaaaagtacttgaggctcttgtgatcggtatagatctcacatcttttgccatacagataatgatgccaaaccttcagtgcaaaaataactactgccaattcaatatcatgggtaggatatcgctgctcatattctttcatatgtctggaagcataagcaattacttttccagactgcataagaacacagcctaacccctgtttggatgcatcgcaataaatcacgaacttttcattactgaccggtaaagttagcacaggaccggtaattaatctttatttaagttcctagaaactactttcacacttatcaatttaactctaagatttctaagattgcggatttaaatcattttgggatagaatttcgggaatataatcatatgcgtcgtttaatttcttaagataaaatat

SEQ ID NO: 242468 - DNA, 973 bp, Cannabis indica
cttataaaacacacaataaaaagtaaaaataccacctaacagtatttttgtaaaaaaataacaaaagttaatatatcatctaaatttccatacttacttatatgaaactgtatgaatcaattataatcgatccgttgagaagcttgctctactatgaaaatcgtaggggaaagttaagcaaatgaacgtgaaaccaaacatataaatatatatatatcaatataaataaacatatatataactaatatgctctcgaactattttttttagttagtaaaattaataaattttatggctcactcaaattgttacaatgctataacacgtacgtttggtggtcaataatttataaaaaacggatgcgagttgtcttagtatatctcattcagagaaagggacacatatatataatataggttctctctatacgtataatttatacgtgcaagtttctcaagcgaagtaagagaactgaataatgcgtgcatggtactatacaagtacgtacatattatatataaataatattatcatcatatatataaaaatagctctcaagatcgatctcaagagctgagcatatatatatataaataatgacatcgaaatgttactgcatgttaaattaacataattagtattaattagctaggagccctaaatatttatatgtatacatattgtctactgttttatgcatgtatttgaggtaaaattgtatagtatattttgttgtgatatggtaaatcggaagttactaatacaaattaacaacgttctatattataaatcactacaaaaaactgctacctttagtgataattttttagtcacaatataatttttttgtgactaaatgtgacttttagtcacaacaaaatattacttgtgactatacatagtttttagatacaagttgtccctaatttagttttaatcacaacatgtattgtgactaaaaatacatttagtc

SEQ ID NO: 242469 - DNA, 921 bp, Cannabis indica
aaatgcttgtgtttggtatattaattagcattatacgtactactatactatacatacaattcatgtcttaactatactagatatacacaaaacagtggccacacacacttgaatttctttaatttatcctccaattgaaaatgataaagttggtgccttgaattatttgattttctacagtcaaaccaaaataaaataaaattctatcgcatgattaagcatcaagtatcagaaacattgaaaagaaatcatatcctatgttacgaaccagaaattatgtaaaaaaagattaaacttaaacacacacaacaattaggactttacaaataaatctcaaatacaaacattaatagcccaaatcagatcaatgattcaataacaactatacaaaattttaaatagaatattagatctgagtttgagcagaaattttaacaaaaaaaaataacacaaacaatactagattatgaacaaagcataagaaaaaaaaagattaaaaaatatttaaattcactccgtcaatcacaaactgaaaccacgaaccaaggatgagctagaaccgaaagcatggacgagcttgaaatgcaaccacgaaccagctccaaacaccgtcgacttctccgaaaacggtggaaaccgagatctctgcacataagagagagagagagaaagaaaaaaaaaaaacagagattcgaccgattaccttgggtttcttgggatcttcggtcgtcgacgagaaatgaggagatgacgagcgagagagacgacaacaaatcgagtagaggcggcgaccaattaccaagatccttgcactggagagaagaggcggagccgatgacattcgccggaggagacctgctctggaggatgccattcgctggaggagcctgctctcgaagacgccattcgctggagaagaag

SEQ ID NO: 242470 - DNA, 690 bp, Cannabis indica
catgtacatcgcataaaacccaatagctatgcaatagctatttggggttaactggaagggggatacgtcatactgcttaagaatagtagtgatgaatgggtggaagggaatcgataccccacatcgaagaatgggtatggaaacaaccacatcctctatggggattattgtgggattggtgaaggaaagatgtggtctctgagtagagcggggacgcatggtgctaagtcgcagcaaattcaacctcgtaaaagtggtgaggtcagatttggtgactcgtgagaccaagtcctcgcatgagaaaggctcgttcagttgtgtgttatccactgaatcatttccacttccctcaacatcctcctcctcatctgactcgcggtcaggaacctcccagtcctcgcccatctcctctacttcaacgtcaggagcatgcctagagtgaacaagatgttcacgagcagataccgtggattcactatcacaaatctcgattgtccccggttcagcgagctcctgaaccatccaatctatgtcctcagaggacagcagacctaacgtcgcagttctaacaacgggtatttgtgtcttagaaatcaaagttggaataaaactatcctcttggtcctggtcatcagtgaaggcatcacctccagagccgagcatttgactgtctgacaagtcgctcatctg

SEQ ID NO: 242471 - DNA, 621 bp, Cannabis indica
ctctcacaataagaatattaagacaatttttcacttgaaggttaagtaatgtagggttgatatcatttccggcttagacatagtgttgcaaatatataagatatctttgcaagtgcacaaattaaacatgaagtaaagtggtctaaagactaatatcgtctcacaaaaagcttttaaaacaattatggctaatactaaacctaattttaccaaagtaaacatttacgaatgattagaaaaaatttaaacaaaaattgcaaaataaatcttgataaaactcaagataaaaacaagtatctaagggttttgattttgctttattataatttcaatttctttcattaatgtgcctaaatcaattcaaaattcttaaaaactttgagcattattttatctctatgttttttgtttgagtgttgcataaagaatgtgtaaataaacaataatctatatctctatacgattatcaagctttctcttcattaaattcaatataaattcatatttgtcttataaatatagctatgtgttaatattcttaaactaattcttcaaatcattcatcagtttgattttgacttgttaggattttagaagtctaatcatgcatttagagtcatt

SEQ ID NO: 242472 - DNA, 1308 bp, Cannabis indica
gggttaaggctctgataccatttgtaacgtccccactttaagccttcattgggcctttacgccacgaaataatggctcttatacacgagcacgtcactctggctgcttcttggattgatgacttaaccctacaaactaacacgagtgtttccatcgtgctttgcctcactcacatgcttcctgaaaaaacttcccaagaggtcacccatcttgaaattacccaggtcaagcacacttaattgtggagttctttcgtgatgggctaccgaaaacagatacatcttttgatataggtagtaccaatcaatccatttaagcctttttcaactatgtagtcccatacatacatagtcttaaaatcatcccacttgaccttcctcaggcggtgtaagattggacagcttacctggtattttcccttacggatcacgggattactgactatcacaaggcattggttacaaacagttggatattaatgttcttgattattaaaaaccgatgacaatacaggggattacaatcaattactttaaaaggtcggctaaccctttgccgtcagttatgaactgctagctataattagacgaccaactttaaccaacacctattttattgaatagcatcgattccagttcaacaatatgctgcaggatatggaaaatgcaatttttcttctatttttccctgtgttaatttttgaatttttacaattttatatatacagctacaataatatcccaataattctttatatacaattacaataattaatctagcaatgtggttaagttaatgcaaaaatattcctgatattaagaaactaacttaataatcatggtgtttactgagatttttgaaaagcgattaaaacgagagttgagggatcaactagattaatagaaaattacgtgattcgggtgttaatgaaccctagtccacaagtcacttgtatttgaccgaatgaccttgatgtattacaatagatattttataagcttaagaaccctagcttcttggtataatattttcacaatgatttcatacactctccagatttctctcccttgcatgagggtatagtgcagtatttataggttaggaaccagacccgggtgcacctgtgacccgctagggtttttgtctcaacttggcccactaattcggtaaataataagtgactatcgacccactggttgaggtccagttcgtagggcggaggctatccgaaaataaaatatatttgtgttttcgtgccatgttttcgagcttgtcatgtcgggtaatgcttaagcttatatttttcat

SEQ ID NO: 242473 - DNA, 529 bp, Cannabis indica
aaatttaaaagttagcaaaatatcttttatctatttaaaattacatgattatttgctctgttcctcgatgctctgctagggttcccagatccgttcaaccggtgccatggcaggtcgtgggcgtcctcgaaaaggggtatctcaggggcggggcaagacagtgaagaacctggaaactaagaaagtgaagaaaaaggagccatcgtcgactgcagacgtgaagaagacgaagaggatggacgaaattttaaagggttgaacctattgagttttctgatgaagaagatccaattggcagcgaggatttagatgatgctgggttaatagatgtccttccagcgcctatgacacccagatcatcactgaaatccatccaacagcaggaggcaatatgttcggattttaatttttcttacaagcaaatcaaaagtgtgctgaatcattaaagaaaggtaatgcatctattccccctgttctcaggtctgaaacagttaaggaaaatctactgaattcttttgagagtaatagc

SEQ ID NO: 242474 - DNA, 1820 bp, Cannabis indica
aacaaaatacagggtccaattggcaacttttgcaaaacagagggtccaaaatggtatttaccctaacccatacaaaaattataaaaactttgtaaagttcttaatgagattatgttctttccacaaacatttctattcaatgaagtttgattatttatcaaaaaaaaaaaaaaagtcaaagggcatactttttcaatttcttacacaaatttaaaaaaaaatgaaattaaaattgttaaggatttgatttgcataccttctaatcgaacaagatgtttatgacgaagacgatgaataatagtaagttcagccaagaaatcttctttaccatccaaattatcccttgaaaatttcttcacagctacttcattatcattattattatcttcattaagaacacctctataaacaacaccaaatccaccttttcccaaaatcatactctcatcaaaattattagtaccctttttcaaatccttaaacttaaactctctaggcatcccaggcaaccttttaagtgttcccaaaacattggactcttcatctttaacacctctcttctttctcatctttaaacacaacaacaccaaaaccaaacccaataacattaaaccaaccaaaaccccaattaacaatgtcttccaattccaaggtttcttgggactcaagtcatcgatttcaagcttccatctaatgacacagttgaattgttttgaagggtcccctgttgaacccgaaaaacccaagtaagaaaattgtttgacatgatttttcaagtttattttctcactaagaagaggcttttttggcttgtcatcaccatcattagccatgaaaacttctattaatttagacccaccattatattcaatccaaacactgtaattcacagttggctcaaactgattaacaagaacagtcttattagaaaccactgagttaacattaagaccaatatggctaccatctgggtcaaacccttgacttttggtatcaaattcaatagcaactatttggttacttgggttaccatctgttgttgcattggttaaaccaagccactgtccataactctgttcaggtaagtcatcaccaaatggagctatgagaaaagtgagtccttccccggcttcccaatccttgtttcgatacaagttcatgacaaagtttgtgttgaatgaggctattacgtcgtcgttttgagatgaccaaagcttgtatggcttgtaatacatgatacgacctgatttgttgttgtaaccatttggttggttttcattgtctggtgttaattgaagggcgtttagatcaattgaagaggcactaaatttgaagaaaggtgtgtcttttccttcatcaaatgtttcgtatgtgaagctttttgttttggttagtagtttggttgaggaaatggggtttggattttgaagaagagaaaaacagagaaataagaagattatgagctttttcattattattattttgggttctttctttctctttgagtttttttgttattgtgttgtttttatataatgaatatgtttacatcttttgtttgtttgatttgattggttaaggaatttggggtgaaatttcggtttggtttggtttgaatatgaattactattagaagtcaacttattaatgcttgtgaagtctataatttcatgctaagattaaaaaaacatattttatacatattagattagaggtgtacaaccagggccgggccctgaaaatatatgggcccaagacgaattaaattttggggccctcaaaaatatataaaaaaataatcaaaagaagagtgttatggg

SEQ ID NO: 242475 - DNA, 1552 bp, Cannabis indica
cagcttcttgtatcgtaagcatcgcatagttaggacgaaataaataagcacctgggacaatagcaacatcaacccataatcgcataaattctggtccaaggggaagtccatgtatctctatgtttggatcactataaatccaacgaccttcagcaactattgtatctgaccaatcaagcatgtaacaagcattcatcgcttctgtaaaattatggtccttttttagtccaacactctgcaaaaattgattttacatataatctattagctttcatatccataacttcaaaaaaattctttaaccaataataaatttgataatttaccttaggagaaagattattgttggattgggtagcattaagggattgtccctcacttggtgttgctttaccaccctaaattaaaaaagaaagatatgtttcatttgaaaattacagatgttgagttgtataagtgaaaaaataaattgttaccaagtgttctttaagtaaatccaacatttctgccattttgagcttcatacagatcttgttattagacatattaataacattcaactttgatcttgttacccccccttccttgttcgattaaacgaccagattttgggtcaccaaataattttgtttaggcatcctcctctatattttctataatttcagagtttgggtcttcacgtataatgttatccagttctccctgtatatgaatgagtaaggctgaagtacaattatagaaaatgagtgtaattataaaaattaattaataagtactcacaaaaactttcgacgctgtcaggttaattggttcaccattcttcttagtatgggctctccgaaaagcctcaatcctagatactttttcctctttggtatctttcttctacaaagtacaatggacagtttaaccaaggaatataaaaataaaaaacaaaatacaatcaatcaaaatgttaattgttaccatatcatcgattgttcgagcgtaacctcttcgacttaaggtgtgtggaacaactttctttcttctctcttgaaatttggcccttatagcctagttaataaaaaataaataacattaggtaaaacataacttaatctacactaatatccaagtacttatttctaatcttaccatatgttctttactagttttttaagtaacaaatgatctccattcaccatcactttttatgcaatctggcttcatggctagtcgctcactctcattttttgcatcgttaagctctttgactaatctagactttccagatctccatagagatgccatcatttcaaagcacatcttcttttgccaatcatcatataaatcatattgtgcctacataaaattcatattaagtgacattatatatatgttatgaggagcagagtgtaaggaaaaaaaaacacaactatataacctgtaaggctacctaaatagatgcccaaagaatatctttcatgattggtgacattttcctccaatctgaaatagtataaggaactacctccctcacaagagcaccaacataagaagaaaattgcac

SEQ ID NO: 242476 - DNA, 830 bp, Cannabis indica
acagaagataggaactgggctatctctaacggcccctggtgcatccgtggatatacactagctttgcaagattggtctccgagagtggatggtccgatttatttaactctcttcgagtttgggtccaagttcataatcttcctcatgaattttactcaaaagacaatgggcttcttcttggggggctggttgggaaggtgctaaatctagaaatggtggaggataagccagcttcctggtcgactttctttaagattttggttgatctcgacattaacaaaccgctggtctctggatgttttttcgacctgaatagtggtgtcaaacagtggttacaaatgaagtatgaaaagataggcattttctgctacaactgtggtcggctgggccatcaacgccgaggatgctctctgtcgtcgccggtgacggtggcgaaaggtgatggaattccgtttccaatgttcggaccgtggctctcaacgtcctcggcctaccatgatgttttctctgggccggtctacggtggatcgagctctgcctctttggtgatatcgggcaaaaatggcggtgcgttcagaccggcaatggcttctccggccatggttgatggccggtccaaggggaaccctgctttggttcgacgtccgagaaacaccttgagaatgacctctcgtgcagcagccgtacctgggaaggctcctcgactggtgtggcatcctaagccttcggatgtgaaccgtgataatatcttacctgtttttggtaatggaggtaagtctgatactctgggaaatgagaaagatggtctggcattaactagtttggaagaa

SEQ ID NO: 242477 - DNA, 784 bp, Cannabis indica
tcaagcgttccatccccacattacaaataagggatagggcaaatcacatcctctctatactggttgagcagaggaacattactcagttggccagtgtgaataacttttggatgtatggcttgcatcctcctactcctggagttgcaatagtgttaaccgttgatgaggcgtgacttggagatgggcaaggccctgacttggatgatgatgaagtaccttagtctcgtatagtatagtatttaattgtagataaataatgcaccgacaaggtttctctctacttttgttaaggcgtgttttaaaagaagaagctacacaacttcttactaaagttaatgaggggttttgtggcatccatgctgggggcaaagtttgtctaagaaaatcctccaacaatgatgtttttggtcgaccatgattgaatattcaaaagcttatgtaaaaaatgtgacgaaagccaaagattttctaaagtgcctagtgttgacctcaaaaagtgatcaaccgacagcgggtcgtacagatccaatgcttgccatgtgtttgcacaaataagaatgaaactctatagacaataagattttttatagaggttcaacccccttatgatagcgggtaatgacttactccccttttagttgtattaataccgagggaattactatccatatcactataggtgggatttgctatagtacccttaggattacaaggaatgaatcaatattgcaaaactcaagtgttgaggagtgccaaggtaggcgcgtgagagagagagagagag

SEQ ID NO: 242478 - DNA, 601 bp, Cannabis indica
tcaaggcacaaaagagtaaactaggaaaaatcatgtaagggtaagcttgaagggcacaaacgtttcaaaaattatctaaatcatctttcaaagcacacatcattaagatttcacctcaaaggctaaacaatgcaagttctatccattcaactcatcaatcctctaaccctgtcaagcatgttaacaaagtccaattattcacatttactgtaggattttactattttaaccctacaccaacaaagattaaatatcagtatcaaggtcagaaatgacctttcctagtctaaataaaccttagactaatacggcatcgttttatctccacgacaccaaacttgatgtcgtattgaacctttggttcaaagactcagtagaagagtctagaaccctaaacactcagacacaactcacacacagcctcacaaactcgaaaccctagcaaagcaagttctctttgagaacttgctcgattctagccctgaaacccagatccacacccacacacaaacacagattagattagatgagtgaaaaaatgaaaaataaggagagaaaacaccagaatttgtttcagagttcacccaaatctgggctacgt

SEQ ID NO: 242479 - DNA, 887 bp, Cannabis indica
ttgggcttgggcagtacaaaagtaatgaaattgggctggggtagtaaaaatgttgtttttgccgtgtcccagtataattgtaaagttttggtccaaaagcagtatttttgtaaaattcccattttttttatgacccactaaagttcaaggtcgatcctaattatacaaaaactcatatgaaataatcattatacttattaaaatttgaagatttacttataaatactcaaatttttaactgatactatacaaataaataaatataatattttagttttacattttctaatacttttaattgtataattataatatgtgctgttatatttaagttttatccttattgttttttaattaatatacaatgcagtgcttaagcacatatttttcgtattgtgatgccaatttgtagcttcgtgttatgttgtgtcgtgtcgtgtccaaacacatattctttcgtacctagtcatgatcgtgccacccatacttataatgtgtcaaaaagtccggtctgaatttacaacactggctacaaccacccctattggtattgttggtcctccaagagcagcttcttctgctcaagctcatcaaccacaacaattggtaactttgatgcatgtcatataccgcattaaatttactaatgaatttaattctaatacttctaattatttcagtataaaaataagtacgggtctatgccatgagaattttgtttactctattatttaaaattaaatagtcaattaaaaggaaaattgttttcaattttatttagaagaaaataggggtaaaaatcggtcggttatggtcggtttttacaattttataaccgaccggtcggttacggttttattttacgtaaaccgtaaccgaccgtttag

SEQ ID NO: 242480 - DNA, 514 bp, Cannabis indica
tgaagatgactatattaagaactttaacccgcaaagcaaagcagtattggaggaaattctttcaaatataactccaaccaatgttctatcatcttctactcaaataggggatgatcccactctcttggttgaataaatatgatttgatacaaccaataaatctaccaataatgttcttgttcaaaaggtcacggctcctcgtcatagtgggagagtctctagaaaactagctcgttatggctttaatggtaaaattcatatggtcgttggtgacggtattgatgacgacccattaacctacaaacgggcaatggcaagtttggaatggaaacaatggtcagctggcatggattccatgaaaagaaagaaagtctaggaatatgtagatgcacttgatgattatcatccaattggatgtaaatgggtctacaagaagaaaagaggtgctagtggagaagtcgaaactttcaaagctcgacttgtcacaaagggttatacccaaagagaaggtgtg

SEQ ID NO: 242481 - DNA, 750 bp, Cannabis indica
catgacccacaattgattctcttacttgccacagtgaagtgactcttgacagttatatgaatgtttattatcaagcagctcatgcctcaaacccataatatgccaaataggtcgataagctttttaatagttagaattatcttatccgactacatacacaaattgctcaaattactcaaagacttttattgattaagaagcagaagattacatccacgagcattcgagaggcttgtactctactatttcacatttgagaggattggactctccaataatcgagataattctatagagttctttcacagcccctaaaaatctcctcctcccacatatatggtttacaataatcccttccacatcagcaacttactaaaactaacccaatacagcttacagactaaaaaattattaaagctatgtttggaagttggatttttgtgaggagaacaaaaaggtaagaaaaatgtaggaaaaaaagtgtggagaaaaaaaaaaaaataaagcaatttttcatgtttgatatgaaaaattttgttgaactaaatgtttttccatacaatttttctttccataccaaatatgagaatatattattttttattttccactttttttttcttacattttgcttaccattttctttccatgccaaaatccaacatccaaacataggataaatgtcttaaaagttaaaacaattctagtaaagccgagttggctttccttctatggtacacaaatctgacc

SEQ ID NO: 242482 - DNA, 1240 bp, Cannabis indica
tttttcactcattatattttagaacttcaaattccatgataaattcatctcatttaacatgctgcatctcattttcaattcatattatgaattttaccatttcaatttaaaataagtagaaaacaagcaaaatttttcacaaaataaatataatcaactgaaacatacctccaaaatactttataaaatgtacctaaattagcctatcaaacttctccaaacttaacatttactcgccctcgagtaaagattgacactaaactaaaagcaaatgaacacagacaaacaaattaagcgttaacttatattcacaccacactgctatcactcacaaagtttaactattgtaaatcatcttttcaatccgattactccatataccaactcttgcactcaatttggaagtaacaattagaaattactatatatatactcaactcaatccaatgaatccacaaaccaattatcaataaagcttccatcattcagccttctatactaatatcaacaacatatactttgacatcaaaaagactaaaacaggttttaatatttagatttaggtcaaagtagatgaaaaacgtcattcaggctcacatatattataagtttctccaatcaaatcaccctacaattttcacacatacatcctgatattccttctttttttcttctaattaagtacataaaagaaccttctctttgataaccttgcaacaactcttttttttagttatatttttatgacaatgtatttgcaaaaattttatttttctcttattttttttccgagttattgcaaataacttttattttcaaattctctcaataatatatttattttttacaaaacataacataaactttccaccattaaaatcccccaaaatttagatccactaatggtatagttacggacaaaaatagatgataacgaatttattttcttagctcaaagtatgtgtaaaacaaaaaataacaagtcaatgctcaaaaagggtaaactagaattaagactacaaggttggcttgaaatacacaaacattccaaaagagttacttaaattatttttcaaagcacacatcaccaagaattttgcgtcaaaggtaattaatgaaagttctatccaattcgacttatcaatcctctaaccctagtcaatcatatataacaaagtccaattatttacatttaccatggtcatattcaactttctaacaagcaccaatgttaagcaca

SEQ ID NO: 242483 - DNA, 1115 bp, Cannabis indica
tttttttaaaaatatatataattaagtgcggattggattggatcggttactttttgaggtcaaacacatccaatccgcataagtgcggattttaaatttttcaatccaatccaatccgcacaagtgcggatatccgcattttgcggattggattggattggatcgtgcggattggattggatcggatactttgtgaacacccctaattatttgtaacatattttgtattcaaaataagatcatgcatatgttaaaaaaaatatatatgtaaaaatcatgattttgtgcgcacaatggaaacaccaaatctgagaccatgtgacgatgagacatttattccaataaatccaccaaaaattaaacaagcaatacagtttaagaatgagcttgttagcaccaactaaaaattgtcatataaatagtaaacgatttattattatatcaaattaagttatgtaatttatttgagaaaaaaattatagaaatttttacataaaaatatgaccctttgtttataaaaataccatatgagaaacaattttatctttaataaatttttattcaccaaaatatcattacatacatccattcataaatatcaagtcgatcatttattttttcttgttttttcttttatttttcatttttagatttagcattaagtttctttttcttttttttctcagttttttatttcaaaaccaccttaccttttcaaaactcaccttcaaaacccatgaaaactacctcctaggcataaacttcgctatcttcttcttcttccaactacctaatttattaattttttatatatatttatatatatatatatctttcattttgtatatataatgactattatttatgactttgcttctccatctccattgccaaatatgatgatgactctgatttcgctccccacgtggcttaaggtggtcgtcgtccaatgaagaagaagtcgaatatgtctttgcttgaaaaaaattctaactctgacagccagaaggaaagaaaaagtcaactttaacacaacagtgatgaaattgttagtacaaaaaattttacttttagtcacaacaaaaaagttgcgactaattattaattatcattcc

SEQ ID NO: 242484 - DNA, 571 bp, Cannabis indica
agagtgaataatcatttcataacactccctaccccaaccatactcattatatcaaccattatcgataatgtcaatcttttcaacatacacaactttctcagggggaccacccaacaaataacattgtacaaagtcatcactgtccccaaaatacctaccattgaatgcaacttgaatagaatttttcgtgattttatcgttccccttcaaacactgttccgcaagagtgtttctctcctgcctaaactcaaaaatattcgactcaatatgacaatttaaactagtcactaaagcaaagtcctctatactaaacctaagtaattttccagcaatacttgtccaaaactccttctcattggtttgttgaacttccctcaacaacagattgtgaaacagttgaaagtggattgaatactcaagggtacgaagaaaattatcaaaaataattttaaaaaataactctttttggtggtcaatcaaaatagaaatgatatctttaatgaccctataatacccacaagtaataactttggaatggtaatgttcaaaatgtaagtatttaagactttaa

SEQ ID NO: 242485 - DNA, 534 bp, Cannabis indica
tatttggttaatgattgattatgggctttgtagcctttgttttctttgttttaatgtaatttggttttgttggttaggtcttgcccctgaaattcctgaggatctgtatcatcttattaagaaggctagtttctattaggaagcatcttgagaggaacaggaaggacaaggattctaagttccgtttgaatttggttgagagcagaattcacagacttgcacgttactacaagaagaccaagaagcttccacctgtgtggaaatagtaagtacttttgttactcaatgtctacaagttcatatcttgttttttacattctgcaatgctatttctttatgtctattagtttattggtatatttgaactgtctctttacatgttgcttattaaccttctgaacaaagggtcgtttgtgtttggatctttagtcttgaaactgttatttagtagggaagtgttatgacttgattgtttactgggtttgtttaagagattggtaatatagtgtgacagtgtttatggttagctaaatt

SEQ ID NO: 242486 - DNA, 1482 bp, Cannabis indica
ttttctcttttttacattatttgggctggggttgttccatcagttgaaaaaaataataaaaaagaaattttcgacaaaaaagtaataaaaaatattaagtttgacttaaatatttttcatataaatatatttttgatatagtgtaaaaaaagttttttttttttttttgtatattttcttcaattaagtagctaaattaagcatagaaattcaaatatctctttcattattcgctatcggaccaaaatttaatggtttaatatttttaaaattaatatttataattaaatttatttagtactcatcaataggtaatactctttaagaagtatatgttcataatcattgctctatatctacatgtcatatatacgtctataaaattctcttcatttaaactatttttttttaaaaaaaaaaaaaaatatatgagtttgaaagaaacaaaaaaaaatgttaattatgacaaagccaattcatatatttgttaattgtggtaatcaacccctcaacttgtaattgttccttagaaaaaggctcgtaaaagacaattctttgtcttaactcctctgtgagctccgttttgggaatcgattctacaaaaaaggaaaacaaaaaatgaattaattttgtaatggaaccattacacaaatcataaaatcagtgaaagtgcaagggactaaaagatggtagctggaattttgaagtccaatgagagtgttgaaactctcacctcatggggaagccggttgtggaaaaccagtattcccggtagttctaactgtgagaagaaatgcttatgggacattgaacatttttgtacttccggtgacgataaaacctaaacttggtgggatgtccttgcatgggttggaattttacctcataaaaatacaaaatttcttctggggttagagcaggctttccccgggatttgtagaatttaaaccattggtaggagctggaagggagcaattcccgctttaatgcaaaattctacaaagtaagttctaaatagaaggtgggctccacaagaaatatgggacaaactccacgctctaaaaccgtctacactttgagaggcagactccccaaggacggacatgcagtaccacatgagtctcagaacatttcgtactcctccgtcagtagagtacgcttctaaaagaccgtaatttctcagttagtttggtctttgatctatttcctagataaagtcgttgagaactcggggaactggagaagttgcaggagctttgcctttgcctttgcctttgctcttacggcgtcatttaggtgggactggttcggaagagcctattgggattttatgctctaaataaaactcattacaatctaatctgattatcaataaaagattagaagtgatttatgtttacttgctgttttcatgtttatggtttaatatatatataaaatctgttaagtccagaacatatagttatttacaattacagtgat

SEQ ID NO: 242487 - DNA, 1615 bp, Cannabis indica
actaccttacccttgagttgaccctgatatttaccattacttgttacttaataatatataaacatttaaattgttcaacaatattctttgttgctgcttatatatattttggtgaaagtatagagctttaactctacaattgaaattattttcttcttttgagacaatttaaatttttactttcaagttagacaacaaccttaaaaattaaaatatatatagtcaatattttcgaaaaattgttacaagatgactacttataagtggtggccattctagagtagttacttaactttcaatggttcagataatataattgagattttctaaacaagctaggaatttattacaatgacatggttaactattattaaggcttttcttgaattcaagtgaatatataatatgacttgaatatatataaaacttgcattcatttattaattggctcatgtaaattaagagattgaatataagaaagatagttgagctaccaaaccttgctaacaataaccaataaagcatatttaactaatgtgtgagctgccatattataagtttttatgacagtgcattagactcgcccaactaaagttaataaaagagtattgttattggatactagtggtgcctaatacattttagatgtattgctttacaattggctaatgatattctttaaaaattattacattaaactatatgagacttgatacttagttagaccaataactatattgacacctaagagggtgttaggcaccactagtagaccaataacgatattgacaactaaaagacaaactaaagagaattgttaaaagacactactagtgtttaatacattctttagtgtcatattactgttagtgtaattaagtagcatgttctatataatataaaaaaataacttttaaaaaatatcgttaaccaatcataaaatgccacctataaaaaatattaggcgccaatattaatgccaaataacaatgtttaaaactaaaatatcttgaaaaagtcttgaagaaaacttcaacaacatatgattgttattgtgaatacattgctagagactaatagtgtcataacaatactcagtcatttattattattattattaattaattaacttgaattccaagattctgactgattcaccaagtgggcccgttgtagtttgtggcttgtgcccacgtcgaccatcaattcatgatgaaaaggttaatataatgttttggcatatatgaaaaaggttagtctaattaattatgaataaatttatagtacatttccttaaaaagcatattttgacagatttaaatatgttctcacatttaaaaaaactttttattagttatgattgtgtacgttcaatttttttaaaattacttgccaatttttaaaaaatttccaataatttatgatgtcgaaaataaacgttaatttattatttaaggtactatttaatattattttaaaaaatataaaatttaatttattatttattaaaataaaatatattcaattaatttttactaaaatacaaaattcaaaataatatttactctaaatgaaatattgtcaatttctcctaagacactacaaatttttttac

SEQ ID NO: 242488 - DNA, 1081 bp, Cannabis indica
tttttttatggtttatatattgtgccgttatatatgcttgatatttgtcgctctaggctcctgccttaatttgtttggtcatttattaaatttgaaacaaaatggcattcctgttaaatctaatcaatagtcttactgaccgaatatgtatagaggctatatatataggtagctagcctaatatatatgtatagcttcttttagtcatacagaagaaaaatcaactgtcaaaagccgcaagaatccctaaaattatcacactatatatatattttcccttctctactttttttttttttgtgttcagtctaactgatctggagaactctcttggtttcatgattataataaatctcaaaagatctctgaattgatttaaagaataagacttttgtactacccccctctctctctatatgtatatatatatataatcatggtcgatgacagatgtcacctttcatttaaacaatctagagaaattcaagtatatatgtgaatgttaatttttacgatttatataaagaaaaagctagctatctttgagaatatatatacagtacttactaaaaatgctgcttatatatatatgatcatgtttaattcattgggcactatattatacttgacttaattagggaagatagtgtctatatatttgattgcttacatataaatatatgtattaatgtatatatattataacacatcatgtatatatatgctctatcttcagctccggaaaagagacagagggtaccatctgcttacaaccgtttcattaagtaagtatatattataataattattaacatactaaagctatatctccatatatatatctcctaattttctccatcaaataatgtatgatgagaacaaaaattatcagttaatattgttttaattctcttcctatatagagatcgatatagctcgatcgaaagttatttgtatgtcagaggtaaaagaaatggtgtgcaatattgtaattaattaactcatattaagtactaaatgttgtaatccccggctgcaccttatcatatcgtgtatatataccatatataaatatatatat

SEQ ID NO: 242489 - DNA, 1107 bp, Cannabis indica
gctttgctcgtaaagtagggatgagccctccttctagatgggaactcattgtgttacaaagtattaagagctaagtatcttaaaggaaaattgtttttaaagtgttcgtataagaactgggactcttggttctggaagaatgttgtgaaatctaaaaaaatcctaaggataggtgtgtgtaaaatgagttctaatgggaaagagaccaatatttagactgatccttagattttgcatggcaaagagttctaccctaagcccattactcaaagtagtgggggtaactaaggttacggagttacttttaaataacggggactgcaaaactccgtatcctttttgattcagaaaaaatgagtaacatcattaatggggggggaaacttaaggtagagataggtgggtctggatgaaagagccaaatcgtttatttactactaagtctgcttatctggtccaagctttagagagagccccaaaatgtgttgttgccccaaccctgtagaacaaactctggaactcaaaaattatgaagagacataaggttctttggtagtgtattctttgagatgccctgcctatccgggctctcctcgctcagaggatgagtattgaagaggtttcttgtcctctttgtggagagggtgacgaatcgatggagcattttttcctcttttgcaactccacgtaccatctttggaggtcttcccctaggggagttacaccggtctttgaatctggagctcgtgtttgggattgggtaacatttctctggaacttgaagtcgaaagagtggatactaaaaagatgttcctctatccttcgattatagtggatatgatttggaagacccgcaacgataaggttcataataattcctcgggtaacattaagcaccctattgattgtatctctatttgttacacagattatgtgacttgcttatttgctttgacgttggctattgtgtctcctttttaattcatcccctcctccaaaagattggatcaaaatcaactgcgatattaaggttggtagttgatccatgggcatggcagttttagctaaggatcgcataggaaaagtttgtgggtagcagctaacatcc

SEQ ID NO: 242490 - DNA, 653 bp, Cannabis indica
tgatagtttaattattggtaataatccaaatcacaaaaatcgcactgcaccgcaccattttttgcggtgcgattttcgcagttttttagtttcgcgatgcgagtgcaaattaggaattaaaaaaactgcatgtgcaggttgatttaaaaaaatagtcaaaaacctcactactcacaccgcaaacacccttagttagacgataagcaggggcggacataggtgtgtagttagggtggccctggccccctcaaaatttctaaaaaataaatgtatgtgttcttcttaatgaacaaaaattatacatatgcattaattgatagttcatcattacaaacaaaagtccaagaaaaaaggtaaaaagtagtatattgaatcattaaattattttattttttatttttataataatttatataataatatattatttataaattaataataacttgttactatacagaaaaaaataataattagagtggaaaataaaattaagtatattagttttaaattttgctacaaatatataagtatgttatttaaaaaaaagttatagtacatttcaaaagattgttcaagtaaattttttatctctttcgatattcagaagaattttttaatctaattttttttttatataatcatgtatatta

SEQ ID NO: 242491 - DNA, 815 bp, Cannabis indica
aagggcaatacatcaaggagtcgacggcaaactcgatcccaagattgcgcacaaggaaaaacacattacatgagaaaaaaacacctcgatatgaatatgatgcgagcaaaaaagtatgagtaacttttataattaccaatcagaaagtatctccccaagtcgaccagtaaaaaattacaatcgatgccaaaacataaatgatcagtccgatttgtgagaccttataaatcgaatgtgtttgatctacgctaccaaataaatcgaaagcaccaaatctcaaaagagattgaatagaaatgttcaacgagtaaatggataaacatatattattctgaaatactaaaaaatattattagtgttttagttattttttttttttttatttattagtgtaattatgtatgaagttatatataatttaaaaaaattaattcagaaattaactaatcacaaaagactcctatagtctccaatagcaattcttttatttaggtaacaaaagattttggattaaaggctgggtcaggttaggtgttccgcagcatgaatccacgtgatgccactacagcatgacacgtagactggcttacgtgtcatcaagaccctaagactaaacctcagcaaaaacctaataatggtcttcttcttcctctgttacttgtgattactgctacagtaagcttcagtaatggcgatctacaggtcactcaaggctctaattgcgaatcctacaaattccagaagcttcgtcacagctacaaccttctccatctcagctccaccgtacacccctctagccaatcccttaatccacc

SEQ ID NO: 242492 - DNA, 922 bp, Cannabis indica
agaaagaattcttatattgacacttgtcttcctgttgtccttgatgagccaaaaccatattccattttcggaaagcatgtccttccttctccttttgcttcatatttgacacgttagcgttgtaatgattttagtacctttaggtggatgaggggtcccctctctataatctcacatcattttcgtatacttacatatgtatgtgtgtatatatgtcattgataattgatgattctgctgataatggtaatgttccaattctgataatgcatgcattcagctataaaaatcataatgaaaagatgtaagaaccagaacattggcattttgaattagaaccaccccacctcacacctcacctgtgcaactctatgaagcatcatctttcatatgatgatgagtgatctctttcgtgcatctctgcaatatcaatcggccaggcctcaaaattagtttttggcgtttggttaaatattgaaatgattttgctttagtatggttaatgggtgcatgaatcaaatgaaatgatgtaaaagtagtaattatttttgtgtaaatatagaagaagaaaaaatccccaaagaaacaactccctcatccagaggaattatgagaggaatataactcagccctaagtacatctacataacagattgtttgaaactattggtcattatcttaggagacgatatagttttttaatcgaacattcgaacttatgtcaatatatagggaaccctgagagcatcacttttgctttcatttatgagtatttttattttattttattttattttaattggttaaacaatagaggtacatataattaaaataggttggtgtacatatatatactatttgttatagtatttttaaaattgaatttttgttttttaattaaaattatggaaatgacttttga

SEQ ID NO: 242493 - DNA, 830 bp, Cannabis indica
ataatgggatggttagcaacttaattatatgttagaggcacatgagagcacccttaatactatagttggcccattaaattatagtataccgtaaaagacctcaaaagccctattagttaataaccccttagggttataagggtaataacatgtgtatatatatatgtgtgttatgtgtggtaagaggtaattagagtttgtatggtaaaggcaaaggggttagctccacaagtgttctctctagtttttgctcaaggattggtggtgagtctcattaaagacattgaaggataatggctcacatgatgatatgggaggtatgtgttttattgtatttgatgctctaaataaatactagatcttggctttaatgattatgagtaatcgttattttaacattaagtttattgcaactccttctataatttgatagaataaacactacatgaaaatcaaagtaatttttttcataaaaaagagaagcaatgtacttcttacaagtaattaagctagtatttatagacaaaacataataacagaagtgagaaggacatatccaataacttaattacttcacttccttcaaaattcaaatttatttttgaattaaataaatataattaattttaagtttaattaaaaataaattaactaaaattgtttaattaattaaaacgttttaaaatatgttttaaataaaagcacaagatcttacaagcatctaggcaagaatctcgaaatgcacaaaatcttgcaagcatgagggtttgcatctcggcaagcatgcgggtttgcatcttagcaagcataagggctttgtatggatctta

SEQ ID NO: 242494 - DNA, 1430 bp, Cannabis indica
tgccccatctcaacccagttccgataggaggtctattgccccaagggacacccggagctgcgcccagagcactggcaccagctgtgccctcaggagctcctcaccagacccctagcctgccgccaagacccaacaggagagtggccatgatctctggtgggccccatattggagggaccactcgaaaggaactaaagcgctatgctagggccgttaaacacgatgaggtgtgggaagtcactcagctgtcggctcaaaggccccgactcatggactagccaattactttcacggaagaagacgcaaagatggtgcgctttcctcaccatgaccccctagtcatagagactctcatcgccaacaagatcgtggctagaatactgatcgacaatgggagtttcgtgaatttattgtttaaagacgccttcacggcgataggcctcatggaccgggatctatcgccaagcggttcccacctcacgagattcaacggaaccacacttatcccaatgggaaaagtgaagttgccagtcaccctgtgtccgtgcacaccacagggtacttttaaatattgcacattcgtggtggtagactgcctaactgcttacaacccaatccttggccgaccggccctagtagactttggcgcagttacgtccatccgacacttgtgtctgaaattccccacccaggaggccggagtagggaccgtgaggggcaatcaaggtgaggccagacaatgttataatgtcgcggcccacctaccagtattgatggtccgtgaagggatcgagccagaattggaagaagaagatgagttggatccctgtgtgggattcgaaaaaagttgtggaacttatggaggacgtcgaggaagtgccagtatgcaacctataccccactaaaatcattcggttgggaaagagcctagaatcggaggaaaaagaaaaaatagttaaagtattaagggtagccacggatgtttttgcgtggtgccaaggagacatgaccggcataagtccgcatgtgataacccatgtccttaacgtcaatccagatatgccaccagttcagtagaagcggcgtccccttgatccagtaaaggcggaagctctagaaaaagaggtggacaagctactagctagtggcatgatctgggatgtatattacctaaaatggctggccaatccagtactggtgcctaaaccaaatgggacatggtgggtgtgtatagattttattgatctaaacaaggcctacccgaaagactgcttcccccttccccaaattgaccaaatggtggacgccacctccgaattcaagttattgtccttcatagacgcctatgctggctacaactagatcaagatgcccatagcggatcaagaatggactagcttcaggaccgataagggggtatactgctacct

SEQ ID NO: 242495 - DNA, 854 bp, Cannabis indica
tttttgctgaggttaacagggttaaattcccaatttatttttatttataatttcctttttccaatcaataacaatgagtcgacaacaggtaacccaaagtcccaaatgacaagaaaatacgcattagaaaactcgagttacatcattcattacatcgtgtaggggaatccgagtatatcatcatatgcagcagaaatgtacaataagctatacgagttgtttaaaaaaatttagaatcattatttttagttgcagaagagaaacaattacagagaaacaaagtgaatgaaattcatctttcattattgcaaaacagaggaatgaacagagttatatatacaagctgtagctgacttcaactctaattgcctaaccaaaatcctaaccaactaaatcaacaaaataacagaaagatgtaactaactcaacaccttataacaaatcattctaatactcccccttaaggtggagagtatatgttaaaaattcccattttactcttgagagcttcaaattggctaggaagcaaagccttggtgcaaatatcaacaatctgatttttgctagaaatatgggcagtctttatcattccttcttgcactttgtctcttacaatgtgacaatcaatctctatgtgctttgtcctctcatggaagacgggattagcagctatttgttgggctgccttgttgtcagtgtaaaatggcaggtcctacatgttcgatgttcaactcctttaaaatggacaagagccaaacaaggtcacatgtagtattagccattgctcgatactccgcttcagctgaagatctcgaaactatagattgctttttactcttccaagaaaccagaga

SEQ ID NO: 242496 - DNA, 550 bp, Cannabis indica
ccatagggttattaaaaaaaccctcatttccccaattcccaaccgacggcatagatatatatatattctatacctacgggttttttaccaaaaaaaccgcctctaaatgtcaatgcagatatttttacacccttaagcttccctttttataaattgggttgaaaaaagggaagctaaaggcctacattgtagtagtggcgattatgttacgtagttgtattatagatgaaattttatgttattcatattttatatccagtaatagtggaatgaggcgttcggcctacagagtcacttagaaatgatatagtatcttagaattaatgggccaatgtaattatacatttggaatttttaattattttaggattatagttcgaactattttaccctagttggtttatttacttattgttaaagtaataggactttgtcttttagtttgctttattaaatggaattttcataatttcttagttagaattattagattttaagcttataaaataatatgggtttatcccattacttatacttagctaaaaattac

SEQ ID NO: 242497 - DNA, 648 bp, Cannabis indica
aaattgttttagtgaaataataaaaataatggttatctttcgttgttaaatgattgattggagaaccgttcacaattatgtgagcctcaaatcaataatgggtacccaactcaacccacttgccctcaaaaacatggatgtgtgtgtggtctcttctctactgagtaatgagtaagtaagtactcctcctatcaagtggtccatttggttttgcttttctcattttttaaaaagtctacaagtctactaattacaaatcctaggttggaacaagttgagaggatctccaattacaattttatagtcaatcttcaagtctaaaatcacatcattttttttttcataacagtatttgttgttatagttacactattatttttataaatttttgaaaaattctaaaatatacagtactgaaaatatagttcttgatattttagtttaccatccatcttcaaaaaattgtaaacatatttttaacactgtaaactattcgaaaattttcaaaaatttacaagaatgttattgtgagtataacgaacaccactataaaaaaaattacgtatattttcaggtaccaagattgactgaaaagtcgtaataaatagttgacaataccactcctcataaaattaatcaacatcactc

SEQ ID NO: 242498 - DNA, 663 bp, Cannabis indica
ctctctctctctctctctctctctctctctctctctttccacatctcctcattctcttaaaaatctttttgtgcacagctccagtagaccaaatgagccatcttaggcctcccaacagcccaacgagctccaccaccaaaccctgtacatctcaaaagtctagatccccaaaccccatttacactcactatgggattttaaaacttattgttgggattaaactcacttaacttgtcaagtcagtatgtccagttattggctcatcagttgaatttgaagaaagttgctgctagttataacagttggctttaataccaacttaaaggggaccccaccaacaactatatataggtgttcctctattctcaaagagagagtttggagtttagagttctaatctaagctcatactttagatttagtttagagagagagagagagagaatccaagatcatagtgaatgtgtgttgagggatgtaaaagggagtatcactcttaaagtaatttcccttaatgtgagatatttctttgtaattacttactgtgttgagttgtaatcttgggcccattctattatgtactactggctattcctattcaataaagatccatcattcattcattatcaagctaagttttctttgtctatttttcaattaagtt

SEQ ID NO: 242499 - DNA, 920 bp, Cannabis indica
gtctaaatttgaaatattgtcaaaacaggtgggacaactaactctcttgaagttgctaaatttagacttttgtgaaaagcttagggtaattgaacctaatgttatctcaagtctgataaatttagaagaattgtacatgagaaatgtgtgtaaagtatgggaggttgaaaaagtcagaaaccaaagaagtaatgctagtctcgcagagctaaagaatttgccccggctgaacacattgtatttagaaatcgataatgataatcttttgccaaaagacttcattactagcaagatgaagaggtatcaaataatggtaggtccatcctttaatttcatgcaaaaggagaacatatcacattcaagagtcttgaagttggagcttcacaacgccaatttgatgaatgaaaatggtcttaataagcttatgaaagaatgccaagcattgcagctcaagggatgtgaagataccaccattgacatttgtatatcaaatgctgatggtttccccgaattagaggtttttgacttacaagatgctcctaatgttgaataccttgttagctcggccttgatgtactgtaatcgtcctgtctttcgaaacttggagaatatggttctcactaaattggagaagctgcgaaagatatgtgatggagaattggtagcagattcatttggtaagttgaaaaacgtcgcagtaagtgaatgtcacacactgaaaaatatgtttccagcctcaaatattgttggacagcttgaagaaattaaagtagagtattgtgatatgatggagaacattgtttccatagaagaaaaatggcacctcacagagattgagtttctcaaattacaaaattgtatctgtgtgagttatcaaaattaattcaattctctacagttcagtgggagccagtatttca

SEQ ID NO: 242500 - DNA, 748 bp, Cannabis indica
gacttagttgatagtattgtactatcaaagtggagtaactgctgtggatcaaacagagataattgctatggatcaatcaggtacacatacctaattattatatcttattattgtgttctatgttatatacaaattgatcttggggtttatattaatttatctttcaacatcatcacccacggtctcctaatacttctggtagaaaccagctcacgtaccatctttcccaagacttttataaggatgcatctgaaagaggtcccctttaacatcatcatgggtataggttcgaaccatttgatagaattcatagaagtagaaactttcgtattgacaacattaaaaataggtgccatgaaatcaaaagaaggagagtccaaactaaaagcttatgaaaattaatattagaaaacaaaggcaagattagcccgatcttccttgcattgttgttctcatcaagctaagagtgaataaaatttccttacaaagagtgaaattaatatataattttaattttacactatgtaatagtttttttatttttttttcttgaggggtactttttaatactttatgttaattctatttttggcatctttaatgtgataaaaatattttattatttattgttttaatacgttggagtaattacattgtttccatattttgtatttgacttttatattaatcaatttatttttggaaagaaaattatctaccttttttatttatgaaaaataaggtaaaa

SEQ ID NO: 242501 - DNA, 832 bp, Cannabis indica
ataatttaataataataagataacatatataacaaagtaagaaacattaaacctaaccacttctctttctctctcaccctctctttgtacctcattctttctctcctctgagtctcaacttttttttttttctaaatcactcaaattttaaccttgatgaactgggagccgtgttggttcttcttgaaaattgaatttggaaccgattctttggagaaggcggcaatggaggcttctgcggagaataagagtcacaaacagcaagagtttgctttggcttcagtctttgagctcgcctcttcttcttcttcctcatctgctctatcttcttcgtctattgttgcttggttcagcgtcgatgatggaattcccgagcttcggttttatcaagaatctcaatcgtttgctgttgtcaatgttgatcttcgagtggcttaggtcagctttcttttattgagtctggtgttttcatttttcgtttggtttccgagaacgtgagagaaatgtattgaaagagtgaaaataacaggaggacgcggatcatttggaatcttagttacaaatgacttgtttagttttgtagattttttttcttatcacaaaggatgattgctgaggaatagagtgctagtccaatggtttagaatatcactcaccgtctcacctcctcgtcatctctccgcttcgcctaggaagacgattcaacctccgacaatgattgctgaactttttttaagtttatattgtttcagttttgctaactgttctaaaattctataatttgttatttatgaaaaaccgtgtttttgcaaatgtcagttgtatataagaa

SEQ ID NO: 242502 - DNA, 1110 bp, Cannabis indica
cacggcgttcaacagggctaacattggcaagtacaaaactcagctaagaaactcaaagatgcaggggtctctcaacgattttctattaaagatcaaaagccttgttgatcttcttgcttcaattggtcatccaatgtcagctcaagatcatattgaggcaatctttaatggactttcgagtgaatacaatgtgtttgtaacttcggtgaacaccaggctagatgcttacacagttgcagaaatagaggctttactcatggctcaagaagttaggctcgaaaaagactccactgaactggacattaccaaaccagaagccaatttggctcatactaagccttacacaggtggtcgaggtacttactcttctcctcattatccctcttcagtttcttcttcatataatcctatgttcaggggttattatccccaatatggaccacctggcaccttttctgcaactcaccctccaccaggttttgttcctaatcaaagcaatgttcaagcccgtggatatcagtctggtcgtggccaaatgtctcagaacaaaggacccaatgtgtcttcaaaaggacaatactctgcttggggacaaaagcttcagtgccaattgtgccacaaaatgggtcacacggctcaaaaatgtttttacaggtttgataaaaccttcactggtccagaaacatttcaaggtttttcaggcagtgccaatcttgctgaatgctctcatctttatgcttctcctgaagtggttcaagacagcagctggtatcctgactcaggtgccactcatcacctcactcctaatcctcaaaacttaatctacacctcggactacacaggagatcagcaaatacatatgggagatggatctggtctaaatatccaacacattggtaaatcctttatcctttctccttttcactctcaacaacttgtattaaacaatttgttgcatgtgcctaacatcaccaagaatttacttagtgtgtctcaatttgcccaagataactttgtttattttgagtttcacccatcttactgttgtgtcaaagatcaggtcactcagaggaccttgctggttgggaggcttgatcaaggtctctacaa

SEQ ID NO: 242503 - DNA, 509 bp, Cannabis indica
atgtatgtgtgtttctagatttaccatattgtattgagagatttttgtgtaaattaactaaaagagtctttattttccagaacaaaaacaagaaagaattatactgattctgtagtgggattgttttgacatacattattatggttattttgtgaaaaagagatttatctgttactattttgtatgtaaaaagctgtaagttatgtccttagattggagtattggacagtggattatccctgctgattatggacgtctccaatccacagtgacttggtcactttgtgtaaaatgcgattttgaggtggtgctgactattctctagtctatatatatttatatatttattattcagcataattaatataagtgcactgaaccagcaaaaatgcttcttgacattgttgtttcctacttaattagaagagtttctttttgtttattaatgaaaattagaagagtaaaataaggttaaggttaaatgtttgaatttgcaattccaagttgat

SEQ ID NO: 242504 - DNA, 2882 bp, Cannabis indica
actaagcgggctttacacaaaagttcattagactgagcctgaaattgagcctagggcagcttagaggcaccttaagaagtgttatgtgatctagggtaataccatgggctcttataacaaggctagggagcctctgaacagtaggggtcaaccttccaaggtaggggatgatcatattgaggatgaggctaccgagccgtggattctctaacttggagagggagatagatgggtatctcctcattctacactatcgactgccaagcttgacaccatcatcgatagtgaacttgttggccaggttcaatgcattaggcctactcgggatcacttggctcaccatccccagccaaactagatagcttggtcatgcccccatgttgagaaaggggtagcactccccttgcatccatacttcagggacatagctaatttcttcaagcagtgtccaactcagattgcaccaaaaaagtataaaatacttgttagcactttttgtcctatatgttgagttaggttggccgcatccttctcctttcaaggtgaattattattttaagctaaaatccagtccaggcaagaataggactagatattttactttagccagcaaggctatcagtggctggtgacactattgatgccgccatgtcgaaggttgggggctacgctaggagttactttatggggtataacataaaaggtgttcgcctattcttccatcgggtcccaactttcatccagccactccttatcttgagactaagagatatggccaaccacattttgtctcccccatttgagcagcgcaacatctatacattgacttatgaggaaaacttcaggaagtatggcaaagaggcctctttgacaaggatggcttagtcggtgactaggaaggactgaactcttaggcagcgtcttgctcgtgggggcgctgttggcgatgccccggttttgattaggcttgagagataggagcctacgaggtctgcccgacttgtatcgatagacaaaggcaaaggcaaggccgtcataactgaaaatagctctagtgagtcctcatttgaagattaggggcctttaggttgcactccttcgattgatcatcctaaggagtttgacggtagtaactcttttaccattgcttgcattttgtatatattacttgtatgttgacctcattgttctttttgtagacatgacttctaggctaaaagatttgatgaggcgaccatcgagtagcccctctggtgggcatgttctgtgtaaggtttcttggacagaggttacctcgcacatgacatggtccctcttcctccacctcctttaggcccacctctagtcaatcagcctgtgattcgtgattcttacttctcctcctcctctcaaggcaccgggcaacagccgaaaacatagccaggtagtttattccagcaaaagtgaaaagggcaaggaattttcacataactatattggcaagtgcctatcaagtgttgatgagcagctctaggagctagatgatgactccctagaatatatgatggacagctccttgagagatggggcatctgttagctctcttattgtttgctcagtttttacttcatgcactgtactaccctattgatcttgtttcttcttttttgattttaatgtctcttgaacttatccatgaccatgataggaccaagggctctacaacgaccttcaagaagaaacttgaacgcaaggatgctgagcttgcaacaaaagatgcgcaactccaggagaaggatctctaacttactgagcttgacaaggtgatggcagatctagagtcggcagagaaggatctaagagatgtcaaggaccagtaagacgatgtgggccagctgcttggaatttggactaaggaggtgacaaaactgatttcagagaacatcatgttgaagagggagttggatgctgcaaagaaaacctactaggagaagtaggaaagtcttgatacagccttgcggggtcaggatgaccttgtagttgagttcagtgacttggctatggaaactttttatgagtgttacctcgataatcctcagggcaacttttcttatgtcgagtctcttgatcgcaagagcataattgctcaaggcagggagttgtatgctaccagaatagccaaggaaagtgctccagaagcatctgccatccaacctggctaggcttcttctgaggtgcatgatggccaggttagggagaccagccagctttctatggagacacacactggccagggtactagtgaggtaccttctgtgcaggtcgttggccaaactgatcctgtcttggagactcttgatgtttaggttacctcccaggacccatctactctagactcatttgtacctgaaaacaattgaaggccttagttttattattttttcatgcttttattttgcacttttttagctttgttcttgtatggccttaaggccctttacttttgaactagtgaccgactagtctatctttaatcctaactttaacttcttttaattttttgaacatgtagctgggtgggcaacatttactcccaaacttatgcattttatgttcaccttaaagaataccatttgcacatacttaactattaatttcttgctttgccaaagcttcaaattttttttgcttaagtatatttgtggtttttcaatgttgtgtgtgggttccccccaagtgatcaagtaggcttaaggtctcttggtcacttgcaattaaacaagtatatagatcatttgcctgtgtattttcttgggaggaccgttttacacgcatgttgaattaaaactaagaattaactttagaaagctaatatgttaacaagttatttgacacaatttgaa

SEQ ID NO: 242505 - DNA, 665 bp, Cannabis indica
tgtgagaaaagaagtaagaagttcttgatctctcttgaaagcttacaaatttacagcttaagagctctcttgaatctctcttaaataactgatttcagatccctgcatgtgaaatgactccactatttatatggaaaaaatacattaattagacttccaaaaacaaacaagaaataaaatggaaaacttgtttacgttcctaaaatagatcaaactaaaaggaaaagtaggaaggtttcctataatttcttgtgggtgtgaatctgtcccactaaatcaggagtgtgatcgagacttgaatgcttgaacatttatgaaaagcatctctcaagatatttcagtcgcattcaccctagccggtgtatgtgagttggctgggaggttaatattggttggacggtgtgatgcaccctgttcggatattccatcttattcttcaaaaaagttgtttatgaatgataaattaccttgaacggaacttcatagagagcgtgccacccatccagatcattaaatattctccacgtgtcatctagataagtgccatgtcaccctgtgcagaaattaggataacatttatcctccaagttcacatgccaacctcctgctcacacgtggacttatctagccactaagctggttggatgggtgacacgtgtttggtc

SEQ ID NO: 242506 - DNA, 4249 bp, Cannabis indica
aattatataatatataatacttaaaaaaaactaaataattatatatattaatcaaaacttttaaaataattatattaataaaataatagaataataaagaatataaatttgggtataaattagtattgtgattggaattgaaaaataaattaatttcaatagttttttggtgttgccttaacaccaaaatttgagttttaggagggagatgatcttataagataaaattgccaactttaatagttgattttaaggacaacaaaaccatgtcgtattacttagtttcctattgaaacgacatactagcttagcttagcttagcttagtttagtaattttatcaaacagttggtgagccttttgaaaagaaaatgttagtcttacttcaaactccactcattctccgaccaaagtctcttcctttcctcgttttttccaaaaaatccgaccaccctaaacccacctctgcttctggaccaaaacccaggtcgccaaatcgtcgattgaaagctgagccactgtcccagaagcccgtagaatcaaagaagaaacaagaagatgatgttgagtttcctaagacaattcccagaaaaccaaggcgtggtcggagaagtgaagctgcagctgttgaagattacgttagggaatctcttgagaaaacatttgcttcgattagagagcaggattctggtgtgtttgagaataaggagaatgtaatgaaagaaagacccattgatgatgaatctgaggaggaggaggaggagaagaaggaaatggtggttgaggaggagagtgaggattggccattggatggtgatattggatggggtgttagagcttcagagtattttgagaaacacccaataaggaatgtggttggggaagatggtgttgagattgattgggaaggagagattgaagataattgggtgaaagagattaattgtttggaatgggaaagttttgcttttcatccaagtccactcattgtttatgtttttgaaagatataacaggtatcttcttcttcttcttcatctatatattattagtttcagagttatcttattcaaatttcaccaacaatggttgttacaaactgattagtaagtcacaaaacaaatacaattcaagataattcaatcaatggcagataatcaaacacataaattgtctcacaactcactcactggtagttggtttttaatgattatatcaattggttgatgttgtgatcgaaccattctaacagctcaagaagttcactaacccacaaacacattcatgaacacaataacagaacaataaaccagtaagaaaactaaagaaagaacaccaagattttaacgagttcgagccatgtgcaatgctatatatctcggttgaatagcagccttaatcatcttcattatcggatcaagtttcagagattacaagtaattaagaaaacagaacacaagtgagttacaagcatggcttatcttatctcacttgtccaagttagtaccaactagcatggtgacttgtaaccatattttcacagttgattgatgagtctcctatacgagttgatcaatttgagggttttaaggttgagttgatgaagttacaagttttcactttgtctctactcttgtttggaacactatcttcaatctttattgatcagtaacaatgagtatacaaaacagttgagaatgagttcttcaatcacaggttacaatggtggattctctttatcactcaaccaaccgatcattcacaatagtttataagtgtattgctctttacaaaaccctttggaccccattctctttcgctctactctttataatctcagctcacactttctcacccttgttctctgaatcttattcgcgacgaagctaacatgtccttatacagacatctactataatgtagttggtaaggacaattaactaacttaactgtttacagcagaaacagttatattagttggcgatttagtaggaataaattccacagttgtctttgaagcatgtgtttatagtagttgatattgatttactctgtaaagacagctttgtaaactatttgatcttgaattttctttagtatgttgctttgactgaaaacaaaaagggatttaaaaagactattaatttggtgattgttgatcagattttggagctataaaaaaccataaagggttcaaatttatgtcaaagcttttggtttgtttgcattacatgttattcttcttgcagggctaccgataattggaaggctttgaaagagctcgagaaagcagtaaaagtttattgggaggccaaagatcgattaccaccacgggtatttcaaacttcttacttctcccgccttcactggattccaaagtttgttattttgattccaatctattccatttgtgccatttctttttcttttgtttacaacagtcagtgaagatagacatgaatatcgaaagagacttggcatatgctctaaatgttaaagaatgtcctcagattttattcttgaggggaaataggattctgtacagagagaaaggtaagaaagttaaaacattacaaaactcactcactcactcgttcgttcaatctgtctgtacttaaaaactacatgtcgtttgttgcagagattcgaacggcggatgaactggttcaaatgattgcacacttttattacaatgcaaagagaccttcatggattgatgtttcagctttgtctccaccttatccttattagttcaagcttttatggtagattttattctttattctctgcactctttttcttttcttttctttctaaacttagtgtacaagatctttcttgtttagcattttttagatttgagttacgtagagaatatgatatttacattttttagattttgtttgactttaatcaaggattagatgtgattaaactttatggttgattctcttctcttctcctttgtatatagaagaatatttggatgagagtgcaataaaatagcattgctattaagcacctttaacaccacaccgacgtgttacttataattggttaacggtttcccatattatttattaaattaaaatatgtaagatcaaatattaaaatgcattaataacagtatatcacttcttgtagtgtatactgtttagcatattacagtgctccgtaacatttctcccaagaaaaatgttccaagtttactttttaacttcactttctctttttttctttcattttggtttaaaataacttactttaagagttttattgaccacataattaaaaggtacgattgaagtactaatgcaccgaagttcatcagaattcttaaacccgtgtgtttagacacggtgtgcaatgaaattcttatgtttggccctaaataaaattattgataacataacaaagggaatatatatatatgatttttattcctaaacaaaggaaatgtaattgtcgtttttcatgttttgcgtcgtttttatgagacttgtacgtttttacgagtttttgttgtttattatacaagaagaatattctatgctgtcgtttactgttcattcgttttgaggttgctgtcgtttttctgattattattacaattttttttcttgtcgtttttaggggtaaacttggtcaaattatgaaattaatgtcgtttgaaaacagtaggcggctaagaatagaagtattaaaaagatattttattatcagaagtcgcaatcttgtctttttcttgttttgtgagccatttttcatgagattaagaccactcacaagtcacaagttacatttttttaaaaaaattaattttttaatttaaaaaattactgaaaacaagctacaataatatattctttttctatttttttaaatttattatttatattctacatttatacaataatattcattcttatagtatgttagatttccccaacaatagtattaacaattacaaccataaattatatgcaatatcatattatttaatagataataaattatccgtattaaattatattctaatatctagaaatgattgtaggccgattgccgaagctggacttagacccagttccgagtcttggcctgaacctagacccttgacctgaagcaagaatcagaaccagaaccagattcggcctcgggcctgaactcagccccgaactcacaagaactctatacctaaacttggaactagacctggacttgatactaaatactacaagccaatatcaa

SEQ ID NO: 242507 - DNA, 788 bp, Cannabis indica
aagactttcaacaagaaggagtctcaacactatagaaggagagaaagagatccatgttcagatcttgatcatactctggtgagtagatctaagatcccggtaaaataatttccaacaaaattttcatgggcctcccttaagatctttttcaaggcctccacttcggcgttccccttcgtatattctgtcgtagcatagttatgcttggcaatttggagttggtttctttcctcatcagcaggaatagggttagaatgatacttggaggaatagtgtactcctccgcctcgggtgggatccttgaataagaactgggagccggagtatcggctctattgggctgcttagcagcctttgtctcccccattttgcccgtgtgcttccagtctagaggggtgagaatctcgccctcctcttcctcttctacctcctcgtcctcgtcaatcaaaacaattttgcccaaggggaagctagaagagggtttcccggaagtcacctccaggtcttgtgcctaaggcagggccaagtcgagactgtaggtctgagcgagggcatctaaaagctcatccattggcttagctactttaagaaacaaacagataaaggcgttaggacattatcatgaaattgtgcacgtaggaaaaaagcaataaaattaatcctacccagacgatctaattcagccctagcaaaataatgcatcaaaaggctggtgtcgtcatccccaagaaagctgttcgagggaaggaaccagctggaagacaaataggctgaatgatccagaggga

SEQ ID NO: 242508 - DNA, 1395 bp, Cannabis indica
tctctctctctctctctcaggttgggctaatccattgaagttcatatggatccttccttattgaccagatccagggccaaccctttttgtgtgcaagttgggctactgaacagggtccaaaaaaataaaaggcacaatatatttttctttaatgctttttaggatttttttagagatttttacaccacatattaaaattttttaacttttttttactatgggacggattttttttcaaaaatacagtgtaagtttcatgctgtatactgtgttaagttttcactgttgttctacacttattttttagttgttctactattgtttttaatagttctcttttgttgttttacggttgttttataaaaagacaatatctttgtaaaaaaattccatgtgagagtaaaattataaacttttattcaaaatccagtatttttgtaaaaaaaaatttaattgaacttttcaatgggctaacaaactcaaaatgagtcatatcggtaacaaactcgaacaagttttaaagaaaaaaaaacctatacaagaacttctactaaaatctaataggaagcatcaatttagcatccaaggagagtgtaaagcaaacaaaactccctttttgaatggcgaaattctgaatagtaaaatgacaaatcaactacaattattgaaagaaaaacaaacacaaaatcaactatatgattaaaagcttcattgttggaaaataagcaatgatccaccaaaatatatttaacaataggaaccaatatcctatttgtctagatttataccatcacgaaagctaccaacaccattagtaaggttcttgacaatataattaacaaacaaaacaacaaaccaacaaaatacacttagaataaaagtgaaagttaataataagagaatcatataattagtagaatagcttaaagaaacagttttcgtgctggccagtggccaccgacaacaacataagtcgattgcttaaaatatatttttattttagggaggagaattctagtcgaggccgataactaccatggaattctattattttaaaactacaaaaaaattaataagttaaaatgatagattacaaataataataataataatgaaaaaaaaagtcttgtcttttgacatgtttggtatgttagtctgctattgtctttgtgtctgtgaaatataatcttcatcccttatggcctcaagatcgatggataatccgacgttagaagaacagtttgcaaacacttcactattggaagaaccggaaggtatattgtcctatggggaggaatgtgatgatctttccgatattgatgagcgatggtgcttggtgggtcgttttcttacaaaccgtacggttgattgtctagcaatgcaacataaaatggc

SEQ ID NO: 242509 - DNA, 808 bp, Cannabis indica
aagaggttttgtcaagtgacaaaaattatctttcgtaatgcatccggcaaaactctatctataaaagatgcattcaaaaataaaaggaatggtgaaggaaattaatcaatagtcaattaagaaaaatcaaagttttcttattaaataataaataatattatgtttggataaaacaatgtattgtattaattattacgatcaaaatttttaataaaatgtatgttgtattatttaaaacataataaatggtccgtattaacttgtattataatatttacaaacgattcggggtcaactccaatctccgatccggactcgaacctgaacccgaacccgggacccatacctagtctcggacccgcgactcgggcttagactctgacacgggaccagacccgggacccaaacccggaccgggacttggacctgagccgtagtcggtgttgggatagagtgtattgaaaatatatcataactttatacaatctattaatacaagtcgataccaaacatagtattgtattaaataatactaatacaatacaatataatacgataaaatataatgtggcgtacctaacgagcttttattgatgtactttaccaactcgcattaataaaggagatagtattttatggagtaatttgtggcataaatacctaagtttaactttcaattgtaaataaatacctaagtttaatttttggaggtaataatacttaagttatatttttggaactttataggttcctaaccgttaaatttaagccattaaatccacgtatcattttcttactgctatatatt

SEQ ID NO: 242510 - DNA, 643 bp, Cannabis indica
tttaacaaaacacagggtccaatctgtaatttttacaaaacacagggtccaaaatgatatttacccttatatattcaaccaaaataatagtattttatacttgtcaaatttacatataaagagagtggaaagagtttgaaaacttgattattcacattaataagttttttttttttttttttagaattgaaactcaaagaattaataatttgaggtattttaattttttatttataatacatatatttttcgattcatttcgcatttcatatgataatatatgtttcatatcatttatctaaatttttaacaaaagtgacaacaccgtaagtttgaatctcctatcatttgtgttgtctcttgcatccctagttcaactgaccaacaaaaatgaaacatttttcaatgttgcatagcctgtaactcatttgttatagatttgatagttttttttatagggtaaatactattttggatcctgtattatgtaaaaattatcggttgaactctctattttgttaataacaaaatagaccatgtattttctaaaatagtaaaaataggatcctgagcttaatttttgacaattttttttaatataaccaacttgaagacaatttctaacacgaacagatataaaaaa

SEQ ID NO: 242511 - DNA, 1216 bp, Cannabis indica
ctcaattgtgtagaacctgtgacaatttgtaaaaaaaaaataacattttagtgattatgttgaaagttgtaaaataaatattgtgtataataaatttattttgggtggatatgataactaagaaaactaatggccattgcatcttaataattttgtgctctatatcgtggttcccctgtatgtgataaaggcaagataattgtttttccgacttttgtacagtctgaatcacctcgatgaatagcatccattaaaccagagtaaaggtgagttcttaatttattttggtactttcgtacatagcgaaatctttcttcttcaattgccatgtaagaatcaactatgtattgttgcaatagtctacccgctcgaagtagggtgtgtccctcatttaatctttgttggaacctaaatgaatagtattgcaacattgtcaattgtttccttttggaagttgtttctgttacggctctgaaaggtatgtgaagtctgtatccatcttcaccataagggtgtatcaatggatatgtcatagacatgaagcttgggtgtaaatctgttattctttgaagtccattagttcgatgctctacaataacatcacgttcatagtttgcttcagtgaaatcacccactattaaccctgctacttcagaaactgttggcatattgtattgacgaccatcggtagtcctgctttgtaggagccgtaaacggaatgtagattatggttgttctttgtatctatccctcaccattctaaatgatttgaccaaattattattttggtctaacattttagataattcaacaactacttcatgatcaatttctgtctttctttcatggttcaacattgtgtttattctatttccgatctcattgtcagtatcatatatatagagttgagcaaattgtggtcttcttccatcttctggcaataatgaaccaatgtgatgataattttggcgttgatccggaaaacataagggccttttgattgattgattgacctatcaattcggcctcccattgatgtgaatgcaaacatcgagttgtaagtccttatgtttttcctaaatttgactcctttttgcccagagtcgtcttgaaggagatatttgagaaaagggggtgcttctttcaacaatggtatttgtacacgtccttccatacaacataatgagaatttaggatttcggatcttttgaaattt

SEQ ID NO: 242512 - DNA, 779 bp, Cannabis indica
ttaactgcttaccaaacacctttttgtcacagcttttttgaaaagcagcttttagcttttccaaaagctgtgccaaacgggccctaagacatatgacataattgattggaaattcttaaagcacttactcaaagctttttatttgccaactcagtttgttaattggataatagtttatgtccgaggctttatatacttgatagtaatgaatgagaagatccaggccaattttaaggtgctaaagttctcagacaaggggactgataggctacttttaggttcattttatgaaattttttagaggggtgttttagttgattatattcattttctgcagaattacactttgttctacttgtttcaagtttaaatggtaaaattcataatatgaattaaaaatgagaaaaaacatgctaaatgatatgtatttggtgaatttatcatgaaattaagagttctaagatataatgggtgaaaaaaattaagttttgaatgctcaacacgtttcgtttgtgatcaaaaattaagtccaaagcttcgagataatttttttactattatgcattcacttttacgaaaaatattatgtataaagttctagatccctctttcatctttccaaaacatcttgaatcgtccaattccgagaaatatttaaagagttatggccaaaatattatcattcgtcgcaccatgaagctcgcttcaaaaaatcaagtacccaggtcgcagcactgaaagggatatgccgcggcccgcctacttttagaggcctacta

SEQ ID NO: 242513 - DNA, 1646 bp, Cannabis indica
tcatgtggtgttagatactgtgatttctaattattgtatgtattcaaaaagtatagtacatttaaatcaaaccttatttatccaaaaaatatagtacattaggtctaattaatacgttatatgtgtgagtaatacttgagactcacgaagtataattagtcatccctgaaaagttgcatgatctcatttaagataaaattgtgtggtatacaataacatttgttatgggtgatgctagacccacttcattacatgttagctgtacacaacatattgataaactttcaacaatataatcttttccaagtggaattatgtaactttcaataggtgtttagtaaatttgcacaatttgtgtgtaaaacgtgtatcaatcattactctatatgatatgaggagcgttgtgtgcaatttctattacacacaaatgtatgcctctttcgtgtgtcccttctctctctccttgcaatttctattgttttaatatatttggtacctattttgtctctacttataattattttgagaatatttacaaccctagggtatgtttgggatgataaaagtggctccctaaaatacctatttagagcaactccaaagaggctcgactagtcgactccctattttttttagcttaaaagttgttttagatagtcattttgttagctaagtacagtaaaaaagtagttgtccaatattgtaaaatgattttaaaatatcgtcaaagataaaagatgattttgaataaaattcatgacaaacttccaagccccacctaatatagttatagacgtttaagattgacttgtttaactatcactcgtttttcttgtatacgaataattcaaatcactttccaaattatttagacataagaaagtcacctaatctaagttgggttcaaatccaagaaaaatcaagttaggtcttcttaacttcttgctagtaacttttgatataaaagatagcataccctaacaaactcattaccatttggctcaagtaacaacttgtatggtgaatacaagagagtcgtctaagctgtggtctgactcatttgctcacaccatacaagttactttatagtgtcaaattgtcattggttttaattaataaaatgtcaacttgatgccgaaatttactagcaataatatctaaaccaagtaagaaaacaatgtaaactgtgacttaaagttgagtaatattttatgaatctgttaaaatatttgatgtgccgatcaaagtatataatactttctatgcttgttctcatttttacattgttatagtcgtttttcaactgtcatgtcgtttttctgaaatcttatcttttgtttgcttgtaacaagattttaattttgctgtgttattgtgatgaagggtgaccaaagagaacagagctgcaggcattcttgacaacttcgaggagggtgagaagtattctcaacacatggtcagaaaatttgtgcgaaacaagtcatcccaaatcatgcccaacatcaacagtttcttctcagacccaaattaatgaagtcaaaacctcaccaattcctcaattgataattgataatgatatcacattgatattaaagacaaaacaattgtctttttcaaatcacattcatatactcgattattgttat

SEQ ID NO: 242514 - DNA, 917 bp, Cannabis indica
ttagggcacaaaacccagcaagagggacatgttgaacttctgcagatatcacaacgactttggccatgacactaatgagtgtcaaatttagaagagggagattgagtacctgataaggcataacaatccccacttatgtcgttttgtgcaagacgaccaggcctaggccttgtcttttcaaaccctccgaccaatctgtggtttctctcttgtatttatgggcccccatacttccatgcaaaaaaaattggatagagttaatgaagttgggtgatagatttggaggtccttggttgatccttggtgatgttaattttgtgctcaatgattctgaaagagtaaggtctaagggcaaagaccaatttgctccctttatttaagagcttgttttctctcgcggtcttattaattttcctatccaaggcaaaaagcttgcatggaataatcaccgagagggtgggactcatagtaaatcaattcttcacaagggtttggtcatgagtggtggttgaatcggttgttgaaggctactctgtgctcatactaggcttgtaattgggatcatagactgttgtgctctttttttaatggtttagatgtgaattttaaatggtgcttcagatttgaggaagggtggacccaagatgatcgtagtaaacttgttttagctcatgcttggtagactaccactcacccttgggctttgaccaaaattttcaagaaattggggctactagggtcaccctgctacactggaatagacttctatttgggaacattgataatactattagaactttggaaaataaccttaatcttttacaagctttgtcggtgggtaccagagatttgtttgaggagtgtgagattctaaacaccctgaataaagctttagaaaggaaagctctttattggaa

SEQ ID NO: 242515 - DNA, 639 bp, Cannabis indica
ataattatatataacactttaattaattaattaactattcccattatatagttccaagttccaacattggaaaagacaaatgcaaagaatgaatctataagaaattattagacttaatatgaaaaaggcatattcataattacatatataaatattatataattaatttggtgcatgcatagtccatagagctaggtaattaaaataaagattaatttatgatatatatgcatggatgagaaattcgaaaaaaaagtataaaaatatatatgagataattattgtattattaaaaaattagggtggctctaaaatagaagtgttatttttatattttattaattagttaaattaattatcaaaaatggttggattccgtttccatggttagggtttccccaaacattttgcttgtggggctcctaacacctcatcatgctgccttctcataattataacctaattaattaattactaatatcaacacattttagattttttttccttttcaaaaatattcttttattattaatatttcattgtactttttttttctataaatatatattgttaaaaaatatatatatgtgcatacattctaagcagaaggaactagggtgaatgatcatttgtctcccc

SEQ ID NO: 242516 - DNA, 952 bp, Cannabis indica
atatgtatcagtaattgttgcatcttttctagtgtctaatattaagtccaagtccaagtcattacagttagatatccaagtgtatggggggtgatagaagagaatttccaacaggttggctttaagagaaagctaattctaacaaaacatcacctttaattaattaattaatttttattttaatgaaaaagcatatactataaattgaaactgaggctaattaattagagtgtgcagcaaattctttgagcatatatggcaaaggatcaagtggccatacccaccttgaaggtattaaaccttaattaattaattagtcaagcttctttggttttaatttgatccactttcaatgtatatatatatacaatatattaataatgattaaaatcaaaaaactaattaagtttcaatattacttttgtctatgttgagaaggttgaattgaaggtcttcatccattgttgtgatgggtgcagaaggaagattaaaaaggttcttaggagtattgaaggtaattaattaacaatactaattttgtttctttaatttccaaaacaaattaataattgctaatttatgtgttaaattgtttattgcaggtgtatttggaatagaaattgacccaatgatgccaaaagtgacagtcacaggaaatgttgatccacaaatcttaataaaaaagctttgcaaagctggaaaacaagcacaagtaacaaagagtgagaaagtcaaagactttgatgatgatgatgatgaaaacaaaactagcaatattaatagtaatactaaaaataatgaaaagagtgttcctaattcaagtgagactactactaaaagtgttgttgttcccacttcttctatccacaaaacacaagccatgcctattaatatgcctaatttggttatagattcatctaatgaggttagaaaacataatatgatcattcct

SEQ ID NO: 242517 - DNA, 721 bp, Cannabis indica
caagtaaaatcttcaacccctttgcccagtgaatatgcatcactatttatagggctatgagcttgaagaggaagtatttcccttctcgttacaatggatataagcagaaagattgcatagtaaatacagaatacactgatcgtgggatttggacagcttgccatatttctgcaatacgatccccaagttatagggattctcttaatgactcacgatgcgaaagctgaattcgctaagtgtttggcgttctgtgcggattgctgattgcttttcctcgagcatgcatatgaggtatcctgttcggactatatcttgcgagcagatactcaaagttgattccacgtgtcaccatcgtgtgatgccacgttagagtgtaaaaattgaaataacaaacagtataatgatccatattatgtatcgccacaatatatcaatatgatccctgctatgatagttacacttcataatagggggatcattataatacattatatggcaaaataaattaatatgttgagccaaaatactatgatcatctttcacaaccacataatcaaggttaagaggttctggcgagcaataccattcaattttagtatcaagctcacccatatactcaaaattatgtgccttattcttaacaaactactcctgttgtaccatatagtgaaaattcatctactgctaagctaattgaaatgatagcagctaataacttgca

SEQ ID NO: 242518 - DNA, 1906 bp, Cannabis indica
tttttttttttttgtctaagaagcatcatggtttctactcggtgggtactgcatacaagctgatacaagcttgaatatgaaattggattgcagctgattattttgggttatggcgcaagctctggaatttgaaggtaccaccaaaagctctcaatttggtatggcgagaagcttcaaattgtttgcccaccttaactcaattaagtggtaagatggtcccagttcaaatcgtgttcaatttgtcaaagaggtgaggaaactatttttcatgcgcttatttcctattcattcattgctcaatgctggtagagacttttggcgggggataggccgattgttgctactgatttttgcagctgatttgattaaattttgcaaaggtgtagtatggacaagtgtggagaagttgttatgttgtgttgggggttatgggaggctcgaaacgatttgatttagaaccaaaagtatactacggtggatggtgttcttatctcatttatgacttatcttgttcaatggaagtcgacccaaaataaaggttcaaaggcttcttttttcagtttttgaagctggtgatggagctaaattttgggttaagccgcaagagaatacaatcaaggtaactgttgaagccgccattttccgtgatcgagttgtgtttggttatggcatagtcgctcgagactctcaaggggaattcgtgatggctaagtcgtgcagttttgttggtataagcgctccgaatttggctgaatcaattgatataaaagaagcgctacgctaaattaaaacttaaccatagcagaaaaatgtagccagagtcagatagtttggtagcagtataagttattcgaaattaattacttatgctttcttcttttggggttattataaaagattctcgtaaactttttgtatctttaaacaatgttttcttcttttttattaaataatttgctaacatgggtcctaatagttttgttatagcatcttgttctttttcaaatcaaacgttcaaccaaaacaatatttctattaatatacaatcttttcttttgattaatttaacaaattaataaaaattgtatatttacttttaaaaatataattatatatatcctaaatatattatataatagaataatagaatactcaatagtcaatattgttacaaatactacaaaaatacttgaatctgactaaaaggagcttgataacagtcatgatagaagtagcatgattgaatatgaattattcaagaactcaaaaatttaaatccttataataattaaaataaaaaaatattattactattacagtttcaaacaattttttatattatttttacaaaaatgcacataaaaacactataccaacccagtaacttaaatcacaactaaaatctatattacaactcacataaaaattaccagagtaactcaaactctaaatttgaaaaagaaaaacggcagcccatccccaacctgctccagacccccagtttttttttttttgccatccttacttggagaagcatcgtacgaaatatcagtttgaaacatagcttcaaaatcaataattccaggaatattattgtaagcgtctgtgcctagaggatggttcaattacgttctcttggttttaaatggttcttaattacatcttttgtgtgtgtaatttcattttccagggaatgtaatgtattgactattaaaagcaatatctatataaaagtagatgtaagaacttgaccaataaaatacgattggttatggctttgagaaaagaatcattaaaccaaaattcatatctagattaaaagcatagagagctaaggttccttcctcaaatggtaaatagaaaaaaaaaataaagattatcaggatattctataacagcccataac

SEQ ID NO: 242519 - DNA, 1521 bp, Cannabis indica
attctacctcttttaaaatattttttaaataactaattaattttttaaaaaagtacatttaattaattgttggcagaactgcttgactgatcttgctcccttatataaaaaaatactaatttcgcaaattaagatttcagtttgtcccaactcaatacatcatgtgaattttttatttcgaagcaatctcctacgtatcaaccacaaacccatttctctaatccaccagttttatcatgttattcccctttttctctggttctcaaatgtcgttccactcggccagacccaatgatattggatgccataaataacaacaaaacattattttccttgtctactttcttcaaagatctttttcatatactttgttcttttcccttcacatgatgtcatttttaggtccattcatttttaaataatatttccagcatgatcattatatcgtttatatataatacctgcattttttttatctaaaaatttcatacaaaaaagctaaaacatcaagttcacggtggagagtctagagaaagaggctccatctcctcaatcaatgctatttctcggtgatcatttcactatgtaattttgtcccacttgtttcaaatattttttttaaacacgataatgaaagagaaatggaaaaaaaaattaaacgcatctttaattttatagttattattagatttcaaactttttttatttaatatttttcggttgaattcaacaagaaattcagtactctaaataacaactttacatcctaataacattttcaatccgaaaacctaaagtatcaccatctatacagtatattgattattttaaaataatctccctatttgtttttccctttgtttgcttttcccttacaacttttttataatttttacaattaatgttgcaaaccaattcttgtctactacactaaaatttttaggccaaacatagctaattcttcttttaacttcctctttgatcttacacacccgttgatcttcctttcttacagtcgaatttcaaagtatcatttctaacatgccaaatataatacatgtccaacgctgcaatagcagcagataaaacttactaatttttgcctgtacaatccacctcatgagtttgcataatgagcttgatttagctccccaacatagccatcatttcaccagttttagacaaaccagagagaaggaacaattgaagaatagatgctccattgtttctaggtgtgacctcctcatcgataatgttgtgtttctgcagtctctcctttgttcgtaacttgtcttgaatagttatccacgagacgaaggtcttagtctaccccatatttcttgactctaattgaccttattttgaatagtttttatttaatttttaaattaattgaaaaaataactaaacaacttgaactagtctcaaactgacatactgatttagcatttaaagtatttaaaatagaattgagtgtagcattatctctaattagaggccattcttattctttttattaat

SEQ ID NO: 242520 - DNA, 1023 bp, Cannabis indica
ttgtattatgtggaaattaatttcatatggtagctacatttctcaaaatatctttgcctataggttttgtatataacaatatatatatacgactacgtcttgtagtttatatatcggaatcatttgacattgggaattatattgaaacatgtaatggtgaagtacaataaatatatactatagaaagcaaaagtgccttcaatttaattaatattacaaatatttgtagtactttattaatattacatagaaagagagaccaaaaaaatgtatcgatgttgtccatatatatatttatatataaatatagttgatgttgatgagtggaagggatagggctaaacatgtactgttacagaaaaaatctgatcaacatagctacctttagagactaataaatataccgcacacaatacataattatattatatatagagtaccaaatttataatacacacaaaagcttttttaaggggggcttcccgttttccttcacaggttaagattactattatcttatcccttttgttaccctaactgaagctctttatagaggactatagaaattaaagacggtctagctagaaagaggaagtgtacaaatctaggtaagagagagaaaagagagatgggaagagggagagtagagctgaagagaatagagaacaaaattaacaggcaggtcacatttgccaagagaagaaatgggcttctcaagaaagcttatgagctctctgttctctgtgaggctgaggttgccgttattattttctccaaccgtgggaagctttatgagttctgtagcggctccaggtatatgtattattattatatatatatgtatacatcataatctcttcctattaattaaacctaccctttctctatagatctccatatataaatatatatacatggtgtttgtatatatatattatatatatataagttatttatcctttttattcaagatctatgttttcttcaacttcaaattgatttttttgtttataattaagtaag

SEQ ID NO: 242521 - DNA, 2113 bp, Cannabis indica
catggtctttgaaaagtgtatcaaacacacaccaagggaagggcagcctgcagtcagttaatgggaatgtagaaaaatctaaacaaaaatgagaagattgaggtcaaattttctagaatagtttaaattaattttcctagaagtatcctacacattgggatacataacaagttaaaaatccaataccatgtaaaatatttgaaaatcctcaacgttttctatttacttagaaatgttctcatggcatatcatatttaacaccctccttaattttatacagaccacaagtctctttgtctacaagggaataatagacaacacagctcatgaatcatatgtgaccataacttgacctctggatagggtgagcttgtgcattgtaagtgagtgagtgagtgattaattttacatttccatcccttatttatagatacctttcctttgtcagtagcaataaattttaagcaaggaacaagccatcaaaacactcaactttcactaccaaaaaatgaaatgctttcaaataacatgttttgataaacaactagaattacaaataattacctaaataattaatactcccacggggacattacagcaggaaacaacttataacaaaaagtcatcacaatacaaatatcaaatgcagagtaacacatcaaccagataagcaactcaaatcaaatttcctatcttttcttaagaaaccatctaaattactctactaagaaatcatcatcactcaaccactaatcaaatcctgaaatccaggaaaggtcaatcgaagtcttgttatgtattattacgttactggaaatgtctaactaaattatgtttctcacattgtgattttgcagaatcctcaagaataaatctcacaataacaatatacaattaaataaaggtaaaaaatgaaaacataccatttggaatgtctttgagctgagtaccacgaccctgaaatttgaaaaataaaacatatatgcatttaaaattggaaatttaacatacaaccccaaaaaaagaccagaatttgtaagtgttattaccttctcaattgataaacctttgctcgacgaagacctggcaacagtaggtgcagaataccgttcaacgatcttcctctcccgagtcggtctatcactactgggcgtaacaggctccttcttcgactcactcagctcatccttcaccttcgagctcgtctttcgacttttcttacctttctcttcactctcctcaccttgtttctcttctccatcacttccttcctcgtcttccttttcctcatcctcctcacttcctccttcatcttctttctcctcttcctcgtcctcctcttcacttccttcactttccttctcctttggtttttcctcctccgaacccttcttcttcacctccttctcctcttctttagcttcaactttattgtcctccttatcttcctcaacaggaacttcctcctcaggcttcttcttcacctcctcaagggtttccgaagccataactaaatcaaacaaaattacacctcaaaacaaacagtcggaaacaaatccaaaaccctaagatttggagtcaggaaggaaagaacaggaaaaccccaaaagaaagggaaaaaggatttgaatttggaatattgttgtagcagaagtatgagtagtaagaagaagaagaatgaaaaattagggatttgtgaaatttgggggaaaaattttggagctttattttgttgtgttttcaattttgaggtttgttttttttagtgcgcgcgggcttggatttggatttggtgggcgtttcaaaattttcacgcgaattttttttttttgggtgagcgcgcttagtctcagtctctcttttgccccttttttttcgtctcaatggttagttttttttttttttcatattatatttattttctctctgtaattattattattattattattattattaaaataaatacagaaatgaaaagttattattgtgcattaaaatttaaaacaacggagatctgcatattgcaagaaaagaaaaaaattggagatttgcatgaacatgggaagctagtttgccacgtgttcatattgattggtagttggatggattt

SEQ ID NO: 242522 - DNA, 1104 bp, Cannabis indica
aaaacgcatcaatatcaaagagtaagacacccgcatggtcaagctatataaaaaaagaaaaactacattactttacaacgaaaaagggggcagaacaaaccctcttttccctggccaagtaaacatggccaaactttcctcgcccaagaggcttcccaatgtcgaaatcgttcaaagtccatctttttttctctccagcagacacctccgtagatgtctgtacaaacaaaagcaaattagatactctaagatgttgaatattgcacgaaaaatctcgaaaatttcaatttctgataatcaaacatgtaaaatggagacgatggcaaaactcatcagacaaggaaacacaaatcatcaagtataatattatttttctgcaaaccaaatatatatacaatttatatatattcgaagataaagaaaccttcagatattaataaataccccaaaaaaattcaaaatcaaagaaaacctagaacttgaattggggaatcgaagagccctaaagaaaacagataaacatctaaggtctctgttattcaactttaccttctctggaggttgattctccgcagaaatgcccatgagaggttaactggtctgggagagagagagagaaagagagagagagagagagaggagagagagagagagagagatgaatttggagcttgatgcggacgatggaagaagagaacggtcaaacgagagctatgaatcaatactgcccaacggtcgaattgctatgtgtcgccacgtggcagagaaagccgctctaaaataatttgaaaatgttggatctgataacttgatgcttgccagccaacatcttaatcctcacaagaattttattacactagaattttaaattttaatttaggtataaatatttaagtttaattttttgcggtaaatttaatttaatgcatgtatctgacagttaagtgctaagtaaattgtcacgtgacaaaatttgattagtccaattcattaattttgattttttgaaaaaaaaaaataatttaaatatactaataagaaaatgatatgttgataatgacttaatgtttaacgtacctacaagttccaaaaatataacttaag

SEQ ID NO: 242523 - DNA, 727 bp, Cannabis indica
aaaaaaaaaaataacaataaaaatgactaaaataaaaatatcaatttataaaaatagttatattgtatattctaaaattgaaacattaagaaacataacgataaataaattgttggaatttttgttttcaccaacacactttaaataaacaattaatataatagtacaaaagtgatatttcaaaatttattattttatttgtccagaaaataattggtattattaaaaataacacttttgtactattgtattaattgtttctttaaagtgtgttggtgaaaacaaaaatttcaacagtggtatcagagccaaataatttctgcaaagattcaaattaatgaagaatttgatcttcaagaacacaaggatgacaatcaagaggatgaattagatattggagatttggaggacattctaatccttttatctaatttgattttttttttaacaaaaacaatatgagtagtcttaaagttgatattgataagtttgatggatcaggtgactacagaatatggaggaggaaaataagatctctactggcacaacagaagttgttgagggtccttgaagaacccattgaatggcctgaaggaacaactaagatacaacaagaagagtatcttgaaacagctactgggattatcatattcaacctaagtgatgcaatcattaggttggttgataaagaagaaactccagcaaagatatggaggaagttggaagt

SEQ ID NO: 242524 - DNA, 2951 bp, Cannabis indica
ctcaaccacagcaacctgtaaacgatttttttttattataactctaacctactatttgatctccaaatgcattgaacagattcaagaaattcacagctaatacttcctaatttttctttttacctgaaacttgtgtcctgaagaagttgatggcaaacattgtaaagcagcttctgatagcggattcccaagattaccccccacgaatgcctcgatgcccagttgtctaagcatctggctttaaataataaactaaatatgaaatgctgaagaccaacatacttttaaatcataccagaatgtgcatagacatgtaaactaaagaaattgttcaagaaattccagtcaacaacctttgccacaaaatacttaaaacattaacaatgtagcttcgagaaaggctaatatcttaactgttagtctgattttctggctaaaattcctactcttacaatgcaaaagttactcgaaaacatataaaattcgaagaaaacttcacaacctgtccagcaaacgtaacaacagtcgactttccattggttcccgtcactgctaaaaccttaatactctttggtagaatttctgcagcaaaatccaactcagacattacctgttttccctacatttccaaattttcacagcaatataaggttttcaagaatttcaaatttgaattattttacaagcatgatatcactgtcaacaacaactaataaaagaaaagctttttattttttgttctagatttcaaatattgacttactgaatgccataaagagttaagaccataattttcaagatgaactccaggggaaacaaccaccctgtcagcactattaagtaggtctccatcaaaatttccaagaactgttcttaaatcaccactatgcttctcaaaatgaggatcttcctgtaattaatttcacaattttgaaattttataagtacatataatccaatcaaattgttgaagcatcataggtatattatacatacctctaacaaacccaaattttgattatggtcaattgccacaacagaagctcctctagctaaagcaagcttcactgcagctttcccagattttcccaaaccaataacctgaaaaataaaatcacatgaaacaaaataacaaaaccatttggaaaaatgaacatgattaaaagaaaaatacccagaatcaaaaaataagatcttacggcaatggattggccttgaaggtcctgagatgaaacgcaggctctaatggaccttggaagaaacccatttggagagtgagtgggtttgagtctgagaattggggtttgagatccactgtggagtgagtttagcttcattttgtcacgctatatcactaactggttcttcatttgaaattgaagttatatacaagaagatatatatatatatatatatacgaatttacacaaaagaaatctggaaaattgattttggtaccgttttaattgtgtaataaattgccctttatttattttcttttaaaaataaaattggaatgttgtaccactaccatgaaactcaatgactttgattatttggattctgttgggattttcatcattggtttgaaagacacctgttaaatatgtcaactccactttcagattttcagtacgttacttactgtggctacttccgtaagtcaacggtcaacctcttctgttctctggataaacaaaaataatagcaagtgaagggactattatcaaaaataaaatacaaatgggtacttaattgcaaatttacttgtttgttttgatacgaggagttcatgttcatgcattttgttttaaacttttttttttttcttctttctttctatttctatatatgtatggttttgatctctttctttaatgcatattggtaattatcttcagcccaaatcatatctatataaagttattttttacatttaagattgaagaggaaagtagtactggaaaattttgtagtgcaacgtacagatatactggatcggcatgatcctaattgagactctgaattattattattattctattattattattatttattattattattttatttatggtgtttattgcaattatgcttttacaatatttgtaaaatctaaactattttaaactttaatttgaacattgtaagttacttaaaaataattattttttttttattaaataaatatgaaaataataggaaaacatatgccaactttcaaatctaaaataaaaataccttttttgttttcttgaagtatatttgaaattaattaaaatatatcctaagtaatatataccatactataatttaaaaatcaagccatatattaagagataattcattacgttttgtgggatgtggcatgataagagaatcgagttaagaaaatggtattaaaggtagttattaatctcgaaaattaatattgctaactttcgagattagttaaccgacaatgagaagattaacaagaacaaaagagtcactccgaatgagtagcgatgcatggtccctcgcatggtcaccaccatgcaagccattcggtatgcatgctcaaaactcactcggcatgcatgcatgctcaagagtcactcggcatgtatgctaaaagtcactcgacaccacacttcacaagtcactcgacatgcattttcacaaatttcactcgacatgtattttcaaaaagtcactcagcatgcatgctcgagtgtccctcaacaagcctcactcacaaatcactcggcaagcctcactcataatacactcgacaagcttcccttgatcacaagtcactcgacaccaaacttcacaagtcactcgacatgaattttcacaaatgtcactcgacatgcatcttccaaatgtcacttaacatgcattttccaaatgtccctcgaccatgcatgtccaatgtcacttagccatgcatgctcaatgtcact

SEQ ID NO: 242525 - DNA, 884 bp, Cannabis indica
cttttttaagtttttctttctctcttgtagttggtttgaggtgaggactgaggagtccgttggtgtcatttcggacggatttgtgttgacttttgatggtgctggtgttgatgtctttggcctagtgtcgcgctgctccttcagttactatcttgttttctgatagtcattaattcttattagaaagtcataccatatgaagatgattttcttaatgcagagcttggttccaattctagctttgtttggcgaagcatttggggtgctcaaaagataatcaagcttggtgccagttgacgattaagtcgcgtactaccactaccattttgaatcatccgtggcttcctaataaaaaccagccgtatgttacaacaaacaatcctggtttgataaactagcttgtctcttctcttttctctgttgaatcgggcagctgggattatgacttggtttgtgacatgttcaatcctcgcgatgcaagcctcatcctcggccttccattacgctccacagatgaagatgattgctggttatggactggtgaaactaacggtagcttcatagtcagcagtgcctacaaactgctgcaacaaatcaaagaactcgaccattctgccaataacttcaggttctcgaaaaacttgtggcagctgaagataccgcctaaagtgaagaacatgttgtggcgaatcttaaataattgccttcctacttgcctcaacttagttaccaagcatgtaaatgttcccattctctgtcccatgtgcctttcacaaccagaaaatacaacacatgcacttttatattgtgcgtgctcttgctgctgagtgttggaatcggcttggtattaaccgcccaactccaacaacaacttttgcctcttg

SEQ ID NO: 242526 - DNA, 418 bp, Cannabis indica
ctaagcggtctttacattatatgtactatgtgagctatttggactaaaaggaacaaagtctaccacgaaaataagggtcgagatggatctaacattgctccttatgctaacacgtatttagagaactatattgcagcaaaaactcaccaactaaatcctgctgaattcaccacttctagtgtccgtacatcagaacaacctactgctactgccagtttcaatagaaagacaaagaaggttctatggaagccacctgacccctttcatttaaagatgaatgttgatgtggcggtgaacactgagacaatggtgctgagcgttggagcaatagtatgtgatcactttggataagttatagttgccttatcaaagttcatcaaggtttcttcagagtgatgagatggaagcaaagctcttt

SEQ ID NO: 242527 - DNA, 726 bp, Cannabis indica
tgacggctatcatacatcacggattacaatccgtgaaagtacaataacatgacaaaatcctaagaatatattcttagaaaagtaataggcccgatggatatacaaagagaacaattttattaggtatgatattatataaaaaatagtaaaaattacccaaaatatgagaaaattttaaaagtttacttttttattgcataaataaataaagttaagtggttatggattttttattttgtttttcttacatttatatggtttttttatgccatatttttgtataaaaagtagaaatctcatattttaaaacaagaataagttttgccggaaaatttgctggcaccggaaaagtcgccaaaaaagttaccggcaccgaaaaagtcgtcaggaagattacggtcgccagaaaagtcgtcgaaaagtcaccgaaagtcaacagaaaagtcaacgtcaccggaaaagtcaacgaaaaaatcaacgttgctggaaaagtaaccaaagtaaatgtctcatatataactaaaaatataaccggttatatgaataaaaactaataactgaaaccggttataattgaaatataaccggttctgtaacataataaataaatataaataacataaaataactcaaaccagttataattaaaatagaatcggtttcataacagtgttataatgaataaaaataaataacacgaaagaactcaaactggttataactaaa

SEQ ID NO: 242528 - DNA, 538 bp, Cannabis indica
gaatctgcaaaattcagaatgtaaaacaattacataaaaaatgaggctttgatgttgaattgtactgaagattattttactatcaaatgacagacttaatcttagaagttatctaaccagcgcagctgattgcaattgcttcctcataagcaaaacctccaaaagcaaatgagggtgttcatgcaaggaagaacatctctgctgccaaggcaatggcaaggcagccagaacacgtagacccaatgcccatgagttcagccgggaaacctcagtatcagagagatttccttctcttcgcttcagaaagaagtgaaccttcgaaaagtaggagagcaatgtttaagaaacatgataaatcaaacttaaactgaacgttaatcattcagaaaaatgaaattaccaaaacagaattacttacaagaagttgctttgaccgcaaattaggtaacagctgcattgcacccattgcaaccggcaaagcatcatctgagtcacgtaatgaagaaagaaagcgtgaagcttctgctggacctccacc

SEQ ID NO: 242529 - DNA, 1129 bp, Cannabis indica
taatttataattttttttatatttttttatgtagttaaatttttttattttaagctttacattaatttttcttaattttatcaaaattttaggttgattggatttttttttttattgttgttaatatatagcccaattgttagtgattgtggactttttagttaactgaaagactttgaagaacagacctactccaactaaaattatatatctaactctcttctctaactctatagatatatattatcttattacagttgtatacttttgataatcaaatagaaattaaaaatgcttctgatttagagatctagaaatgaagacttagttgatagtattgtgctatcaaattaaggtaattgctatggactaatcaggaatatatccctaattcttatacattattattgtgttatatattatatacaaattgtatcttgggttatttaattttctaatatgtggaatcagattgctaattgtatatgatttaggacctataatttatataacaattgatattgtatctaattacatattacttttgtaattattatatgttaaaaaatttcaatttttaatcttaaactataggagttttattcttcatgaaattctctttcttttgatatattatttatataaaattgttgattatttaatttgtgagaattttaagtttaaagtttaaagtttgtgtgagattatattatgacatttattttgagttttttaattttactgattataaactaaaattaattgtgcatatatcattaactattactatcattaactattactgtacaatgtttctacatatttaattttaaaattggatgagatatatattataatccgtttaaactttgttttttcaatttcgaatttcatgatcaattagatcaactctataagtttaagcattttacacaaaagtgatcgcataagtctctttgaaatttcattccgaccaaaacccatgatcttatacatattttttttgaaaggatgatcctatacatattgtctcatcacaattgtatatttttataagcaaatagaaattaaaactacttttgatttagacaactaggaagaaagacttaattgatagtattgcactatc

SEQ ID NO: 242530 - DNA, 792 bp, Cannabis indica
agaaaagctctttctgacattggaaacacaactgtatgcttctctttaaaccaaatataaagtttgattttctcttaattagacaaacactaagttttgagtatggtttcctgactaatattacaggcaaaaccaaatgtaccaaagcctaacaagagaaagaaatggaggacatcttcgatacaacttgttaccaatcctccactaccttcatctcagccagaaagtggtgaacaaccaccgcaaccacaaccacaactgcaatctcagaagttagataacattgcaaatggggctgacattcctataaaattaccgagggcaatgcggtctgtcaccacgtctaatggtgggaatttattcaaagagaggaatgctgagaaaacagatgaattaagtgtctacaaagagacagctggggctctggctcctcccagaagtcctattaggcaaaacaggacatcagatgaaaaggagaacattggccattaaatcactcatcgctcatggcattggtagcattgattgatctaaatttcttattttatcatattctccaatgtttcattgttgtaacacttctcttattggattgaacaaatgagtgaagatgctttgtgtcgtgtcagtcatgtcattttttttcattgaacaatgaagttatgtatgttttaagttaaaacaaccacatgaacttcagctttgttattttttttttcatgtgtatcatgtgaaaagtgttgtgtaaaagctgttgtaggatatttcttttgttctttcttttttatgttt

SEQ ID NO: 242531 - DNA, 583 bp, Cannabis indica
aagtatacactatgaagattttcttagcaattttcattctattaattctttcatttacttcatattctgaaagtagtaatagtaatagcattactactacttttaccattgatgaatttattgatttaaaacgcatcaatttacaattcccatactgaggtatatatactttaaattatttcatgatcttcatatttatatatttacttattttactatatacataatttaattatatatatgtgtgcaggcatttacaaaagcatgggaaaaatcatgctcaacacaaggaaaagtaatacttcaaagttcctaaaagattatactatgttaagccaattaaattgcaaggaccttgcaaatttaatcatttaatatttgacattagtggaaccataattacctctaaatctaattataatgaccataatagtaattatggtcttacatttgagaatgttgataatttaatagttcaaggtggtggaaccatagatggctatggtcttgatttttggtggagtccatgcaaattttacaaattcaaagtgagtaaatatttattactaatattatataaatt

SEQ ID NO: 242532 - DNA, 1230 bp, Cannabis indica
aaatgagacttgggagtgggttgaccttaaggaggtaacaattgtgttttaaaatcttggttcctgaagaatgtttcaagatacaagtatgatgggttttttatattatagacgatttgttccaaaacataatagaactaaccaatttaggttaatgatctggcttctgatacgtccatattaaagatgattgggggtgtgcggttctgtaaatgctatgaaataattttgtagttagtctgtgaatattgcaatgaaagtgttggtttgacctggcaattttgtggttacaacttacaagaattcttaacaaggttgttgaatagtaaaccaatataaaactttaatatgaaagataattcattttttcaccatgtttaaaaataaatacaaatttgatgagcatattacttttttttttttaattggagagtctcagagtatcaaatcctgggttttttttaatgtgttgtgattctcgaatatttagcatcaaatatcaattcaaatattaatggaatttgttttattattattttattatatataaataatattttattaaataaaaattaaaagtcacccataaatttctcaaaaactaagaattttagttatatagacacactttatatagaatagatataaactagtttaacaattgaaaggaaagaaatattggtaataagtggtaattttaattaaatatatattgtaattaacttattaaaatacatttatatgtatttttaatttatttttttaggagaaactgccaaccctaattctctgtcaatctgcttgtagtttttcacctagtagcttgttgaattaagattacttgtaaaaaattagtgtcacgtattaaaccaagactagtgagctaattcaattaactactttttttaaatactattcatcatgtagataatattcttttttcttaaaatcctctcaaataaactaatgctttatatttagattggtttaatacactatgatatatcattttttaactgaagatctttattcgtagcttaataagtatcataagaaatgctgaaaagctcgaatatttttcacaatcttatatttatattaatataatagtattaaatttcatataatttatatgaaatataataactaatggcaatggcaagatgctattctttaggtggtgatgagcaaagctaattatgcttaataacaatgttcctataggtagta

SEQ ID NO: 242533 - DNA, 1628 bp, Cannabis indica
acagcagggacactcaagaggtatttacaccccgataaccatgtcatctgttattacttttttgtctttcgcgaaatttttacctaactgttgtggatttgcttaggtcaagctggagccagggcttaaactgatcaagatattcaaggagcactcgagcaagacttgtatcctcgacgattttggcttttacgagactcgccagaagactattcaggagaagaaagctaagcaacagcaatttcagaaacaggtaactaaattgttttgttgcctatgaacatcatgattgtacttttttttctattgcttgtgttattcaaatttgtataatgaaaacaggtgtgggaaggaaagccggtcgatgagaagaaggaagtagtggcaaatggagagttgaacccaaaaccgtctgaggttgtttcatcagaggtcacaaaggatgctttgccaaccaccgcagcagctcaagctggcaacagtgttaaggtttccgagaatggttctgctaccacaaccatggatgccccaaagggtgccaagccagtagttgtggctgacaagagaaatgttgcaaacggggttgctaatggttgctaatctctgcgaaatgcaagatggcggtcctcgctctccattgaatagttttgttaccaaaaaaaagataaaaaaaatcagaaaggtgtttgcttgctgctgaatatacttaaaagggcaaactttctggcaaaagtaaattctgggtatttctgggactgccattagtatcaaaatccgaaagctttcggtcctgcttatggagagagagtcaataattcattgagagaggaagaagatgaagaagaagattcaatctagggcaatgttggtgagaggtgtctcatgtagaatttggagtttttttttctttttaatattttgctactacagtggggtttagaatcacctaacaaggttttgagattgctagggtttttggggggtgttagggttttctggtttttctttttttttagttgggttttattattatgagataatttcttgtcttttttttatgggtttattttttttttggttggcttatattttcccagtcttgtaaatctttgcagaggtcagcttttgattttcttgtcttgtaagaaagagaaagagagagaactagaaaaaatcaaggtgggaaatatataattacaatattaattaatattataatagtcaaaagcagcttatatatctataaatatttttatgaatttctgtttttttgttgtgctttttatttttgcttaatttgaattttcataggtataatgaatggaaagaagaaaatgtatgaatatgttaatgtgtttgatagacttgtctttccttaaacaagcgttttccctttattaatatttattttacacctctaattgtatataaataatgagtatttaataaattaaattggtatgaattaacaatgtccatttaagcattattgctaatgtttacaaagttgaggaaagtgctttcaaaaaaataaaaaaatgaaaaaattgaggagataaaataaaaatggtagaaacttacacaagtgttatgttgatatttcttgaatcaagagtaatatctaatat

SEQ ID NO: 242534 - DNA, 1077 bp, Cannabis indica
aaatataatatttattcaattataaaaacgctgtttgttgttagttggttgttttattataattttttttattttttgaaaaaggttatcaattttttccatgagaaacttaatgatttatttgatggattttattttacaaaaatgtaataattcttcctaaaaaaactccttaataccaaactagtttttttttttgaataattacataaggcactattttttgtaaaatagttatatttttatgttcaaagaatgttttttttacatttttacagttttctaaaaaaataatacgaaaataacataaaatcaacaagaaaactacataaaaataacatgaaaataacaacaaaaaataacatacagataacaaaaaatcaacaacaaattaacaagattacaacataaaaagaccgtattttctgtaaataaaattaaaaaaatcataaaaatatttaaaattccgtgaaaccgtatttgtgtaacttttttgttgtttttatgtttttgtaaaataatcccattctttttttttttcctttgacaaagaaattatattccatttttatgggcttggaaatatgagtgttttaaatgtgattttggcaaagtccataaaagatggtgaaatgggtcaggctttagggctttaaatcattttaatgggaaaatggagaaaaaagtggcccacttgtttgcatattcaaaattttacccattattagtccattacttcaactcaactaaaatctatgccttggttaaattaatgaaaaattatgcaaattttcttctctagttgaggaagtaatcatttcaacatatcatattagatgttgactatgaatgaaaaataaattgatttttaaattgaggaaattataccatataccctttttatattgtcttcttaccttttaaaatctatgccttggttaaattaatgaaaattatgcaaattttcttctctagttgaggaagttatcatttcaacatatcatattagatgttgactatgaatgaaaaataaattgatttttaaattgaggaaattacaccctataccctttttat

SEQ ID NO: 242535 - DNA, 615 bp, Cannabis indica
aaaaataaaaaaaaaatcgaattcataaagcttgttaaaaaatttggctagtgggagtgtttcgggataagaatgtgaataataataaaaaaaaaagtgatggagatattgttatgaatatactgttaactgctttaaaaatgagctcaaagtgattgtgtgaattggtcattcgcaaatgaagttgcatagattttaagtggagatgactaaataaacaattaattaaccacactgattacaacgttgcaataaaccttacaaaacgaccaaagccaacaccacataaaacctaggatacaaccattattacaaagaaaaaccaaataaaactaaagatacacacattaacgagtttcccccaatcacaaccagaaatttaagaaagccttaacaataaccagaaacattatgaacttggaccaaaaaacaaaactactaaaacgtgacaataaaagcctatacgatttcccaaatggttcaaaaatggtgaaggagcatcaacaacaaaaataagacaagggctttcaatttttgagaaagttggtgttaagaaagccttttgcttgagtttgattttcttgttcttgacctttttttgtttgaagtgtaaaa

SEQ ID NO: 242536 - DNA, 837 bp, Cannabis indica
aaatttttgacatatttagaaaattttaacaggccgaaaataggatttaaagagttctattgcatgtgtgattttttttattttatacgcatatgaaatagacggtttgaacatacaattctatattgtaaattattctgaatttcttaaaattttacaaaatgttttcgtacatgactatgaacaaaatttgaactaagaattttttttagatacccgaacagttaaagcatttattttagtggggtttactgtagaagcaacttataatgtatctatatatatatataattgcctaatatttgatctgatctccgggagagtgaaattgggaagatgaaaaatgattaccatgtgtttgaacattttcaagggatgattagtttgcagagcagaggaaatttcatgtggagtattaagtttatttttaatgatcttattatggattttgaggttctactccttacaatcgttatactatgttaactttttcaaaattttcatatacatataatttcccaatatttgatctgatctcctgtagattaaaatgggaacctcttttcctttttaaattgattgccgtgtgtttgaattttttcaatgaatgattagagtttgcagagcagaggaaatttgatgtggagtttactttatgctggaaagatcatttggagttttgctaaagcaattatgaatcttattatatggttactaagaggccacagtgaagagagtggatcatcaggagtataattgctgttatcatttctggggggattgttttttgttggtttattgaattactgattgaattggattctgttcctaatttta

SEQ ID NO: 242537 - DNA, 672 bp, Cannabis indica
tgagtattcacatatttattttcgggtgttgaaatgatctttgaatattcgaatagttttagtattgtttaaattcctccgagaacagcctcatttcattactatcagtttaacttaaatacttctggtaagtattatagaaatattgttttactttgggatggttaaacttcacccacaaatctttgttcgaaaattatgagtaacattactggtatatctctcaataaataatattattataatgtgaaatgtttcggtgccaccatattcagttaccgaaactatgattatcgcatgtaaaattctagctgatgtcagaaatttatatcgtatgccagttattaacattatatattaatttatttctacatgacgggctctcacccaggcctacatctagaacttatataaattatagaaaatttgcagtaaaagtctctaaaaagttcactatgatgtacattagtccacaacttcgaaaaatagcggtgatagtcctcaaagtcacattttttgtaggtccgttagtcctaaatttaacggatccgttaaattattcatatctggcacgtgttgagccattattggtccaaataataattttaatgaaaaataattaaaaattaaaaaactaaaaaattaaaaaaatattttaatttttttcttttt

SEQ ID NO: 242538 - DNA, 792 bp, Cannabis indica
gaagacccagtaggattttatggttcttggccatcttaggggtgggggtttgtcttttggaaatcgttgtcaacataacaagcataataagtaagggacctcaaagcgattaatatgaaaacaactcaaaacagagtttttgagataaaagttacttacgtataatgcaaaatgcagtcgtgttaattggagaaagactagttgtgtagaagaaatcctccttaaactcagtcttatttggtaaccttgcaatgatcctatggccattcgtgtgggtaccaaggtaataaaaccccctgaacattgcttccttgcgggaactgctttaacggagtagatataagctatttcaaggggagtgggacactcccagcctaaaatattgtacaaaactttaaggctagccagaattctgtaagaacttggaatcaactaaaagggggcaattgcaagataattacaaaattctttgaagtactttctcagggggagaattactccaaccctgatgtgctcgaggctccaagaacctatccaagacgagctactagtactggcctcaccacattcctcacgaataactcgttctggtagaaagcaactgaattctccaggagcaaaagatctaatgcggcatctcgtctctgcgtaatgccacaagtttttaatacacctccaacataatctccgatggcccgtactttagatttaatgagctcggcttcaaaagtcacagtggtgtcctgtgggatcttttatttacacctccaacataatccactagtggaaatg

SEQ ID NO: 242539 - DNA, 482 bp, Cannabis indica
ttgaaataaagttttatttagggcacaaagcccaacactgaccagggcggacagtgaactgtccttggagcttgtcttgagaggagttctgaaggaaatctctcaagtaacttcccgctatcacttttctttttatttttctttgggtagttcagaatttaatgcattctccgtacaggctggtgtgaagatggctaatgtgtactctcgagccaaatcgaccgttgtcaagaaccttgccacttttaacacgatgcgaagggacgtggacttggccaagaaagatgctgaggatgtggggactcagctcgaggtcgtaagaggaacttggagaagcaaacaagaaactccttgctgttgagaccagggttgtcgagctgaccaatgagctgcaggatgcgccatcgaccgctcagcttgaagcgaacaatgtttctttatcccaggagaatatcagtctcaaagatgagagagagagagag

SEQ ID NO: 242540 - DNA, 1216 bp, Cannabis indica
atgatgtgtgaatgctggtacatagtattttgtttttccttactgggctttgcagctcaccccttatttaccccctatgtgcagataagtaagcctgtaagctttcggtgacaagttgagtctgggcagcatggggtgtatctcgtgtgatcatgtaatgtaataaccaaaatattttagtattattttctattatgttaatatagttatctcgaggtggagttagtaatttcatagaataagttaatttttttcaatttattaaaaagtggtatttacaaaaaaaaaaaaataaaaatttacaagcttggatagttttagaaataaaagtgttatgaatggtagtaataatttaaattaagttacggtattataatagttagaagtataagattggatgacattgttatataataaatcataataatagtagtaatggtaatatagtaccacatatgatgaatttagtagtaagttagaaattgtagaagctattaaagttttggacgtgtatgcatggaattaattagatttaactcaaatttttaaattttaaaaggacctagagtggagcacgtggagagcaatgtgagttatctctcaaaatttaaagagaagtcttatagtggaggtttgaacaagatatgagcttgaatatttaaaataatctaatctggcattttcggttgccatagaggatttagtggaggaagttgaaatgtttacataagtaaatttagtctagatacgtgaaaacaaaatgagagagttaatagcttcggaatctttcttaaccgtagtcatgatatcaaggtgaaggagtgccaagtattattcttccattcagttatttaattcaaattttaaaatttgcctttagttagaaggggtgtcatgggtaggttaagtaaataaggtatgattaaatcaagcctataaatagagcctaaggtatttatttctgcacacacgctcaaaaggccaaagtatagctgtcaaccacactatatctctcagtctctcacccttaatgctctagccaaagtcaccatatccatttctcttattcatattcattaaagaaccgagccaacattgatatttcattattttcttcttgtcatctttcacgcaaccatatattaccttgcaccatctttagtttccaaatcaccatcatattcttataataactatagccacacgccatcttttg

SEQ ID NO: 242541 - DNA, 959 bp, Cannabis indica
catcagcagccatggttctcaagtaagtctctatttctctgtggctatttggatctgatatcagattattcagcttatattctccgaaatgtcctaaatttaagttgatgctttgcatttcataattttattcaagtattgcttctatcgattttgtcatggtattgtggtggagaaatgaagcttggaagtgaattaaaatatggtttaacatttgggattttagggttctgatggtagtttaaattgtgatgttgagtattaaagtgagtactaagattgggtgtatgatgtttattggtattagaaccagaaaatatagaaatttgttttcaaaattaacagaataaaggcagcgtgcttagtaacattactggtatatatatatatatatatatctatatagtatattcattttaagtatatataaatgcttgagcaatcacaagagaagattactcgaatagaacttttgaaatgtgacttatttcgagatcttggtttgaaggtatgtgttgttctacacgaggggtattgttgaatggtagtggacgtggtttgctcccttcagccctgggattcgactctcttgagttcctactgagcaattgcttgagttttctagttttataccttcggaggctagagtattcagcacaaaaccaatatatgaaaaaaaattattaggttgttcactttttctgcacctagaataaaattgatgggatatcaagttttgttggctttcaagaccaacatgtctgaaaagattattaggctgttttgcatctaaaatataaaatgattggatctgaatcatatgatttttgttttctcaagaatattatattaggttgttttgtacctaatacaaaaaatgacctgatatatctttgctctctcagctgagagtgtcttgtctaattgattctcaacgcagtttattaatattttggttt

SEQ ID NO: 242542 - DNA, 2127 bp, Cannabis indica
gaaggagcaacctcacacggaggagctctctccaaggcttgtgctaggtaggcagacttacatgagaactggccactccgttccagtgtccacacccacctatccataccttgaccagggggatgacccccttttaaaatagcggtaaccgtttcgcgatcaaagagagcattaagcttatgaatgtcccacatcccattaggaagtaagagctcggccaccttagcatcctcgttaccaaaggaacctacaggtttcggaagaaaatctttaccgtgaggtatccaggggtccttccatatacgcgtatcttgaccatcagcaatcagtctacaggcaccctttcgtaaaataacattagctcggaccacatttttccaaaaccaagaatctgagctcttgaatttatgattaagactccttccctttaagatatttagcctcaagtatacgacagcaaagagagttgcacccattcaacaagttccaaccccatttggctagaaacgccagattcatctctctcgtcttcctgaatccaaggccaccatgggatttcgggagacaaagcttgtcccaagctcttaagtgcataccatggttagctttatcaaacccccaccagaaatccctaaccagcccatcaattttagtaactagccggttagataatttggtggtttgcatagcatacatcggcattgaaaggcccactgatttgatcagggtagcactcccagccttagatagggttttcgccttccacccttgtaacttagaagtgaggttctcaataatgaaattaaagtcaacatccttttgcctcgatcgaaacaacgggagacccaaatattttatatagcctaccggagaaccaataccatacttttccttaatcccacgtttcatactctggggggtgtttttgctgaagaatattgttgttttaagcctattaacttgttgacccgaccaatcacaaaattgttcaaggcatttccaaacaccttcggcctccctcacattagctctccccacaaggattaagtcatccgcaaaaaagatgtgagaaaggaccgggccgcccctgctaagccttataccaggaatctctcccttggccagcgcattcccaagcagcctagagagaacctcggccgcccaaataaagagatagggggagagaggatctccttgacgaagcccacaggagggcttaatcaacccaaccttgcctccattcagacagatgttgagcgtagtggtggacaagcactgagagattcatcgacaaaactgctgagggatcccatgacaagagaggacatgatcaataaatttccaaatcagccgatcatacgctttgacaagatcaatctttatagcaaacataccttccttgcccttcttccttttgaacgagtggattatctcttgcacaataacattgttgtcctgaatattcctaccaggcacaaaggcagcttgtgtagggcatatgattgcaggtagaataggtttaatcctgtttgcaatgatcttagatatgactttataaagcacattgcaaagggagatgggtcggaagtgactaggtctagtttgatttgggactttagggataagaactatattcgtagtgttgatacccatatgcatgttaccagtagcaaaaaatcagacacaacattacaaaagtcatccccgaccgtattccaataatgttaaaagaagagcacagacatcccgtcagggccaggggctttatggtttcccatgtcaaacagagtactcttaatttcctctggggtggggcattttactagtgcctctttttcctcctccagaatccgctcttgaaaaggtgagaacagttgagcacctgaccattatcggatccattaaatattttggagaagaagttcataaactcaagcccaattgattccctgtttgaaatccataccccatcttgtgcaaaatgctttcaatagcattcctcctatgacggatggtagcggagagaaaaaagaacttcgagcacttgtcgccctccttaatccatgaaatcctggccctttgcttccagtacatgtctttcctttcaagggcttcattaagagagcg

SEQ ID NO: 242543 - DNA, 2405 bp, Cannabis indica
tttatttttaataataaattattttatttttaatataaataaaaagtgacccatgaatttctcataaactattttatttttaataataaatcattttatttttaatataaataaaaagtctcccacgaatttctcataaaccaagaattcggtttatagacacactttatatagaatagatataaagatttgtgtttctagcctaattaattttatcttgagaattttttacatatatacataaaatgtaaaattattgcattacaccgcaaacttaaattaatgttctaatttttaaaattaaacataccaaatgcccactattttatagcgcgtaagtgatttggtttttttttttttttcgtttcaatttttttgggagatatctttcactagctcttttattttttcttctatttcgtaaggtacttttatttaatatttaatttagaaattaatttttgatcttaatactaatgtgttggactcaaaaaaaatatattattgtgacctattatttaaaatcattatttaaaatataaaaattgtatattttttatcaatcaaaaaaaaagtcaaaaccaacaatttaatttattttataatttcttcacaaataaaatgttgtatttacagctcctgatttaataggaaagttgcatttaggattttattttattttttttttttgaatttgtggtcttgtttagactgtgtacgagctatttataatgtgtatattgactataaataccctgttatagtaattaggtttaatattgtttatatctttgtatttgattcatatcttataagaaagaaatatttttgttttgtaaaaaatagtatgtttatctctttctacgtgtttatatactcatatacttagatagaatttgattctcatgtttgttttgtgaagaataaggtgacaaggaaatgactacaatggctgcttaaaggcggtgtataccagttcaatttcattcctgcaatcaatccatttgttctaccactaaaatcagatgtcttaaatctcttcactcaattcaaaactatggttgaaaatcaatttaaaacaaaaataaatttattaaaactgattagggtcgagagttttgacagcttttgagaaaaagaaaatatatatttttttataattttaaattattttaataattaatattaagtaaatcactacaaatttaccataaaaaattaagtctatatattaagtgatacaaaatgtaaaatttaagtagatttatcatcaatatctctaataataattctctttttttttattaataataattatccttgactctctgtcacttggggccggggatataggaagagaagagagttagcttaaactgtcatacaacgaaacgcatatcgaaacacacaagcacgcatatataacagaaatatatatatatatatatatattatttattacgtgtgggtatcggtaagaaacttcagcaagtctcttcctggagaagcccacgaaaccaaactatttcatataaatatattataaatagggcatttatatctctacttctcttccattttgatttgacccttttgttttttccgctcacccaatttatcaatctttatcttcccaaacccttgacactcatttttcctgattggtatgttgatgttggtttttatatctctttatggttaaacttgacactgaccctttgaatcttttgttttaaattttcattttatatatttatatatgacactttttttctttcttgggtaagtgatgttttgtggggttgtgattgtttcggtgtttgaaattccgcagatagctcaagaggtggaaattttactatggccaaaagtccattcaagcttgaacatccaatgggtttgttccttttcaatttttattattatgtttgtttgtttaatcaatgatatttttaaattgaaaatagtatttttatattcccacttgggttgatttaaatagatgaattgggtattttgaattgcttatgagttggttttacgttgagtatggaatgaattaaagaagactacggttctttctgatcttgggtttttttttagaaagattgggcatggtttaacatatccaaaaaatcctggtattagtgctagcatagcaactttattgtttggcttggtctctgagtggttttatattatcatagttagcccctactaatgacatttttcatgcttacacaacttaagattgttcttgaatatgattgaacattgtttttttgtcttgattatttttggtttattttctttatggctttttggtcttcccatatgaaaggaggcaggctgaagctcttcgcatcaaagagaagtatccagacagaatacctgtacaacttttc

SEQ ID NO: 242544 - DNA, 978 bp, Cannabis indica
ttttgcagaaaagtaacatcactagaactggtgaacgaattcaccagattacagaaatacactaagtaatcttaatatatcactaaggcataaaaaaatagaagtccaacacgttttccacttacacaacctccaagttaacatcagaatgtcaacctagtgcaagatgtcaacccgggcgcaagatgtcaacctgggtgttaagcgtcaacctggttattggttgctgaactacctttagtaaaatggtcatatcttactcaatatttatccaattaacgcgattcaactcgtatttgaaagaaatttttaagctcctaattcatgtctcataatcatatcaaaattctatcaaaattttgtcctcaagtcaagtgcgatttttttcacagattacttgaaaacgatccaacatcaatggtcaagatcagtccagaatgatttttttttatgttttattattattttaatggacatccctccctatacaaggagagctccacaagctcattggagacatttagaaaagtccttataaggtcagagcatctctctctagaaatttgagctcttgccttagtcattctataattctagaaaaaaaaactcgaagtagacgtaggttcattactgttgtgacacgaggagtggactagtgcaaatcttgtgtctctcatttatttttaactcatatttgcgagcaagagagtgttggctagttttctacgttaatattttggtgctttaattgagagccacaactcaagatcttgaacaagatggttgccacgtgatcaacgagtgttgaaagaagcacccgcattggtctgcttactgggggcatgccaactgctagggctagtgttgggatgaaacctacatcccagatgccaagtgaaggcctcagaactatttccacaactcgaccatcaagaccaccaacaactattggtactgatgccagtagttaggttcctg

SEQ ID NO: 242545 - DNA, 1468 bp, Cannabis indica
tatatatatatatatagtagtttaattcttgggtatatttttcagctttaatgtttctaatgccatccttacactagcaactttgattatatatatatatatatatatatataaatcatgtacgctagcttttgttcacttttcttttccttcttttttcttcgcttcgggaaaagaagaaaaagagtaattgtctctttgtactattgatatatgatgatctgatatctgctgcttattggaaccaaagcgcgctttgttactgatctttattccaatctctgttgggtgtcactgtgtttgtgtgtgtgcgcccattcttccctttttgagttttgactaaagagccaactttggctcttcttcgaagcttttaggttaaaagcggcaacctagctatctaagaaacactgaagtccacgcacctagcaatagctactacttctccctttttaaacctacacctttcgttttctaagtaattcaaattggcattgaaaatgaaatcgtcttttctagctagctagcatccattttaaaccaatatatatatatatatatataaatatatatgtatgtatgtatgtgtgataaataaaatataaagtttaatttgccgcttctattctatgactttcaataaaagtagtaagagagacatgcatatcttaattgttataatattgtgaaatcattgacatgcaacttaattttatttttggtgactaaatttaagaaaagtatactgatagtgtgttgtgggtccaattgtgaaccatatatgctgatcatgatgagatgggattcggagggaaaggcagatcaggaaagtttaaaatacaaagatcttgcgcaccacttaattatgagtttttgctataccaaaaccaatttaattaattccctcctattacgatttcagtccaaaatattaattattgctgctactcctttttttttttaattctgtaaaaaaaaaataaaaatattactggtaaattggacaaaatatattacatgaaaataatactcatagagatgaaaaaaaaaaaaattgatgtcatttacaataaaagaaaattctaatattacgttccactaaaatattaataagttgtgaacggttcaaaggactgcaatgaatgctaaattcacttagaataaagatgcatttgtcaaagatcttttaataaaaattaaaattggcaactcaagtatttatactaatcactgatgtaggatcaaaccacaaaatatggagttaataacaatttggaaatctccaaaatataagagaaatgctaaagggcaccattggtgcctagcaccctcctacgtgtcaatatcgctattggtgcaattaagtatcgggtcccatatagtttaatataataatttttatagagtatcgctagccaattgcaagtcgacacatttagaaggtgctaggcaccactggtgcccaata

SEQ ID NO: 242546 - DNA, 1389 bp, Cannabis indica
caatataaaaagggtatagagtataattcctcttatttgtacttttacttcattttccatattctttaaaaatataccccactttttactagatgataactcatttatactccttaaattgatgtaaattatgtgctacatttaagtagagggagaaggtatgttaggcaactcactcacaaaagtatgtagattttaatgaaatataatataaaggtatttttgattaatggatacaaaaaaaaatattcctcaacttaatcatcccaaaaattagagccagcccatatggaggttagcccaactcaaaactatatatgagtctatgaaaggagcatataggaataggatattaatagtgctcaacactttttataagtaacgctccacgattagtcagcgatatttattaaaagttattttcttaaattatatgaagtctaatacttaattacactaataatagtatgacacggaaaataatactaaacactaatagtatactttaataattatctatgaaaatagtaatgacccaattcttttaataataaaacaattatcaatatcattgttatttgcatatttcaacttttaatggtgatttgagtgttacagccttttcctgtgtcaaaattgatgaacataaaaaatttaaagtggtggttttcaaattactaggtctcactcttaatggagattcaacctattatttttaggtagagtttcttaagattcctatcaacaccaattgcctaagattttgccaaggtattaatagcaaagcaattgatcattatgaatttggaattgtggtgatattttccaagtatgaaattctctcttctgtttccaagtaaatgagatcataactctacctctcattctcttgcaaagcttgttctttattgtggccaaggcttcccatttgccttttggacttagagcttcattttgatttgatgtaatctaatttatatctaggccatgtgcctaatgaaactttaagttattaaaaagagaaattatgtttgaataattttagttaatgctatatatattgtcaaatttagcataaattttcatatttatgtaatttcaatttatactatatttttctttcttcagaatacttatggcctttagttaggagtaaattcatccaacaactccttgagattcaatttttattcaattaacggcatcactctaacttcaaagttaccaatgtgggacaaaacaatatcacatatttctttttattactattatttattttctagcatactaattaagttcataatttatactatttacaaattcataggaataatatgtagttcttaaccaaaaactaaactaattagttctaagtagaataattatttg

SEQ ID NO: 242547 - DNA, 529 bp, Cannabis indica
taagagtttagacagaaaataaatatagaagataaaattaggggaatatgttagtaaaaatacatacacttgacccatggccacataactaaatcgtttttttgaaaaaaaataaaaagaatgttaaactgaatgggatacttgcaattatttttataatatagaaaaaaaatttgcgttaaaaataaattcaatgggcaaaattaattgtcatagctcaaggaagaaaaccatatttattcttattttaagtagtctcacaactaattcattttattagtatttttttttggtgaatcttggtgaatggattatttctctataaaaaagaagggtaaatggcggcaaaactattccaaaattttcattttagtttcacttaaccccgaaacccaaatttgggcggcaaaatccccaaaactcatgttctgttagcaatttaacacttccgtccattttaggtgttaagtgccatgttggactgaacacagtgtacacgtggcacaattttgttggtccacgtaaaaaa

SEQ ID NO: 242548 - DNA, 1306 bp, Cannabis indica
aggagggtaaattagtcattttgatggttaatattaatcttatcttatttggaattaatggctggagttgggattttaataaatagatttatttttcttttattctattaagctttataaaactaaacctaacaatgaataacctaggattaagctaaagaagtcatccattttctttctctttctttccttatgtcgagccctagaagaagctgaaaactagggaaaagctcatctcacttcatcaaattcttgatcaaatctttaaccctaggagctagccaagttgaggtatgatcttactaccattttctttgattttcttaagttctagtttaggttttggtaagggttttaaggatttcagggctagagtaaaaactaaggttagaattggttgttagggtcgaattgaagcttgtttaagtttaatttggttagagataggggctgtttggtttgatttgagttagaagtggtaaattgagcttaacttttatttgagaatgcaattttaagtaaattgataagttgaggtgaattggtgatttggatatgttttattttttatattgaactattctagaaaggtatagcaggtttggtggaggttcgattggatttcagggtaaaaaataggtttcccatggctgcctagaaaaccggtcgaccggttttccaagtaactagcaaaccggtcaaccgattttgccagcagggggaaatctcaggttttctcctcaagtctaattatgattcggggtatcttttagagtgtaattcagagtattttagggatatttaagttagtttgatccaggtggaaatatgattgttcagttatgagaattagggtttatccccagaaatttgattaaagatttttaatgagttttggttgtcgtgacataggaccgggatcgcccagcttgttctccactcaggtcagcccgcacacttaagttatggactaagataagaaaaaggggtatgcatcacttagggttaagtgattaacatgtgtattgtaagcctcgattatgatcgagatcctgattatttgtttgttaagcctcgattatgactgagggttaggaaacagtcattaccgttacgagtaattactcttgaaaccacggataggtttcttacttatcatttgctttattggacaacaatagtgacatattcagctcgtggttaacgagtggtaaggatactttatgaagtaccagggtttgtgtggttacaatgttgtgtaaatgtttaaatatgttaatataagattgtatcaataaatgttgta

SEQ ID NO: 242549 - DNA, 591 bp, Cannabis indica
ggtgtgttcatgaaagcacctgaccggaggcaatcaaaacaaataggggctcggtggcttcgggacaatatgggacagccagtagagggtggcgccggccacagtacgtcggagaaagcttccatggatgcaatgaataccgaccgtgattctggggatatgttgatgatggatggagtggctaatggagtgattggtggaaggagatttggtgatttcccacaacctgtaaaaggaaaaaatcacgagaatattaatggggagagggagaagaatggggaaatagatataaataaggaaagtcaaaaggagggtatagttatagtggatcttaaaaggaggcgtgtgaatgggaaagaggtgcttggtcattcaagtgaggattttgtggggtcagtggtaattgttgatgatgtggacgtgggaaggatacaagaaggaataaatagagaaagtggcattcttgcaaatggggcttttgataatgatagtgaggttgtaaagcccaatggtgggaatgaacttttaaggaagaattctgaagctaatattggcatttttccaaaaaaacgattctttggcgggtactca

SEQ ID NO: 242550 - DNA, 302 bp, Cannabis indica
aaggcttcaacaagtcttctcccgaagaccaaagtgcttacttcctcctgaagtaaggctcaagtcttctcccgaagaccactctcttgttcaatcaagtcgttcttaacaaactctaggatagagtaagaactgatataaaatactagaacctagatgaacaactaggttctcacataacaatgaaaaactctcttcacatataagaaaaatgcaaaaaatgaataatggaagagttgattcgaatggttgctctctaggtcctatttatagaacatagaaaccctagagacaaccacaag

SEQ ID NO: 242551 - DNA, 607 bp, Cannabis indica
tctggcaaaaaggtgtaaaggataatgcacgcacacggggggcaagatctgatcccgcccgtgtcaaaaaaagcataaccatcactgggcaatctgggttcatctccaaggtagacatttgcattccttttgggtgttctgcattcacaatatgccctacgagtattctcctgtatcgcttaagtaagctctaagcctgaaccactctgaatctcggagaagtggaaaggcctctgtgtctcagaggacacaatgaggctaagtgaatctatgtgtatcctttggtcttgatccattcctgggttcgtgcagcctctccatgacttggcttcgcggaggagacttactcactggctattcgaagtcgtactcctcttcttatgccacatgtttcttcattcaggaatagggataatattattttaatattagttaattttaaatatttttatttttagtaatatataataaagaaataaatatattttaacatatatatttgttatagtattttaatcaaatttatcaaaataacttttttttgaatgttgggttgtaccaaatttaacttttagctgtacattcttcataaatttatcaataaatt

SEQ ID NO: 242552 - DNA, 2380 bp, Cannabis indica
aaaaattcatatttcaaataaaaacaagataattattttaagacttcagaatctataaatagaggtctcaacatatacagtggaggtcttatttggtcaacatatatgtttttagaaagaaaaacaaaactgaagatgatttttttttaaacaaagatagatgaataaatcttttaattcttcatttgaatttaaatttaaattagagaattaaagaattaaaaaggaaaaaacaaaacaatattgggctgagtgaacagtgtaaacgacaactagagagaggaagtccatccatggaattgaaactgttgaggaggagaggaaagacttgcccgaaacaacaaccctttccttcaaactgaaattgcttcggactccgaattggccgatgttcccttattaacacttcccttcccatcaccaactatggagctcgacctcacctccttccttgatgacgacgacgacgatgatcaactcaactccattccccaccgtacgattgatgacattctcaacgactctgattcttccacctcatcgtctcctcctccatccccaccctcttcctcccgccgtctatcttccgatctcgaccgttcgtcctccctcactagacactcctcccagtcttcgattgatgggactcgcaaatctacggaaggtactaagcccacacaattggaggaaaggagaattgggcctcgaaccacttcggttgggcggttcaagttcggcgattcgtccgatgacgtgatccggagaggctccaggcctttgccatcgttgttcggaggggttcgttctaatgcgaagcccggtgcggctctcgcggctgcggcagccgcttcgaggtcgattccgacaccgcacgcggcggcgatcaagtcgaggagaagtttagggattgggggtttccagaaggctcttgacggtgttgaattgggttccactaatggtactggtgttgctgcggattctgagactgttgtttctgatgagttgggttccaattcgactggtgacttaaatgtgactggttcggaaattagtagtttagattcaaagttagtggaagttaataacattgatgatgatgagaagactgatgaaacttcaaaaagaggtgaagtttcggagatttcttttgtgggtgaagttcttcattgtgaagaaacagtgagcgatgatacaagggctggcggtgctggagaaggattgttgggttcaattatggaaaccgaggttaattctacttcagttaatgttgggaaggatattgagaattctgctgttgaccgtgttgaaagtagaaacttcggaactaattcttgtgatgaaaatgagcctggagtggatgagagttcaaaatttgtcggtgttagtgataatgatgaaaagggtagttcttgctgggatgttgctgataatagtggagaactcgcaatggagtcgacgactgaggaattagaaaagggagattcaataaacaatgtgccttatatgaaagataacagtgatgaggatcttgatggtgatgatgctagctcaacaagtgagattaaagaacttgtggaggagagaattggggaattggagagcaggggaatcagtcaaaaagcagaaaagaaatcacagccttgtaagaagccacttgaaatagccgaagagctcgagaagaaacacgcttctacaagtatgcattgggtagaaggtgctgctgcccaaccaatgaggcttgagggtattcggagaggatccacaacattgggatactttgatgtgaatgccagcaataacattacacgggccatttcagctcaggcattaaggcgcgattatggttcaccgcaggtcttggctgttcatactaattacattgcagtaggaatgggaagaggggttattctagttgttcccagtaaatactctgcacataatgctgacgatatggaaaaaaaggttgcatttgcttatctctttgatgctctgtatttactttttttttgctttggttaactcttgaatttttttctttttttttgagatgtagtgttgggtgttttgaaacaaaactatggaagaatggacttttaaatacgttatacgtgataatttgttgccaacttctattttcaatatgcctcgtgtgtctattaaaaacaggcagtactgaaattttaacagtcactccaagatatatttggcttgaaatatgctttggcatataatcgttgcaatgccataaagttgttttctttcgaatttggtttgctctatgctctttatttctagtaaatcacaaagaacagtagtacttgacctttaacaattggtacacctgataagttaatttttcttcttcacggtgttgaacagc

SEQ ID NO: 242553 - DNA, 782 bp, Cannabis indica
attagctatagaaatatgtttattatatcataattcatgatgaacttggttttagttatatagtacttctactaaaatgtactaagattaatgtaacattcaatattcatcaaaatttaatagggaatttatgataattatattaaaatatcattgtgtagagagtttgaatattggttgaaacattttctcaatatcatatagttaaataataatatttattgataaataataaataataatgtaattatgtaattatattaattgcattggcttattctcctacgaagacagaagtaagcacataaacgataagccaaagccatgagaagcaagacccaaacttcttggaagccaccattgagattcacagtgtcaaatgaaggagagctttgtaaaggcttgcaaccacttttgctttcacattcatacaattgttcacctgagtattgtacttttaggagtaatctaaatccatagtacatgaatgataagtactttaaccactgcataaatattggtatgtgctgcaaatcaaccaaaaaaaaaaattaaaaaaaacatcactccatatacaattaaggaaaaaaaagataagagagaatttcgctaaagatcaattcgatcggtcgtgtaatttaatgtcggatctcatatttcgcgtgtgtgttgtaggtcctgtgttcaggtcctagattatgcattgtaatataaatgtttaaatcaaaatttgattagtggtgtagtttatatagatctctatatttagagtaaaaaacttt

SEQ ID NO: 242554 - DNA, 573 bp, Cannabis indica
ttacaggcaagacttcgttgagtacaagagcagcaagaacttcgacggttgtctcccttgtccatggaacagccttgttcggtttgcaatttctttcttttttttttctttcgggtatttttgtgattttatttgaattgaattaagttgattcaagaaaagaatacatttaagacccattctctatgactttaaggatttaattttgaattagtcaatgatctgccattgtcttcccctccgatggatgcccttgaggaaaaaaataggtttctgtttaattacatgtttgagtaatttaaaaatgactgccttccatggcagatctaaaaaaaaaaagggggggttctgagattttttcacccttattccaccatttctgactaggactttttttcccttcgaatggagtccctttttcttttcttctttctcatatatctttcatctctgagatatttcttattagcagaaaagaagcatttgtttctatgctttcagttacctccgtaagtttttattttgttttaaatcaaagttaccactgataattattaatcattattgtttttg

SEQ ID NO: 242555 - DNA, 2389 bp, Cannabis indica
ggactcgattagacccggacccaaatcccctccccacggccctggcactgaaccctgcttttgatccgaactcaaatccgacttctgacctagaccctacctaaataaaataaaaaaataaaaataaaaacgaactttacagaacacacttttgttttctatttttaaaattgaaaaataaaagtggttacagaacgcatttttgttttttaaaaataaaaattttactttcattttgtgattaaaaaatttaaaaataaaagttttaccaaactgcacctaagtatatgattatttgatttcttcaactttcaatatttgggcaaaacttttgttgaggatgttaatgacatatgagaatattttttttagtaaatttttggtgaaatgttgtttggttaatgagaaagtaagtatgagagagaagaaataaaaataataataataaaaaaaacaaggtgaatattttttatattattaaaaataaaaaaattcaatttatgtatttacatatttcaaattatttttaatatttcaaattagttagatttttttatttttacattaattaagataattttttaaatattattggttgaaccataatgggtgacatgtcattccaatcaacaattaacaacataataaaaaggttaacaaaagaactatatttctataaatcgtaaaaatacatgagtttttttgaataaaccatatattttagaggcacaatcttatagtgtcctaagttgagaagataaaaatgataattattgtaattttaattaaaagaaagctattgaagattttcgctcccaaattatgtactatgcattgttttctgaattttttagtctattaaaaatagtccacaaactattcaaagtgttgtaaattaattttttacgacaatgtgataatttaaacaattactatattagcaccacgtgtataatttaaaattaaaaaaaatagttatatttttaaaagatcattaaattaaaaatttgttattaaaaaaattaattaaaaataaatttaaaactttcaaatatttttttaacattaactacacaagtggcgctaatatgatacttacatgttaattatctagacaactacgttattattctcttcgttacatgtaataaaaatttgacagaataataattaatttataatattgcaaatagttgataaatcacttttaacaaacgcggaaaaattcagagagcataataatacataaattcaatggcacaaaaactgtaatatcctgaaaagaaattagaatttattatttaataacacaattaataaagcttatacattgatgtgaaacaagatacatagatatagaagatagctgcttcaatgtttccttgtctttttatgccttgttggtgtatttccattggagttctataatcatgttttggataagatcctcatatatagattttcccacttgccgacacttgataaaagtattgaaactgaccaattccattggtgtaaagggacacttaaaaatgtaataattcaactattttcctttttatccacattccgtggagagaaaaaatttatactactaacaagacatatgctaattgaaatcatttcctttatattaaaaaactagaggcacatagaatttgaaaaagaaacttcttccagatattttattactggctaggattctaggacaaaggttcatataaacctaaccacaagaagaatagaagaaaacctattaatttgctgttgtgaattaattaatttccttgaaaattatagggaatgtgagtctagaaattaacaataacagcaagcttttaacaatgtacaaagttttcacattttgtcaaaaatcctaaaataggatatgtttcctcaaatgggcagacatgtttttattattatcctctctttttatgttaattatgagtggtttaacaaaatttaagagtatttattttctaagataacatgtctctttataaatggacccttctttcaggtgtttagtttaaggataatataataccgaaaagcaatttacataaatggagccggccaacccctaaaaaatggaaaacaaaaaaaaaaattaaagaaaataaaaaaaaaacatagtttcagtccctgtatagataaatctataaaccatattaagagagaggggtccataaataatctttagactttagctatatacgtttaaatcaaactcttaaaatagtgtttctatgatattatcatgatcatgatcaactacaatgtgtcacatctggtcccaaaaacgaatatacatgtatagatattattgtgtagctgtatatatataggggtggatattaatgtaacttcctcttatgaggagttt

SEQ ID NO: 242556 - DNA, 1004 bp, Cannabis indica
aaacttatttatttattttgttaatttttctcaaataaattgtgttaaatgatttttcttttttcttttttcttttttttttttttattttcaaaacttgaaggaacaacattgaacatataatatagtttatttaatggaattaatagcacatattctttatctcatttagtcccgttaattgctacactaattacggctaatgttttctttttcttttctttttttttttttgggttttgttttaaaaaaatatgcctcttaaaagcatacaaggtatatagtcaagaaaaagtgaaatgtaaattgaacccaaaaatcaggattaatggaaggatagtgttgtgtaatttttctcccaaaaaaaaaaaaaaaaaaatctaaaaaagtagtagtagcttagatctagggaggttttatttaattttcaataagtcaaattaaaacagaggcattggtatttgagtgagtgttatgtagtgagtgaattgaattgaccaatgcatgggtatagtaggagtcggcaaagcatgcgtaggattgtgtagtgtctttgcaaaagtgagagatcatatatatgtatatcttacccattccctacttcaaatccaataattcatcatcaattaataatatatatagagctacataaaacgtcaacaatctcatctatatatacaaacaatataatatattatgtaatatagaaatcataaaaaaaaaaattgttaatcggctccagtgatgtctaacaccagtaccaccagtaacattttatgactcgttatcaattttttatagtttattattaaatttaaaatatgtaaaacctagtacatacttaattatatcaataataatatatgacatttcgtggtagtcctgactcctatggttgggtgtgaattaagcttagagacactacaaagaaacttttacttttagtgacaactttttagtgacaacataaattttttgtgactaaatgtgacttttaatcataa

SEQ ID NO: 242557 - DNA, 1652 bp, Cannabis indica
acatttctaaaatgaatacaaggattatggactttcacatgcaaataatagtgtgttttactactaaggaacaaaacaaataaaaatcaaataataataattaaaataatattacacttaataataataataatcacttatatattatacaaaagaatatgttgtgtttttattttaagtacaaagtaatgacatgtgtgcaatatattaaaagaatttgttgtgtatattagggcacaatatttttgattagctagttttttgcaccaactgttttgaaagtagctttggtgaatttggttggaaccggtctgatccaatctttgccaccaatgaagtcttgggtcaagaaaggttcaacttcttcgctcgtaaagttgcgcgcatattggacacgtttactcattccggatccccttccataacatttgtattgcccataatacaccgtgctacaaaatacgaaataataattagcttttaagctgattcgatatattcagacattcaataattattaataatcatacgatcaatccaactataaagagtaaattcggtccataatatacctatgcgtgttcgagtttccccaatcatcccaaccttggggcaatatggcacttgaaatgtaactaaaagcaaaaacaaccctagagtgtgatccccacggccttccgagcaaggctgttctcacaccggagatgttgcaccctaagaaaacgaaacccgtctcctcggacggtgactcccttcgttgcgccgtgattgatccagttccttcggccaacgaatgaatatggcatttctgcaaattgttaagtaattagtaacttgttactaagaaaacaaaataccaataaaactttgattaattaattaattacaggtgtgtgtatatatatttaaacctcaaatagagaagctgcattgccacaaatgaaatcagtggctccttctatataacaatttttgtaataatgtctaccattatcatctaataaagtatcttgtactgaaattattctacacccataaaatgctgctttgtctcctgatactctcaatgccactgctttaccacctgacccataagtgttctgtaacatacatacacatatataagctgaaaattcaataaataatgtataattgtactgtatagatatatgaatatttttatggagtattatatcacggtgcccaaaatttcaaaattaccatatttgtgatgatttagtatattaattggttcaatttaatatcgaatttaatacactaattttcatattatatggtaatcttaacatcatatagctaacactgagttaacaccgtataaattattgatattagtccaacactttctataatataagtagtatcttacaattagttagcgatattctctaaaaactatttttttaagttatatgggactcaatacttaattagaataatatcagtatgacactgaagaagatactagacaccacaagtacttttcaacaattctctagattatattatattaaaattatagcacagtttgaaaagagaaaaaaaactagattatatataaataataagagagaaaaatatataaaattcaataaatatatgtatattgaaagtatattatatatgttttt

SEQ ID NO: 242558 - DNA, 829 bp, Cannabis indica
ccgatactgatattgatgtggtcaaccaattactgctggatgaaggtacgatggtggtggccaaaacgatcgtgggtagagtcatctcgacacgctctatcgatcgtaatgatctgatttacacagtcaacgggttctggaaaatacaggggtcttttacgtggaggctcaaggtatgaacacgtttgtatttcgttttgatttgattacggatcgaaaaagggttctggagggtgggccgtgtatttttgaacattgtctcttggcgctcaaggaaccggatgatgttttggttccgacagagatggtattgtgcgatccgaatgggctttgaacgggtgcgtttatgaaggtccgagttagtgttgatatcagcaagcctctcgctcgtgtgatcagaagacgtttggcactggataaacccttattacagatgtcgttaaggtacgaacgacttctggatttatgttatttttgtgatattttgggtcatccctttaaagaatgtctctcaatgctgagttcggtcggtggcaaggaccaattaaaatatggtgattggattcgggttttgtttccgaacaaggttagtggacattattctaaaggctttgggttcgtgccttgaatgcatcggcgtctggggctgtggttcatgtgggtaaggtgagtgaccccgtgacggttcgaccattggagggtggctgtggtgtaggaggggttaggttaaaatcggctactaatgatattttggggaaaggtaagggtattatggtggaagacgcggttaattagcatcccgtctcagatgcatttatgctcaagatcc

SEQ ID NO: 242559 - DNA, 661 bp, Cannabis indica
ttttctttaagatacaacatcataaataagcaaatacacccaagttttcaattggtaagggacatttttgcttgttttcaaaagccaccattgaatcggacagctggatcactatgctcttacacttgttttcaaaagcccattactttaacacatttgaactcttcacatctatctttgactatctttagcatgaccttaattacaagaacagattgattgtgtatttcattggtaagtatatgggaaaatttatcaacacagacgccttaattttaccaagactccattgaaacatcaataataccagctttgtttaaaaggtgagtcaattaccgagatgggaggaggaggacacatatgaaagcaaaaaaaaaaaaagtgatattttttcaactaccaatgaacaagtacaaaagaactcaaaataccatgaaaatagaaaacgtattataatcgttcgttttcagtcaatctgaatctactgcgcttttctcctctacccgaatgctttcgccttctccttccagtccagcctttttacattcttcacaattcacagatcggtactctttcaggttgcatgttgctcctcctccgcaaatttgaaaaaatctgtggtgcactaggtttgtttaattctttttgtcttctctcgatg

SEQ ID NO: 242560 - DNA, 625 bp, Cannabis indica
agaacctggattcaagaagtgtttgattagtagatatgtggttttcaaggaagatgaaatggatatgaaaaccaagagcacttctaaagacaatgaagctggtttaaatgtgaatgtcaagattgaggtggagcaggttactcctacatcaccaactaatgctattccagatggaactgaggcaacagaaagggaagacaatgaagattagcatgaacttagcagctatcaattagctagagatagagagagaagacagagaaaagcccctgatcgttttggttatgttgaattcattgcatatgcacttatgattgcagaagaggttgacagttcagaacccactagctttgaagaagctatgagaagtaaagctacaagtcatccaagaagagatgcagtctcttatgaagaatagaacctggattgttgtgaagaaaccagagttctacaagctggtaggatgtaaatggattttcaagcataaagaagattcagggaataagcctaccagattcaaggcaaggttaattgccaaggggctcactcagaaagaaggcatcgattacaatgagattttctctccagtagtgaagcaagccttaatcagagccatgatggcaaa

SEQ ID NO: 242561 - DNA, 633 bp, Cannabis indica
tctcccatttaatctccatttgaaatctttcagtcaatgcttgtcaattttcagtattgggatctttgacctattttgaaattcacaaattttcttacatgtacacccacaaatttctcaatttggccttgtgagattttttcaaatgtcacgtttaaccttgtggtctcttaaaggtcgttcgttatactcacacttttcagcccaaacatgaggagtgtgtattagaaatagtcccacacatggaaataaaatatcatatataagatgaatgagctactcctcccattgcaaattagttttgagatggaacctcatgcaccttaatcacaccttatcaaaagctaacatgtatcaaacccaaataaaaaacttttgttgtctcccctttaacctttatttgggacctttcggccaatgcttgccagtttttaatattggggtctttaacctattttaaaatttataaatttctcgatgtgtacactcacaaatttctcgatttggccttgtggaattctttcaaatgtcacgttcggccgtgtaatctcttaaaggtcgttcgttatacccactctttctagacctaaacgcgaggaaggtgcattggaaatagtctcacatatagaaata

SEQ ID NO: 242562 - DNA, 547 bp, Cannabis indica
gctctagcgtttttgagaccaaagggcatgacattatagcagtttagacccatatttgtccggaaatttttaagttcttagtccaatggatgcatttttatttggttgtaccccgaataagcgtccatgaagctcaatatttcgtgccctgctgttgcgtccacaagatgattgattattggaagtagaaaacagtcttaggggcacgccttgttgaggtctatgaaatcaatacacactcgccattttttgttcggcttgggtactagtacgggattggcaacccaagctggttagaaagattcaattatgaagttgttatttcgtagcttccctacctcttcctccaggactagagctcgctctttgcccaacggccttcgcttttgttgaactggtcggaagttgggatcaatatttaggacgtgcgaaattacatccattccaatcataccctcatgtgaccaggcaaaaatttccaggttcgttctttactggactcggtgtcgtccctggaatggaaaaccactggttttactttgtgata

SEQ ID NO: 242563 - DNA, 574 bp, Cannabis indica
gatggggctataaatacattttttctttattctctttggctatttgtgtgattttttattttggttctcctataaatacatttgatgaactcacagacaaaaggattttgaggtgtgtgcttctcttatgtttttttaagttgttatattcactttattgttttacatttattttgtgttgttttagtttttatttagtagtttttttattctaatattctagaattgtgcttgcaaatataaccgctatttcatgtactcactaaaaaatatacatataaaagaattactattataattagtaaataataatactctgttatatatgttgtatgtatatatgtataattttataaaagggataattgcggcaaaattccccaaaaacttaaggttgatgcagattaatccccaacctcaaaaattggcggtaatagtccccaaggtcacattttctgtaagtccgttgatccccaagttaactgatccgttaaacccaaattaaatgccacatgtcaattttttattggtccaaaaaataattttaataaaaaaattaaaaatataaaaatat

SEQ ID NO: 242564 - DNA, 1250 bp, Cannabis indica
aaatgaaaattgcatcagtagaattaccaaaatgtttaattataatatgactatgtttgcatgttatgaagggaaaagagttgaaaagaaaaaacaaactggagtaattaactatatataaaataagaagatctagtgttagtgttagtgttagtgttagtgttagggggaagggtgaaaatgtcattttgagtgtgaaagtgatgagaagaagtagtggtattttgggaaatgcaactcaaatttgggtgtggtttacttttgacgaattggtattgggtgggtgggtcttacatcatttgtgtactaacattatcaaaacttttcaatttttagttcattagagtgacaggcccagagatcgcccaagattgactcatcattacggaattacattgcgttgacctatttttacttgctttttctttttacccttttcaaaatatcttaatcaacatccttcatattcatatattaaaatgtttaaaaggcatcaaatttttattataacagctatagacaaattttacagcttcttcctctcccgattcgctttgggtattgggagttgttcatataaatatatatattcaaaaagaaaaaaaattatcatattgtattgattaaaattatgataggaaggaacaatttggttatatatatacattttaaatcgttatattttattactttaatatgtttacagtaacgagtataactatcgtattgttcaggtggagaatttataattagttttttcagagaattcaaatgaataatttcaacaaaatattttaattttttttactatgttcaagtttatatatttctttatttgatatatttctttattagtatagtattttatgttcatttccgctcaacttcctacttagtaatttcaaccaagttgaaggtggaattggttgatgacctacgccatatttttcaacaaaatctcacgtggatttgtttttggtgacaatttagtttttaaaatattatttaagttaatttaaatatttaatgtaaattaaaattaattttattgtgcaatataatttttatggataatttgtatattttagaaaatgttttcataaaagagaaggaattctctatgaaaatattgaataaaattgtttatttatggtgtaattagttttagggcttttttcataaatgtacaacaaaaataaaataattacaaaaaatgtgcaaaaaaaattatttgaaaaacttatacattt

SEQ ID NO: 242565 - DNA, 1112 bp, Cannabis indica
tcgaaagaagaatgcgattctcggttttcttaaggaaaagatgaaaaagaagatattcaattgggagagtcggtttttatcaaaggggggtaaagaagttttgattcgatctgttgcacaagctcttcctagttatgctatgagtgttttcttacttaccaaggagatttgtgccgagttggagggtttgatggccaaattttggtggaagtcgcaatctaattcctcttctaaaggagtgagttggatgagttggagaaggttgactaaacacaagcatgccggtggtcttggcttcagggatcttagagattataacttatcctttcttgctaaacaaggatggcgtttgctaactaatgagtcatctttggttagtaggatgtataaagctagatattatcctaatggtagtttcttaacagctgcattaggacaaaatccaagctttatatggagaaccattttcgaagcacaagatgtggttaagcaaggagcaagaaggtcaatcggatctgggcaaacagtcagtattttgaatgatccgtggttacctgattctaccaacccgtatgttcaatctacacaccctgctctggttgatcagcatgtggattctcttatgtgtatggagggtcattcgtgggatttaaaggtgcttaatgacctatttgtggccagggatagggacttaataatctttatccagcttagtgatcaaagctttgttgataggtggtcttggagtatggaaacttcaggtcttttctccgtgaaaagtgcgtataaacatttacaaactgctcatggaaactggtctgttatggatgatattgatgggtggaaaaggttatggaaattggagattcctccgaaagtgttgtactttttgtggcgtgccatttcgggatgtttgccaactaaagtacaattgcagactaaacatgttcatgtggatcttctttgtcctttctgccttaattcggttgagactatctctcatgtgcttatggaatgtcggtttgcacaatcttgctggaacttggcaagtccgactgtgatttatggggctcctattgattttggcagctggtttatgggagttcttgaaa

SEQ ID NO: 242566 - DNA, 918 bp, Cannabis indica
catacgcgcatgggacagatgcaccatgctcgatagacagaggtctaacatatggtgccttgagggcctagcaacatgcgtggagggcttatctcgaaggcctaccaacatgcgtagaggcatggtgccttgaggattggaccatggacgtatgggagtgttcaaacagtatagaaaggggcacgattagaagtgttggcatgttagcttagtgttggtatcttgctacacatgttaccttggtcacgagtgacaaggtgagtgacggtgttggggttttccttatcatagtggaaacctatggacaaggcgagtatcttggctagagagcctcgatgcatggatgcactcatggatgcttgcgagcatgacttggcaagagttgttcgagaaaaggaagtgtgcacgaggcatatacggtcgcgcaaaaaataaacctattgttacttggatagttggaaggctgaccttggcttagagaaatcaaggttccacattggtattccgctgcctgaaaaggtgagcctgtgacaccatccaaggtgactttgtccgcttattgaaaaaccataccccacatggtttcagttgtctatgtggacatgccacgtaggtaagaattaggataacaaaaatattagctaaacgcgacttgtgttttgaaaactttaaaatttattttttgttcttatttctaaaaatacttcaaaacaacagaaaacaatatcaaacatgctctaagtttttctcccgatgcgagacccacaaatgcaagttgcattcccctccatactcccatccacgtgtacatgaacgacacagtcacacttgggctttctctgatattcacggtcattgttggatcaacttccatctcttttcgtgaaagaatttgctattatatgaaacaacaaaata

SEQ ID NO: 242567 - DNA, 749 bp, Cannabis indica
gtacatacacactagttagtatatcgaaaaaacaaacctcagaacagtcgcaatttgagagctgagatgataacttggaattttcagcctctagttcctgattcaatttgcgaaaacgaaaaataacatcacaaagctacaaaaaaaaaaaaagaaataactgaaagagtaccataggaagattagagaaaaggaaagagagacaaaccttaactctgagttggagagagtatactagggtttgtaaagtggagatgagttcatctccacctactccttgcccaacttccatggacaacaaactgaatctgctcgctcgctcgctcgctccactgtcgagtttcgagttttttgacaatggcgttccttttttttttttttggttataatttattatggatttttaccattgcagtccctctattaaatgagaatttgcaaattggctccaaaactaaaagattattatgagattcgaatccacactgttaggggtgtttatcaaactgctcaaaccgctcaaactattcgcactacaccgtaccacaataaaaatgcggtttgaaattctttgcggtgcgatcgcagtttcattttttttaaaatcgcgcagtgcggtgcgatttgagattttaaattgttaatatgcgcttcaaaccgcaccgtactgaacattatacaaataccaattttaatatttatttaagtccaatatgtgaatgtctcgcccaaagcccactaattattat

SEQ ID NO: 242568 - DNA, 1779 bp, Cannabis indica
ttgctattttctttgccaatttatgcacaagagttattgattttaactaacaacttcaaaatacacacaaagacataaaacactgaaactttcacaaattaagagacaaacataatttaaatgacacacaattacataaaaaacatgcttaaagtgatatcaaataactctttactcaagagttatcagttgcatacaaagagaattctttacaatcaaaaggagagataatatcaccctccacatttggattcagaatccaagaaacaacctctaccccactagagagaggaatcatatccaccctaacattccatttgctttgaagccaaagacttctggtaatagagcaccgagagaaaaaatgagaagctgaatcttcaccttcctcattacataagtagcacttaccaataacattcccaaaaattctgctcaatctagctccaaacattagacaatcatgtgcaactttccataggaaaagtttgagtctttcatgaagaggggaacgccacaaagaagagaacatagagttaggagataagtccttacaacagagatcccaataagccgatttgagcgagaaatcccccgaagagttggacatccaaatcaaacgatcagtctctaatgaatcaccagaattacagttaaccaaagaattggccgcttcaggcagaaaaacacttgctatcaactctctgtcccaacagtttccattattccttttcagatcacccagggagagatgagagcatattctaggattaaagtccttgggccccataaccactccatcagaacacacccaattccatttccaaaggtcaatatttgagtcatgaccaagaatccacgcactatgactgaggataaattgtcgagtcttccaaattccgcggggcccagttgacgcaccccgagggggcatatcacaccaaaaaaaggattcgaaggagtatttgcttttgattacacgaatccacaatgccgaatggtctttggcaatcatccaccccaatttcgctataagacagagattcatatcactgaatttccgaatccccaaacctccaagcaccttcggcttgcaaatcttatcccaatttagaagcgctaaaaacttacctccgtccaccaaaaacggcgaactagcgcatccagagaattgctaatattctttgggagaagaaaaactgacatagtatagattggtatagctgaggccacatttttgattaggaccgttctagccgcctgagagaggagttttgctttccaaccatctaaccgagatctcactttatccacaacatactcaaagtccttggatttgttcccagagacaaacagcggattgcctaggaaggtttcgtccccattcattaagtcatacccgagccattccgagatacatattccagcgttcacattacaattcttggaaaagaagaccttagacttccccacattgatctgttgccccgaccaaaggcagtaagtatccagcacctcctttagaattgttgcctcctcagtcgatgctttcacaaagaaaatagtgtcatccgcatacataagatgcgaaacactcgggccattcgaagagcacttataacccgtaattaacccaagtctttccttttcacacaccattcgggagagaacttcagagcacataatgaataaataaggggaaagagggtcgccctgcctcaaacccctctcgggtctaaacatcttagtcaagcctccatttaacagaacttgaaacga

SEQ ID NO: 242569 - DNA, 634 bp, Cannabis indica
gaccttgggtattttcaccgctctaatttttgaggttgaggactaattgacatcaacctcaagtttttggagacttttgccgcaattatctcttataaaatttaaagtgatatcagttgctaagattttataataatgataatagtttttgaccaaaaataagtttgtttttaatcgaaagatcccattaaatattttttattatttgttggggttctttctttttattattttagtgggttctttcttttttggaattttttctggttttcagtcacttattatcttttttggacacattttacttatctttgatgattaaataaagttaattttaattatcttgttttgggttttacaaatattttcttttggttaactcttttcgttgactttcctttgggcttaactcggtgttaccgaaatatgcgatatctcggtttgactggtgcattgttgaggtatgttttgtttgatctgagatttattacgtgctgccagccgagatatatactatctcagtcagatatatactatctcagtccgagataaatgatatccggattgtatgattcgagatatacaggtgcctcggcaatacttatgtttttcaattttttaatcacaaaataaa

SEQ ID NO: 242570 - DNA, 623 bp, Cannabis indica
gcatttgtgaaattaacccttctaattttctgtaaatgtaaaagttttaaggaaaaaattaacatgttgtatatatttgagacacgatttaatagggggtaagttgaaaaatatcatttttatttatcaattaattaaatttatctctaattttatatttaattgaaacatacatctttttatatgtattgtacctaaaataccctgacataagagagtcacatagagagtattttaaagtgacaagggcaaaattggtacaatatttaaaaaaagagataaaaatgataaactttaaaaaagagggtaaaaataaaagagaacaatataaaaagggtatagagtgttatttcctcatttaatagtggtatattgagtgttcataaaatatttaatttaatctgcataatttaatttaattaaattcgcaaagtgcagatacttgtacttgtgcggagtggatattgatggatatgtaaaaataaccgatccaatctaatccacacatatttatatatatatatatattaaaatatataaacaattaataatttaatgtaaatactaataatttaaaaatataatacatatgatgcaaaaatatttcaaaatttaatagatca

SEQ ID NO: 242571 - DNA, 621 bp, Cannabis indica
tttattttattttatttcatttattatttattatttattgatagtggagaaaggaaatgctgaatggcaagataacagctaagagaataaaactaattaatgcacattggattctttacataattcattaagccatttggcaaattggcaatcaattcagtttcaatatatcgaaacatcccgttaagtaaggtttactacccttaaaaaattgtgcaaggaagaactaatgttggggtttagtttagataaagtttctccttttcataattaatggaaaaaaaaaatgtatttatctgtgtaatttaatattgaattttatttattttaatttttaaaaaaatattaattaattataaaatgccatcagagttttactagcagtaatataagaatttcttgtctaaagatgaaaaataaagacaaccttgagaaataccttcaaaattacaaatacaatgcgagcaacatgttcatgcaagcatatcatctaatgaaatcacactaaacaaacaaggaaatggagaagctattgtgactagtataaactattcaaaattttctgaaaatatacataaagtcctaaatagctacaatctacgcgattatgaggaaaaaaaa

SEQ ID NO: 242572 - DNA, 1155 bp, Cannabis indica
accaagaattctgttatataggcacactttatatagaatagatacattaaaaaaaaaaaaggataaatagtgcataactacctaaaattttggatttataaaccgcataaacttaatgattatttttagcagcataagtacccaatgtttataaaactgtaattttcttccggttttatcagtacaaactctgttattatcttaaacaggacacacataagacctaaattttagattatttggtctggacgaaaatatgtagtattagttacttccaaatcttttcccaataaatttaaaacggagtctgtactgacgaaatagagaaaattacagttttacaaacatttggtacttatgccactaaaaaatcattgggtttatgccgcttacaaactcaaaactttaggtacttatgtctctatttacccaaaaagatatgttaaaagacacatagtgcctagtactctccaatatcatagtattgatataaagaatatcttactgtttaacttgcttggacttaacttcaaaatttaaatttggcgacaaaacttctaaaaccacgatatcgttagcagtttactacttccatccaattttgacggtaaactaccatgctggattattcacgtgtacacagtatacacgtggcacaattttattggtccacataaaattttataatttaattatttaaataatataaaatttattttaaaaaattataaattaaaaaaaataagactttaataaataaataaaaaaactcatatttcctattgaaaaaaacgcattctctttcttcttaaaaaacccaaaacgatttcatctctctgcctcgctctctttttgccatggtgagctctgcaagggtggctcagcctccagatcagtttcttcgttgtcagaggagacaacaacatcttctggaagatctttttcagaagaaaaggacttaattttggactcagagttgtcagaagacacttccatgggttcttcttcaccatcagaactcgtggaggctgagggaggattcagcttaagctttttggcagcagaaataggtctgtcatggcgccttttggtgtgagcttccttctcaagagaagcttgttcggcacgggtccgagaggaagggccctttggagt

SEQ ID NO: 242573 - DNA, 512 bp, Cannabis indica
cctcttcttggctgacaatgatcactttcatgtttttcaatcaaccttatttaatcagatgcacacacaaccccattcaatccattcacaaatctcctatcctatcaataccatttgtattaggtatcatcaaatttaagttttgacttagaataaaacacaaatattttctggcaagattctagtattttaatcactcgccaaatatttagtcgttttttgtctttgattgaagagtgaatttggaaagataattattcttaaaagttgcttgcaccaccaccaaacttaattattatatttttctatgaatatgatgtagacttgtactcataaaatgttcatagctggagatttaactcttaattttcttagttatatgatgctgctcttttctctgtttttccctcgctttttctcacgaaaatttcgatacccacagctcctacctcggcccctaatcgtcgaacacccagagattgaaagaacaatcggaggcccatttgaaagaa

SEQ ID NO: 242574 - DNA, 1109 bp, Cannabis indica
aaaaaaaaaaaaagaactatgttgaattattgagtattatatagtaaactaactaaactaagaaatccttgccaatgccaactacattttggttatagtattagaagttaatcatataatgttaaaaacaaactttgatgtgaattaaactttttttttttttttcccaatgtatcaagattttttttaagtaaaagttacactatgtatgggtttatttactattgatccttatattttcttatggctctttggaagtgtaaactagagtaattaactaggatgtagtttaagcaacttaagttgtataaagttttatctcaaaattaattgatgagtaaaataattcatgtatctaatatatgatattagattttcacaaattactaataattaagcctcgctataaatcttttataattaaaaaaggttgcactaaatatgtaattattaaattgatattgtatctaaattgacataatgttaaatattatatgatattttatttaaataaaataaaataaaagctacaaaacaaaatcatgataaaatcaaataagaagataaaccattaaatttacattttaggatttgtttggtactcagtatgtgttgttgattatggttacaaattttgtcattcggaagaaaaactgtgaattcggagtgtagatacgggaagcttggtgtgaatttagaaagtcttgtgcgaaagactatgtagaatccaaaaggtgtttccaaataagcttactgcctctccaaatagattgtcattagtttggagatgcacttccggataacttactgtaagtcttggttgttcatctgggaaggagcgcttgtacgtattcagatagcttgtctgtattaaaactttcagattgtttgtactaaaagcgtgttatcaaagctggcatgatttattggtgctagtattgagttaaaatatttaaggcggtgtaaatgtgccacgatgttctcataactattttaggcaacaatacaaatctataaataactatcaatctttgtaatcagaggtagaattagactattattgcttgagtgaaaatcgtgatagtgtaaggttgagagagagagtttaa

SEQ ID NO: 242575 - DNA, 2664 bp, Cannabis indica
taaaaaattataattatttgtattcagaaatcatccaaaaaaaaaaacattacaagtcagcccatttttttggggttttacagtaataatatgcttaattctatttgtcaaaaaaattactataaaaaaaaaagattagaaagaaagttacttgacacgtagttaggcaatcttgatcgttcgtgaagaacacgctctacaagttggcgcgttgtgcggaaaacccacaacaaatcggagtttttatgatatataagaagaatgacccaaaagtgttaaggaatgtggtgagtcttaacgcttaagtcaattttcactcacgcgctcctctctcgttttcttctgctagggttttaagggttttctccaaacgaagaacacaaaattaaaaataaaaaataaaaaaaaaaaatctcaatcgattgaagcatggataggtatcaaagggttgagaagcccaagcccgaatctcccatcaatgaaaatgaaatccgaatcaccacccaaggtgttatcagaaactatatcagctacgcgaccactcttctccaggtactctttactatttttcatttgatgagttctgttctagattattatagatttctgtgcttttgagttcagtacagaacatatatatttttatttggcatttatgtcttggcgtgtttgttaatttatgtatttttgtggatttttctattattacttatcatcgaaggaagttttggtttctgggttttgatattttcagattaatggtctttaattgctttgttagctgtgtattgtaatttgattggtaatattaggcttttaatgtgagtcaaatgaagaaggaaattattgtttggttgattcttgtattcatctctcttttgtgtcttttatgggttttcatgccttgtttgccttttagttatttgttgcatgtttatcttgtggtattggggctgattagtgttatggggtgatgttttgctttgttgtttgaactgaaaatttctcactctgttttgtttcatattgtatttaggagaaacgagttgctgagattgtattgaaagcaatgggtcaggcaatcagtaagacggtggccatttcagagattataaaggtcagtacaatcttgtaataagatgaagttttccatatctctctattatactgttacaaaactaatatgtaatttgttcatacaaaacagagtagaattcctaggttgcatcaagatactgctatcagctcagtgagcataactgacgtatgggaacctattgaagagggtcttgtgccgtaagtgtggtttcatagtatttccatgtttaatttaatgtataattatgtgaaatttctttttgctgtaatctgctgtgatagcatcatgtcacacattttgatggttttgttctgttcattttttttttatgtttactgagttgttaaaattctgatgcagtgtggagatgactcgtcatgtctcgatgatttcaattactttatcaactaaagagcttgacaaatcctctcctgggtatacattacagcttgataattgatcaactttgttctttttgtgtgctttgaactcatctgactaaatgaacgttttgtgcagttaccaagagccttaccaaggggatcagtctaagccacagccaaactatcagcagcagttgcaacaacctaggcaacctcgtgtgccatataattctgtaaatgaaggtgatgcaaacaacatgttttctcatccatgcaacatgcttctacagttttatatattcttaatttctcgctttgcttttagattcgtataaccgaggtcggggccgtggtagaggacgagggaggggttggaataggggtgggtatggtggaaactatcaggttgggtatggtggtggaaactatcaaggcggtggatatggaaattatggaggaggttatggaaactaccaaggtaatacattcttgaatatcttgagggctcaaatttatttattggtcagttaatgattaccaaataatttcctttctaaccttagtattttgacatgcacttactttcactagataatggtggatattcaaatcggggtagaggtggtggaagaggcagaggtcgaggttatcgaggtgagtagtttccataactgtaattattcatgcaatctgtttccttcattgatgctttgtaaactaatagttgtgttcggctgtttatattgcatactaataaagtattaaacctgggaaagaactcattttgatgtgttcacttgaagttttgattgatgacttcttctattaactgtaatgggcagtgtatagtttcactttcaatacccttccaagttctttccttaatttccattaccgatcaataaagatgtcctttagtttagtttcttcttcttggcaagtatgactatccaaatatgctttatcaataaaactaaaatcttgaaccaactgcttatcttataggtacaggtacatatgaaaggagtacaggttctggattggaaagaggcacaggttctggatttgaaagaggtacaggttctggatacgaaaggggtacgggttctggatatgaaagaggtgccggatatgataggggtacaggatacgaaagaactggaggaagttacgaaaaagtta

SEQ ID NO: 242576 - DNA, 1700 bp, Cannabis indica
tttcgattttgaagttcaaatctcccttgagcagtggcttttgaattcagaaatgcattcctcggttcaattattggtgaacgacgctgggatactggctacatcgcatcgactcactgtcgaaggctatgatgagtaatgtctttcatagttgatttaatagtaaatacagaaaccaattacctggttttgatacaatattttcattttatagacacatgctattgtctaaccaaatacagaagttttaggttgctcttctgttctttagcttgttatgactaacacaaattgaaactacagtctttcagagttttttggatttagtaggcttttagttcttcacagctttgtgttatcatagtatgacgatttaaatcaacagaagaattgttttattctaatattacatctggtctcttactcccttgaggtataggttacttaatgtaaaagttttaatgtaaattttcagagttatggctacaaattacattggagcattttgtctgacaaagctgttattgcctctgctcaaaaacagtcctataccttcgcgaatagtgaatgttacatcctttacacatcgaagtggtaagcttatatcagaagtctatgggttcaaactttttctgtaattgatctctcaggtaaatcagtatgtctagtcttgatgaactctgaaagtatgctgctccatattaacttgctcgacccttgcttttagtctgtgatgtgaatagataaaaaaatcttctattataatttgacaaatgcaaatccatttaggtgatgtgaggagaaaagtgaaaatgtgactatttctgtataggagactacaattctgtcaacacacacacacacagaaagaagaataaaaagagagaagaagaagggcacgagaaaccaaatgaatacaaagtcaagcaacataaaattataaaaggaaaacccttgtaatccatagccaatgatgacaaaatctgagtgtctccttgatgaaggaaacatctggaatgttatctttaaaatcctatattttcattccaatcgcagagtcaagtaaaactttcatcaatgttgtgcttgtgtatctaaccagtaacaaaacaaagtaataagtgaattgtgctcataaatcccagcaaggtaaatattctaaactagtgccaagtaataaggtttacaattttagacttgatagaaattctacgtggctgacattgtaacggttataatgtgatcaagaatatgaattatgcaatttaagttaggtacaacatgttttttttccctatttttcttttctttctgcatagtgctatagttagatctgttagttcttcatcacttcctttatgatgttaaatgtgaaattaacattgctatgcttttttttcctttttttctttgaagtatctagtgttcagattaacaaagatgttgttgctgggaagtggttatcaggattaaaacaatatccatttgctcgagtgtatgaattttctaaatgtaagttgtggcgtttacataagatagtagctgctattttttcctcttaagtttaacaatcagtttcccttatcttttgcagtatttgtactgctattttcttatgagcttcatcaacaacttgcctcaaatgatgaatcttgtcaaatatctgtcctgtaagtatttgcaaattcttagcagtcttt

SEQ ID NO: 242577 - DNA, 4201 bp, Cannabis indica
tacgttactttacaaaaaaaaaaaaaaaataagacaaaaagcaagacccagaataatttttaatatgattaactgtcaagttatcattcgacctataattgaagtattggccaaaaagtgagcttaggatatctcaatttattgaaaaatagtttaaccaaagttcaacacagggaatcaatttgatttattttgcaaaatataaagtctagtaattgttttaataaaatgatatagccaattatgtattcaagttaaatataggtttcaaattagtatttttccagaaataatataactcataaaaatactcaaatatcctttttgatgagaaaattctccaaaagaaatagtagaaaacattttttggaattgccaaaaactaatacaaaattttaaacactatcagtatttggttagaaggaatgaaaatataagaatagaaatgagaataggaataagaataggaagaaaatggaataaaatttaaaatgcgtaaaaaaaattgataaaaaaattagtaaattttttctcattatgcattagaatggtctttgcttttattttaaaatggaataggcattctactaaaatagtagaaaggtcattccattagaatgatattcgaatactttaatatacaactaaataaaaaaataaaataaaaattgttttcttataaaatattccataatattctatttcattacctgcaaccaaatgctacctaaactaattataaaaatacagcattacttcaaacaaatacagcaataaagaaaaagattccataacaaacttaaaacaaaaatgagataagcgacgaaattatatttgatatttatgagaaaagagaaaagctatagactatagagtagtactcttatcggtttttaacactttcgagttacctaatgaaattgggcttgcacgacaagagcccacgaatacaaagtgaatcaagccagggcccaggcccaactaaaaccacgtgcctaccaaggacacacgtgcaaagtctgattcgctccaaattagggttttggggactgaggtatattacttgagctaatttttcaaggcttcaacctccgtcttcgtctacatcttccaagcaggaaaaaccctaatttacagaaatgggtaagataaacgagatccatttccttaattcttctctcattcattatcaatctgattgatttttcgtttgaccgttttaattttttgtgtttgttaaagcgaggattaaggttcacgagcttaggaccaagaacaaggccgatttgcagagccagttgaaggatctgaaggctgagcttgctcttctccgggtcgctaaggtcactggcggtgcacctaacaagctctccaagatgtaacatttctttctcgttatatttactttcaaatattggaatgtatcaaagtatggatgttgatgattcattcccataatgtgtttgaatatttttctgtgtgggttgtagaaaggtggtgaggctttcgattgcacaggttttgactgtgatttcgcagaagcaaaaggctgctttgagagaagtatataagaataagaagcttttgccgctcgatctgcgtacaaagaagaccagggctatcaggaggcgtctcaccaagcaccaggtaagatgctttaattgaacttattttctctgcattttaatttgtatatatacatataaatattgttatatatgaacaataaaaccatatagcagaaaattttgatgtatacataggtttagaacatgtaaatagttaatgaatgtatgtagtttatcatactattattattgcaccactatatgatatgccaatttgtttatatgtccaattagaagaaactggctatagttgatcttgatgcattttggagaattggtataaacctacatatttgtgcttattttttccctttgtttatagatagatagcttcacagttggggcagggttgaaattcgggcatgtgtttaaaaagatcactttttttcgtgacttagtaattgaagtcattagtatggtttgctagttctactgctactggaaattctacctcagctttgctgattgtgatctggggtttgagaatcctaattttctctttatctctcgtgaattcctgaaggttgaatgaaagaaaaataaacttgcttgttatctgaaatttgttacaactacttaaggtaaaactcactctcaaaaataggagtttacaagtagttataaaccaccaaccaatcccactcttatttgatgtcagatcctaccaatacacccccgtagagccgtcatccacggcggcccactgcacactgaccagttgttttagatccatttcacttgatttttggttattccttgtattcataagataacccaagaattctagaagtattcgaacttgtaaacttactgttatagatattaaagctgattagtcaagcttattgccatgccttcaaaagaatttagggtttgattaaagatctagatacatatgtattttatcatatcaagattatctatctaaggagagctcagggaaattcttgattccaaataccagaagacagaaaactaaaatgtaaaatctttctaatttgaaatgactagcattttttagtccaaatttgtatttgagaattaccacgtgatcttttagttgccaacgttatgtgactaggtttaaagttttttcttttttaaaaaatttctaaaagcactcccaatagctcctttaaaataaagattctttaaaaatttaaagaacaatggagcaaaaacaccttccaacaaatgatgtaaactcttctgttttaaagtatccctattttcttcaaatgcttctctacatgtagagaagatgtagagaagcactattcatcctttaaacatattttactaatattataactatttttattctatttctattaatgtattatatatatcaaaaaatatattattttcgtgatgtagtaatataaagaaagtggtgttttcgtgatgtattttaaaagatagagaagaaaagttgttgggagtgctcttcattttgttgtagttgctgagtgttttcttgtttaatgcagttgtcattgaagaccgaaagagaaaagaagagagaaatctactttccaatgaggaagtacgctatcaaggtgtaatgttggatcttcttgggaagttcttaacatgttttcatccatttctaggatatacttttaaaatgtttgtttagctgcttttcaaatttaatcattggggacagtatcaccattgagtttttggtttttcctttgttcagttatatgcatcctatgtagtactactactacttcaattattggttttagtctcaacaaattctatgtgttacttttgggaactacgctgttcttccttcctccttttatagcatcacatctaatcatcaattaatttgatcgaagctcagtttgtccagaaaaacagaattgaactaatatttatttattattattttacttaacaaaagtaactatgcaatcaataaagttaaaatagagtgaaataacaaattaaaactgttaatctatttttggaaaatgaatcttgtacaatcttacattggcaaattgtcaaagtggcaagaatttgcttttagtttaaagaaagagaagccaaaacataaacgccaaaccaataataacttaaatcagtaaatcacaaccacatttaaaaacgtgtattgaggaaatagtgtctattttcgttaaaaattgtggtaatttagattaggctggtttttttgtgagtattgagtagatgaatagggtgtattacaaaatataattgtatttgtgtttgtaagaaaaaaaaaaaagattgtgaatggagaaacttataattcatgaacaatcttggtgactgatgtgtttgaaggttgtgtgagtattttaatttttataaaagttatgaaataagcaatttagttttcataaaaggttatgaaataaacaggattttcgtagaggattataaaataggcagcctgaatttttataaaatcttattaatgagcagtttagtttttataatggtaagggtgtgattattaaagagactattaagaatgggatggttgtatataaaagggaagtgatgagaagggatggttgtgtgtatgagagaag

SEQ ID NO: 242578 - DNA, 1220 bp, Cannabis indica
tattttatatgattgatcactaatagaaaaactaaccgttccttaaattatatattcatacatttttatcatttaagcaaaaaatgttagttttcaataattattctgctgtgtattttatttttaaatcatcatacacacaaaaaacatataaaaatatacattatccattattaaaaaatgattaaagtgtacctctaattcaaatatgttgcaagcgactaccattgtagaaccccaagttaaaaaaatcctcttttacaacctgaacgtttatataaaaaaaaattagaaacaatataactaatttttcactaaatgaatcatactaactactctataccttgattattgatttgtattaaaaccatcattcaaccaaaaaaatataaatcattactctgcaaaaaaacattgttggttttatgaaaattaagctacaaacattagcttaaaactacaaaacacactttctttccaactttataaacttgaatccttccattaaaagataacattccaaacaacaattttaactacttatatacttgcatatttccaaaaaaagatactaaaaggtcccttcacagcagtgttaccaacaaaagagagattaacacctagctaacactacatataaatcctactgtccagatataccattcactaatactgacaatgaaatgtactaaattggagcttaattacaattctaaaaacaaaaagtaacaaaacaaggtactttgactccaaaatagttcaccaaaaagtttcattccagttgaaactccaactttagtacaccaaaaagtttcatcctagtgcagattcaaaaccccttcaatccaatcaagcttttggaatcctcccaggaaactcagactcagaatcataatcattcaacagtttcttcttggcatgaacatacaactcaacagcgagcttcctcctaaaaaaccccacatctagaggatttggaagtttctcaatacatccatgaataaagaaatcagcatacttagccacgaacaagccacaatcactacaaacaaaacaagaaaaaaacaaacattagactgaatactaaaaaaaacaaaaatcataacaatataaacacatttaaacatacttgtctacttgggtaacttagtaacaacaaagacatcaagcatgtcctcctcctttttccctttaaaaaatccttggcttgtgtcaatatc

SEQ ID NO: 242579 - DNA, 534 bp, Cannabis indica
caatattaattacaccaaacaaaaacgtgctcaaaagacttgtgcaaataaagatgtgaacccacataaacttggccaaaattaaataattaaagaaagacttgctttttgttggaattaataaaacaagacttgctttttggtgatgacttagtcaattgtattaggaacttgttatctctttaccctaacctcaaagtggttcatgttcataggagctttaatgtaaccgcacataatacagttaaatggggtcttgggcttgataatgagttcatttggaatggctctttgccttccttgtagtcttgtggtgttggtttgttttccacaagattttatttgtgagtgtggatattttattagtatttaggaaaaaaagagacataacataatgatgcaggcgcctaaattcttgaatgaatattaaaatgaaaaacaactcatcatttcagtttcataataatttgttgaggaccagagtcttctctttttcctttccaattagttgtctttcttttctcgtataaagat

SEQ ID NO: 242580 - DNA, 1102 bp, Cannabis indica
aaaattaatataataataaagaatatttttttagtgtaatttttggtattatggttggagttgaaatattttttgacaccaaatttaataataatgtaacaccaaatttagtgtgtcgttagagatgctctaaaaactaaaagttctaaacttcatataaatttcacctacttttgagtctttcatttttatttttattgagtaatgatgtgtgaccttacacttttgcatcattgcaaacacctatatctatgtggtaaaaaaaaaaagaactcacccaagtcatattgatttaaaataggtccgactaaatttaaagggttgctcaagttttaaatgcaaattagagagtaatttttagtcaaacttattttaattttccctcatgttttgtaggtagagttgtagagttgaggttttgggtaggtgagaccgtgagaggcactcatggtgcatagcactaaagtgtcgctttataattagttagtgattttttataatatttattaaaataaaataagtaggacatgatattgaattgcaccaataacaatattatattttaaagagtgctaaacaccataagtgtcctttaatatttttatttaaattataaacttattaattttttgtcaccaaacataccaattgtttataagtttggtgctaaaagtgacaaacagaaagaactcttattttgaaactacttttatcactttaacttatcttcgtcttttatcattcattttctttttatcaattgaatggtattgtccctttttcatatagaattaataattctttttaggtagaaattacatgatatacttctttagccgttgttaagttatttttagcctaatgtttagagtatttttagtatctattttcttcttgaatactaatttttgaaatgggaaatttgattttttatacttacaaaacttaaattttttttttaaaactaatacattttacactacaaaaaatatgacacttttttcaaaaccccgaaaatacccccctcaataactcaaacactctctctcttcctctctctgaaaacgaatagaaaaaaaaaagacccaggtgcgatggtcgg

SEQ ID NO: 242581 - DNA, 794 bp, Cannabis indica
aaaacttataatatttatgctacaattatcatatatttaataatcaattgattgatgcaaaaagaatgcatatatataatatatggtttgtttttctctattgatatgtagcaccagctatgagtacttataatttggctccttcccaattatgatgtattaaaggtacgaattggaagattattaatatgaattatattctatagtaataatacttttattttattccatagaaaatgtttgaaagagtaatatatatgattaaatattgcctttatatttctttgatttgatatatgagacttattgtacgtagtactatatattgatcatctttgttaatgttcacatgcactgaataaatgaaatgatattattaataataattaattaattagaaaaacagatacaataattaatataattatatatatgtgatatataaaaataaatttaagtcagatcagtccactgtaatcagagttggtacatgcagtagtctaatttaataataatataataattttgagaaattaataataataaaaattattggttggttttgacttttgactttagtttaggagaataattaagaaaattgaattatggaatatatagtttaattggtcataatatataaagctccttgttggtggcatctagattcaagtcatatgcttctgtttgtttactaattagaatattttaatttttaataaattatgatgatagccatgacaatatgatctttagaaaattagacattaatgcaattttaagcttagacataa

SEQ ID NO: 242582 - DNA, 2557 bp, Cannabis indica
gtcattaacttagaagacattgccctaatattccattaaccataagttagtgatcaaaacatgaaatagttttggtttaattataattgaaagggaccaatttgccatttatcacaaaaagggtaacaaagagtgtgtgcagtcctgacccaagcacaagctataaagacccaaaagagcttagatactgaaaccacgtgacctcgaacagcttttgtcttcaatctatgatagagaagagaaccatgccagaagaagacaaattacattcgggtcagaacatgatgctgggtcggttgcccgcataagaaataaacgagggttattttcgtaattgagggaaaaccccccatgttgagctacatagtaatagtagactagaatagatactggatagatagatgaaatccaaaatggcaaaattgaggattttttaaatcaaagggctttattgtaagttggtatgcatataaggccatgctcttcttcattttactctacgcattccatttccatctctctctctctcacacacacacacacacactctctcttccttactcactttcactttcattctcattctctctctctaacagttgcagctgatcagtgagttaaattgtttccacaatgagagggattgctttactgtcggtgctattgtttgccactttccaactgaccttgtctataacagatggtaagcagcttagttagttcacttcaaaataatgttttcattttctcatgctcaaaatacgtgctttatgtattatatgtatagacacacacacacacacacactttgctcaaaggaaattctgattaggaaaattagaggatggccaaaataatctcatagttataaactgaggagttagagagttcagggtcagctttaacaaagaatagcatccgatggtgatcgacctttcccttacatattgtatgatttgaatttcacaacggttgatttgtcatttttgaatgttggtctatcatttattggcttaactttgctgcaaagtagttaaatacactttgcttttttggcatagccaactatacaggagagggttttttatggttttctattcggtatagccaactagtctgtctgtgtgtacttgtacttaatttgttggcctttaattggctctttgcttttcgctcactgcacataaaaagctcacgtgggttggtttgtgaattgtcacaaatggtccagtcagtcaatactacaaaagctagctgactaggtccttttccacccatcaacaccaaatatacatacaagaaaatagaaataaaacctttgatacttaacttttaaaaaaatcaaccgtcacaaggagaaaaagaaaagttcagcaaaatgttacataatctcttccacatacatcattaaattagtaaataattaaatcattaagtgtgactccttatggatatgttatgaatgattgtgtaataattagttgtaaggtgttgctttctgagctatgtaatgtgttacattttgtttgcattgtcaaaggatctgcaaacaaaatggctcattcttgccagagcctcttgttgttttggtgttgatcttacttttagtggaagttttgttcctactaatttgtctctctttgattttggataacttaaatgtttgtgttaacaggattattggataatgggaatttcgagctgtccccaaaggcaacagaaatgaatgggacaattgtgaaggggcgttacgccatacccaaatgggaaatatcagggttcgtggagtacatcaagtctggccaaaagcaaggcgacatgttgctggtggtgccggagggtgcgtgtgcagtgaggctgggcaacgaagcctcaatcaagcaaagagtgaaggtcagcaaaggccagtactactccatcaccttctgtgccgcgcgcacctgtgcccaggaggagcgcctcaacgtgtctgtccctccggactttgggattctccccatacagaccttgtatggcagcaatggttgggattgttactcttgggcttttcttgctcctcttaatgaggttgacattattgtccataaccctggtgtcgaggaagatccagcttgtggtccacttattgactctattgctcttaaggctcttgtttctcctaaacccactagtggtaagttttttacttggtcatacaattattgggtttttctgttcatataacacatactattactcactttgtcttgattaattattgttattttttgtccatctaaacttctctaatgagatggggatggatgaatcttcactaaatacatgacattgctttggtttttggtcttttaccacttaactaaatgtactttcgtctatcaactgattcgacaatttgtgaattttcttgtaaccacaacttttttttggttatgtctgtgagtgtacccgatattcccaactgaatatttcagttctttctaccaatacacttaatacgattgtctcaaaataggtcccaataagtattgtacctatccttttgtcctagctctac

SEQ ID NO: 242583 - DNA, 480 bp, Cannabis indica
gctcaatacaattttgacacgtgaccctctaatattccatatgtccttatgatattttgccacgtgagcctattagaatgtgatatgtgaacatatcataatgtgccacatggacattaaaatatgccacatgtgctcatgtggcctaataatgagttgacatgtggatgacacatatgtaatatgcatcctatgtggcaatccatgtcagctgccacataggatgacacttcataatccacatcacttgcttactcatcatcatcaactaagacaagtggggtccaccaatttttttccctacagatagaaataattgtaggtaaagatctttctccacaatcttttacctacaattgtaaattatttgtttatttgtaggtaaagatctttccctacattagcagacttgtacctacacttattgtttgtaggtaaatgacccattttcttgtagtgagattagtataacagtatgca

SEQ ID NO: 242584 - DNA, 1055 bp, Cannabis indica
atcaaccagtgatattgacttagaaagatacaacggtaagattataatatcttgaccaagatcaatatcggtcacagtccaatgtatactccatacatccgaaactagcatactttgtcaatgttctggaaagaacataacacttatccaaggtgtaagtatactttatcgctgattatcacatcagtgtaaatccagtgcactgatgaatcaagggacattatcttttaaagcatataatcacaattacatttcactgtgttgacatcactataattgtgaataactttatgttctcgacttaacagattttgtatacattaaaccataacacatgaaaactacatgtaaacataaatgacttctaatcttctattgataacaaatcagattgtattaaaatgggttttatttagggcataaaatcccaacaatatcgacaaccataatatattcttaaaatgtcaaaaaactatcaatatcctattgacatcctataaacatattcttaaaaaaattgaaaagacctactatcgataacatattgacattttatcgatataaccaataaattcttacaaatatatcctaatcaaaatgtcgataaaccatagataagatgtcgataacctatcgatatacagtaaaaaaatagaaaattcttatgctcaaactattttcaattatggtcgacgttatatcgataacctaccaatatctcatcgataacactgttaaaatacacagacaccactgaagaacatacataaaaacacacattatccagaatctacaaaaattcaactaatctgaagaacatacacaaattcgcatcctaatctatgaaaaatctaattttttatttataaaaaaaaaaaaaaaaaaaacttccttttttactgagcttggtggtggcgacgatttgactttgggttctctcggtggtggcctgatgtcggtggttcgtggtcatggtcgtcatgggtcgccttcgttgtcgtcttcgtggtggtgaccgttgggtcgcctggggggaaatggagagagagagagag

SEQ ID NO: 242585 - DNA, 1277 bp, Cannabis indica
gagttgttgacaggaagctgacctatcaccatagaaggactggctacagcatcagcttgggtgatagaaaacacccgagcaggtacaagttttgcctttgacttcagctcttctttctatgcctaagggcaatctttcttgatatgcccaaccatgccacacagaaagcatgtcttccggttgcactcttccggatgatatttcttacaacatgggcactcagggtaagagtaaccctgtagtccacctctgccttggttcccacggaactgcttactctgccccgagccaccagatgcaggagtaactttcctcttctgatcaatggtggaatcaccaccatccctaccataggcaggagtaggaaaagtgggggttcaaccaacattcagagtcatttggggctcctaaaggaattaaaccgcaccctcggctcttagagctttctcaatcattttcgcataagttgttgcttcattggtagtgatcaccagatcatgtctaatcttcacattcaacccaaccaggtacttttctttcttactaaaatctgttgccacaatacccacgatgagtttggccaaacgattgaactttgtggtatactcaatgactgacattccctcagtctgcactaactagtaaactctttccgcttagcactgcagacggcttcattataatacttggcattgaataactctcataattcttcccaggtcataacagtaacatcccgagtgagggacaccaattcccaccacaccagggcgtcttcctagaactgaaatgtagcacaggtaactcgatccttaccaaccacacccatgaaattaaaaatttgctcgatcacagtgggccactgctgggccttcatcacatcaggacctcccagaaacactggatgtgcttgcttatggaaccttttgtataacggcttatacggttgccaacaacaagttgttctgctggcattactagagctacaacgacccgagcttattgtaggggcacggcaggaagaccctgcggccttaatcttagaatttcttcttcctgttggcgaattcgatcttgcatttttgcaaacctctgctcccaatcgggaggagctagtggtggatttacaggacgtccaccctgaactctaccatggccacgaccgcgaccacggggattctagggaatttgatttccctgaccgcctccggtcccaaccatattacactgacttcttgtattttgctgggcgtccatttaataggacttagcctgcg

SEQ ID NO: 242586 - DNA, 1304 bp, Cannabis indica
aaaaaaaaaaaaaactattaaatcataaaaatctaaatattaaaaaaaaaaaggattggttatttttaggttaaaaatttagtcaataatcttttttaatattaaaaaaatgtttgggaatcatatttgcaaaatgtttttaattataagattaaaaatcttatttgaatatctcttaattgagttttatgataataattaaaaatatatttaggcctatgatactactatgtgtcatttttagtaaaattaatatataattcaaatagtgaactgaaacaaatttttaagaaaattaagggcgggtttgaaaacctaaaaaaatttgaaagtgaacgtaactaaaggtaattacacaattttatgtttttatttgaccatattattatactgtaataacgtaatttaaaataattgaaaggtctcaattatactctttaattctcataccacataagaattggatgtaattacttaaaaattttcattttaaatatgaagtacaaattttttattttaaatattaagtactaaattattattttattgtgtaattattaactatttttacaaaaaagacataaaattaataaataattaccacgtcatattcaaacacacattatattttattataaagtgtaattactatatattacgaagtgaactattcatagagttaggtcattattatctaattcaatcaaatataacaattcaatctttaggtagatattggatattttttccaaccaatttttttatagtttggacaaaaaaaagtgataggtttccaatttgatcaatgttcactctcatttactctcgattatgatagaaatttgattatttgagtctctcttttgtttttttaggtcaaaatttattttcaataaatataataactatctaagtcagagctaaagtttataataattttagagtaatttacggcataaatacttcaatttaatttttagttgtaaataaatacttaatttttggcgacaataatacctaaaagttataattttaaaatttttctaggtacctgattaagtaaattgtcacatgacaatccttgattggtcaaagtcattaaatttttattatttaaaaaaaaatagttcaaatataccaataaaaaaatgacacgtgaatttaatagcttaatatttagcggttcggtacctacaaagttccagaaatataacttaagtattattatcgccaaaaattcaactgaaagttaaatttgtattaatgccgcaaattacttttttaaaaaaataatttatctttag

SEQ ID NO: 242587 - DNA, 1075 bp, Cannabis indica
aggaaaaaagaaaagttgcacgaataaatttatgtccttagatgattttgatgaatgaagttcgaatatttctacgtaatctaacaacaaagaattctaagtgcgtatagtcagtggcggacccaggatttatgttgagggggatgacacttttttttataagtgaaggggtgcgccttttttttttttatattgcataacatgttaaaaattaatgcaaatttatattttagtaaatatagtataaagtaaaaaaaaaagtaataataaaatatatttggttcaataattaaaacattaaatataagtattattggtagatgttcaaaaagtaaaatactaaagtaaacaatttatatgcatgaaatgactttaccattataccaaatcttattttatgtatatggatatcacttttatttataaatatatgttgtaactaactaaaatacatatataattttttttcgatttttttctgcagggtgggcgactgccccacctcgcctctatgtgggttctcccctacgtatagtcaatataaatgtatgcagttattaattaattatatgcaattataattagttacaacctacaattcattaattttttacgaaatttagcatcggaatttggaagataattgtaaattacaatataaaaatgttaaatactattttagatcctttattttgtaaaaattattaattagatcttttgttttgttaaatgacaaaatggatcctgtatttttcaaaatgataaaaataggatcctgagcttaatttttgataatttttttaatataaccaacttgaagacaattcttaacacgaacagatacataaaatgtaaacagttttgtcataacacctttagatcagattattatcaaattttattttaataaaaaatcaatcaagggtcttatttgtaccattttagaaaatacatgatctattttgtcatttaacaaaacataaggtccaaaatggtatttacctatataaaaattagattaattaggatttttgtttttttgaatattgatatgtactaaatcattatttttaaa

SEQ ID NO: 242588 - DNA, 564 bp, Cannabis indica
ctctctctctctctctcaatccaatatttgttcaagaaatacggaccgacacggtacgaaaatactgggcctacgggtcgtgccaggcctacccttaaaaaatattgacacaacaggacccatattaaactgtggcacggcaggacacgaccaatttttttaaaaagcacaaataaatactagccgaaccaacacgacacgtacgaacttacagcactgatcgagaccaaacatttctcatacctaaaacgatgaacagaagcaaccgagtgaacaatataattaagtaaaattgatattagatttcatatgaatatcatatgtcatatattttattgtaaaaaaatgtcaaaataaatttttacataatgtgaactaaattataaacacataattttttctttttaaaaaaaaaataaaaaaaggaacaagttaatcggattagttgtccccacttatctttatctaagtctatcattgcccatgtctttatttgtttttaacttttgtattcattatacagtagaacctctattcaagaatactctattcaagaataacctc

SEQ ID NO: 242589 - DNA, 1858 bp, Cannabis indica
aaccactaatctgtcttatatattctatagtcaaacatattacacaatactacatagtaacattttgtaacacaaaatccttagtaaaaaaaaacccaagaagaagacgaaaaataaattacaaaaagaatacaaaacaaaagtagagagcaataacagaatggagtgagtaagagctctaattgcatgtcttgttcttccacttgccaaccacctcagatagtgctttagtagaagccccatttggactcagagccttagccgcagcttctttaagatccttcatttggtttctcagttttttaccatcttccccttcgataagggacttaactactttagcaatttcttccctttcaacaataccgttctcactcactttaggccttatggcaactttaatttcatgggtcaacataaaagcgttcattctttgctctgcgtagagaggccaagccacgagtggcaccccactgaccacgctctctagtgtggagttccagccacaatgggaaaggaacccaccagtcgagccatgactcagaatttgggactgtggggcccaagatggcaccacaaggcccctcccttgggttcgctccaaaaacccattaggtaagaaatcaaacgacgattcgttttgggcagtcccgttaaaataagtggcgtttgcgactttgtcgttgggccttctaaccacccacatgaatctttgctcactcatctctaatccaaaagctaactcattaatctgctccgaagagagggacccaccactaccaaacgaaacgaataaaacgctgccatgtggctgcttgtctagccacgtcagacaattagactcgtcagccttcgttgacggttcaatgttgaccaacggtccaactgggtaaaccggtggcttacctggctcgctcttcgtcaaatacgaaacggctccggtctccaattccaagaacgaattcaccataatcccgtcagctaaacgataccgttttgcgttgtgaagtgtccatttgtaagcgtcgtttgttctatcctgaactgggtcaagcaattccttgcccgggataggaatacaacccgggattctgaccggctcgggcagctctctgaactcacacgacaccgtttcgtcgagaatcggcaagtggaggaagaaagacaaggtcatggctgtggacgggaaaaaaatatacgacaacatgttgaactctcgtgcgacatcaaaagcgtcggtgccgaaaaggtcgacgacaagagcactgaccgagccgaaacgcgagaacattgacttgatgatgtttctaagggcagggagagaacgtgccactgtgagagtgatgatagtctcgacctttgtgtcttctgggaggtcgtcgaagttaaccggcggaaggaaaacgtggtcaatttcctccggtaaggcgctcagaacggacttctgggtctttgaaggtacggggccatcggtcgaaaccacgaacgtgatggtgaaatcatgagctctgactaaacgcttggcgaattcgacgagagggatgaggtggcccatccctggagatggaagaattgccaggtggggtttctgatgagcttgaggttgttcagccatggtgaattgatgatcaattaagctgtttttcagtttttgaagtacttgtatgtaagtataagaaagagggagataatagagaaggctatacgggacttaatttttgtttgatttataggttcaatgtttcacttctagaattgggctttatttttaattattaaaattagtagccaatttttgaataatacaaaagaatggagaaaagttttagagagaattttttttgtttttttaaaaaaa

SEQ ID NO: 242590 - DNA, 649 bp, Cannabis indica
aaaaataaaaattgtatattaattataatttattattttctaattttaagttataaaactaacgaatgtacgtatattattttttattattaatttttataaaatgacaataaaagttacaattttttatttttctatggcattttacttatcactccattttcatatgtctatatatatgtacatgtatttgttgtagaaatattttgatttgtgttttggtatatttttttaattaattgatgtaatggccaaataggtcatatatatttacacatacgataagtttgtaaatactccaagttttatttttagcaattttttatttgctttcaattataattggaataattacataagacactattttttgtaaaatatttacatttttacgttcaaagaatatttttttacatttttacggttttctaaaaaataacacgaaaacaacataaaatcaacaagaaaataacataaaagtaacatcaaaataacaacaaaaaaacaacaaaaataacatacatataacaaaaattaacaacaaatgaacaaaatttcaacataaaaaaccgtattttatgtaaataaaatcaaaaaaatcgtaaaaaatgtttaaaattaccgtgaaaccgtatttttgttatttttt

SEQ ID NO: 242591 - DNA, 1017 bp, Cannabis indica
attgggtgaacaataatctgcaatacattctaacagaagaaagaaaaactagttaatcatttgatcctaaagttcataatagctactagaaatttcaaacatataaaaaagaaaaaaaaaaggggtattaagaattagagggtttctatcacagaatcatagatagcccatttgtacataaacaaaatagaaaactcacaggggagccttgactaggtggcctggttaaaacatgagtccccaacactttggacttaatcccctcttctaggttactttccatcttctctctatccctttattttattttacttttgctttgcttagctctcctcagcctagtttgaactttatctagttgcctacgattacagcgcactctgttttagggaaactaattttttaaacggataaatatgaatatgatttgaactatggtattggacccaccttttcagcggcaatgtacaagatggggtattcctatttgatatcactctcttttaatacacatcttattttcatccaaatttggtcctttctaaagtgccagaacaataagagaaagaaagaaaaattaaataataaaaaaaaacgccccttgttaactttctccattttccctctttctaacacacatcacatggtttagattggcctagcagtcacggcaccgttagttaatcgagtatgacagattagcaaatacccctaaattatacactaaatcaaatcaaattagctatggacctatagaatgaattatgtatgcgttaggtgtaacatattttcttttctaagagttgagattaataattttgaagcgacttctttcttagttgcttcttgaagcttctactcaattgtataattttgacctcatcaaatcaaagaagtacaacataaagaagaaaaaggaaaatcagtgcatgaactacaagcagtcctggatatctttttatgtaaaacaaaaaaaaagacagaaaaataattgccatacataagaatttatgagct

SEQ ID NO: 242592 - DNA, 1068 bp, Cannabis indica
tttttaaattttaccaaacacatattaactcataattttttccaaaagtgattttagcttttttaaaagctcccccaaacggggccttgttactatataaaaattattttaatattccccaacttggttagtatttaaatcaaattaccacttaaaatataaggttcctcattacataataaacatatgaattatcgcaataagtcctcattatatgtcgaatattatattccatgtaatacaatatattcattatataacaatatacttaatgttgcaatatacttaagcgaacaaaccataaacttcatgtttattctggtcctcttacgatagtttcctcagataaaattaaggtgcatataaatataagaaaatattgaaattagagttttattgaataattttagttgtacaaccaaaaaatatataggggtaacttaatctcatatttactttattatccttgaatttgtgttgcggcatgcctttagtcaaggatattgcgatcacccaattcagtgttacgtgcttaatgaccacttatcacgtctctttatggctaaatactaaatgtcgatatgctagcttcaaacaatactcttatagttcttagccataattattgtagctgaatttgtcgaatttttttaatgacctgaaatataattttgaactctaggctaattatgaaactctataatacatcatctcaaaataataaatgaatctaacttttataatagaaataacaattaaggttctccacaatacaatttactggtaaggttaaggacgtaatcaaatgttaatttatgtgaatcaatatgtaacgtcctatcccatagattagagacgtcatgtgtgtgattttataaattaatttagtaccgataaaataattaattattaaaatctgtgataatattaaaattttcactaaaataaaacactaaaaatggatatcataacgacactaaaattgtgtttcggggatccctattgtaaaagttttacaaaaaggctaaatatgataactaatcaaaattaggggtgttcattagatca

SEQ ID NO: 242593 - DNA, 5705 bp, Cannabis indica
gacctagaatttaattggagggtagacgcaaaatttttttcatatataaaaatattccaaaaaaataagtaaatataaagaaaaacacaattcaatatttcaattcccaactaaaaagatccaaaccagcaaccgaagcggtatggaaagcatttcttagttggaatgggttgttcccgcagtttcgagttctatcgtttcaccagaattttctaatatggtgtaattgtacttgatgaataagtactttcaagtaaatgtaactaaaagtctttcaaaaaaaaaaaaaagagtaaatgtaactaaaacattattcgaagaaaatagtcaatacagtattgccaacatatatttttaaatataaaccagtacaccactttatataaaacaacatataaagataaatatataattactttggatttcaacaacgtaactcaatgcctccaatcaaatctgaaattagacatttgatgtagatcattttggtttggttaataacaataaaacaatataaattacctggagacatgcaaaaaaaaacacataaattgaccatgtgaagggttttacattatgggttattgatcctcgggagtggtttgtctcttaatttacatgtaaatgcagcccaactataattgagtagagcagaaagatatattatattaagtaaaaacagcatataataaaagcattgacctggattgaaagatatccagcttagccctcaagaagctgctgccgttcaagtccgatgacatgtgcagtcaaagggcgtgcagtgccgtttgcctcattgcttcctttacattgttgtaattgttcccgaagactacgaactagttcattaagtcgttgaatgttcttttcttgggataaaatgatctgaaacaagtgggttttatcattagaaactcccttaaggccttaagtaaagtaataatcaaccaatgtgcaagtaataaaagagtttcaagaacactatgagtaatgatatgcatatacacaaatcacacaaacttgaaacacacgtatacagcaagtaatttcaaccataaagacgagtccgatttatagggaagaaacagaaaaaaaaatacacgttttaagaggtcaaagtttcatttaggggaagcctacatacccaatgataatttcaaaaaggaggacctatcatattaccacagtacatttttatctcatcacagaaataagatattgatcttttatctgaaaccgaaaagctggcatgtaaacctgcatatactcttgtagatgcgagccataacataaacttggagaagcaagtgcagatgctgctgtaaacatgaagatgtatgtactaaactaaaggtcagtcctgggagaagaatcttaagaagcatatacagatgctaattatgaaggtgggagatactagattagctaatagatttcctcttctcagcatgttaccaacacctggcattgcctccatgtgatgtgagcaaaaatgtatcagggaaaacaagttctcttgggatttgaattaatttcagaacatcaatgagagagaattggtggaggactaacatttaaaatatattttatttttggtctcatctaatccaacatcctggtagaagattaaaggatatagaagttagacagatccagatccgtttcattcaaattcttatttcggtcactcagttgatctggagaaaggttttcatttttcacctacatttcaaaggaagttgtttactcaaaattaagtgctttagttggatactaaatttgggcaagctgaacccaaatgacaccctacagagacgaagacccttcttgcatatttcccccacattggttggaccttcgcaggcagggcaccaagtcaagtcccaagaccaactcttatcgcagtgcctgttttccaccatcatatgggagtgttctcatagggcattgggtgtagcctattctactatcgggaggaataggtccgaggtcaaaaagaagtcagaagctctggaatctagctatactagcaacatgataggttctttggttagaaagaaagaatagattttttcaaaacaaacttggtgaaggaaaaaaaagaataaaatatgaacagatgtttggatttttacaataaggatttcaatgtaattgaatctccacataaaaattttaagtagggaagtcaacttaagtagttaaatgaataaatgatgtaattctcaaacaatcttcaatatattcactaaggactaattttctctattgaagaagaagggctggtctttgaaatccaaaccctagaaatgtacagattccttaaaagatgcctccctctcccaaacaagaaagttacctctaaattattctagcatcctccgctctaactctctatataacacttttctcatagagccacctcagcaccacagaaactaacagaggaagtacacaaaataaaaataaaaaaatctacattacacatcaagtagtaaaacaaacacatacttacaaaatctacattacactacacttgataccacaaaaacataattaattcctattctttccttctaacatagatgaatttgatgcagttttctatcggccaaaagcgagttcaagtatgataaatgtaggcaagggataagtctatcatacatctatactttcctcatagttaattaagtgttcttttgcaccgggcaccggccattaatgttttatgttccaatgtgctaatttttattcaaaaggtcttttgtttctctttgtatttccagactatttaactttgtaagatcctactttgaatcaggatgaaatgaagatatttaattttccttttcagtctggttcttgaatccaattagcgggatggtagtagacccatacttttctagttagtttccttcatttttctttgttttcctatagcaactgtccaaacctacaaaatccacaagattattgctggtgacaaatgacaattaaccatggtcatcatgggattattatgacactatctattatgacgatatcatgaggctttattcctcccataaagtagcccgtatgatcctacaagtcttcccttttctagaaaagacatcaactaaaaaaacaaaggttaaattgtcaagaactataaccccatcccatgcactcatcatacacaaagagatattctatatgcaagataaaaaagattaagattacaatgttatcaaagccatactgcccgtcccaatttattatgaagtgagctgaatatgaacaagttgggagtaaaagtaatgattaatccttctccatcaattgggctttaaaacaattcaattccaaactgcccaatttcaattttctgctgttaaatatgtatcattgatgaaaatgtgattcaccacacacacaaccacagaatcaatcagaagaaacaaaaaataactgatccaaattaaacaaacataacattgaagttatatgaatctattgattgagcattagttatgatgcatatgtatttcaataaagtgatccccaagtctctaatgaagttattcaaagttatattatcatatcatttataaggaaataaacaaaaaacccatctttgtttcacaatcaacaacttcattcaccaccacaaggaacataattctttaacacaaaaagcagttgaagagaattcctaccttctctttaacgacttcttccctctttgaaacatgttgttgttgctgctgttgctgagagatagtaggagtggcatcaaggtcaataacaagtggctgtttccactcaaactgagaggtgattattagaacaatcaacagaaaaacaagtaacacaggccttgacattttactcacaaaacctgctcaaaattatttcagaacaaacaaacaaacaaaaagcataatatgcatcagaagttccacttgatatagagtttaaataacccacaaatttataattacattaggttttccaaaacccaataattatttcttcttcatcaaccttcaaacaaagagttatgaattttgaacaattgagattaaagagagtgactttcagtgaaattgagggttaggattccaataattaaaaagaaagaagaaaaataaacttacgagttggtggggttgagaagaaaaccctaaggacatgaccagttttgagaaaaagagagaaagaataagtaatggtgtttggtaaagggtacgaaagtgaactgaattgagaagagaagagagcagtgggtggagatggagatggagatggagatggcgatgggacccttgagcagagaggaaatggagcttaaaggagtgttaagcgttgatatgggtaccaaaccaactcttcttcgtctcttaccgtttgtaaagggcgtctttactttattgtgacttttttttgtactcataactctttctttctttcttttcattttcttaggctataattttagtataaattttgggttaaatttgtttcaaaaaataaaataatattatatttagtttaaattttacaatatttcctttttttttttgttttttgaaaacaaaatttgacaatatttctccaatgcaatatctaatgcaataggagtaaattaactattttttataaaataatgtattaaaaaagtcaatacatgcattaattttttattaaaagtgcataaaaacttaaaatgttaaaagacgtactaataaatatcaaaagagtaatatttattgaggtataaaatttaggagcatttttattggacactaatggtgcctagcactcttaagacgtgttgctttgcgattggctaacgatactccataaaagctattatattaaactatacgagactcgatactaaattagaccaataactatattgacacgtagagtgtgcttggcaccactggtaccttttagcatttctcaaaatttagcttatgatatattttatattaaatttgacacaactttaaatcatattatataccactattggaatttaattttatgaacatggactaaaaaaattacattccattggagatgctctaatctcaatgtcgaaaaattttacttactttttgtctatttcgacatctatgataatttttagtttaattttttttttcataatcacatagattatagttcttcaagataatttgtaaaattttgaaaaaaaaaataaaattaacgtgctgaaaataaggttcaattagtttgttgcatgcgtaactcttttatttcatatgcgtataaaatagattgtttaagcattattttctatatagtaattatttcatgtttctaaaaaattatacatgatattttaataatcataacgtaaacgattataaaaaaattgaattaaataattctcataaatgtcgaaataataggggatgtatcagattcagtgcacacttttttggagtgcattgtagcaccccaatattttatagagtaaatactatcaaaaaattttatgacacccccaatgttttgtacttgtgcactaatatatctacgaaaaaatttagtctaaaaatatttatttcttagtcgtatacattataactatttaaaatattttataaaattttgattttttttttttttggaaaaatttcaaatatagaaaatagtattcacacaatattcacatgaatataaaa

SEQ ID NO: 242594 - DNA, 721 bp, Cannabis indica
atatactattttttttaaaaaaaaaaaattcaaatttaaagtttgatttccaaattggtttctccagttgatttctatgtgggttgccattacgatttttagttacaatttaagttagttacataggaatttgagtaatttgcagtataaatacctaagtttaactcccaattgcaaataaatacctaaatttaattttcggcagttataattttagaacttctgtaggtacctggttaaataaattgtcatgtggcaattcctgattggtcaaaatcattaaatttttattatttaaaaaaaattaattcaaatataccaataagaaaatgacacatggatataatggcttaacattgaacggttatgtacctacagagttccaaaaatataacttagtattattactgctaaaaattaaacttaagtatttatttgcaactaaggtatttatgccgcgaattactctaaaaatttttatataaaatttcgtaaaaatatatataaaaaaactgtttagaagtgtaaaaaaaaacctaattactattatattgccacaaaaaaatattgggaaattctacaatgcaccccttaaaatggatacattgatgcacccttatctgttttagcacacgaaataattttttagtcaaaatttttctcatggtcatgtacgttatagttatttaagacattctgcaaaattttaagaaatttggaa

SEQ ID NO: 242595 - DNA, 746 bp, Cannabis indica
ttctgttttggttttttttttttttttttactttttgcttaaaaaaaaaaattgtatttttgtaattttatttacaaaatgttgaagcttgggatatatacaatacaaatggttttaaaaataaaaaaatagcactataaaattaaacgaaaaataagttacattatcaatatagggtaatactatatgataggacctagcaaaagtttcctattggtagggaattttttttttaccgttgattttaaatcttgtggttattatgatgtaaggtatatactcttactatatgactgcttgtatacaattaaatttttttatacatattataataatatatttattttaaaatataaaataatattaataattaaaaaatttattaatgttattttttaattattattattttttaaaattaatttaaattattttttttagatatttattttcaaaaattcttctaatgtaggatcgcttgaatgattttagatgctctttaattggagccgtaccaacttgcttctcctaaactcaattttttggtagaaaaaataatatctaattgaattaattaattatttttttgataagtgacgtttcaaaagagtagccaaacaacaacaagataaaaatcactgaaaaaacagtcaataacaccaaaactacacacaacctaaaatcaaaacaaagaaaagacaaagtgtaaacgtaaaaaaaaaaaaaaaaaccagcagtaaattatg

SEQ ID NO: 242596 - DNA, 759 bp, Cannabis indica
tccgggttcgggtctggggtccaggggtcgggttcggggtccggggttgggtccaggtccaggtctgggtctgggtctgggtccgggtttgattctgggccccgggttcgggtttgattccaggtcccgagttcaggtccgtgttcgggtccaagtcggagattgatgttgacccgaaatcttttataaatattataatacaagctaatacggaccatttattatgtattatataatacaaaatacattgtattaaaaaatttggtcgtaataattaatacaatacattgttttatccaaacataatgttatttattatttaatacaatacgactgttatacagtgtactaaacgagccctaaatataaagtacaaaccccaccatattaacgttaaatagactaacaggtaattaaatttacaattattaacgttaggagggaaataataagagtcacttggcaactaccatattgaatatcagagagttcaaactattcctagtatcaatatatcaaaaacagagatcttaacaggcaagaaagaatgagtaattggaatagtttgaactcatatgatcataacaacaacgtagtcctcctatgtaatctggttttagaggtaggtcgtaactgtccttaatgacgttaagcagatcacaccaacactcagtgcatcccaacctatttttcgtgccacgagtatcgatcgtgtgcacattgagccaaatagattgaaattgaggaacatatatataa

SEQ ID NO: 242597 - DNA, 569 bp, Cannabis indica
cattaaaaattagtaatgatcacaaattaaaaatattgataaatttttttattagtttggttgaataattattttattatttattacatcaggtggaatacgatgataacatcagttttgaatctttatagagataatacaacaagggatgacttatttcatcagtataagagaatcacaagaaggtttttgagtaaattattgcggcataagtacctaatcttttgaatttgtaagtgacataaatctaataatatttttagcgacataagtactaaaaatttataaaactgtaatttttctctaattttgttagtaatgactacgttgttgtctagatcgtgatttacatctacttaattacttcttatatttttttttaaaaaaaaaattataaaaaaatttttaaaattaaatttaataaaattttattatttaattattatcgaataaaatacatcatttatttatataattgaattttttttaacattcacgttgttgtttactagttattaactaatccaaaagggaaatttgattttctatacttaaaaaccttaatattt

SEQ ID NO: 242598 - DNA, 775 bp, Cannabis indica
tttgctttatggcccaataggattactcagcttttatcaatcaaatacattctgtattagtaaaggcgccgttgcaattaatcaataaattttctggtactttctctttaaacgacatgaaaggagggagagacgttttaggttctcctctgctatacacattgttgcgcccccctttaatgcaaaatttaatttgttttcatactgcgttggcacctccattgctgctatttctgacttgagagatgtcgtttggagttctctgaacagtttttttttttttttttcttttctggcaatgagtgcaaataatcaggtggatagaatcggtttgtcttccttctcatctaaccttgttgctgctgtgattttctctgttgtgtcaacgattccatggaaatttcaagtccatcatcattgttgttttctcacacgattggattacgcaatttctcgtctttgcaatgacttttgaagcgacttataatcgttgctcaggggctctttcggtaagaattaagatctagtgattgtgtgatctgcttggagatgacgtccgcttatgcactgccccttgcattatcgtatcacgaataatatattttgttactcctgttgtatggtctttgaagggaaccgagtcgagatgtcccaataccaagcggccccaaaatccgagcattctcaagacttgggcggctctaggatctgggcgtcctcaaaatctgggcagctccaaagtccataatctcaagagatgatttctattgatctt

SEQ ID NO: 242599 - DNA, 779 bp, Cannabis indica
tatccttatcagtcctcaatttcgctgataccgtaataagccagtgaaattaatcataccctacttattaattaagtcaatgtcactaaagttggttaaaaaattaagccaacaaaatatcattgtcattaagtaattaaattcaaaagacaataatcacaataagatatgaactacatgctttcaattcaattattctcgagaatttaacaaaatataattgaaatcataaacatcacataatcaaaaaaaaattggcccataagaaactcccactaacccaaaggtgcgatagattataaaatgctcatatcaacaacatatttattaaacaacatgtcacttaatcctttggttagagaatctgcaaacatcagctttgtcttggaatattctatcacaatatctcatttcttgaccaagtctctaacagtgagatactttatttctatatgtttggaagcactactgatctcattattctttaaaaagaaaataacaatattattatcacaatagattagtataggagaggaaatagaatcaactagtcgtatttctaaaatcaaattctataaccataaagctttccaagatgcctcataacatacgacaaactcaacatatatagtagatgatgtgattaaagtctatttaacactttctaagaaatagttgcatcagcaaaagtgaaaatacatccaaaaaatttactttaaatcatctacacaaccaccaaaatctgaatttaaataaccaacaactcgaagattgtcaac

SEQ ID NO: 242600 - DNA, 758 bp, Cannabis indica
actaaaagtaacaattttttggacttactaaccagagcaccactggagcccctccattcatagcggctgtcaacattataataacaaaataagaaatgggtctcaaaatcatgaagctcacatagactagggtaaggatctagaggtcatttaccatgagagatcctagaaatggtcaaactgacattgtgaaatctcggctctgatgagctcctaaggagacgagacaatgacagaggttgcccattgtggccacgctgagagagacgagagaggttcgatagcaagagagaaaggggggggggtcagaattggggttttttggttctatgaattttcgagggcagaggtgaagaaggagagtgtggttgagagaatgggaagaaggagagggtggctgagagaggaggaatgagacggaattagggttagattttagggtttctaaaattatggtttttctttttaagtttttgattttaattcttttatttattaattaaaatttaattttcaacaaatttaatatatttttttcatttaaattttattttattttaaaatatttatttatatggatcaattaaattgtacctggggtgggcatcatccaatccaattgaaccgaaccgatccaatctaatccaattgcaaaaagttggatatccaattacaattggattagattggatgctaaaagttagattctaattggattggatcgattattggatgtcaatctcaaaatccaattaaaa

SEQ ID NO: 242601 - DNA, 511 bp, Cannabis indica
ttaggtcgacattcttgccatcttatcagctattttgaggtattagcataactagaaacttgttttaatgaaacttcaatggctcttttcctttctagctaattttttaaacaaatttggtgtttatcaaggcaattgaaggtgtcagcaaagtcaaagatggttataatcctgcaacttggatgttagaggtttcgagttccgcccaagaacttgctttgggagttgatttcaacaaaatttacaagagctcggaactatataggttagttagttttatgaaagaccgtttattttactatgttggggaagataaaataaaatactaaagagttattaaagatactaaacaatttttttttctacacaaaaaacaagaagaaaaaaaaaagcttataaaagagttgaagcatccctgctcctggttcaaaaggatcttcacttcgctactcaaatactctcgctcatctttcactcaatgcattgcttgcttatggaaacaacgtcggtc

SEQ ID NO: 242602 - DNA, 1937 bp, Cannabis indica
ctacagtgatcgtctctatttgtcttttgcatgtcaaatgtaggaaacaaccagatcaatccaccatttaactatgtcgaagatgaagttaggtctaaaacttgattttatgatctatacaacaacctgactaaaaaaatcaatgattctgtatatatgtgttttttcatgttttatgtgatatgaaaccaattaaaattagttaaaacactcaataagtggtatatcaatatatataagattgataccttgttttactaggatttatactttttatgtgctactgtatatcatgaacaaattagaatgctattgtttttttttcttttttttttatgatatattaaattaaatttctagtataccaattgtatgtaacaatgcatgtgaaattgtttcacaaaaactactatagtatattggttaaaatatatggtatatgggtttcttatatgtatgtctatgtatatgtgtttcctatatatatttatattacacaaattattaatgttactgaaatagtcattgtttcagcacatggatgttgcgttttactattttgcataaaaagttcagacacaagaataaaagttgtacaaccatgaatgctacttgtgatcggtacatgcaccaagtttttgcaaaatacatggataatccaagtgagcaattctcttagaaaacaaagcctttttctttcttattaaatttcgctaagccatggactgatgtagagtacatctattggcctatctttgtagaagatatggttcattagaaattagcttgatgaacaagataataaaaatatatgatagtttgagtggggaggtgcataattagaaggtgaaggcaaccacagctgtatactcaatgatggttccaatgctcttaggagctataagtttctattaaaaaagaaattacattgaaagaggagattttactatgaaaattgtaaacaacttagaagttcaacaaaatgggtaagtaataatattttatttttcatatacatatatgtttttcttatttcatatatttaatacttttggtatatcttatcttatttgtagatttgattgcggaatgtatatcatcaagtgagctgaaacattaatgtcaaaatcatatattaatgatatcacacacaaacgaatgctattttttcgaaaaaaacttgcgattgaactatatgatagggaaatggaaaaagtgagaaataattgtaacagtgatacagaatagataaaaaaagggacttccaacatcatacaacatctatgtaatttaccaccttataccacatcttagcttttgaaacattttttagacaatgttgggtgtttattgtaagttttgcattaggtttgacatggaatacagatttaatattgtggtaaattatttttcaaaacaatgatataatagtagtttaagtttgaggtatgtttatattttattggtatatattctttttatttccatggtatatgaaaaaagaaaagaaaaaataaaaaacttgtagaatattaactaattttttggatttttgtgatatattcataatgttttaaggtatatcattttgtgtgatatagtatatattgagtgaaataaaaaaaaacgtggaatattagtttaaatttgaggtttaatattatatatgcatatatatgggtacactcttaatgggtattactcatgaatgggtaatattaaaaaattgagtttttatgcttaatctttttatttaattagaaaaatctctcattttttcattatatgggcagaggttgttccatcagctgaaaagaaaataataataaaaaaaatcaacaaaaaaatgataaaaaaatattgagttttacttaaatatttgccatataaacttattttgatatagtgtaaaaatatgtatttttgttattttcttt

SEQ ID NO: 242603 - DNA, 564 bp, Cannabis indica
tatatatatatatataaaaatataaataaatattaattttagaataagatacacaagtcttgtaatgaattgcactattctaaacacctgaaaaaggacttgatatacaagtaaagatgtgatgtgatattttacatttaaaagaaccaagcttggaacactttcaagagataatgtataataactcttcaaataaatgagttataatatttcaatagctataaagtaaaattatatctcaaaactcttaaaataactcttcaaataaatgagttataatatttcaatagctataaagtaaaattatatctcaaaactcttaaaataactcttcaaataaatgagttataatattttaactcataaatagtatatctccacatttagctaaagtctcttagctaaatattttttataattattttttgttattttttctcacattatttatattaataaatacatatattaaaagactacgtagtagttgatgtatgatattatgtaaaaatttgagataaaataaaaaaaaaatcgtaaaatattttaaatgataaagtagag

SEQ ID NO: 242604 - DNA, 2054 bp, Cannabis indica
tatatatatatatatgacattaacacatataatttgaatgagaaatgcttaaaggcattatcggtgcctagtatctttcttggtgtcaagtcccatataacttaaaacaataacttttaaggaatatcgttaaccaattatagggcggcacttatagatgatgctaggcaccactagtacctaataacaatgctaaatttgaattcttccaaccatcataaatacaaatagagtagatgttcatccaatcaaatccgtactattttgctcatagtgcattcaatccaatatgaatcagggatcacggattgacctatcgccacctatatgagaactaaaagacctaaaaggactaaaatagagatcactcaggtaaacaacccaaagtgtcaggtaatacagtaaagaaaagaaagaacgatgggcacttacaaggttgagacaaggcaattgtgctgagacgacgcaacaatgacagtagaattgtgcctgggatcattggagaaaaagaagcaagaaatctggtttattgaaaaagcccctacgtataaagggcactgaggaatctttgaagtgtaaaagtgtgaattagataagataagtattatttataaggcttaggggcacaatctgatcccttttcatccatggtctctttcaaatttcaagaaacacacttgatctagcgactcaaatataatgaagagaaacatatttaagaggggacgtttgatgtacttgagtatcctcctaccaccttgcattaaatggtacgtcccgagattccatatcagaatacaaatcattctcatctggaacgaggcagaggcgcgtagacggaagtaccatttatagagcgagacacgccgtacttgcaaaggcagttgtaacccaattaaatgcataattatgatcagtttcgctcccaaaggaaacccaaaaggcactttatagcaagtcctcacttcaaaaatgaaagttgagacttgggaaacaaatgttctctcagtttttgcttagcatatgtggctttctaataaacaaccatgtgtctagtaggtccaattgttggaggtttagagaatagggttcttgagcccaaggatacatagctctaggaggaagagggactcgtgaaagatcttcaaaatttcataaggtactaagatataaataaaggatatttgagtctccaagaaggatcagaaccacctggatacctctattacgtgtcatcccaacatgtgcagcgctttctgaggaaaagtactgttacttgtcctccatacaagcgacaaaacgagcgtacctctaaaagtagatattcttggggatttccccacttttctgacactcgcctttcctaatcagagtcatgcggctcacgccctcaacaatcccatcagtcgcagacaaacagggtcttgtctcaccaaactcctattttggatctactcggcaagcccacaaaggaaggaaatgtgttcttattgagaaaaatagcctcactaatgacagctaaaagaaggaacaggcctaagtcccttccacaagcccacttacttctttataagtagggattgaaacccactgtaaagaggatagggagagcttagggaagactataccaaattctccctgcaaaaattctaccattattgtaaccttgttcaatatcaaatacaagtgattcgtagattaagactcattaatgctccaaccacgtagaaataacctctttgaaacattattattattattcattatattaaatagttgtcgaaaatcttagtcaacagagagcttgaagaaaaaacttagtattcacatttttaatattgacacaaaaatatcaattaccaacaaaatacacataaaatttcccgataacgaggagaagagcatgagaaaaatgatgatagtgattcctcacatacccatcaccaccgccgacatcgcaacagaggctagatctggcgaccgaccaaaaagtatagatgacaataacaaaacgcaaagccaaaatatgtctcacatatatgatccatcctcaa

SEQ ID NO: 242605 - DNA, 565 bp, Cannabis indica
agcttctttcttgatcaaaaaaaatatatttaattttaatagattattttttaatttatgatattttgtggttcaaatttaataattgattatcatattttatatttatggtcagattcataaatttagttaatttctttaatgtttatgcattatttaattataaggttagatattttaatattaggtatattttaaattaaaagatagccttatccttttaatttaaaatattatattaaaattatcttataggatacattaataattataaattttgaaattcacctcgatatttttatagacatcctaaccataatattttcatatttaaaattgattatttcgttaaatacgttattgtttataaattataagttagaaatattatttttatggctatattatatcattttacttataagaaatttataaatagtattttaaatatttaaatatcctagatatttttttagaaatttgaaaaagacataatttgagatattttcacatataatttggataattattatttgtttattattttattcctaaaataataatt

SEQ ID NO: 242606 - DNA, 610 bp, Cannabis indica
tttctatcatggacggtaacaattattcatgaggtttgttttagatatttatttaaatttagatttaaaataataaaaaaattctccataactaaatctatatattttatataaaatgcttttacgatttttttgtcgttcaaaaaaagatgaataacaacaaaaataacgaaattattgtgatcatgaaagtatatttaataaacattaaatataaaattagttactttatagctaagaaaatatcagattaaatttagtggtttcataattaaagtacctcttatgtaaatacttattaattatactctcttcgatgagtcattccatgatcaaaattagccaacaacataggaatgagttatacagctataaaaacagattttttttttttttaaaaaaaaataaaaacatcatatatatatatttcttaatttattaattaaatccaaacataaaaaaaaaaaaaaattaatgttttttggtcgtcataatttatttactgattcatatcggatatgtattatatattattttcattttagatactcaacactattttatgaataatccatgtaggcttgtagctatacttaaatttcactttttt

SEQ ID NO: 242607 - DNA, 3182 bp, Cannabis indica
tgatttaatacatataaaagtttgaggggcatgatttggtagatatcaaagtttggggagcatgatttagtacatgaaacagtaaaattgaatgaaattacacaaaagtccttaaatttaacaatctcaatagttcaagggaaatttgtaatgaccaaaaaagttcagggggcatgatttggtatatgtcaaagttcggggggaaaaattgctaattagcctatttttaattttgtgtttgtggtaaatacctttaatgggccccactcccagtacaactaagcccaacccaagtgaaagagcgcaggcccatacccaatctcaccgaagtctctgagcgatcgtctttctcttacctgcacgaacaccatcgctctggaactctgttccgaagaacaaaaatcccaacctttgcttcaatggcgcagattccaaatttagacaatgctccgcttaatctcacagccctcaggtataaaaatgacttaattttctacttaatttaattctatgtgactaaaatcttattcgacatcttaatgttaattttgagtgtaattatgtatatttcagggagcaatcacagaaggagcttgttaacattctcaagaatgtgagttttatttcaattttttcagggttcgtaaattgatcatgcttttcttttttattattacggtcctgttttcataaatgtatatgtatttttgtatatgcgactatatagtactgaattggacttttttcgtaatgttatagattcgtggaaagaagtgtttggttatcgatcagaagcttggtggttctatctcattgattatccaaacttcacttctcaaggtaattttctatgcttgtatccacagaaaatggatggtgggaataaatgtctgtttttgttttttgtttttcatgtaatcattactcaatgtttattaatggggggaattttttgattgattaagtggtttctttctctcatgtaaaatttgtgtttatggggctgtgaggataaatattatgtatttcaaaattttaattattgcaatgctaatttgcaggaacatggggttgaattgcgttatctttcagctgatcctattcaaactgactccactaaagtggtttaccttgttcgatcacagcttaatttgatgaaattcattagttcacatgttcataatgacatagctaaaggtcttcagagggaatattatgtgtattttgtgcctcgtcgttcagttggctgtgagaaggtcgcagattttatcttgttaaaatacttttatagcttgcaatttgtgcttaatggtcttaagattttggtggctagattttgtaaaaatattgttttggtaatacagatccttgaggaggagaaagttcaccatttgctgactataggagagtatccattgtacacgcttcctctggatgaggatgttttatcatttgaactggatcttgcttataaagtatgacaatttcttttttcttttatatatctcaatggggattcaagtgacacgtgttatttatacattgtgtttgtggtaggaatgccatgttgatggtgatacaagctccctttggcatattgcaaaaggcattcacaagcttgaggtagtataaaattatatatgcttgagttagttgcacctttctctctctatgcacataatttatttggttaagttttttttcccttaaagatgtagccttatcttatatatatttatatatatatatatatatatgcaaactaattccaagataactccacacatgtgcaattgtggttgaacccattttgtgtaatcatgtacacagtctaatttataatcttctaatttagctgaaatttatgtttttgttactctattgcactactgcagtcttcttttggtgtcatacctaatgtgagggccaaaggcaaatcatcagtacgtgtttccgagattctacagcgcatgcaagaagaggaacccgttagttcgcctgatgtaatgcaatatctcaattttcttggatatctctccggttttgttttatttttggtttgaatctctgatcctttgttgtgacttcagatggctgttccagagataaatacccttattctgctagatagggaggtagtctctctctttctctctgtctgtatttgttttacaaataatgtggtggaggatttatatgagaaaatgttttcagtttaacattagtttctaattaataaagtaatctacaacataagaatacaagatagttattctattcaattagtgactatcataactatttcttctgaaaaattattatatgacagataaattatgcttgtccttgagtaaatattttactttttggtgcctcagtccaaaacatgaaagtagagacttttacagtaccgtgttatgccctttttctctatttaaattttagattttgagaaagaggcttttcatgttgtgccttgcatgcattcctattgagcttatataaatgtatgtgtgtggattttttttatttgtgtattctttagcgatttactccatcgagtcagccatatgtaagtaaattaggactggtttttcaccttttaatagatgttgataacattgctttaactaaattaattgtgatctttagactttgaaaggtgaaaataaagaagaattgaagcgggcgtattgtatttgtatgaatttttttgacaaggatctcaaatgcttggcatgaaattcagaaagttattgctatttcttatatttctagcagaagatgcaagaagagagtttgagattaaggtagagaaattacaatctatgggacactaagaaaggtttctgaacagttttccaaatgcataactgatttagattattggctgatggagggatatgttgggttccaaggagtagcaacaattcagtataggtatagaaaactacattagacaaccttttctttttaaaaaggttaggcaacattattgacttacaaataaatttaaaatactagtgtgatacctaagatctgataagcttaacattaagcaaaatttatgatcattgataatttgataataatgacactctgttatcatcaaattaactagattttaggaatctactacaaaggctaagatcaaacatttctgaatggttcttatgcctctt

SEQ ID NO: 242608 - DNA, 856 bp, Cannabis indica
attgtgaagataagaacaccaagagctacatagagctgttcttcgggtatctgattaatgtactgtatagcttgattccaccatggctcaaaccgagtcttcaattcttgaaaaccctccattgttctcaatttcaaatcttccattaccccaaaatgaaatcgtcttcggcttctcgattaaagagagaccctttgggggaagttaagaaaggaatcgactagttcgagaaatgaaaaaagagcagggaatcgagtcaatcaatctttctttaagccctagactgatttggtaaaaaccaggcctggcctatcacagtgtgccaagtcatttttctttgaaacttttagagcatttttaaaggtaaaactttaaaggatgtttttaaaattttatttttaaaaaataaaaaagtgttttaaaactatttttattttttgattttaaaaataaaaaacaaaagtgtgttttataacttttatttttattttttgattttatttaagtcgggtccaggtccagatttgggaccgagaccgtggtccgtgttcagatcggggctagggctggagtccgaatcccaaaatctaagttgtagtcggagttcaaaattttaattaaggaaaaaaacttttaaaataattgtgaaagtgatatttttaattaaaaatttaaaaataaaaatagttttatagaatatattttagtaaaatattttcaactttcttaattaaaaaaagctaaaaaactagaataaaaaaatagtttctaacaccctatattaatcactagggttattcgtccatacaggttgtgcggtttttgtacgtatttttttaaattcaattctgtcaca

SEQ ID NO: 242609 - DNA, 721 bp, Cannabis indica
agtttagatttataatctttacaaatatgaaaaacttaaatagatctatttactattgttgttgccgttgcttaattactgaattcttaaacaaaaaccactagaacttatataaaagtaatatttacgtggctcgctacgtaactctcatctagtatatatataaaagtcaaaatgtataaagaacttattgaataattgaatttttatcatgttctgtactatatactctctattacgtataatgtgtataaatacagcttattattattattacagtgtgatccagaataagatcgagttttacatattgtttataatggtatttcgtttaaaaagtatatatgtactaatataataggggggtggtaaatatatacgacacaatcataacgagtattgctaataagcactagtggtgcctaacaccttctcgacatgtcgcgttgcgattggctagcgatactccttaaaagttattatattaaactatatgagacccgatacttagttggaccaattagcgatactgacacataagatggtgttaagcactgtcctttaacatttctcataacgagctagtgaattagtaggtttttaatatacattaatgatatatacattttttttatatacatttaaaaagtaagaattgggcatacaagaaaaaaaaaaaaagtttgcactactacaaaaacaccctttagaggcggttttt

SEQ ID NO: 242610 - DNA, 684 bp, Cannabis indica
acaattatgtaactacatctaatatatagtatacatgtttttatgttttttgtgttgatgttatctgtatataggcaagtggaatgggatttgtaaattgaaattcaacatgaaatatattgatgggtgttttcttatcttatccttatgattaagctttgttctcagtcgaattaaaatgggttacaaacgacaatgttagagggtggtgtgtcccgatctctctctagtactattctattggtttttgaattttctattgagaaagaccaactcaacacttcaaataaggtattttccacaacaaaaaaaaataaaaaataaataaataaaaataataataattgagtggctaggcttactctcatattaatttccaaaaagaaaatgtttactctcatgacaatcttatctcaaagtttggaaccaacaaaaactttaagcattatctttctaagtttgttggcatatcttatccgagtgattatattagagtagtttcttaaaaaatgatttagagcaggtggaaggttgattcaaattctaaatattagtattagtattataattaaggttgaccatgttggctcttgataagagttttgattgtgtgtatagtggtatatttataggagaaattaataactcatggatacattcagcaatttcatggcatgtccccga

SEQ ID NO: 242611 - DNA, 1592 bp, Cannabis indica
atggtattatttatttatgccataaaaaaaataaactcgtatgtaatttttactttttgtataagttttttacgctatattgaaatttttaatttttttttatttttatattgtgggctggatttttttaaaaatactgtattttttttttcaaaatgtgtactgttttaagttttcactgttgttccacggttattttttagttgttccactgttgttttaattattctattttgttgttttacggttgttttataaaaagacaatatttttgtaaaaaatttcgtgtagcagtataattataaattttgctctatttttataaaatccgtcttttttttttatatggaaaaaatatttacttaaaattaagtttagagttatttaatctattttctaaaagagaatggttcatcccttatttaagttaaattcgtatttttcctataaaaataaatatgttattatttttattttttttagaaattagtagctatatattcatgagtaccaacgatgaactatccaaaacaaaaatcaaatagaagaattgaacatttttgtttgtatgaatgaatatcttaatttaaactagatgtattcattgttagattattgacggtaaaaccttctattcttgtagcacaactctctaatcttttttatgacaaagcctttcaatagatcagagatgcatatggagacggaacagttctttttcccgcctcctattacattccccgttcctgctctttcccgcacattttccagtggtgaactgaatagggcgaaatcaaagaacaaaagaaagaaaaaaaaaaatacaaaacggcaaaataaatgaaacaaaggctaaaaagcaacaaaacaattagagcaaacattaggtagttccactagagtcctccaacaaagattgcattgagcagtcactacaattatgtaaacttttcccttttatccaacacccctttatctatacaatctttgtagctactaactactactagttctagtggttatgtttatatatacatatatttatgcatatattttccctatacaaactaaaaagatcactttaaaatatctacattatgtataagatcactcttctgattactatcttcaacttctatacatttctcatgtgaagatcccaacatctgaacaattaagcttccacctataataccaccataaaattcttgcttttaagcttggtcttaagctgtgagttagattgacttttgttgtgtcatatgttagtgactaataagaaatttttagttactaagtaaagtgatgattgaacatgtataagaaatgtttaccaagaacagagtagctccaagccaaccaagagtacccccatctttcacctaatagaaaccaagcaaagccagcaccccaaactcggctcaagaccatatattatggctgtttctgttgcagaaacatcacgcatggccgaaaactgaacacacaacacgatgaaacttcgtcaaaaaactatattcgtgttaagaattacgagtatctatctcaaaaattaaatgataataagtagagtatctcgtatcttataaata

SEQ ID NO: 242612 - DNA, 1021 bp, Cannabis indica
atatgtggaaaaataggccatgcagagaagttatgtcccaggcttttcttgaaaccattgcacttacaagaaaagccttataacttggagctgtcggcgtcgacgcagagaagacattctacctttggggcacagtggctccgatcaggggtggctgcaaggggtgagtcgagccatgtttcccacggtggaagcggtgaacgaggagctaacttgactcctatgattctggagcaatcagtgggatcggctggcaagattctgggatatggtattaataataacttgctgaatgagaggcatcaatatggggaaaatatcatgggagtcaatgaagaagatttgactttaaatgtcaataataatgggaatttttttgattccacaattactacaatcattgattcaaaaagaagaagacctgattcaaacgtgggtgtgtccatgggcctacaagctaaggttacttctggaagtgtagatgaaatggagcaagatcgtgtggggttttcaaaaaatgggcctttggtgggttatggtttccaggcccgcccagaattatgagttgcttgagttggaattgccgtgggcttgggaacccgcgagccaaacaattcttatcggaccttgtattccaaaagaagcccaacttgctttttctttgtgaaactttatgcaataagttaaggatggaaagtattagagcccatttgggttatgaaggttgttttgtagtagaagcccatgggcatagtgggggtttggccttgttgtggaaagaagaaaatgaagtgacaatccagggcttctctgctaatcacattgacgccatgattcagaaggtggggactccatcttggcgattcactgggatttatggagagccgagaagagagttgcgattccaaacttggaacctttttcgatctttaaaagaagataatgatcttccttggtgccttatgggagacatgaataacttgggttctcaattggaaaagaaaggtggaaggaactatcc

SEQ ID NO: 242613 - DNA, 1411 bp, Cannabis indica
taataattaataaaaaaagtgaagaacggtttggacgggttaacccgaccaaaccgacgaaatcattgggcgggttgaactttctctaatttttgattgggcgggttatggttaaatatttgcaacccgatatttatattgggttgataaaaatatgctataacccgactaaaccgaccgacgtacacccctactgtccatattccaatacttttattaaaatctactttttctttctctaaccttacctttctctcctaggtacgaattgaagtttatgtacatagtttcacttgtattaaataaatacataaacaccaacaacatggttttatatataataaataaataaataaatattaaaaaatgaagaaaaaagaaatgaaaatcagtaccaaaaatgtccctcaaccaaataatacccaataaatgaaagaagtgagaagattagaggtagtgatttggaacttaatgattggtttataggtctaaaaagggacaaatgaaaatgttaatacaagacaagttagagaagctttttttgcagaaaaagataaaaaagggtgaccatgaatttgaattatatccaaagagtattagacctattaatatcaaccacaagattagattttgagagatattaaaatccacaatgccctggcccagtcactttcccacaaaccctcaaaagatctctaaaacaaaatagaaacatcagagagaccaagtactactggtaactattattcttaatcaatttaaccaaatactaagaaatcaaaagaaaggcaaaaaaataccagaagctgattttggttgaatttttattttatttttaatcttaatggcttcccttacttcactcacctcatatccatcttcatcatctttacaatcaaattttcaacactcacctctgatgttggcttctaaacattctcaacataattataactcctcttggttgatgattggagtgttgagatctgcacaaacatcctcacaacgcctgaaaatccaaagtgcagcaaccaaaccagcaaaaagaccaggtaacattagtattaaatgtctattgatgttgacaactatctatgattagaccctcacttgttctcttttcctttttttaaaaaaaatcttcttttagctgaagaagactggaagatcaaaagggaaaaattgctagagaaaagggtatagctctactgctcttattgtccatcttattacacacatgaacaatgtgacataattagcttatttgatcaatattcacaatagaaaacaatcactgacttaaaaggataagtaggaatgcaagcatgaatgaaaattaatgagataacaatttatttattcgatcatatttaactgtgttttcaagagcaaaaaagggttagaagcaaaa

SEQ ID NO: 242614 - DNA, 688 bp, Cannabis indica
agcctttaagtcatacaaagttggacgacctagcattacgttaaaggctgaaggaacatcttataccagaaattgtgccataataggcatgctagtcggagcttatcgaacaaagatgggtagacgaatttttccttgaggtacgacttcttggccagagaaaccatagacaggcaggagacatggggctagatccttgagctggagtcccatcttttcataagcattttggaacaagatattgaaagaggcaccattgtcaattatggttctggccaccatcttattagctatctggacctccacaaccaacgtgtcgctgtgtggaaacctgattttgatagcatcttcgttgttgaaggttattgtaggccctcctgcccgtgggattttgggcttcctttcttctacggccaggataacttcttcttgctcgtgctgtactgttcgggcatacctctctcgagctttgcccgaatctcaagctatgtgcggacctccaatgatgacttgcaaatgtccgtctaccggtggaggtagcaagtctttgttattgtcgttcctctgactctgatcggtcttgaaattgcattttatttatgcaagatgattttgaacttgtcttgaaaaatagattcagttgtaaattaattatttattttaattaattcttggaccaacttaaatc

SEQ ID NO: 242615 - DNA, 822 bp, Cannabis indica
tttatcttatatttaaattataaaaaaggataagtaatattcctaaagaatacgcagatagtttgaggaagaatacctatctttgtaggttgtttgatctgtcccataactgaaattaagcttgtggatcagtcaaaaagcttatcgtggaccccaccattcatttaaactcctgttgatgctctttgcacgtgctagccggtcatccctattcttagggcctggccgacacattgaacttcattggttggccagggtgtggtctagccagggtcccctggctggtcattttctccttacttaatcttgcttgattgcttggaacccttaacaattggcacgatgtgtaaggtgacttcgttcacccattgacaagttgtattccacgtgaccttatttttgcctatgtacacgtcaagtgggcaaaaatagtgataaaatttgcccccaagtctctgtgcgaatgtctgtacggatagagacttttcaactctagcagtgactataaaaaccttaactgggtagctatgcctactcagatatttgacccttcaaatgactcatctttatgacaaaaatgactttattgccaaccattatagggatttgtgttatggctgcacattttcccatttttgaactattggtctttttctcctctacatgactatttttgtggaaaactaaccaccccttaagttttatttgggggaaaattctttcgaacctatataaggttatttgggggaaaattctttcgaacctatataaggttcacttttccttcatttttcacttcacttcatcttctctctctctctc

SEQ ID NO: 242616 - DNA, 677 bp, Cannabis indica
aaaggaaacacattttcatggaaaatgacatctcttcaatgatatatttgttttgtttggatgtcaagaagggtgtaggccttcattccatgtgggtatccaataaaaacggatgcacaactttttggagaaaatttatgcctgtggaggtaagggtgcaagcatatgctaggcatccaaaaacccgaagatgatcataagttgggggtttggaatgaagtttttcgtatgaagtattgccatgaaatatagaagaaggtgttctattcattaagtatgtggtagtggcaataagatatcgccaataagcaagaggcaaatgagattgaaaacataaagcccgtgcaatgttaagtatatgttgatgttttcgttcaacgttctttatcattatcagattgaattgctttaattggggtattgtattgcgtacataccatgttataaaacatgggaaaaaccgtttgtgctttagctttagctttaagcataacatccaagtaaaccgagatgcatcatcgacaattgtgagaaaatgcctatatccttctatactagtgacatggaggggaccccgaatgtccaaatgtattaaatcaaaggcattttcagtgaagttattgtttgagataaatggtagtttcctttgttttgcaagatggtgttgggttttatgc

SEQ ID NO: 242617 - DNA, 633 bp, Cannabis indica
ctcttggttgtggagcatgaattacacttctcttaaagataaagagtcagaccgagaggtgagattcacaataatagcttcatactcagatcctaggccaccaaggatgtataggatgagatcctcatcagagatcggttgacctgcaacagaaagttcatctctaaattgcttcattttcaagaagtactcatcaattgtcatagatcctttcttcgttgactacaacgatccacaaatttggagaagtttggctcttgaccttgtgttgaacaattgattgagagtgttctgaatttgagcagaggtttgacagtgaatcacgtatccaagcatcacctcattcattgaattcattaaccaatgcattaagaattaattgaatctcaactattggacaaaaatagggttaagaacatcacctgctaaaaaatagttgcggaggaggattgttagcgaggatgtagccgtcgagattgtaggctcgagtggctggaagaactaacgatctccagtaaatggagtttggatcgatcccagtcttagattcaatggaaagcaaagttgtgtttggtaaggtagcttagggaatttcgttcattttgagcttgagcaattggatgaactggttca

SEQ ID NO: 242618 - DNA, 597 bp, Cannabis indica
tctattattgttacttaagattagtggtctattctgcatgctattgtttgtgatttcagacaaggagagcattgagggttttaagaggcttggcacggttgaaatcattgatgcaagggcagtctgtcaaaagacaagtagccaccacgttgcgatgcatgcagactttggctcgcgttcagtctcaaatccacgcaaggagaattaaaatgtctgaagagaatcaggcgctgcatcgacaacttcaacagaaaagagagaaagagattgataagttcaaagcttctgtaagtttcatcactaaattgtgtttgtcttaatatccttacatgttagtattgctcttttcttatttggtaaataacttgctctaagttgaaatgggttataagaaaaaaaaaaaaaaattttggcccttactataaagataaatagtattttaaaattattaaaatatatatatatttttaaagttaattttttatttgggcctctaaaataagtggaccctaggcgcgggcgtagccagcctatgtctcgaccaatcctggtcttttcattccttctctgtcttcctcttatttgagtgaatttcaa

SEQ ID NO: 242619 - DNA, 608 bp, Cannabis indica
gaatagggtattgaaatttcaacgcaagtaatattattattataggttttgaataaatgagaggaatgttcttcctcaattggttcagccaatttcttgtagagatgtaatattatatatatacatgcatgttttttgtagtattaattaatcaaatttcatacaaaaattccataatgttattattaattttttattttcatttgtttggatatataaatgccggggaatatttaaactttaaagcataataatccactatatagacaatgcttaattataataacactattattatgtatcaagttttttttattatggaataatccccctgtacaattgaagtttaataacatattacaaaattacttcttatacatactattacatgcatatatatatatatatatatatatatgattctatttgttttttaaagtattattagttttagaaaaagaaaaaaaaaacacaagattaatagctaatatataggagtctttacaaaaatgttaaattttgggcaaacatatttacaattttactgttacacgtaatttttttttttttataaaaatagtgtccttttattaaacaacaaaacagaa

SEQ ID NO: 242620 - DNA, 703 bp, Cannabis indica
taattacataatattaattgtgaacttcaagttagatagaggtactcaactttttgttctcttatctttaacatctctatatatcaaatgaccaagtgttgatgcaaacgaattggaatagtgagcaatgctcatgataaaattaatatctatggaaataagggggaaatctcttaaaatagaagaacaccatcaactttgctatttataatatgttcaataatttgtctttacattcttctactaggcttatatatagccattatgataaagctataatataataaaaatatataataagcttctagactatatatcattcaaaaaaaaaaaaaaaaccttctacataactattctatataagattatagattagtggatatgtctcctacatggctataataatgaagctcactgctagtataatgtaacacaaaatatcaaatagtttgaaaatatttagaaaattagtcgcaaagaatatctcctctatgtgtatctaaactctctctctctctttaagggttaatagaagaaaaattaagatttctcgttcctaagtttatagttattggaggttgtcttttgtctctagcaaggtctgcagacttttcttgggtttaggtgtggcttggtcggaattgtattttgctactgcaattcaatttttgctaatgtactggttttgagtgttttagtcttc

SEQ ID NO: 242621 - DNA, 736 bp, Cannabis indica
tttttttttatttgctaaatacctttttttttcataaaaaaagtattttgcaaataatttttaaaattagggtattttcaccaatttcccaaaaaggaaaaaagaaaggaataattacataagacaccattttttgtaaaatattcacatttttaagttcaaagaatgatttttttacatttttacggttttccaaaaaataacacgaaaacaacataaattcaacaagaaaacaacataaaagtaatataaaaataacaacaaaaaataacatacatataacaaaaaattaacaataaatgaacaaaatttcaacataaaagaccgtattttatgtaaataaaatcaaaaaaatcgtaaaaatgtttaaaattccgtgaaatcgtatttttgttgttttttgttgtttttgtggatttgtgaaattaacccaaaaagaaactaaagtattaacaaccttgggctggttttactactatcgtataggaatgggccttgtcatgtggagtaaaagaagcccacattgtatattttgtgccatctcactattactaattgggcttggaccatagtacacaaattcatgggccactatatagcctataggcttagtagtgattaagagtaactttcttggaattatttcagaaatacctaaaaacaacaaaaaatttacgtttttatggaattatgagtttttctttggggttctcacaaaaatactgaattttggata

SEQ ID NO: 242622 - DNA, 1808 bp, Cannabis indica
atatagtatttggaaaataattttgacaacacaattacatagagattgtatttctcctgtaattatatactacatttttgatttattttttgaaatttaatgaaatcaaaagaaaaatatgaaatcatgctataaatatgacaacacaacaatatagattatttgttttttttttttctctttccgattatgcattacatattgacttattttttacaatctagtgaatcaaagaggagtatagacaaatctatgaaagatttagtagcataacaatcatttttttattaagatttttgtctttctcttcgattatattctttcatattaatttattttatgaaatctaaataaaaacttatgagaaatttggcaaaataataacaaagatatttatatttttccctttgcttatataccacaaattaatttattttttgaagtctagttaattaaagaaatcataaaaatatctatgaataattcattagagaagaaaatgagtttagtgtgaagaaaagggcagccttcaatacttgtagaaacttcttgaagataagtatatgatactatagtatttctttgtaaattttggtggagttatttttactttattttctcattttttttgtctaatttttcttttctcttaatagatttttttttcacgatattgagtggaaatgtgaatgatgagtagttatgggttagtggagaaaaaaatagcgatatattattaattaattatatatttttcccttatttttaattctgaacaagctttttgctatttattattattattatatattttatatatatatatacatataataaattaagaaaaaaaaaactacaacaatggtaattaaaaaagaattaagtctatatcaattgtgcatgtatagatttatgctgaaagttaccttattaccaccagttaccagttgaatgaggctgaaagcgaggatcactgagtttgctgattccacttaaaacgatcttttactgcttaatactcataacatgcgtatttaggtggttgcttactctacataaaaaccttagcattgcttcagacaaggagttcaagaagaagaaaaacattaataatgaacatctgcacttttgtgattcatcgtataattttgtcattggatgagacgactacgcgccaaatagatcgttgtgaattagggtgaaaatgaatacaagcaaaccacgagcgtacagatgaaagctttgtattgtgagcgttttgagggcaaaaaatgaagaaaaaaataaattatgatgcccctaaaatactacccaccaaacacaatacatgtttttctttttaataattaaatatgatacatgctctttaacatcaataaaacccacccttctctctctgccaaacaattgcacaacaaaatggtacaaagcatggaaatgctactctgctaaacaatctcttctcgtaaccttgtgctatcttgtgatagatctttctgcagcaaacaaggtgagaaaactgcaatcagcagtggattctttctcaggcaggctaaaaactcatccttgctgatctttccatccttatcactatcgaacaaatcgaacattttatgaacctgccagcaaatcaatggggatatttgtaagttgacaggggtaaaaaatacttgtgtgagaaaataaaacactcttcccacttcaattttggggcagggactgggaaaaggggaatcttcaaaacatgggtaactcgacaaatccattaccttttcctcattcaaatctggaattgctaatctgatgga

SEQ ID NO: 242623 - DNA, 1096 bp, Cannabis indica
atcaaatttatataattttttaagtataaatcttatacaatatgatatgataggtgtaaaaatatgtgttctgtagtaatttgttttagtatattttgttaaatattatatatatttgtgtgttgatgcaaaaatcttgacaccgatatctggccatatcagctctctagattggcatgattgtattatgagttaagtataaataagagagacacaacagtttatagtagttcactccctgtatcgcgacagtaataaaactacgattacttaaagtttcatttctcacgagatgaattacagaaaaatagctaaatttgggcactctaatttttagagagattctctgaccttatgggtacttttatagaacttgtaaaatgagcttttggagtcctccttttaaatggaataaagttcttttaaaataataataaaatatgaaaaaaataataaaatatgaaaaaaaaaatatatttaggctatattttgaccgtagatgatggtgaaattgattttcggaggttggtcgtcaatttttcagagcttgagtcgtgtcatgggacccacttcaggtaagatgtaccttaactcgtaactctctttagggtaaaatttggagtcaataacttcataattgtaattggagtcagatatataacttgatagagcattgaaatagcttcgaaatgcaagttgagtcagatcaatcgaatcaatattgagtgatttatgaccgttttactaaagattaatctactcccagcgcccaagttaacatgcgatgttaacctggacgttgggccaaggtaaaatagtgtttatgatgtaatttttgaagcctaagtgatattttgacatcacttagctagttttcgtgttctggtgaagttggtcaccagttcttggaggtgttgctattagggttgttcatcgaaaccaaaaaattgcggtttgaatttggacggcgacaatttgaaccactgtagaccgtaaccgagaaaactatttttggtggtctggttaattcggactgtttaccgcgtaatggttcggttgcaattcgtaataattagttaacagttaaactggaccg

SEQ ID NO: 242624 - DNA, 701 bp, Cannabis indica
gtatgaaaagagatgtggctagctttgtagttaagtgtgtagtttgtcagcaagttaaggctaaacatcaaagaccttcaggtttacgtcaacctttacctatagcaaaatggaagtgggacaaaattaaaatgggctttgttactggatttccattcacacctttgaagcatgatgttgtttgggtgattgttgattgtttgactaagtctgcccattttattccaatcaaaaaggattacaagcttacgaagctagctcgactttctgtagacaatatagttcaactatatggagtgctttcaagcattaattctgatagagatcctcgatttacatcaaggtttaggaaggccttgtaacaagccttaggaactaaacttcacttaagtactacccatcatccacaaacagatggacagtctgagaggaccataaagactttggaagacatgcttcgggagaacacttatcactggtggaattcacatacaacaatagcaaccaagctagttggctccttttgaggacttaaataggagaccatgcagatcgccattgtattggacagaaccagatgagaatgtcactattggaccccaaattataaatagtaccactgaaaagattaaaagaatccaagaaagacgtaaggtttttcagagtcatcagaaaagctatgtcaatctccatcgacgaga

SEQ ID NO: 242625 - DNA, 899 bp, Cannabis indica
ctttaatctctagcagattttactcccaagctcaaacctgaagctttgaggtaagatctttactatgtgtttgagaatttttccagctttaagctagtttagggttagggttttaggatttagtttgagtgattttagtggttgttgtgataaatttggagaattgagttttagaactcaactttttggttctttgatgggattttgtttaattgatgaagtattgtgaattgatgattggaatacattgtttttatgttattggagtaaactggaaagtttaagaaggatgggaggagctcgggattggtttcggggtgtaaaaccagaattatcccaaaactgccaaaactagtcgaccagtttacagggtactggtaaactggtcaatcggttggcctgcagggagaattctagggtttttgcctcgaatttgattttgactcaaggtgtttttcggaacctaatttagggtattctagtgatattttagctactttagaatcagtggggagttagattgtccgattacggaattagggtttgtttttgaaattttgaataagttatttattaagctttgttgtcgtgacataagacccggaattgtcgagcatagttccattcaggtcggcctgcacacttgatattggattgaggtaaaaaaagctttatgcactgctgagcatgttagataagaaacaattataatcgttggtgtcttgattatgatcgagttaatgattgttattattgtcactcgattatgatcgagggatagatacaatcattactgttatgaataattactcaattgaaattgtagaaaggtttcttacttatcatttgttttgtcgggcaacgataatgacatatgtagctcgtggataacgagtggt

SEQ ID NO: 242626 - DNA, 562 bp, Cannabis indica
gagttgattagtgggttgcttaacaaggccccgaccaagcatctcgagattagacgtggagctgctgaggttaagaagaacctttttttctaaaggtcccaatttggccttgattaggttatttggttagacaatgtgtggttggaaaacaatgatcaattttttagtaaggtacaaaatatttcgtcaaatattcaatatgattccacaagatctagtttcgttcaattaacaaattatagccaattgaaaggatcatctgatagatccagatatcatttgattccaatagtaataaagattcagaatatcacatattgatcaatgaaagagagattcaactaaacgaaagattaattctttaggattcttcctttctgcaaacggaataaacagagatagaatcatattgattccctaaatcctaggaggcacaaaacaacttcatttggtataatatcatcgtcgtccattacttctgagagatggaaatatatatcataaaagaatatttacctaataagaatatttgacactaatacttcattttaactatttttct

SEQ ID NO: 242627 - DNA, 671 bp, Cannabis indica
ttaatttaaattaaatatttttacaattttaattgtacattattttagataatatatttaatttactttcattttgtattaattttcgaatttgattaagggatagttacataaaacactaatttttataaaacttttaaatttttacattcaaaatcattttttttatatatattttatgatattttataaaaacataagaaaatcacatgaaagtaacaaaaaaccaataacaaaacaacataaaaaataatatacaaataacaaaaacccaacaacaaaataacaagagtacaatataaaaatacataaaagattgtatttcatgcaaataaaattgtaaaaattgtaaaaatattgaaaattttggaccatatatttttttttttaaaaattattccattgactaaaatggtataaatgaagaaagagcgtgagactcagtttaaaagaaataattacattaggcatcattttttgtaaaatatttacatttttacgttcaaagaatgttttttttacatttttacggttttccaaaaaataacacgaaaacaacataaaatcaacaagaaaacaacataaaagtaacatcaaaataacaacaaaaaaacaacaaaaaataacatacatataacaaaaaattaacaacaaatgaacaaaatttcaac

SEQ ID NO: 242628 - DNA, 587 bp, Cannabis indica
ataactaattaattgaacatcatattacagtgttgattaaaactatacgaaatgcatattttaacataaagacaaacaaacaatacgatatgcatatttgagcatccatccatcaatttcctatgattcttgaatttttctttccatcttgtatcaaatggatggatgtttttaataaagttttctaacacccttcaaccccaaaacatcatataaatcatttaaaaaaagataaggtaaaattaaagtacaaaagaagatgaatatattaatacctgattagtgatgatcgttgttggtagaaagtttggttctaaaaatttctcctcaacacctaaatctgaaaaattagagattttaatagaaaaatgaagacttaagaagaagaagatatcacattattactatatggaataagctttcaagttgaagatgaatatattaatacctgattagtgatgatcgttgttggtagaaattttggttctaaaaatttctcctcagcacctaaattttaaaaattagggattttaaaattaacagttaagaagaagaagatatcacattattgttggatatattttacc

SEQ ID NO: 242629 - DNA, 880 bp, Cannabis indica
gatgtttgatcttgggtttttgttattattttactattttgcgtattgaaataggtgttgtgtgtgaatactgtatttttcctagttttgcgatttttttttgttagtctgatgggttttgatgtggccccgatggtggttcgataccatacttggtatcatgacagggatgtaagcccaatgggccccgattgttgtccaatatggggttggggactttaacttttgatgggcccgatattggcccaattggggctcaatggtttttcgatatggggttggggattttaatttttgattggcccgatatgggttgataggggcccgatggttgtctgatatggggtttggggactttgatttttgatgggcccgatattggcccgattggggcctgatggttgtgcgatatggggttggagattttgatttttgatgggcccaataggggcccaatgattgtccgatatgggattggggactttgatttttgataggcctaatattggctcgattggggcctaattttgtccaatatgggttggggattttgatttttgatgggcccgatatggggttggggattttgatttttaatgggcccaataggggcccaatggttgtccgatatggggttgggaactttgatttttgatgagcccgatattggcccgattggggcccgatgattgtctgatggtttacatatttatagcattttcaagaattttattgctttatagtgagatatttgttctaaattgtaattatattttatttttaatatatgtgacaggttcaactgttgatgcagttgttatgtataatagtgtttaagagcttgagggtagagattgagtttataaccaggccaaaaatt

SEQ ID NO: 242630 - DNA, 1190 bp, Cannabis indica
taaaaaaaaaaatacgagaggtaattaaaattaatgattatcaatgcaaaaaaactaaagtacctggattccttgtgcattcaaatttctatgcatatcttcaagacaagctattcctgatgtatcaatattcagcaaacctaaacagacacacgtaattgtagatattattataataagcaagttgtacatgttataaatcatgtttgatgaatttattatttcttttatccaatattgtttttttttttcgcacccatcaaatttttaaatcttttcaaggaaatatatacctataatgtatgtcataatatattaataagaggaaatatatcataaaatccaaagaaagaagaagataatttttaatagaaaaaaagaaaattgagggtgaactatcttctgatcaagaacatcaagagcatctatttagggagcaaatcatttttcaggaggagctgcagacatcccatgaggattcatactagtaacttgagtagtcaccattgaagattgaatcaagaaatcaatttagaaattttgtgttgggattttttgaatttttacttatgataccatattaggaaatataatattaattttattgaatgagtatcataagatacttgtctgctgtatattttgtatgtactccttatatagggaaagcccttgataaagaataaaagaataatctctaaatgtaattaactatctagttattacaacaagaattgaaaataacaaaactaactaacacttagactctcgctccttataataataataataatattattattgttgttggaatattggacaccatctatatccatattaatatgatatttgtttgctttgagactaagctttaaggatctattgtccatctatatatactcataattttttccatttttaataactattgaactttgttgcacactcaaactatataaatatatatatatatatataataatataaagagaaattatggatggattacttactagacatgtcaagaatgagaagtttataaatagtccttttggtattttcttctatgtcctccgatatccagttcataatccttcatgtgcatatataacaaaaatttgtatgtattactagaaaatataatctaaatatattgtgtcgttcggttttaaataaattaataaaattat

SEQ ID NO: 242631 - DNA, 855 bp, Cannabis indica
ataataataattctatatatattaaaaaaaattaaacaaaaaatttataaacttacaataaaaacactttaatgtataatatagttaaaacttaaaacggctccatcaataatttgctacaacattaaaaaaattctacttcctatttttattttagcctaattgaatgaaaagaagggttttactttgaaagaaagctaattaaggaaaagaaattaaattagaaaaaatatcatttctcttctctctctcttggtgttcggccctcccaaaccagaaggaaaaccaagccaactcattatttgttctgtgttttcagccaaggattcaaggaagaacaatcaaggtaaaccctagctcctttccttttaagtttatgaagttgtattttagttttaagaggtgattttgggttataggagctgttagggtttgatgcttgcatagttcgagttctagggcttgtttgggttaattttggttcatagcagctggttttgagattgattataagttttatgcaactttgagctttgagttcaaaactttaagctttaatggcaacttggattttggttgtttgttctgtgaattactggctggattatattgtgtatgcccttattaggtactctggaaggtttcatggcaattggtggagaattgagcaacaaatgaagagctttgggaaacctggtgcaaaccggctagccggtttgcagtgccacataaaccggctcgccggttttggcagggttccccgggcctttcattttctcaatttttgccttttcgatgcctcgattgggtgttttcccatttccagagttataataacccattaagagcatagca

SEQ ID NO: 242632 - DNA, 682 bp, Cannabis indica
cttacttatatataacataactcacaaccaaaaatttggtaatttaactaaataattaatctatatatatacttacgtgtatatatatagatataccccaagctacacttatgtgtgtttatatatattattagctgagaagaaacaaaaacattgaagaaggattattaatatataaagaagaatttcaggtcttatatatataatagtaactatatataattaattaaagagcttatatatatatatatatgcatggtgaatatgtttggattgggggtcaaagaagagaagagtatttaatgccatgtctgtgagtactatatattcttaattaatatttgtatataaattaattacattatcatttcttcttcatcatctatatatataaatatattatatataaatatatatttgaatttatttggtttttgtgtgatcagattgttgagttgttggttcatatggactgtgaaggttgtgaaaagagaatacgaagagcaatttcaaagattgaagggtacatattaatattaataattttactatatataatcatcaataatacaaaataatataactttaattatcttgttgaaattaatggtatataatataaccctttttttctttctttctaatcattaagtaaagtgcagtacaagattatcaatataat

SEQ ID NO: 242633 - DNA, 580 bp, Cannabis indica
ctggtccgaccagatgcggatcaagctgttttaaataaagtacaagtcgcttaggtttaggcttcttaattcatgactaaagaaagaagccattaaagaaataccacccttaaatatctacattattaatttactattttttttatgatattttagagagtttttcagtattataaattaaaattttagctctttttgacgtggtatttgaggacgttatatctataattattgtctaaattttttagagtagttttatcctttacttctgcagctcatgatttgacaaagcacatttttcggctagacaatgagctattctgattcaatgatgaatgtcaatatcttaaatttctttagtggtttttaattactatgtcaaagaaaagaaaaagatgtacattctatcgcagcttctttggcttaatggaatcccaaaaaccaccaaagaataagttggagcttaattatacataatttttaagaatatggtgtcatgtcaattgatgcccttctacgtaggacttcccaaatgggcttacacaaattaagacctgtactcacttttaaggcctatagg

SEQ ID NO: 242634 - DNA, 1950 bp, Cannabis indica
cacaactataaacttatcacataaagctctaataagaattaataccgaaaatagtatctaaaattatggacaaattgagtttgtggatcaatccttgacaatttgacttgaactgaatgttgtggataccaaattaaggacagacagtgagatatggcatgatgaagtgcaagagcctcagcccattcaggagggagctgcccatgcactttccaagcagcaaccatgctaagaccacacatcgatcgcctcagaacgattcatggtcacattgtaatatttttatggtctattaaatttaaataaattgtaatatttaatatttttaatatttttgagttattatattaaaaataaggtagtaatcatatatttaattaaaaaactgatttaattcaactagtttttagattgaattagatttttgagctctaattaaattagttcggatgataatttttttaaattacaattactaattagattttatcaaattaagagaaaaatattaaattagatcaaatatctaacactaatactttatgagcgtatactaatttaatatacatattgtatttctaataatgctttatactatactaaatttagatttgatcaatataattaaaatttctttagatatataaattttaaattcaaatgtaattcttattttatttttgcaaaaaatcaaatttaattgtttaattacttataaatgataacatttgatcaaatcaatcaaacttaacaagttcatgatttcaaataagtatcattataaaacacaaaataaacaaaaaaaaaatatatatatattaataataaacaaaattggttttactaacttggttatcataaaataaaaaagaagtttatattccattctttctatcaaactatttttaacaacggattgaaaacatagtccaataatagtatccaactctattgatatctactaaacctaattttctagaaatcatctatattttcttgttatgattttaaagttaggctttgaagcattgacttatattatgcttgatcttttcgattaaaatacaattgttaaatacattatggatgtaacacggtccatattaattaaatgagagaagacttgagattaacttaaatacttttgaatttggatcaattatttcacatgtttttcattaattttatttttatttataaaaataactttaccgaagtaaagttgagccatacaaatttctatttttcttttagaaaggcatatccatatctttccaagtgtcatctttagagaagtggactatattccatagacctatctttctatctttcacaatatagagagatattgttgtgataagtatatccgtaatctttggaaaatcccttttttactttataataaatgctataataatacaaaaaataaacaagattaaatgaatctattatatataaaataattcttttacctaccaaataaataaaattaagaagaaaatagaagtagaagaagagaaaaaaaaagaaagcacttttcattatacaaataatattattggttgagtcatttgccaactcaagaagaagaagaagcagaaacaagccaaagctattgtagtacaaaatttgaggcaccccaaaaacaaaagagagagaaagaagaaagaaagtcagtaaaagagtctgttttgttttgaaatgtctagtgttgttctttgggtacatgttagtcctaaagagagtataagctctgtgttgagctttgttgggagcaaaaatggtggaacaaagaggtcaaaaatgtggtgtaataataataataataagttgagtttgtcaaggtggggtttgggcttactcgggcacagttgcgaatccagcaaggtcttcagaagagaaggtgtatgaagttgtgcttaaacagctgctctggttcgagaacagagg

SEQ ID NO: 242635 - DNA, 3354 bp, Cannabis indica
ctgctgaggtcttgctgaggcatattactacaaaaaattgcagacatgcttgcatttggaaacaatcctgaagtatgtgaaaatatcttcaagccttgtagcatctgtaagacactagtaaaatctccattacaaaataggaggatatcgtcttcaaagctcaaatggttgagttgcaattctttccatctatcatggtacttaaagtgtaccttagtaccaacattcatcataatccttgtcaaatattccattcctagcacaaatatgaagggggacatgggatccccttgtcttagtcccctctttgatgcaaagaaaccatgcatctctccattaaacattagagagaattttggtgttgttatacatcttaaaatcagctgagtgagatgaaatgggaagttaaaagcttctaaaatctcctcaatgaaccccatttcaattgtatcatatgctttctgaaggtctaacttgatcatgcacttggctttcttgctttttcttcaataatgcttgatgagtcttggcaaatcatgatgttgtgtccaatatacctcccatgtacaaatccccctgattctgtgctatcaaacttggtaacacagtctttagcctatagcaaattagaattgtagaaattttataaactacattacaacatgctataggtctacagtcattcactgtattagggcatataattttggaaatcaatgtgagcatagtggaattaatctccttgagaattttccctgtttctaggaatgaaagcacagcatcaccgacctcattctccaccaaatcctagttatcctggaagaaatagcttgactagccatctactctcggagccttgagacctaggatttcaaagacaactttcttcacttcatccctggtatatccggtcattaacattgcagcatattgtgcattcagaatagggcccatccgaactacagaagctttaacctattttctatcttccagtgttgatcccaggagatcaatgtagtaggtaagaaaagcatgtacaaatttggtggggtcattgactcttgatccatcagtttgttcaatggatagtaccctgttgtgtctccttctccctttaatacttgcatgaaaaatggctgaattgtcatctccatgccttacccaattgagctttgccttctattgcagcattgacaggtaatcctcttgtctctgaattagttgctttcttgcctcaacttttctcttgtgtaagttagcatctaaaggatttgttttgatttcattctgacagtgttctagctctcctttaaactgaatgatatctgcttgaatgtttgagtacccctttttatttatttctttgaaaacttttttcagttctttaagttttgtcaccagctggtacatcttggttcctccctgttgaacttgccaaacttccttaattttcctatcataatctgcatgagatttccacattggaatatatcaaaatggtttctttcttgtttgcacatcaggatgtaagcaaagtattacaggagcatgatcaaaagttccttcattcatgaagtacacttcagctgtaggataagcatccatccaagcaccattagccatcattatgtcaatctttgaatatatcttgtcttgtccatgttgcttattgttccaggtaaagtaacaacctgtgtacttgacatcctccatgttgcaagcctccatgcaattaataaactccatatcagcctgatatttttctctctaccctatcctttccaccttggctagaatgtcattaaaatctcccatgattagcaatttatctacagttttgtgtccctgtaattctttccataataccagcctcccttgcttttgattaaaagcatatatcactgtaatatagctgctaaaaaaatccacctactgtcataatatgcagatgcatagattggctggtgcaagctaggatgtttacctggaaaatgagaggattccatgctaagacaattcttccttctttgtgccaaggtaaattagatgtaaaacactaacctgagaataaatttgagtacaaggctcccaatttttgagccttgactcttgtctcgaagagcccaacaaagccagcattttgtgtctaaataaattgctttatcagattttgcttatgctgactattggctcctcagacattccagcacaaaaattatccttgacaagagagggatctccccctcccctgtcttctctttattgtgctttgtcctcttgtcctctgcctcttctatttcatgttcttattgacctgtctcagccaaagcttggaaagcattctcagtatatgtctcctcggtgttatgcacttctttccttttccagcccttcatcactagttggaaaccctcatcatctttctcatctttcttttgttttatctctagttttccactcttatcttccttgacaatccattctttcttgacctccccttttttcctgcatacctctttggcttccactcatagtgtaggcctacatgaacatttgcccccaattaatcttcaaattcaatcatgtcaggtgatggctgatccatattgacctcaatcataactctggggaagttgagtcttgagcgttcccgagttacttcatcaaccattacgggtgtcaaacttgcccgcttatcttgaataaagaactctgtccccaatacttcaagtcaagatcctctaactgtacctagattggaacagtccttatatcttccttcttaaagtttgtgttggggtcccagggcttcataataataggtctcttattaaagaaaatatagcctccattcaacacttcatctctatactccatgctttaaaatctgataatgaacacaccatgagagagtaccttaacttttttgatcttctccttctatattctgttagcaaagccttcaagaatgtgcaggggtgggttagaacccaacacataacgtacgatcgagggcctccagaattctacttcctcttctatgtcctccatagtaatcttgaccttaggagtcttcataacaccattaaaagacatttttaaactcctaattacagtgccagatgttaaaacaggtggtacagaggcattaccttgttgtatgtcattgttactgtaagcccaagctcttgtctatcctatctttttcatatttagattgattttatcttgatttaagcttgaatataaaaagaacaaaatgaaagattcaacattagaattttacaagcttcacctgccctagaaactcattctaggcggctagtgcttgggttccccgaaccagggtaaatt

SEQ ID NO: 242636 - DNA, 1142 bp, Cannabis indica
tatagttgtattataagagttgaaatatgctaaatatcagttcaaatattaataggatttgttttattattattttattatatataaataatattttattattttatcaaataaaaataaaaagtcacccatgaatttctcataaaccaagaatttcagttatataggcacactttatatagaatagatatagagatattattagagcatatatatataagtgtcttttctttatattagaatagaaaaaacaaaatagacaaaaatgtatcataaataagttttagaccaagttgaattagttagttaggatatgttttggttgttagagtcttgattcatgtagctaattctgttacagttggttattcctccaactgattatcccttgttgtaaccgagctatataaggctcattccttctctttgtaaaacttaatcgagcaataataaagaacacactttgcttttgctctgttctctcctttctcatatggtatcagaagtaatttcgcccacagcttcaatggagcgcccttcaactcgatcgcagaatggtgatcctctatcatcgatcgacaatccagctgcagagatcaattccgatcccactccagcttccaatccttcagcgattcctccccgtaatccactgattagggtttcaacttagaacacagatcctcttcctcaagatcctcccaccattgttgatgacaactcgaaccaggcactcacctctcgatccgtggctgacgatcattccagccccttcttcctcagcaccggtgatcatcccggtcttgtgcttgtctccaccgtcctcaacggcaccaattaccagtcgtggaagcgaggcatcaccatggcgctcactgccaagaacaaaattgcattcatcaatggctcccttcttcgcccggaacctggtaacatctatctcaattcttggttaagatgtaacaatatggtcatgtcttggttagttaactctgtgtcttctgagattgctcaaagcatattatactttgatttggctaccgatatgtggaacgacttagctgaatgctttaatgaaggtaatggtcctcgggtcttccaattacatactcaattgatccatcttcaacagggtgataact

SEQ ID NO: 242637 - DNA, 516 bp, Cannabis indica
ttgtaaaaaaattaagcaaattgtttttttacggaactcaattctgataaaaaattaaaaaagatatggtgtttaaagtttcgggtgcatatggtgtcgagaaggggtgcatcgcacgaatagaccctcggacaagacgaggtcgcgcacagatttagacattccgtgtctgaagacacggctagctccacgttcggacacgaggatgcacgcccagcaccctgctagcagggtctttcgcgcgtggatcaacttctaaatcctcttgtgcacacacgttgaaggctgccatcagcctgtccctcggtagccaaggtgctatgcacctaaaatttgatttttggtggattttttcacaaatttcgaattttttttaatttcaaatcttaaaattctaaataaaatataatttttaatatttaaacctaaatattaaatttttaaattaataatttaatttttttaatgattattattaatttgagatattttgaatttgaaatttaaaaattggtt

SEQ ID NO: 242638 - DNA, 1376 bp, Cannabis indica
aacataaaatgttatttctgatctttattaaataggtaatcttattatattggaatgggttttatttagggcacaaaacccaacaagatcatgtcctggaacagtctcccgtgctagagatattggatttaaagccacctaagataagttggattttgcgagcttctgctctttcttgtgaggcctttgataaggtcattactagtggccttgttgggggtgttcgttgtgagattcctcgcaagaactgtagggcacacaggccccctacgggctggctggcatggtcagggcaccacatagaacatgggatggtgttgctacttcatgattatttcctggacgtcatagcctacttcgggatgtgcccaacacaactcatgccaaggagcattaaatatctatcggcgatgttcattttgtacagggagcttggttggcctccgtctaccccttatgagattgggtacttttttgagttgaagtctgggccgaaggagaacagaactggctatttctatttcagctagcttggtaaaaatggttgggtgacaccgattgcaaggccatgtcaaaagtaggaaagtatgccacaaaatactttatggcacaaggccttcgcggaattgtgcaccacgagttttagttggtgccgctcttctgatgttccatccctactttggagataacagatagagtgaattacaacctttccttgttggctgaacagataaatattatctggttgaccagtgtggacaacttccggatacatggcttgtatccctttgctcctagggttgcgagaatgctaacagctggtgtggcctgcgctagagatgggcatggtcctgacatggatgatgaagaatcacctttgtctcgtattgtacagaatttggagaggggagagagagagagctctctgtaggtgcctgtcccgcgggggtcaagttggtgatgcctctcttcgtatcaagcctagaggcccgatttttgatagacctacatgccccatacccacagctagggcaagggaaaacctatagttgtgagctctcatagctcttcttccgatgaaaatggtatttgacagtttgtaacaccatacttttactcctatgttgaatattttttgaatgtatcctgactttgatactttctttttccaggcatgtttgtaacatccccgcttcaagcctccattgggtccttacacccacggaatgactgactcttatacacgagtacgtcactctggctccttcatggattgatgacttaccctacagactaacacgagtgtttccagcgtgctttgtcctcactcacacgcatcctgagaaaacttcccaggaggtcacccatccttgaaa

SEQ ID NO: 242639 - DNA, 589 bp, Cannabis indica
gacttagcaagttttggaatgatagttggttcaagaatgatatatgtctacaaatctcttcattctcttttccccaacatacaccgctaaatacccttttggaacatcctttgtacttgaaaaaggcttttgaatgagttgcttggcatgaactaagctagcaaagcgaaaacccattgttgtaaaattcttcaaagaaagaaaaagatcagagaatagtttaggatgtgagggcttgtggtgctaaggaacctgttttgatgagtatatataaccaataatgttggtaggacatatgaaactcaagagtgaaaaggcaatggggtctggtgaggaggcattggccattaggcaatcacatggtactgtcttcttactcatcacaattttatatattcttgaatatttctttctcttcaattcccaaccccaccacaccaacacatatcacaaaatttgtataaagatgtctaaggcatgccctgttggattaaaaattctatgtgggcacatatgtataatgtatatgctattataaagtgtgatacaaaattaagtgaccaattatgttatgggtatcaaaagggta

SEQ ID NO: 242640 - DNA, 494 bp, Cannabis indica
tttaaattttaataataaatatttaaatatctgattataattaaaattaataaaccaaaatataataagaataattcaaaaataaccataaatggatttttgtggaaaactcaatttttttaaattaaaggctactaatatctaaaactaattgaaattaattaaaaaattaataaaaattaattttattctgattattaaatttttatttgaaaattaagattctacacaaaattttactaaaatttttattctgacgaggcgggaccagttgggaagagagactacatgcgggccccacgcgtgcaggctggagagaagagttcaggcgtgtcacttgcgcctggtcaggtggttgtctcactcgcgatctggaccttcagatcagggcgtggacaactgtgatgggaagctgactttgactgcaagtgggccttgcataagggctgatgagatttcttttaaaaattatacttttagctccatttcttcaa

SEQ ID NO: 242641 - DNA, 1055 bp, Cannabis indica
ttctcaggtcataattactaaaatgcccctggctcaccaacacaaggttccagattttcatcttcttaatccgatagagctccactttgttacttggccaacttggtcaaagcatcgatctactcttacaatctctttgtcttactctcggggagataatgtcccctcatcttatcactcaagtagtttctaaggtcacccccacgtggccttgctttctcacttttgtactttttgtacttggcatctaatcgccatcggaggcttatggtagacctgctgtcctcataataccccacaattgtccttccatcctgattaactgaatcactggggtggttccttccccctttaggcttaggtacctttgcactttgtccccgtggcacagttttgcctctaggatcataagggcttctaggctcgaaagcactagtggccttctgcatacttgagggctggccgactggatttgtatcctcttgaggaggcttaggagtgggtttttgtgggggctcacccaccttgcccttacctttatcctttcgaggattcaaggattttgcttcaatttatttgtgggtgcgttcttcgaccattacttccaccgaaggttcatcgtcgaactctgccaagtcttcaaacttgtttagaaggtgttccatcattctcttgatttttgcggtgagcttcctttgttctgctaactctatcttagtagcttcaaactctttgttcactcacaataagtttggctcgtggtcatagtaataattatccttgtagtacccgtcttttacgtagtcatcgtcatcaccttcttcatccccatcttaaggattctggtcattgtcaaggccgttgaacacgttctcagcatcctccactcaattctcgacacgggtcgtgccttcttctctaacactgcctgtctggaggtcggaggtaagggagtatgcttcctccattacactatccaatggagttttgttgcttgtgtccttttgggtattcaccatggtcagtaaacttccctcatctctcaatgaaagcac

SEQ ID NO: 242642 - DNA, 1485 bp, Cannabis indica
ttattctcaaacatggaaacaatcaacaaagaaaagagataaaacacctagtggaatggaagatagtgataatatatgtatttatagaaacaacatctaaaggttataggttaaaattggatttaaaatgaaatagatatccttaatatgtttacacaattattatgaaactttttttttttttttgaaataaaggcgtttttataattaaaataaaaatcagatctcatggtcattacaaaggatatcaatcgggatagtagatacttctaccataccgttaaaattgtttgcaaacgcccatttagtcacattatgggctgcaaaattacagtttctggaaataaaagaaaaattacaagaaatcatacaggtagagagacgtttacattgccgtacataattttcaatcccccacaaggtgtcagcacctttaaggttcttgataacactctcagaatcactctccaccataacaaaatgatgatgcatagagatcgccgtctccaaagctaacagacacgccgctgcttctccgatgatagagtcagcgaagttaagcaatttagttgccagccacaaaatcgaccccgtagagtccctggcaattgccacaacacacatggaatcaccaccgactctgacgtcgcagttaattttaatccaatcctccggcggtggcgaccaagccgtggtaccatcatcttgaaaagtcttaaacaaacaggaaccataatctgcgtaacaataagcaatagagtcaatataatgtatcaagctacccatagtgttgttatggaccttatcattcctagccctccagatcgtgtcaaccacaatcgaagcaaaaaggaacacctcatcagtgtccactccaattattatgaagcttgagtagtgttaaattcacaccaaattgtagattatttgtgaatttttcttttctttattaatgtgaattatatcaatgagtttatttttttgtattctagattagtaaagtgggattggaaaaaaaatcatcatcacactagacaccactacaaattatgtaattgcatctagcttggtgagtttaattatttatcatttttttaatttagaatttaaaagttatcatttgtattgaatagtagttgataacgataagaaaaactaaacaattatcattgaaaagtaatcctcctagttgtgattcctatgtaatggtaaatcttcaatactaaaaaccaattatgtcatgtaagaaaaatataggtaaaaacatcaaaccaaaccagtatattataattctccactcaatgatggtagtcatatataatagaaaaaactcttcaaaaaataaaaatatatatataggcagaagttacgtgtctagtcacgtatagttagttttattttaggttttaattatagttatggttttttttcaaatgtcatacgtaattttaaaataaataatgctcaatatagagtgataattgt

SEQ ID NO: 242643 - DNA, 480 bp, Cannabis indica
tttttgggaaaaaaaaaaaaaaagctgtgctatgttatggccttggtgacagaaagagtagtaaagaaaatcaaaccattgtatcattgaacattctgaaaattgtgtaggcattcactcacgggaactgttatctctactctagtgttgatgagaagcaaataaatctttggattctcactgcagcaaataaagttaaaaaaagaaaggcctattattattattattgttattattaattgtggggcttctgaaatcatggctagtgtttttcttccttacctcgaataatggcttcaattggttggctcccacaaacttctgttgtacttgaaagcagtaaaaacttaataagtaaataatggctacccaaattgtttttgttctacctacccaacttgtgatgatcaaaaagcatcaaagggaagagattattctattaataatctagaaaagtactcaaaataatatagaaatatt

SEQ ID NO: 242644 - DNA, 745 bp, Cannabis indica
aaataatgaaagcaccaattaatggattaaaacgtccttttcgagacaggatcaatctccttaagcaaatacttgaaaattcattccaattatccccaaaattattacaataagagtatttatattgctaagaaaaaaaaaaaagaaatgcctcttaacagaattagttgctccaccagctccctttcagtgcctctctatcatcacgaagtcgttgagccacttgggtctcccgcgcactcgattcccatgtgctagaagctcctggttgatcactgctgcttctccctcattctcgttcatggagttctttgttgcagttgatgcttctcctcttgctgttgggctacctttttaaaccaatttttcacccttttgtaataccttaggattatgagaaatggattagcaaaaccctaactagataattatgaataattgaggaattatattattatataatttaatatatgtaaatttacatgatttatgatatgttaacacccgttggtgagccaggggtattttagtaatttttacctgagaaggttaaagtaatggaattaatatattaacgtgcttatgggactatattattatatagtatgcatgtgctgtctttttcaggtatattctgcaggttggcgcggtatgtcacaacggtttcgggcgaactggttcggctcggatgcaattggattgaaattattggcattatatttatgtgtggataatctgaaattat

SEQ ID NO: 242645 - DNA, 501 bp, Cannabis indica
tagtttattatgtaaatttttctaaataaaaattgtaaaatttcttatgctataaatttggtcttatattatactaagaaacaaaccatgcttcgcgtgcggttatattttgtttattgataatttagttataaaaatatattaaagttgatattttttttaatagtatgagtaattattctactaaattttttcataatttttatatagaaaaataaattaatatggtaaaaaaaattatcatataatttcttatctaaaaaaaaaataaaaaaaatagaggttgaaaaatcatcacacaaaatatagatctagaaaaattaattgataaatctatagaaaactcatcatatgattttaaaactgttgtcattcaaagccgatgtcatcaccgtatctcacttgtagtcgctactatatttaaagtcgctattattatcatatattatttgtagttatcactattgatcaaaataaatttgctatgtacataaaataaat

SEQ ID NO: 242646 - DNA, 510 bp, Cannabis indica
atttaaattaattttaatcattcaatctatttaacattcgttgattattgtattggatcggttctatcctctagatatttttcatgtatatttgttagttgggtaaatagtagtataagtacctaaagttttaggtttgtaagcagcataaactcaatgatttttttagcggcataagtactcaatgtttataaaattataattttcttccagttttatcagtacagactttgttattgtgagcctgtactaataaaaatagaaaaaaattacatttttacaaacattgggtacttataccactaaaaaaaatcattggatttatgctgcttacagactcaaaattttagatacttatgccgctatttgcccttgttagtttgattcaactttattcaacatccacagaatacatctaatattttagtttcagtatacattagattccaatccaattcaaaaaaattagaataaaattttaatgtatacatatatactttatgtataaca

SEQ ID NO: 242647 - DNA, 899 bp, Cannabis indica
caaagtgtgattgtgattttgattcttctatttttttttattattccaaatcaaactcatgctaaatgttggcctactccaaaaaaaaccattattattcataattcctttttgtccttatatatcaaaattctattatactatcttacataactagaaataaatgtaatagtgtaacacaaaatataatagcaagaaattaatatatgtattaacattcctcacaatataagcaatgatattaaattgacaacactatataattctccaattaaattggtctaagtgtttgtctgagtgtatcacaagtcgatagcctagtagacctctaaatcaatcaaaatttgactagtgatttgggagactcgaaatgaaaggcatagtctattaagaaaaacactattattactactactataaattgacatttgatcaagtaattgttaagagaagaaatttatgttgattaaaaccatccacctcctctacaatggtgctttctacactcgtcgttgcatttaatgaaatctatgaaatctggacgatatgtgctcttgcaacatctaaggagagaatcttctcctagatgtaccattgaagcctacaaaaacaaaatatatagtatgagtactaataataatgacaaatataatttcaataatccaaaagaaacaatatataaaaaaatatgtatatattgacaccaaccaaaagaacaaatgagaatccccacaagaagaaagaagaagaacagaaacaacttgaactaatttgaccattcttcttaagactatattctttaactttaaccccaatactgtaaagaattaggcatatagagttttaacatataattttagcaagcaaatgagaaccagctactgatggtaagtaaccaa

SEQ ID NO: 242648 - DNA, 1165 bp, Cannabis indica
agaccagcggcaactgtccaaataagaaaaaagatcggacctgtttgatgacgtcattacccacaattgcccaacacttttgataaaaacctggagtcatgccatcgggtccaggggatttatctgggtgcatctgaaatagagcatctttcacctcctcatcggtcaaaggttgcaagagagagtcattctgggttgaagtcacagtagcagaaatcccatcaagaacatcatccatagtacagttggagctagtaaacagattctgaaagtaagaacacatgacatctgatagacccgattcccagtcaacccaactcccatcttcgcagttaattctatttttagcagaattagattgtcaaaaatattttgtaatttgaatatggattttggttgagttatatttttattttcatatatttgtttttaattgattgattcatttaaggtataaaatgtgtgtagcttttctaaattgggaaagttggacataattggtaattttcatgaataaatcaaggaaagttgctcttatagctcgcaattttgtaggtacagaagcataaatttctgggctgattgaagatctttttcagggaagtttcttgtgagcagtgatcttgttcagaccgtgtatgagctgtctatactgtgtatattgattataaatacacgttatagtagctaggttttgtatctctttcacatctttgtatttcactcatactttgtaagaaagagagtatatctttgttgtgtagaggagggattgttcgactcttcctctatgtttatgtattttgtattgtcttaagtctgtaattaagtctacaaaagaagaagaacaacagtgctacctttgggagaaggttcaacaagcttttgagagagaacttttcaagtcttacctcaggaggaaacaaacactcttcaaggagatcgaaaggaattcaagcacttgaagtttcagttagaaggtggaatacatcaagcttgcgacatacaataagagggggtctatttattcataagtcaattaattagtatttttgagacatatctaatgatcttatcttttggtgtggccctgtgaactagtaacaatttacaaggattgttaataccacgtataaagacattgtatgtgtgtgtgtgtgtgtgt

SEQ ID NO: 242649 - DNA, 703 bp, Cannabis indica
  modified_base (131)..(131): a, c, t, g, unknown or other
gcacagaaaagataaataaacaataaattattatttacgaaaaaatgaaaatcaaagcataataacaaacaagcaaaaaaataataaaaaaataaaaattactaaaatacctaaaaaaatgaaaaaaaaanaaaaaaaaaaaaaaaaaacaagagagaaaagaatagagcgaaacctggggagcagccaaaacagcagggtggtgatacaaggactgttgcatgatcgcttgttgtttcagcctctgtggttgcatcttcttcttcctcagacccaccaaggctgagatttctctaagcaagcggaaactttacagggaaatcgagttttctagggtttcagttcaagatttggaagagaaagaggaaggaaaataaatttttaaaaataaaactaaaatacaataagaaaaaagaaataaaacaaaaaaaaaaaacaaaaggaaaaaaaaaatccctctgagagggtgagagagaaaaggaagaacaaggcgatgggtgggaggagaagagaagaaatgtgaaaaaaaaggtgtttttgctgtgatgggagttttatataaactcgcccttcgaggaatgtaaaagttattacaacttttaccgacacgatcacgcgccgcgcgttggtgtttttgtaattaaaagtcttgttttgtaatcgttaggaaatttaatgcccctgttactacattcttaccacc

SEQ ID NO: 242650 - DNA, 738 bp, Cannabis indica
aaaccaagaattctgttatatatgcacactttatataaaatagatattgattgatatttttatgtttatatacatatttgaatttattattttgtttcactcaattcgcattgagtgcccctattacgtatgagttgcatacgctccagtaatacacaatttagttatttataactttattggttatataaataaagtttatattttcttttattgtcgttgatgtgacctatgagttttatttatttaatttctttttatgttcttttattttactcttgatttggtttcagtttggtaaatatatatttttatgcaaacaatttaattcaaattttagtgtttgtttatttctattattttaaataaattaattgaaataatatgttgtcaaagtgacttcttttgtgtagattaatttattgaaatattaagatggttgtgtgtttgtaattgatgcatatattgactgacccaaaagtaattttaaatatacttgtggcaataaatgtgtgacaattataaggtattttatgtgaacaatacgttagttcaaaggataatctattgtttgacacaattttattgtcaatgtttgattgctacaccaagagtaccgcttacagttaatattattgtttaaagacttgatattaatgtgcgctttgtatcttgagatgggattaacaaatttttgaatttatagtttaattatgcatattaatgtgagcttgtttt

SEQ ID NO: 242651 - DNA, 7294 bp, Cannabis indica
tttttcaaaaaaaaccttggaaactcgactccaagcttttaaaccctactcaccacaatggaagaagaagatcagcagaaggtggcagatctgattaaagagcttgttctccgtttactttcgggaaaccccgcctccggttctcaacaactcacctctacttcaccaactttccagaaatatctccgttacgccgttcgaatactctccgctcgattgaggccctccattgctcccgactcggctgccattgctgagtccatcaagcgccgactcgctaatcaaggtaagtcctcccaggccctcactttttccgagctttacaacaaattcgaatccaaaaccggtcctggaagtgttaataacaagtgggcagttcttcatttgcttaatattatatccgaggataggaagaacactacgacccagttggattcttcgtcggttttactgcccaatctggcgtttaacgatgccgaattgggtaacgatttaagggtttctcgtaaaagaggaagtaaggaaaagggttggaataatggggttttgttggtctcaaaggacccggagaatctaagagagattgcgtttaaggagtttgtgaatttgttgaaagaagagaatgaaatttccgaagaggttttggtgagagatgtgctttatgcttgtcaaggaattgatgggaattatgtcaagtttgataccaattctgatgggtatgttttattggattcgataaaggttcctagagctactcggataatggttcgaaagctttgtgaattaggttggttgtttaaaaaggtaaaagggtatattcaagagagtatggatcggtttccggctgaagatgtgggaacagttgggcaggccttttgtgctgcattgcaagaccagctttcagactactataagttgttggctgtactggagtcacaggcaatgaatccgattccattggtttcggattcggcagcttcagggaattatctttctttaaggagattatcagtttggtttgctgagccaatggtgaaaatgaggttaatggccgttttagtggacaagtgtaaggttttgaaaggtggggcaatggctggggctattcacttgcatgctcagcatggtgatccaatggtgcaggacttcatgaggcgtttactcaggcgggtttgctctccacttttcgaaatggtgaggagctgggttttggaaggagagctggaagatatttttgcagaattctttgttgtaggtcagccagtgaaagctgagtccctttggagggaaggttacatgctccactcaggaatgcttccttctttcattccacaatctcttgcccaacgcattttaaggactggaaagtccattaatttccttcgtgtctgctgtgatgatcgtttctgggccgaagccgcaaccgaagctgcagctgctgctggaacctcaacaaggagagggggtcttggatatggtgaaactgatgctcttgaatccttagttgacgaggcagcaaagagaattgataagcatttgttggatgttatgtacaaccgttacaaattcaaagaacattgccttgctataaagcggtatttacttcttgggcaaggggattttgttcagtacttgatggatatagttggaccagaactttctgaacctgctaacacaattagctcttttcagcttgctggtttgctggaaactgcaatccgggcatctaatgctcagtatgacgatcctgatatattggataggttgagggtaaaaatgatgcctcatggaacgggagatagggggtgggatgtgttttcattagaatatgatgcaagagttcctttagatactatatttactgagtctgtcatggctaagtatttaagaatatttaatttcctatggaaacttcgacgagtagaacatgctcttattggagcttggaagactatgaaaccaaattgtatcacttccaattcatttgataagctgcagcatgcagttaagatgccactgctctcaactttgaggcgatgccaagttctttgggacgagatgaatcattttgtcacaaacttgcagtattacatcatgtttgaagtcttagaggtttcttggtccactttatcaaatgaaatggaggtagctaaggatcttgatgatctgcttgctgcacatgaaaagtatctcaattcaatcgttgagaaatctctccttggtgaacgttcacaaacactgtacaagtctctttttgtcttgtttgatcttatattgcggttccgaagccatgctgataggttatatgaaggaattcatgagttgcaagcaaggtatttgtttttctattcttacattgtatatttctgagcgctgtgatgtgcatttgctttactaacatgtacctgctactacagaacggaatcttctttaccctctcaagacaagagtagatcaagaaagaaaacgagcgataaatctaataataaatcttcagagcctggatcctggattactgatggtaggaaggccctcactcaacgtgccagtgagtttcttcggaacatggggcaagatcttaatgcaatatccaaagaatattcctcgttactcgagaattttatttctcagttgcctgtgcagcaacatgtagatttgaaatttctattgttcaggcttgacttcactgaattttacagtcggatgcatcccagtagctaatgcaagggaaatatatcattagttttgagttgaaacaaatatgttgacaggttgaattaagaacaggcaatccacatttggagttgcccctgcttgtgtggctcaataatcattcattggctggctgacatcatgacccctactatttcaattttttttggctcaactttaggtatatttttaaaaatttcttatcccatttaattttttgctctctttttcaccttgctgtttttaatacttacttttcacaactcttgctggcagtgtttgcttctttctgatgttcaagtgtgagagttcagttgacataaaggtacatttttacctttcagatccgggtttgaagggtcacagtatacacgtatggtatctgatgttctaacggtttgttgttgatttgttgcggctttccaagctgtgcatttagagcttgtatatttgtactatagttctgtgtttggataaatcataaatgatgagcattgtgttggtaatcttattgcattcattctgttgttttgttttcatccactttgtgctggtattagtagttgtttaaagccctcatgtaactttgaatgtagtcctgcagtataggattagatggtcaccattcaagaacctcactgtaattacaactaaattaaatgatcatgtggattgtgaaagatattgagtagcttggaggctgattatattgtattccttttgctaatctggagccaaaaggcataggcattactacattttttttacctgttataaatttatttcagtcattgaaaacaatggtttcatttttctgttggtattctaggttagcttttgattacgccaaacttgttttcacaaagtgtgcgatcgtgtttattgagagatatattaatcaaaaggtgattagcagaactaaagctcaaaaagtaattaaattattggtgtttttttgagaaaatgttgataataaaattaatgcaaattaaattggtaaaaaaaattcaatgtcaaaagtaataaggtttcaataatctttttagctcatttatttagatgtagattcacacatataacacaatttatttggaagatgagtaataaaagttctatcttaaaaacataaaaaatcatcttatgaaaaatctgagaattacaaaagtaatcataaaattaatatattaatatatttatactaattatattcacataaaaattgtataattatttttatataatattaaatagacaaaaacataaataaattttgcctcacatataagattatctcttactagaacatcagcctagaaaattatctcacaataatctaaaggaaaatataagaagaaatagacaatgtgattaattagggttttacatcccaatatgttggggaggtcccctttaaatagtgtcttgaagccacaattgaaacataaaatcatataaaaaatgtggaaactgatatattgcttgaatagccatgatcatgcacttgtgtagtcaacacactgccatttttcttttatgagagaattaggattgagatacagagaaagaatgagaaaaaaatatttcttattattgagctgatctgaaaaagaagcctttatataggcaaatgtacaatgtgacatgtgctacaattatacaacttggcaagaggataacagaatgtaactaactccaagaaacagttggagtgaccaaataacagccatagcaacttctaatagccccccttaaagtggagtgtagatgttaagtacacccattttggaaacaatgtttgagaaggggtttggaagtaagggcttggtgaagatatcagccaagttttgttgagaagtgacatggagaagctgaagagagccttgctgaattttttctcgaatgaagtggcagtctatttcaacgtgcttggtgcgttcgtgatacacggggttttcgttgatatgaattgcagtcgtgttgtcgcaatagagattggcaggttgtttgtgtgagacgccaaaatcgttgagaagagcaagaatccatgtcaattctgaagtagcattagccattgcgtggtattcagcttcagccgaggaacgggagaccacttgttgttttttggatttccaagagacgagggacttcccaaggaagatgcagtagccagaaatggaacgacgggtgtcttgacagctgccccaatcggcatcagcaaagaaagaaacttggacattgtcacaagagaggcttgtttcagtatatgcttgcagatggggtgctgtatcagatgggaaaaacagtccttgacctggtgtttgtttgagatattgtaatattctgttggtggcctgcatgtgaggaagccgtggacaagagaggaattgactgaggtggtttacggcgtatgtaatgtccgacctagtaattgttaggtagataagtttttctatcaaactcctataaaccgagggatctgggaggattcgccctttgtccttgctcaatttgaaatttatttccatgggtgtggaagccggtttagctcctaaataacccgtgtctttaaggagttgtaaggtaaatggtctttgagaaacggagatacctttggaagttctaccaacttcaaggccaaggaagaatcgaagtttgcctaaatctttgagtttaaacttggtatcaagtttttgagtaaattgagttatggcaagtgtgctgttgctagctataatcatgtcatcgacatagattaagataacaatgaatatagaattcgttttcttgataaacaatgaattgtctgataaggattgtttgaagccatcttcgattaatgtggaacttagttttgcgtaccattgtcgagatgcttgtttgaggccatagatgctcttgttcagtttacaaattgtattgggaggagcattgtaaccaggaggtattttcatgtagacctcttcatggaggtcaccatgaagaaaagcattattgatatcgacttggtgaatgtcccatttattgatggctgcaagagccaaaaaaactttgagagtgttgaacttggcaaccggtgcataagtttgggagaaatcaataccaggtttttgactataacctttggcgacaagtcgtgctttgaaccttatgatttcaccagcttcattatatttgtgtttatacacccatttgcaaccaattggtttgtgcccagaagggagtttagtgatgatccaagtattgtttttttttctaatgcttgagtttcattgtccattgcttcaagccaatgtttgaattaggaagcctcattataattttgaggctcggtttgtgtgtaggctgcaaggacagcagcccgaaatgttgggtgaagcttaatgtaagacaagaattggtcaataggatatttagtagaagccacacgacaaacatagtttttcaaataagatggtttgacaataggtctaccttttgtggaggtttgtatggcagtagatgaagtaggaccgggtttggttgttgtgagttcaacaaccgtgtgctgatcctaggagatttgagctgctggtgtgggtgttgttggttcaacaacagtgtgctgatcctgggattgtgctactgatgaagtaggagaagtagtttggagggagggtggatctggggcatgatcgagtgttgcaggagcaacagattgctgtagtgagtttattatattggttttgggggctgttgctggtacaacaagttgttggcagggaaaaaattgcttgagaaaaaatatggtcaatctcagttaatggtatggtagagagtaatgggaatatattttcatgaaatgtaacatctctagatgtgtatatttgatgagattcaatatcaagtagaagataggctttcatgccagttggatagccaataaaaatagaggcacgactcctaggtgaaaatttgtggcgtttagaacttaaggttgaaccataagctagacatccgaatgatctaaggtgatcataaataggtggtttttgatataatgtttcaaaggatgtactgtgatgaagtaacacggaaggtgtacggttcattaagtaagtagtcgtggcaattaggtaaggccaataaaccaatggaaggtgagattggaattctaatgcacgagcaacatttagaatatgctggtgttttcgctcaagaacggagttttgttgaggtctctcaatacatgagtgataatgtatgacacctttggaagcataaaaagaggaaagatttaattctttggcattatccgaacggacagccttgatattgagaccaaattgagtggaaatcatggaaaaaaatctggaatgattttgtttacttcagatttcatttttagcatatatgtccatgtgtatcgggatttatcatcaacaatagtcaagaagtatttataaccttcagtactaatgattggaaagggaccccaaatgtccatacggactaaatcaaatatttgagaagcaaaattgttattggatacaaaaggaagtttcttttgttttgcaatatgacaaacatgacaatgagtattgtg

SEQ ID NO: 242652 - DNA, 565 bp, Cannabis indica
attaataaaatatatgtaaaaatataatatttaaatgatatagagaaactaatgtatggtgtaatgtagatgtgtgaggtaaaattagtagtattcaatattcatagaccaaaccaaactgtacacacagtttgaacaatttcttaaactgcaacaacgtaaacatgaattacacaaatcattttttgcattttttactcatgatctatatagtgtgatatgcaccatatagcaagcattttgaagaaaaattcatgggtaaatggctcgtgactattttgtgaatttttaacaaaataattcctcaattttttcctttcaatattatacaaattcataatactcctagcaattgtaattcatggaggagacacaatcttagagcaagttgttaactctataacatagagttattttttaatattaatcttttagatgtgtgttaatttagagtgtttttaggttaattttcttatgttttttatttgtttagttcattttgtttgattttagtaataagtttgttattttggtgtttttttgaaaatttttactagaaaaataa

SEQ ID NO: 242653 - DNA, 629 bp, Cannabis indica
ataacttttgacaattattttggtgtaatcaacaaagtaaatataaaaaaaaacgtaaaacatagaagtaacacattttgagaaaaataaaataaaaatagtattttaaattatataaaatgcgcgcgaagcgcgcggatacattatctagtatatgtatatattaaaaagttgcatatcaaataatgaaataatacgtcaaaaaaattaatgaaataattaaagcttaatcacaagctattttgggatccaatcttaaagttaagtcgtcttaaccaaattgagtgcaacaccatgtgaatcacatcaaacggttgagccggtctatttaacacaaaatgtttctttacttgagaaaccttattatataatctcaagtacttctcatttggaatgccatttaaaatgttcttgatttcaggtattttagagatcgggatttgtacagtaaattgactccaatcaagtacatcactaaatggtaatgagtaactatccgagataataactgggacacaccctgcattgattgcctcgactactcttgggctagctacttcgtacccactcgggcataagcaatactttgccttgcccattagctcggtgtagtttagctcttttggtac

SEQ ID NO: 242654 - DNA, 620 bp, Cannabis indica
gcaccatggggaggaggcttccaatatcgtcactcaacaatcgacaagatgcttcttcgaatgctgtaaatactactgtcgtcgagggatcagatactgcaactgttgttgatttcacaaaggatgaagttcaggccttgctatatgagaagttcaaatcaaccaaagtttgatatcaaggtttgtttaaattaatattccttaaaatcttcttcatatatgattgattttctgtttgaaatatattgttttgatttggttattttcttgtgtaggtagggattaatgccatatttgggtttgacaagcatctgagttctcacctcagtgtttgaacatcttattactcaagtaagtacaacaacataataatatttgttaactcatgtcatgcacatcatatgtgtttttatccattttgatattgttctttctctatgaatgttgtctctgaggttttggacttaagttttgtattataactaattgctagtttggtctgatttggttttgaacttaacatggagtactctgcattttgcagcctgcagcaatgcgaaagagaaaagcttcacaagagcctgggcaaccatcaccagaggctgctcgggacgacccta

SEQ ID NO: 242655 - DNA, 1482 bp, Cannabis indica
aatttttagaagtacaattaagaaaagactttccttttaggtattttgcctccaagatctgataacaaagggattgatcgtgagtcaaaaggttccaccccattttgctaggaaggcgagattcatttctctagttttacggaatccaagaccccctaaggacttcgagaggcaaagcttatcccaagcttttagatgtagaccatggttacccctttcggacccaccaaaaatcacgaaccattccatcaatcttagcaacaagtcgacttgagagtttggttgtttgcatagcatacataggtagggataagcccacagatttaatgagggtagcacggccggctttagatattgtcttagctttccaaccatgaagcttagacgtgaggtttttgataatgaaattgaagtcagcatccttttgtttggaccaaaagataggtcccaaggtatttaatgttgccatatggggatccaatacccagatgagacttgattcctcttttcatgccattgggagtgtttttgctaaagaaatcgaagttttgagtttgttgacttgttggcccgaccaatcgcaaaacttctcaatgcactgccaatagcctttaacttcttcccagttcgcttttccaaccaaaattaaatcatccgcaaaaaaaaaatgtgagaaattatggggcctcctctactgagtctgatacccttgatatttcccttacattgggcgtctaccaaaagtcttaacaaaatttacgcagcccagatgaataaggagataaggggtcgccctaacgcaagtcgcacgagggcgtaatcttaccaaattgacctccatttaggcaaatattgagagtagtagtgatacactaagatatccaccctctaaacttttgcggcaccccaaaaccatcaagcacatgctcaataaatttctaactcagtttgtcataaattttcacaaggtcaattttaatagcaaaacaaccctcttttcctttcttcctgttgaaggagtggataatttcttgaataatcacattgttatcctgaatattcctccccggaacaaaagcagcttgggtaggataaattagagaaaacaacaaaggcttaattctattagtaatgattttagagataaccttgcattaacacctttatgcataatacccaatgtatacacacgcttaatgacaattccagaagagagatagagaccgtgcaagtctactcagctattagctccatttttaattaatcgaaaaaaaataaataaaaagaaaacaattagctccatttttttaaaatataaatatacatcagtgagaatgtttataaatgaatcaccagggggacctcatttctctttctttttaggaaaaatgaaaatccccatttatatattttattgatcaacacatgctttgcttacaaaaagaatgcaatcatgccattttgtttttttctttttttttt

SEQ ID NO: 242656 - DNA, 1150 bp, Cannabis indica
aaaaatacattaataatattaaaacgaagttatgtctttaggttttttcattttttttaaaaacaaacaaccaaaaagaccttccttttccctagccaaaaatacatacaatgttttacaaattgtaaggaattcaaaataataataataatcgtgactgtgtagtgttattatacttatattgtctaaattattactttttgaaaaaaaaaaatgaaaaatgaaagaagaagaaattaaaaaaaataaaaataaagttagagcatatatttgttttatatttttaccttaatacatttaatagaaaattcctttcttgcatataatataattccttgcaaaagtcggtaaaaagaaaaataattctttgcataagaatttagaaatgtgttgggaaaaaaatattatttgcttgtaatagtgacaaagcataaagagtgaagaaaaaaaccatcataaatcagttggttgtaatctttagactaattagaatttttgtcccataaattttaacatatactaaatcgtacatgttaacttttaggttgttaaatgtttttttctaaactattaagaattgctagattcaagatgtcacgactcaagctctaagccgtgacaaatatgtaatgtctataactctggtggtcaaagatcacactttgactcttttagaaagataatacttataaatgatcctttaatttatattataaaatacctattttaaaaataatagattaactcctgtatctatatgaaaatattagtaacaaaatcaggatcacccattaatataaaagagcaataattaatattcccacagtcatatagttactaaatagatagatttagaatatccagcatccatcatttctcatttctaactagtacatagctaatttaagttatccagaatattcattcaagcttaactaaagaatcacttttcagtggaaagtttgataaatagacaaagactaaactaataacgactttaattcttcttcaacggtactatcctcatccactagcatcaaactaagttcctagaatgggagaaaaataaggggtgagtttataaagcccagtcgaaaataactaatatcaaagaactcttggtttattaaaaatacctgcatggttagct

SEQ ID NO: 242657 - DNA, 571 bp, Cannabis indica
ggctagagatctgaacggaatgagtcattatattccgctgcacccaatataaggttttctaaactttatttgtgtttatttcattgttttagaatttatattaggatgttaataaaacatacatggtagtaaatctagatcctagtaaaatatttcctacatatcttcggtacggtactcacttaatgtcaatgggaatgggaaacattatcccttctcaaggtctttgtcaaggtgatctttctttctccctttttgtttcttatttccactgaaggactttcagctaatataaaaaataattaatttgggtaggcttcatgggttgccttatgggagatggggcctgatagtttctcacttgttatttgctgatgatagtttcttcttcctcgaagcttctagtgctagattcagagaaattatgggttggtatgaacgtgcttcaaggcagttggtcaatctttccaagtcttctgtttgcttttctttgggtgtctctcgaggtatggaaaatgacttggcagctttgctaggggtttatcatgttccttatcatggaaagtatttg

SEQ ID NO: 242658 - DNA, 2088 bp, Cannabis indica
ataagaatctaagtaaacaaatgcaaaagaatcacttaattaattagtcttctgggtttggcaaattaaggtagctgaccttattttttattttttttttccttacattttttttttaaaaaaataaataataaataaataaagagttttttttttcttttatggaaaaactaaaattaggtcctacagaaaaatagtacacatcatatatcaatattattatagcagtcaaatatatatatatatatatatatatatgtgtatttattattatgccaataaagccatacagattatctgtcacaataaataaataaataaataataaagccacacatacatatgtatagcaattattatgaaatatgaatattgtacatctcttatcttatttgtggggggattgtaaaatattcaatctggtccaattagtttaatttaagatgtaatccacaatgtgtcgatattcatatttttgttaggtttgggaaaacacatcactatacccattatttgtgtggatgtgatattgattcactttcaaaaaatacttgatctaaattaatcgacatttattaaaaaattaatatatataataaatattgaaaaatattgaaaaatattagaaaactgatatacaatatttatatatatataaactatatatgtatgtaaaacaatactcgttttggttgctagggtttttttctaactcattatcttcctccaattgaactagggctagccgacctcctttggccttgggtgtggctctagttggattttgatttgggtgtcatagtcattttaatagagctcttcctctctggtgtctcttgggtgtggggtggagtcatttagtgttgtaggtgtggcggttgctctgacggtcgtctagaaatcgtgttcctctggttgttgagccatggttcgagatatgggggtgcctagccgtgagatggggtttatttcttgacccgtcaggctagttcgaatcccttggagtttatttcttggccccatcgtgctttttcgaatatatgccctaatatccaaggcacattatattttttctaatcattgtgctaacttttgctaattcaagaattaaataaacatgtaattaaataaaaatttgtaataattaaatttttattaaaataaactgtgtataaacatttacaaactaggatcccagtttctaattaaaaaaatacatattttctataatattctgaaagtgtcgtctaacaacaaaatacaaattacgctaactgatctcccattaatctcaactttctaggtctaggcgattaaatatgtacaatcttcattagagccttcaaaccaaccctgatcagattcgctttcatataacctagacatagtgaagtcactgtgagtcaacagactcaataagaaaatcatacatgatacaatcatatatctaatcacttgtaactgagtgtcctacactcagttaccataagtttaccacttgcatctaacacataaattgagatccaaatattcatacttatagtatgattaactataataccaacctaatccgagtacgctagtcgtactaatgttggtagcattaattcatactattcaatactacttaacatactagatatgagtatcttggtacaactttatgtacacacatattgttatctctaatatgttagctacatggcaatatcatgcataacttacacacatgtatatgtgcatctaattacttttcttacttcgagtcctgattcaagtgtaccagttaacctaagtggaactttgctcgacgattggaggccctaagtcacattagtagtaaactggtaagtgtctcgctaaaatactttctaagactaaaatacataattttaagtttccccatcgataaatagagtgacaatatcttaaatattttataaacacaaaaatcgaggtacccccggaactactcaacggggacaatggaattataattaggtacccagtattacaagacctactagaacaacttggtacccaattgctacagcacagagagagagagagagagaggagagagagaga

SEQ ID NO: 242659 - DNA, 1016 bp, Cannabis indica
tgttctatgttatatacaaatagatcttgggttaattgttaatttatctaacacctactgcatcaatctcaaattatgtcggtatttagaaatgttccaccaaattttttcgctatggtcagttcaaaatgtttttatttttttttttctcgtaaagaactaagagaagttcattgcaataaaaagttgggaatcacaataggggatccctcccttaaaatgtagccattacactgattattttctctagcccattttgctaaagcatcacaagctaaattgtcttgacgatgatttgtatcaattttcatattcatctatattagcttaaagtttgattaatgagaagattaatttattgtaaatgagttggtgcattttttttttttgcaagatgttttagattttactaccttcgttttagataatggaagttttccatttgattaaaatagtatttgatgattttttttttttttgtaaatatcaacttaattaaacttaacattccgagtacaaaatagcactaaattcatcaagaatattatgctcgaaaatgctacaatcaaagtagtatcgagaatttctaacaacaaaatgaacagtttgatttgttgagtcttacaaaaaataaacctaacattattcatggaagaaagtaaaatgcgacaatcatgaataattaaaccaaaagaggaactcatcacttgatcacagtgaatagcttgaattgagagtaagccatctgattcaatcacaactagttgccaatgattacttttaacccagctaagtgcctccttgatgcccattgcctccactatctcagtcgcataacagcccccttgaacatgtgtcgagcctcaaccaaggagctgttggaattattttactaggatctagatttactaccaagtatgtttcattaacatgctaatatgaatttctaaaacaatgaaataagtacatataaagtttaagaaaccttacagtgggtgcagcagaattaaatgact

SEQ ID NO: 242660 - DNA, 896 bp, Cannabis indica
gtaatactcctcgtcaagatgagatgtagaaaccttacccactaatagaaaccttcgaggaacatggtggaaaacttggattgtcgatgcaaagcaaaaatcccgagcgttggaggaatatggggcgtcgacctcaatgggaagtgaagagctatctttagttgccttttttcaagagagagaatgagaagggtggaatgagaagtgagttgcaccaataagcttaaatagcttctagtggatccctctctcacatgcaaaaaataagaaatattttcaaatttctgctaagggatgtggtcaaacaagtaagaacaaatatttcaacgactactaaatatactgcaaggtctgcccagttaaggctccatcaattcaaactaagctagaaagtccctatccgtacagacgtccgcacagggacttaaggggccaatattatccctatatttaccctcatcacgtggcatgttcacgtgggcaagatcattgccacgtggtgtacaacttgttaataaaaaggccaagtcatctacacaacacatcaattgacgagaagcccgagtgcttaggcaggacgaagtgacgatgaattggccaccttgaggggtctggccggtacccccctagtcggccttatggccagccaacctcaagcaaatgaagggtcgaccagcttatatcttggcaggcacttagcttgccaactttcacctggtagacacttggtgtgcaaccttcatccgagacaacaagctaagctgggatttgggctttaataacccatgaaaataagggagaaatatcagctacttaccaattcttaggggataattaacctatttattatttactatttattatttaattgtataataaatactttatagttccta

SEQ ID NO: 242661 - DNA, 2058 bp, Cannabis indica
ctcggcatgattgtacatatcgcggcagtgcaacccggagggtttcgatcttatattattttgagtctgtattttggaaatgcatgtccgctaaactttttaaaaaaaaatgtatatgtacatattagtaaaatattttaaactaatattttgatactcgggatcccgatccttataattattaaatatataaattttggaaattcagacttcgtgtattgttattatttttataaaatacgggcgttacaggacaaatgactccacttatgcccccctttcctcaaccgctgtacgcaatggcggacccatatagaagcagggcaggacagtcacccaaaaaaatggaaaaaatatatatttagttagttatgacatatataggcacaatattatttttgatgtaatgatttaactaaatagcatatatgatagaagacagaagttttaaattttaattcactaagagtatttttttaaaaatttacttttgttcttgcctaactaaaaaaagtaagtgtgggtagtttaataaacaatactaattactagatatggttaaaatttagtaataagttgtgttaatctgttttcgactaacgtctaatttttcggactctaacccgtaaaattcatattatatattatatttgtatttgtgtatggtatcaaatttgtcacccctaatatatatggttaaaatttagtgagaaatcgttagagttgatgcccagtcaccctttttattaactttgatgtggtatatggtcaaaaaataatagtttaaataatcaaataaataaataaataaataaataaataaaagtgaaggagaaaacgtagttgacccgcgaaaaagagtaataacaatttgacaatcaacctacgcgttaatttaattttattattaataataatttactaaataataataggagagtttacagtgtttcaatagacttgtttcgtcataccaaaaagtattttaattaattttttttatgttataatgatttaagattattttaaattttaaaaaaaaatcgaataatttataatataataatttataatattcaaaataaaatttacatatattgttacatgtcttagtattttttctaatttttaattaagtcggttgtaattaaatatttgtaattcgatatttatattgagttggtaaaaatatgttataattcgaccaaaccgcttgcaaattatttagaattttcttaaaaatttacaaattgtcttaaataattacaatatacacaatcataaaaaataattatactaaaaataattcatagatatcaaaatagataaagaatttaccagaatgaccctttaaaatagtctactacgtaaatttctaataaataatacataaccttattattattagagtaatttacgacataaatacttaagtttaattttcgattgtaaataaatacttaagtataatttttaacagtaataatacttaagttatatttttggaacagtcatcaagtgtaagttaatgatcacgtgtgagtctctaaatggttcaggtcaatggtcattctattataatttgttatttaaaaattaatttaaatataccaataaaaagtgacatgtggataataattcaacatttaacgaccagttacttacgaaagttctagaaatataatttaagtattattaccgtaaaaaactaattaccgtaaaaaactaaacttatatatttggtatataacaaaaaattaaacttatatatttacgccgcaaattactcttattattattatcataacgtattgaattatatatcatgaggtatttacaataaatcaatttaaattgtaaactaaatatgacctaataattaaccatgatggcaatttattcacagtagtatttaagaaaatgcttcctttttttttttcttttccattattttttttaaaaaaaaaactataaacttatttatttattttttataagtgtggtcgtagtaaaattttagagatttttttatttttatattttaaaatatattttttt

SEQ ID NO: 242662 - DNA, 451 bp, Cannabis indica
gtgatcttgcataatcacatatgagctcggcaatggcccagggggagtcactcggcatgcccgagggaaagcactcaacatgctccatggaaactcactcggccttttcatgaggaaggccactcagtaatagcatgaggaaggtcagtcggacatagcttgaggaaggtcgctcgaccatggcatgaggaaggccactcgaccatggcctgaggaatgtcactcggccatggcatgagtcacttgaccttggcatgaggaaggccacttgaccatagcatgaggaaggtcactcggccatagcttgaggaatgtcacttgaccattgcatggggaaggccactcagccatggcttgaggaatatcactcggccatgcatgaggaaagtcactcggccatgcaccaagcttgcaagtcactcaccatgcacctgttgggttttgtgcccta

SEQ ID NO: 242663 - DNA, 1963 bp, Cannabis indica
tttgtaggtagtggaatatggttgattatgtggacacatagccactagagaaatattgtaatgatagtgaaagtaataggcaatgatatacatactataattacttattactagattaatcaatgtatatcgataaaaataaatgaataaaaatcatcaaagtcaagaacagtagagacttcaacatcgatctttccattattttctcaacaatttccactaggaaaccgcgaagtatcatccaaaagaagagaagagaaagtctatatatatacataactactcatgcatataatagtattaaaagatataggaaaattaagttaaagtaatttaatggattcttatttactttattatatatatatcatggggttcggtttgaatttttcaccatatggctaattaattaaacaagtcaactactaatatatatttttttttctgctacataatgcaggcatggtcaataaaaaaacttcattgctcatatcaattatatttagagaattctaaaaaaaaactaattggttctctagcacttttcttaatgttatattgctattgatgtaattaactatctgatcttatataattttaaaaaaataaattttaagaaatatcgctaaccaattatgaaactctacctataaaaagtgatgggcagtaggcactacgtactggtgcctaatatagcaattctcttatatttatgagcattgatcagtagtgtttagcatcttctataaatgacgctttataattaattagtgatattttttaaaaaactaatttttaaattatatgaaacctcatatttaattatactaatagtgtcacatccaaaaattactaaacacaaatgttaccatttctataacaacttttagaatgtttccatcgaaaaattaattaatgacactcgccaattataatttatacacactaagaagtacatatccatgataaatatttagctatatatagcttcatatttatatattactgattataactaacttctcatcaaaagaaacctctctaggctcattttgtagcaataatatttattatatatttgtccaaaacttttatatattataatgtactctgcaccacaagtactggctgttgattcaaagatctatggaggtgatgatcatcaaggttgtggaaatccaacagctacatcaattgcagcttcaggatttccgagcccatgtttacccgccatgcagtttccgatcacgcccgccaccgcggatgatcggacaggatggactacacgtctgtcctattgttttgatgatcctgcaaattgtaagctataactatttaagcccttatctatttttgcaacttgaagaaattaattataacttaatttttttcttttatatacatgtgttatatataaattatatttataatataatatgcatttcattcatttttaatttttttttttaaataaatatcaaaattcaaatttaaatacaaatataatatatatactaaccttttttcaacacaaaatttatcatttgatcctattaatataatattgtgattatgtatatgattaataattggggttttttcaataatatacctaaaattgattttatttataaaaatacctttaagaaaattatttgcacaaataccgtcgtgccacgtcagcatgcataccgaaattcaaaacaattaccgaaaatagaaaaaactggaaaaatctcatttctagaaattttcgcttttggggagatttgaaaaaagcaaccatttagttgcttttgatgttaataagatatcaattggtttctttttcattaaaaaaattatttcagaaatttacacataaattaataataaaataatatttttaatatgtgagaaacatatatttttctttctccaaaaaatgaagactattattaaaagaaacttttatgtttctttt

SEQ ID NO: 242664 - DNA, 703 bp, Cannabis indica
tttctcacaacccaaatgaattcctgccctgaaccctctaaagccattgcgatctccatgagctgtttgtcttcaaactttatcatactcccaaaacatacgtaaataacagaattgggtctcttggaatcaagccactttaaccaaacttgtttgtcaatcgagcattccattcctcttttttcttcaggattcattcctttactgtttaagaacaggggaccaatgtgccatgacttgatccctaaaacgttggtataatgatctgcataagcaggttctagctcatagaagctattaacaagaaccccattgcacctcatttcatcttcatggatatccttaaagagctttatgtattggggttccacatcttctttataaaaatcagctaccttgcttgctgtgaattctatcttatctggaaaattgggaataatgaatgtttcgtattcagaggatactttcttatgaggctcataccgtatcatacaaacagaagcacaaagagaaaaataacaagtcccatgaaacataaaccttggaataccaaactttacagcaacatcagtagcccaaggaaagaacatatcggctattagcccatctgggcggtgtcgttttataagttcttcgatttgtggcccaagcatcggaagagcttgaaaaatttttgaaagcatctcagttgttgtagccatgt

SEQ ID NO: 242665 - DNA, 834 bp, Cannabis indica
ataattataggtcaaaataatagaaaagcccccagtaaattagataaatttagtaagagtgattataatgtagctataaatatatttttatgataaataggcccccacaaagtaaaaatcctgggtccgtcactggttgcttataaataaggttattttattattgtaaaaggatttgatttttagttcataagtaaaaatattattaaaacataaaaaaactttcgttgttgtaatcaaattcaacactatgaatagtttaaagattatttttaacgggttgaaaagttcaagggacacaataatacaaaaatcataaatagctttttcatatagaattttattacaccaaatatagtatttattcaaccacacgggactaaggaagacatgaatgatattattatgattatgattattattattatttgagtcttattaagtcaagagttggtttgaggaaggcttgagagctttgttgaaatttaaggtactccttaattgaaatgggtggatatgctggtttttgggcatgtgcttttaacaattcttctattggttcaatctttgtatccatagatgccccatgtaccgacacaattgatatccttctgcttttcttattcaccactactctatgcttcacactcttgtacatctcattgcttaaaatctgccacgtcatcaatttatattattaaagctaattaaaacttttgtctctaaactttgatacgtactaaattatgcctctgaacttttaaggtcggtaaaaatactcttgaactattgagattgttggatttaagaactttttttaattttagtaaaaaa

SEQ ID NO: 242666 - DNA, 2577 bp, Cannabis indica
atagtaaataaagtctcagctcctcatcaaaatacacatccaattgagatcttattgatttgaaacttacgatcacaatcccaaatggggaaatagatttgaaatcttccacacaccaaaacaagaatatcgaattatattagtacaccaaacaaaaaaaaaaactagaaaaacaattaagctaatcaaatattataattaaatataatgaattacacatttagagcaacccaaacagctctaattaattaattaattaatatgacataaacgagttacattaatactaatttagccaaagagttatagtcaaacacataactccaagcttaaaaaagaaaagcaagatccaaattaacagtgcttatcttatcaattaaggcagttgtttaaatcatcatcccagcatagctagaccccaattggcaaacaaattaaaaatgcataattcacactttctaaagatcttgttagcacccatattaattaattataattatacatataataacacagtcatcaattcgtaaacgacaacacttgcggctgctagtggatcggcgttcagaaaaacggcgtcgtattgatacagtcatcaattccgtaaacgacaatacttgcggtgctccatggccgcgcggcgttgagaaaaacgacgtcgtattgataattctttgtcgtttaagctagcctattcctctggctctggcctgagactgcctcaccatagtgacgtaatccccgacggcgattgcaccaaacggattgatcccggcgttaccatttctttcactaaaagctgcacggagccttcccacgacgccgtcgaggttgccccaaaattcctgattcgggcaggggcaggtctccggtggatgaagctgcccgtagaattgacatgtgtcatcatgaattttggtctcgccgaactgatcgaggtaacggaggaatttcagcacgtgggatacacggcattgggagatcgtgatcggtggatcgttatggttcctcaagtactgcccgaaattatcccagtccctttctttcagcaaatcgtattggagtctccggcgtcgctgttggtggtggtagttgctttgtgaaacgaagctatttgagctactatatgcggtggtgcttttagtgttgcttcggctactgttactgtttgagctacgattccggcttactacggcggcggcagcggctgctacggcggcagacatggctgatttggcaagtgaaagagaggaaaagaaagagagaagaagaaaagaagaagaagatgagagctaggtgtcgagctgtgaagagatattaaagcaaaatggaggagagagacaaaggagggacccatgtaagaaaaagccaggtctcaaacgtcacgtcttctttatatcatcattaatctctttatttattttttaatattatagaaaagacaatgacctaaattcgccacttattatttaataattataattattagtggttgtgataaaaaagaaaaaaacactagttaaatccattaaattattggtgaatgtgattgattatgatgagcaacgaatgggatatatctatgttattttgttttgatatgtagaatagacaaactgtaaaaatatatttaatatgtgtgtgtgatatcgaactgtaaaagaaaacctaacctaaaattagtggatctcagcttggatgagcttgcaaatagggaaagcttttacgcgtagaaatctcaacatttttgttttcgtagtagacaagaaaatgaactaaaaagcacgacacaggtttggaagttttgacaaaggacggaaggtacacacacaacatatattgaataataaacaaattaatatataaaaaattacaactatctttaattgtttatttctttttatgagtctttatttcaacatttttataagtctttgatttttattatgtcttcaaaacatttaataatcacaatgtctttacaaaataaattagtattcacttgtgtttttaaagagattgccccatgtaacttcaatacatgctccgactaccactcctgaagagtactggagtttccctttttcccaagatatatatagcactctatttatagaatgagtcgatttttgttttagaaatttaattacataaataacttagaatataaattaacaaaaggtttagattataattaattaattaaaagtttttaaataatataaactttatttattaaataattatgttttattgttagcctttttgttattaattacatataaagttttttccaaaaagtttatattataattaaactagtaaacaaccgatatataaaatattttaaattatataaaaaataaagtaaattttacaactaaaataataaaactacctaatttattacatatataccacaacacggttaaagtaactattttacatttacttctttactttattacactatactaccacatgcacacgttaccccaatgcatcagacatgtgcaacctcccctatcactcatcaatcaacaattaatcactttcctttctttctttttttttctt

SEQ ID NO: 242667 - DNA, 1160 bp, Cannabis indica
tagtaattaaaaaaatattattatttgtcctaaatttgtcttcagaattaattaaaatgcttatgtggttaaaataatatttaaaattcgactaattctaaatatcaaaatttgaaaataatttttaaaaaaaaaaataaacaatatgaacaaatttattattaattgcaacactttaggtgtactaattaaatttaggtttaactaactgctgatcctttacgtgccaacatctagtaatttactatttttttatttaaaaaaagtcacccaataatttttcataaaccaaaaattctgttatataaccatattttatatagaataaatatatatactaacaaatgaagatagtaaaaataacttggtttttttattttttaaatttggataatacacgtgacaactgacaagagatgtgttgctttttgtttttttaattaacatgtagaatataatataaaaccattttataatttagtacgtatttcttaagcgaaaaaatttagtacgcatttggcgtgacctaataacattatgaactttaagtataggatatagttaccattcattaaagtatgtatgtatatatatatattatattatatttttatacacatatcttcaagggtgggatatggagagctttcctcttttatatatataaagcatacatatattttgacaagacaagctttgtttagggtgtaacgtacgatcaatcatatttatatatgtcatgagatctttataattaagttttaggatggacatacctttttttacgtataaaaagacgggtgtaaatacatgagggtggtactaggttgattcatattttttaggctttttaagagggattgtttcacaaaaatataaaaataacaaaaaactacaaaataccgtttcacagaattttaaatatttttacgatttttttaattttatttactaaaaatacagtttttttttaatgttgtaatcttgttaatttgttgtgattttttgttatctgtcggttattttttgttgttattttcaagttacttttatgtagttttcttgttgattttaggttattttcgtgttattttttggaaaaccgtataaatgtaaaaaaacattctttgaacgtaaaaatgtaaatattttataaaaaa

SEQ ID NO: 242668 - DNA, 542 bp, Cannabis indica
gccaccacaggccacacaggcaggcacagctatgcttcgtagaatggtatcgataccgcttttgttttcatttgattgattttgtgctaattccaatagtgacccaacgttatcatcatcaaaaaaaaaaaaaaaaattatatcatttttattttttattttaatttttacattcattttattatttttaatttatacctaattttattatctacattagaaactctaattttaatatgttatgtgaggttatattttatactttgattataaaaaaaggtatttattaattaaaattattttaaagttatatttagttaatatgtaataaaaaaaaatcaacttatcccaaaaaaaaaaaaatagaaaatacaagtttcggacttcaagtttcgagttcaatttcacatgtggaaaaactttgagaattttacaaaaatattagattttagataaattttacatttatattgttatacgacaaaaattatatttatactgtctttgcctttcttttttctatacgagaatggctgaaaaca

SEQ ID NO: 242669 - DNA, 1459 bp, Cannabis indica
ggtaattgacgagttgaatgcaaatcttattgattctcagaaggccttattcatgtacaacacatttttctcacttttttgaagatggatagtattaaatggatgattgattgcctcgacttgctttagtgatggaggtgcatcaagagagagaggctattgagaagtggtttttcattcgtgattgagctgtacattttggattggacgagttcgtttggataactgggttaagttcggaagggtgttctgatttgaatgaatttaagcagaagatgtcattcaagaagaagatgtttgctcacttaattattaaggttgaacaagaagaggtaaggggtaaaattttgagtggtgattttgaagggtgtggtttatcttttaagtcattatttatatggctatgagaatggaaagaaactggataatgagttgttttgttttgttgatggggagctgtctgatttgaaaaacattacttttagaaaactattgtgggataggacttttcattatattaacttggcgtttagggatggtgacaatatcttctataagattgagaagaaaaaagatgaaaaagataagtgttattcttttaaattctaaggttatctgtttgcttttcttatttggttgtttgagattctgcctatccttagtcgtaagtattgcaagaggattgctaatacatatcctcgagtgctgaattgggagagtacaaacaagaagaaaaccgaaggttattctgaacttgtgttggaggtatttaataatcctgaggtacttttttattttaattggtttcctttttttccttattgatttataactagtttcttaactgtttttttttctattttgttaggaccattgtgaaggatttctatcctgttggtcgtgagcttaaaaaatatgcactgtaaaatcttaagtttgaaccaatttatttgccaaaaaaacctccaggttttggtggcaaggtaagttttctctgtgtttgtgtttgtgcttgtgctttttgttttattggttattttttgtttgtatggtttttagttggttttctataattttttaatgttgttattttttgtttgtttgtttgtttttagtttgctgaggtcgagtctgctttagtttgtattcaagaagactaaaagaagataatgtttagtattcaaagcttgagagatgagtttaggattaagtttgatgaagttactaatcttttaaagagtaagggtgggtcgtctgtgcccaatgatgtggatgatatagttgaggattcttgttctgagaatgtggatgtcgatggcagtgatggtaacttaccggatctattttttcgagtggtattttgcttctattttgttttgttcagtcttattacgtggttattttgcttctatttttgggtttttttgtttttttttttcctaattttttttagttgttt

SEQ ID NO: 242670 - DNA, 619 bp, Cannabis indica
gaagagactgccagtcgttataggcgattcctacaagaaatttccaagggcaagcgtcgtatcttacaagacgcggcctagccagaacccacgatattaaattctatttcactcgcaagaccaatgttttatacccaacgtcactgttgatttgaactagatgaccttgagtttgaaatcatgtctcctaacctcacaaatcaaagaccccttaggaccccaatgttaccttcaaggaatactgcaactacctcggggttgccccattccagctgaaccccatctcatacaggatcctcgcgagcctcaaggttctataacacattttaggctgggagtgccctaatcctctaaagattgcctgcttttactctgtcaaagtcgttcccacgagaaagaacattgcaggaggcttctattatcatagggcttacactggcgaccacaagctcatagttagactgcccaacaagacagattttaaagaagacttattctgggcgacaggtttatctctaataaacactactgcctttcgaatcatacataagtttctttccttgtgaaatcaactatattaaccttgtagttttcaaagttgcttactgaacttttatct

SEQ ID NO: 242671 - DNA, 949 bp, Cannabis indica
gtttgaagtagccaatcaaaaaattacaatactccttatattggaaatagttgatattaattactttttactttagaataatgattgagattttgtttgagtgtttggaaaaagtatatataattctcatataatttaataattattatgaaatatatacccttttgcaaggtctacctcatggtggttcctagtaattgcaaggtctacctcacgacatctaataatttcgaatacatccaagattgacttatcacaagggtagttactttgttaaagtttaaatcaatcgcaataaagtaaataaaaaaggattttgttttatatatatttattatatatatttatatatcatataatttatataattatttaaaaaatataaaattaaactaatatattttttttattatgattgatttaagctttaaattcaacttatatatttatttaattattataattaactaaaatattatatatatatttatatatcatataatttatataattatttaaaaaaaatataaaattgaaactaatatatatatatttttttattatgattgatttaagctttaaattcaacttatatatttatctaattattaaaattaactaaaacataacaattaaatgtaaaaaataaaaaaaaaaaaaaaaaaatattagtagtcgatttggacggattaactcgactaacttcattagatgagttattattttcttttttcttaattatgcgagttccacttaaatttttatagcgatctttacaatgaattgaataaaatatattataaacagaccaaattgatcaacgtacacccctaatcaaaattattgtaatagttaagaattcgaaaagttagttactatggtctcacatgctactattaaaataattaaattttattaaatactatataaaatataaaaataatactat

SEQ ID NO: 242672 - DNA, 536 bp, Cannabis indica
aatcacgtaatacgcctatgttagttagggtgttgcaatatgtttatgttagaacttttaatttatgtatgattttaataatatcaaaatctttttttcttttttaattgtggaataagggttataatctaaactaaactaacccaacccccaaaaaaaaaaaaatagattgggttataaaatatttaagatgtgaatttgttaaaaatctataggtagatgtcattgggttgagtcattaaaatactctcaacccggccaacccaactcatgcacagtcttaaaaaaagttgtataatgaggttgggtgtgcctaatcccatgtctcacagtgtgagtttctaatgtaattgagagttcgatttctggctgtactgttcttggatttatcctaaatcagttcaacgttttgttttctttgtggttctgctacaattttagttttgctttcattttaatctcaatttctggttttatgttcaacccaattaatcactgtacaatgacttggttttgttcttgagtgtgcttttttg

SEQ ID NO: 242673 - DNA, 603 bp, Cannabis indica
gatatatctatactttatttctctattatgttgtgtataatatatacttttgacaactttggttagcattttctcttttctttttaggaaattgtttcaagccatgctacaagcctacaaacacatcaaatcccttttgaccttcagattttaaagaggctcaaaatattgaaattcaaagggagaggtactatgttgtagtagttattgtatttaagtaggggtgttcatcaaaccgcctacagtacaaactgtccgcattgtataaaaatgtagtttgaaattttttgtggtacggttgtggtttgtatttttgtcaaatcgtgcaatgcagcgcaattttgaatttaataattgcagttcaaacagcacgcactatatattataaagttaccaattttacaatatgatttttattttatttttcatataaagataaatatatgtatatattaaattattttttaaacaaatttaactgtaaatattaattttaaaaatatcaaactatcgaattttgatctaataacgaataatgaaattacaaatttgaatttttatgcttaatttaattacttaattaaaaaaatatcaaaaaatatc

SEQ ID NO: 242674 - DNA, 4837 bp, Cannabis indica
gtgtgtagcaaaaatatcgcaaacaataagacacaccaaaaaacataaacaaactaacatatatagtacaacacaaactacaaatctacatcaggcataataacaaagtaccataaccataattctatattaaattgtaatttatactaaatatattatatttatatgcccataaaagttaatactacatatatttttatgtaaaaatataatataatataaaatacaattcaatataatatattatgtaccaaactaaccatagtaaaggcactctaagtttccacatataaaaaataaacatcttaagtgatcttcaactactacacaatatagttagtcaaaggaaatttcaatttagtgatatataaataatcacattcgattattcattttgtgttcctacttccctcttacacataataaaaaaaggtaattgttttgtttatatatgattaatgaaagttcttattcaaatcttaataaaaaaaaaaagaggaaattaataaaagtcaaaagacaaaaagtcaaaataagaagacatgacaacaaaacaatccataaagtttttgtgtcattaaaaataaatatggagagaaagagattgaaagaaggtattcaataaacgtattcctaagcttaatgcgcgaaaacaataagaaattagctcaaaaattgaagcccatgtctttgaaatcccacaatagaaaatgagagacccaaagtaattgttataattgcaatttagataagatgagcagttttttatttgaacgaaccaacagatgatgcagttttctctttctccaactgtggtggtgtttcatcgatgaattcggttggaggatggtgtggggatgatgagattcattcttcagctttggctttgaggatgtctgccatagattcaacgtccatttcaccctttcaaagaatgcctccctcagttcatcatcatctctttctctgctgcttctaatttcggcttcgattcaatcatatgagattccagcttctgtctcagatcacttctttctgcatttgaaatcaatacaaagtaaatgaatataagcagcaagacgaacgaataagcatatgaaccaaacaaacagtaccccaactatgatctaaatattttcattgtttttgatggcaataggagtcttctatatatggaaatatgaaatataagaacacctgtaacatttgaaacgtctttcccaaccatactggttagtggtttctttcattgtgtctttaaacctgttgaaactacatcaacaaaaaacttaaataatgataataaataacaaataaaaattgttcataatttgtcatctataaacaaaacgaaataataaaagtttaattttgtgatttacaagttaccatctattagtatggaatgatttttctttttttttttgcatcagaagctttgacattattctccatttcttcaatgtttcagtcaggtcatcaacagttagctttgtcttttcgagcccatcaagtgcttgtgatttagtagtagtttccggcattcttttgtagttccttcctgacactcattcacttttttctgcattgaaatcaatacaaaatttggatcgaataggccactacagacacttaatttccacaagtaattataatctaaagaatcaagatgaatgagcaaatcttatcaaccaataaatattcatccctgcaaagattaaaaaagtaaaaagagtagtgctgtacttaatactgattatttttcagtgaaagtacctctttagctttggctgccatggttatattcaattcaccagctgctgctaatttcagcttcgattcagtcatatgagattgccgcctctgctaagtagagaatgctctcaaatgacaactttctttctatggctatttaataaagaatactgaataatcaccaataatcactacaagagcaaacaccatctttgaatcgatgaaaccgattgttgtctctcactatgatctctctcccaacaatacctgagatgaacttaatggcactatggcagtctccacagatcctaagattttttgtgatccttataggtacaccgggaggaatagctatgaggccaaaggcgagcgcaatcttctcactatggtaccacacttctgacactttctcttcttcttctaaatcgaacagagcgaaattggtgtcaggaatgtagcctgcctccttcatctccttccttaactcggttagcattcgttgaatctcggagttcctttcatgggaggtgtccttagattggaagacatggattgcattcttaacagtgatccaactgtagcctgtccctttcttgatcccaacttctttcatctcttttctcacaagagtggcttcttcccaccttcattcataatttgtaaatggttaaccaactcaaatttgtcaaagaaataggaaaaaaaaacaaaacaaaacaagcaaaactaggtacctgccatcagcagcaaacatattagaaagcaccacatggttgccagagtcattcgggtcgagtttaaacagattatcagctgcaatcttgcctagttctgtcttcttgtacattttacaagctccaagaagagctccccaaactgaaattgtaggctgcattggcattttcttgataaaatcgtatgcacgctctaccaacccggcacgccccagcaagtccacgacacatgcataatgctcttcacctggttcgatcccgaatatagttgtcatcgactcaaatatctccatacccttttgtacagcacccgctctactgcaggcggatagtacacaaacaaacgtaacataattcggtctggtctcactactgcttgacatcatttccttaaacattgctaaagccatgttagcatgtccttggtgagcatgtgcacttatcatcgcattccaagtgattgagttcctttgaggcatttctttgaaaacatgttgagcatcaataacactcccacattttccatacatgtctacaagtgcactcccaacaaagacgtttccctcaacacaagccttaactgcaagagcatggactgatctgcctagttcaaaccctgaaagcccagcacaagcacttagaatagttgaaaccatgaaatcgttaagctcaattcctgctttcctagactgtagaaagatctcaagggccttttcctcctcatcattttgaacataaacagccatcatagagcaccaagatacatcatttccacgagtaattctatcaaaaaccattgttgaagacacaatgtcccgacacttcccataaaaatctatgagcccattcataactgagacatcttttccaaatccatatcttatcacaaatccatgtaactgtcgtccaagctccaaattcaatgtatccgaacaggcattgagaaatgcacagaaagtgatcgaattcggctccccaccaacacccagaaactccacaaacttgtgaatagtagttctaggccgcccaccaagaacagcatttgatatacaagcattccacattacaatatttctacgaggcatttcatcaaacacttgggttgcatcttcccaaaaacctgttttgcaatacatatcaaagcaaccacaaccaacaaagacatcacctatctgaccggccttcatcgcaagggcatggagctgttttccagtaacaggcaaacgaagagaagctgaggccttaaacacacaaggaaaggtaaagtcattgggttgaatgccctcacgacacatgttagtgtagtggagtagagcagaagcaaaatgagcattttggacagaaccggcaatgagggaggtccaggtgacgacagagcgtgttggggtgaatgagagaatgaggtgagctgagtttagaaggtcaagtttggcatacatgttgatgaggtggttggagagaaaggaagggagtggggcgtgaagggtcttgattatgtgggcatgggtggctcggccaagggtggaggagtgagtcgagagggctgattcgaggatggaggcgagggaggtggcattgaggaagggcattggagcaatagcagtaaaaatgaatcgaaggaaggaaggtgaagtgaatgaaaactcattattgtgtggtaatggtaatggtaatggtaatggtgaatattaggcagagtctttggaaattaatgatagcaatacccaaagagatgagtgaattgagatgaagtaagtgtggaggtgtgaagtttcccaggaattcgatgatgatcataataataaccacactcaactcaaggaccaaagtaacaccaataattccaacatatttgctttccaccattgaattcaggtgtgttcggtttacaattaattgtcatagtaataggaatagtaataaaatgtaatggttatagtaatatgaatgtttattttgtaatcaacattgtaattagaaatcaaagagaaaaggtaaaactgtctttttattatttagttatcattgtaatcctcatttatgaagtgtaagagtataatgagaatttataagattgggtgtaatgtctattagaatggaattccattacaaaggtcggaaacacaaaccaaatattgtaacggtgactttgattccattacaatcttgattccaattaaccaaacataacatgctcaatatttgaaattttaacaaagcaaatatgtcaaacagtgtgcttgggcttgggctgggcttacacatatatggtcatggggttcagttatgtggcccgtctgacagggatggtcggagaaggctggtattgtgcaccgtgagagagagtg

SEQ ID NO: 242675 - DNA, 1232 bp, Cannabis indica
acttattttaaaagtgtaaaaaaaaaaaaaaaaaaatcttaaattttaagagaaaatcaaatttattctatttaaaattagtatattgttttttcaaggactttttcatttaatgtaaattattatggtgccgtttggtaacacttttgttttctaattttataattataaaatgaaagtaaaatttttgtttttaaaaattttgcttttgaaaaataaaattgaaaaacaaaaatgtattctgtaaccacttttatttttcaattttaaaaacagaaaacaaaagtgtgttctgtaaagttcattttcattttcattttttgattttatttacgttgggtctaggtccggggtcggatttgggttcaagtcagaggccgggttcagcgccaggaccgtggggggatttgggtccgggtcatgatcgaagtccaagatattgattaagaaaaaaaaattgtttaaaaaaatattgaaagtgatttttttttttttaaaattttgattatcaattaaaaaattgaaaagtaaaaacagttttatagaacatgtttttgaaaaatattttcacttttttcaattttaaaaacagaaaactgattaaaaaagtgttaccaaacggcacctatatttgttgggatttagtataccccaacacattgagtgctatcgtgttatgagtataaatatgacatagcattacgttttagacacgttgagattttgtagttttaattattaaattgtactttttttaaaaaaaaaaaataagttacttatttaaaatctaaatcatattatatgtaaggtcaatgacaaaaacaaagtattttccagctaattgaccggaaaagatgggatcgccgtaaattcataataagttatttttttttagacaaatagattttaaaacttctttttgtaaaataaaattaaaatatcaaaacaatattctatataatgatgtaaatatgtgtttagctttttacatgataagaaactagtacggacataattaggcacaaaagaaaatataaatttaggcacgatacgatacaattacggttggccctgaaatttagtgggccatagggaaaaaaatatttttgggctctcatttagaaaaaaaaatgtggtatttttcaaaattgataaaaaaaatgtgtaatttaataagacggataaatttttttttgggcccctgagctaggtgggccctaggcacaggccta

SEQ ID NO: 242676 - DNA, 1132 bp, Cannabis indica
gaagcattcttcgtctctttttttctagccaatctcacttgctttgtgattttaatgcacaaaagcaaaagcaatgtgatgcaaaccaagataaaggcaagacgtaagtgcctatagtataaagaaacagctgaaaataccaagaaagctataatgaccagctcccatattacaaaaatcacaacatctaccctgcatccagaaatggggggagaagaaaaagtttcagaacaatatcagaaatgaaatgatgttatccagaagataaattaaaaccaactaaaacgagaagtagcaaaaaaatttctgatgcagtaaagaaaaggtttctaattaattagactattttcataataataataataaactccaaggtggcatttggttggaacttggaagtaatgaaatgaaatggaatggaaagaaaacaattttcattctattcctttgtttggttgcatttaaaccattggaatactgttccgatagaatggcctttctatcatttcggtagaatgactattccattttgaatagaggaaaaccattccaatgacaaagtttgaaaaaaattaataaatttttaattcatttttttatgtcattttaaattttattccattccattcctattcctattcttatattttcattcctctcacgaaataccacctagtatttttactttatggtataggcaaacaaattaagccaatccgaatttaaagaaaacatattgtatagaaattttgtttcaggtgtagagttttttttttttgagagaaaagctatatatatattaatgaacaagttcatttacaatgatagcttcaatagggcttggacaaacaaccctccaaacaatattagatccatcggtaaagtgaatctagtaagatcatgtgtagctgagttagcactccgacgaacatagcttagagggacacctgggaaagatgataaattatatctcgaataagatcatgaaatcttccataatgttgttgattattatcaacactttgtgagatagtgatattgggatttattttatcaggatctagatttactaacatgtatgttgaattaacatcctaaatatgaattctctaatacgatgaaattaaacaca

SEQ ID NO: 242677 - DNA, 1458 bp, Cannabis indica
tattagcttaatagcttaaaggccctgggctcgaacccttactcctgcaccttcaaaacccttactcctacactacttccttacaagtaactttctgtcctatttacatatgtggtttgttgattagttttgcactttattacctacttttaacaatgattaaagtactatttatatagttatatgttctatatatatatattatatatggtttgttttagtgattgtagtacttagtttgtttgacaataattatgttattttgaaatgtgccggtgtaatatgtgactctttatggaacaaaaatgaaaagcagtgtcagttcaaagccgtggagatcagataaacttatttctttaatttgtacttttttttaagaaaatttgtacttttctagtaacatgttctttaatgttaaaattcgaatttattttgtaagactaagtattgtaaatttgagtaataaataataaaattatattatttttgtttggccttctagtatgattatttttctcattaagttgtctttaaagttaaaaaaacattgttatataagtaaaattggcaataatatttattcacaagtgaataattttgttatctatactttttatataatgcagagaatgtgttataaaaatgtgtatcataacactattttataagtacggaaatgtgctatataattaactagaaatgatatagtgaaacacttatccatttattaaaataacatagaaaatgtgttattgttgcctatacaataacacatatatataactatgaaaatatgtttttcaaagtactccaacttacgataacatagtcgatcttaacacatcaaaaagtgttatggtacattttcataacacttttctagtcttattaaaagcaatttttcttgtaaaataatttcccttttaaaaaaaatatcaaacaattttaaactatcttaataactttttcaaaaaaaataaagaaaaactatcttaataacaattttaatattatttgtgaattgttttaataaatcttgtaaaaatgaaaataatgaaaatttaaaatgaaaataatttttttaaaattatatttttttccaataatttcgaaaaaagaattgtataactataaaaacgttggaaatggttatattaagatctaaagttataaccaattaaccaaacatttaaaaaagaaaaattgcctttctttattttctattcattatattcttatttgagtttaagttataagtgtataatttaaaataatacataaattaaaaataaaaataaaaaacccttcttcatttctctcacaatttttttttcggttccaatttgtaactttaaaatattttattttttgccattttaaaatatatatattttttaacaaatatatttttttgaatcaataattttaactggttaaaaaaaaaatcaataattgtaa

SEQ ID NO: 242678 - DNA, 1584 bp, Cannabis indica
ccttaatcacttagaaaaaattcatgtctgttagaattataagttattttttttttgttttttttttttttatatcaccccaacaagacaaattaccgtctttaacgcacatcactgaagctaaaacttcaaataaagacaagagctactatataaaagttgaatttaagtggtatttggttagaggtaatgaaataaaatggaatagaaaagaaataattttcatttcattcctttatttggttgcattttaaagtattggttgctttttgaaatttttttggagaagttacagctaaaagctaaagctgttccaactcaacttttagaaaaaactgttttgattaaaagagtataataaattttttttttgtactaaaatcatatttatttatttattatatattaaaaaaaattaaaatatttaaaataaattaattattaattctcttattttttttaaaaaaataataatctatattttatttaatattaatcaacgacatcaacttaattttttttataaactggagtttctaattttttttagatttgataaaacataatataaaaatactataaattatttttatcaaatgtatataaatttatatttgaaaaaaataaaatattatataaaataaatttttcaatatttgtgattataataaactagattataacattatcattataatagatcttaacaaactcacagtactttaaaatttataatttaccaaacactcagctcagtttttttttttcacagttctgctgcagttgctttttctcacagcatagctacagctgttttttttcacagcgcagctatgccaaacttgccattaatatataaatcaaataaaacataaatatatagattatttatacatatatggtcgatgaataataaatataaaatatttttattaattaaatatatcaaatatagaagtaacaatattcaaataaaaattgctaagaaaatatattatagtttcactaattaataatatttggttatcataaaactaaatatattaggaatatgatttcaaatatatatggatattaggaataaaatttgctccctaaaaaaattatttaatgcttaaattttaaatattaaccttctctcccatttaatcttgctccacttattagagtttagttgcataatgcttaattacttatgtgtggaaataaatgtcatatatatatatatatataagatgaatgagctacttctcctattgccaattagttttgatatgaaacctcattcaccttatcccaaattttaacatggtatcagagccacttgtgatccgttgtgagcccaaatagtgccaccgatccaaaaaaagtcgttgtgagtcaaagtgttgccgatccaaaaagatacttttgatgtctccccttcaacttctatttgggacccttcggccaatgtgtgccaatttctagtatcaatataaaggaaagcacaaagagtgtctatatgtcctcttataattttttctttccatttttcctatttttaacacattttctattttgtttgaaaaccaaatcatatgt

SEQ ID NO: 242679 - DNA, 762 bp, Cannabis indica
aagaatattcagacatgtgatttcagacgtaaaaattgactgggagattataataaaagattgtaattaatacttatctttaatttaataattaatatgaaaaattaattatctttgttggacactaataaacaatcactattaaaataaaaatttactaaatcattgaataaagttgaggggggtttcatccactatattagaattgtgctttctatttccaaattgattcatattgataaatgagtaagacattgtggttttgtatgaaaaagttcaactttcctaaaattattattttatataattgctagaaaatttaataaaagtctaaacacaaataagtaatctagcatatatatagaccattagctttaaataccttacaaaattaggtttttgtaatgaattagtgatgcaaccactcaaattatcttacttaatttttatttttggtactaactagtaagagagtggtttgagttgggttgggaaagatgtgagagtgtttttgtgatttttattaattttgttgtttaaaaaaggacaaatagatttctgtcttttgaattattgaccctagctagctcctaacttttggttccacatagtgtgtttttccttgtagcaattaatgcctctcatggagaatttcaactaaaaaagagtgggggtaatagaacaataatatatacatgtgacacaaaatgttgacataaattcaagtggtcaaaatagttgggagaaaaaaaaaaattaaac

SEQ ID NO: 242680 - DNA, 1307 bp, Cannabis indica
ttaactttactttttgtgtagatcgttcaaatgataggacaacctgaccgacctatccaatggatgactcttattaatcctgaacaaccagacgacaaatagtgtggatactacgtcatgaaattcattgaaagttttatgaccgtagaagatccaatacaactgttgacccgacatgataggttctcaactacgtacacaaatgatgagataaatattatgcgtgatcagtggattcattacgtgaaagcagaagcagagcgacaacagttatcgtgttaatcaatgtgtatatatctcaatttattgttactatatagatttttaaatatatttagattattataattagcgttaacttaattatagatttttaaatatatatttagatgatattagcgttagtttaattattgtgactatacagaattttaaatatatttagatgatattagtgttagtttaattattgtggctacgcaaatttgtaaaaaatttaaaaattaatgtagggaaaaaaattgcagaaaatctattttttctatatttttccaatgtaacgattgaaaaaaaccatcgctaaaaaaactataaatggtaaccagtactataaggaacggtttaaaaccgttgcctataacagggtataggcgataattttaaactgtcgggaatttcatattggcaatagttttgaatcgtcgcttattctgcccgttttgcgacagtagtataggcgacagttatggaaactggaaatactttaaacgattgtttaaaaatattgggaaaagccattttttatagtagtgtgtaattttttggttgtttttgtatatttaagaaataatgccaacttatttttagtaaactcaagttggtttaactaatatacaccagttccccaaatataatatattttatataattgcataaacgaataatataatattcatcaattgcacgaaatatgtattaaaaaattaggtgtagcaatattatactacattattactatgattatgttttttaaaattcagcgctatatcattcacgtattttataattttttagtatatattttgactgtacatattcttacttattatataaaatattataatatatatacgtatactgtatacatatattattcaactgtaaaattatgcaaaatacatttattataattaatgagatgataacttgtaatacctgcttttcgggtatataggaagatgctcaggttgtttgtttacaaaatattatttataataatgaaattgtgatggtaacaataatctggt

SEQ ID NO: 242681 - DNA, 550 bp, Cannabis indica
ggagatttggttatttgctattatgttacgcggataagttatcgttactgaatgattctttcttactgtgtttagaaagtgacacctgttctataattggtaatctcatcattcacctgtaattgtcacgtgtacgaaaccactactcttaacaaaaaaaaaaaaaaacattgttacgtaagggttgtgtgtggtgtggtgtgtgaaaatagaatttgtttaagcattgttattgagtgttgtagtgtttagtcttatatatgtcgttttgtaattaattactgatattgtaattaattattaatatttttaaaaaattattatattaaattgtatgagattcaatatttaattaaactaatagtaatattaacatataagaagctgttaatgttttttaagttttaatatatctcattttatttgtttattaattgaagtacacagtctttattttctctattaaacattacaattttaaaatattgggttattaccttgagttctttttaacataaagacactaatttgatagatttttttttttttt

SEQ ID NO: 242682 - DNA, 943 bp, Cannabis indica
tcatcagtacagattctgttattgtcttaaacaggacacatataagacccaaattttagattatttggtctggacgaaaatatgtagtagtagaaaattacagttttacaaacattgggtacttatgccactaaaaaatcattgggtttatgccgcttacaaactcaaaattttaggtacttatgccgctatttacccttttgttaaataataatttagattctatgtttttcaaaatagtataaaataaactacaaaactcaatttttagtcaatttattttttttattataatcaacctgaagttattatctagcacaaatagatacaaaaatgtaaacttgaggtcaagttactattaaatttttatttgataaagatttgtatagttttaaaaaacaatagagtctgaattatcatttaacaaattagaaaatctcattaatttggtataactatcatgaacatcttcatcatatagaaaaatttaaattatatataaacaaaaatgtctctaactaataagaacaaaatggatgcttcaatcattacattatctaacatataaaatattatatataaatgcatgattagcgctattattttttttagattaaattacacatattacatttatttaattaacaaaatcttattatggaattaagacttgaaaagaaaaaagtatctaaccgctgtatcaatactaggtccggtatatttttaaatttaaattaaaggacgtagtatacacaccaataatataaatataacatctcaaactctttgtagtaagtaaagatgcacattttccacatggggatggtgccccgcggggacccgctcctaatggggcgaagattctctgtctaaatggagaacaggacggggacggggatcaaattttatccccgaatgttaaacggggcggggacggggatga

SEQ ID NO: 242683 - DNA, 1074 bp, Cannabis indica
gtttagatgaaaataggtagtatgaatattgtctaaattttcttttaagaaagtcaaaattaagtgtattgaagaaattgaatgaaaattacacttttaatcttttataaatattaaatacttatattaaaaaaataataagtagatttatgtcaacacaaaatttttaatatttgtactgtaatttagacaaattttccattgtaaaagtaaaaccatctataccatcgtacacttcacttgcatgttttttttctctattaattactttacactaagagcatctcccatggttaattgttttggaggatgctttttatgtggattgtttatttagtaaaatacaaaaatattatactattagagataaataaatgttatcataaaaaattgtattaatctcactacatagtattgatactattttttttaaaaagaaataaaaattaaaagtaaattaatagagtgataatatttataattaaaataaataatatattaaataataatgtgtaaaattataattatcatattatttttatataataagaatatttttaaaattaaaagtgtaaaaaataatatgaaaaaaaaaataaattttttaacacttatatgttagctaccaaatatatatttcttttcattctttcttagtctcctcttgattctagaaagattgtgtaatgattgtattactcagagtatctttttgtaagatacatacaccaaagagttggatttatcataactagaaacttaattaagaaactcttatttttttcacaatatggaaacttattagtagagaaaattgattgagggagattttttctcataataaacaatttcagtttactttaaaaaaaaaaaaaagaactatataaaatgatttttttattatttaaaataaaatatataattatattaaaaataataaaatagtaattttaataattattttactcttcattcttttaattttatttttaatatcaaacagaaagaaaagtaaaaatcttttccgtcatttttactctctatcttttcaaaaatctccatctttctctttct

SEQ ID NO: 242684 - DNA, 1414 bp, Cannabis indica
aagctcataagatagaatggcattgactctcccctaaacgggacaacgctggattctcatcttgatcgaataaaaggttgctaaaatgtttatcattttagatgagctgacaactctattcaatggatggtatctttgactctcgcctaaacgggacacaaatatcagtttgttgaagaccttggaaattatttaggattgtatgttttagtattttcgcttgtcattcctatttgctaaatacttaataatttctgaattatatgtgaatttatattaaacaatgttattttctattatattgtaaatgtctattatttagtaaatctattacaattaaagtaaataggcttgttggcatcctctaaaaaattattaaatttcaatggatcgatatttaattcaaatggtgcatctcctatcatttctagaatgtgatcatactcatacactaaattaacacccttaaccttgttacacttagatgttccctcgcccagaacactattcttttctccatgatgaacctaaaccttatctcttgtctattccgttaataaacaaatgcattttcatcttagtaatgtccatatgctccatgttaccacatttaagacaagggcaaagaatcaatttaggatttttgatatacttctaataatagtccaaaaaatagtcaacaccttgactatactccgctgataatctattcccactcatataatttctatctgttttaaatcttcaaaacaaaattttattcaatttttttttgaatatatgcagaaaataattagttaaattaattaccacacatacataaattttagtgaaatttatcctaattctagcaaaatttcagcagcataacggctgtaatcggatgttcctaaaaatttgaaacatgacaaaaaaacacataaaatacaaaaataacaaaatgacattaacaatacaaaatatccactcattcgactgcaatacttcattacggatgaatatttaagatattcaaactcatctaacatgcatattccacccatccgaccgcagtacaattaatcacacaacctacttcacaacaaatgaatatctaacatatctgaactcgacaaaataaagaattttaaagttttagtgattatacctttctccaataaagatagctacaattgtgcactcttcaatcaacacaaagaactcgatacctataaaatatttaaaatattaaattaaaagtttctatttattaactcatcaaattaaagtaaacgtagataaaattttaatctttataactattatcaacttatatctaaatatgtataaactaaaaatacacaaatatatatatggaatatttcttaatgggtattatccatgaatggttagtaaacaaatttaactataaata

SEQ ID NO: 242685 - DNA, 2182 bp, Cannabis indica
gtgagtgtaaggacccaatggaagtttgaagcgggaacgttatagtataatatctgtgtgtggtggtgacaataacagccgcaaagcaatttgaaaaatatacttggcatggtcaacaaaatggggttaattaattaatatttagaattattatttggaagaatttattatagaagtgagaagtgagaaaagcatatatatggagttgggcaagatcgtcaagaaatgtggattatagaagatatgaattagaggacaggaaaaaacaaaaaataaaaacaatttctcttctattggataagacatatgcatgttcagagttgtcaggcttaatctataccagttatggataagaagcttttatctgaatatgatgataccatagaagaagaagttgtctttgtcttttgttcatttcctatatatttatctatagacactaatatattctgcaatttttgataccaaacttaaaatgcttcattcataaccaattatcatgatttggacggtcaactttaatgttcattaataatttttttattttttttgagaaggtgcatataattaatttagagacttgtataatgcatctaataataatagtaatgataataatgaataagatgagaattaataataacaaaattcatgttcattggtcaatacttaatactagatatgaatatgaacaagtacatacacacatggcttgatattatatatgctgatgcaatttcctttcaccataaacattctcatagttttcacactttttcttttttcttttttattataaggtacttaacaactttccagcttggatctatatggatcgattctttagaagcattactttttactaatgaaaatgacttatattacatatctatagagatatatgactatatagctaataaagccatgtgcaaatctgggactttaacagaaatgttgagcctaatatagacttaccttaatatacttcattcaacaattgatcaaaatcttcatatttttgtctatttccaaaaatgactaatatatttttttttaccctgtttaattattgcctagtactagtagagtttgtccctttaatctttctctttaataaaatttacttttaaattataacaaccactgaaaattttgtttatgtcacattggttgattgagcttttaaaagttatttttggtgttagaattaagagattgtccaaacatcacatttaaaagaatttcacacgtcgagaaatttattaattttgagaagacatcaaaagtttttagtttagctttaatactgtattaaaattataagatacatgaaatttcatttcaaaattaattgagagttctaaaactccaaacatatttcaccctaagagtaactctaaaagcactaaaatttgttgcggactccaatctatataaatacgataaatttcagtttttaacttcttgaaaaaatatattttaacaaagctgatttttcttaacagtttactcatatagccacatgtcaaaattatgatttttaaatagtcccaactagtgctgtaaatactaccttccactaaaaaatatatattccttttcttttcaaaaatactaaattaactttatgactggttgcagctatttttgttatatgttaaacaaaaatgaattcacaaaacaaattcgccacgaaaattgggcatgctttggtagtcatatctcaattaatgaactttaatatattcattttaagaaagaaaagaaaagaaaagaaaataaaacccaatgagtataatgatcccatcaatgttgaaccagccataattgcaattgtcaacaacactatatatatatatataaaaatatgatcaggaactgaactgggcagtgtaactgtaatatgtcttttgattatatataataatcttttggacaaattagtagtcaaatcatgtgtgatggaaaatgcactttgtctcacactttttcttctattcatttataaattagatatatttgtttattttcttcttcttcttcatggctcatgcttgtatgtaaacaagaaggtcgtgcagtgtccaacattatgggcctacatgtctattttgttctgcatttatatcataacatattcacctaaaatttatttgcttacatcaaccaagattatgttata

SEQ ID NO: 242686 - DNA, 1704 bp, Cannabis indica
atgccataaccaatcatcatcatgttcatacagggtaattggaattgataaaatgagttgtgagtcaggagtactaaaaacttggtgaatcagatctatattccattgtcctgattgctctattaattctgataccatcataagatcaccaacttcctttgtaataggtagaaaggaaggtggtcgtggaatccatggatctttaaacacccttgtattagcaccattcccaattctccttctcaatcctttaataagtaattccttaccccaaactataccacgccatatttgagatggatgagagctttctgtagcttctaaaaaactttgttgtgggaaatatctggcctttagaacttgtgccagaatagacgtaggatttatcaataccctccatgcctgttttgctaataacgcttggttatattgaacaaatcttcgaaaacctaaccctccttttcgcttagaaaaacaaagcttttgccaagctcgccaatgaattttcctctttgattggaatgaccccaccaatatctagccatagtttctctatatcatttttgaattaattagatataattattattagttatcttcactaaatttgactatttgtctcaggattattattattattattattattattattattataacaaacaaattgttaacatctttttcttttctgattcagttcttgaaactttctaattaattaatttctgtttgatttcaatacatatttttagttttaagtttggaatttgactcaagagacagtttttttacatgatagaaatatgtccatgattatagcattttatttctcttatgtaatatctatcattttgaattataatattatataatattttcgagtgcaacatttttttttttttttaaaaaaaagtaaaatcttgtgttcaaattttgattcattttcatttaatgcttttaagcatattttcacaatcaccttagttctctcccatcatcatctcactttctatctttgctctttgttttgtcatttgatcacttttcttaataatgttttgaagtagggcgagcaaccagagacatttttggagaggtagcgcgatggcattgaagttgggtgtgaccgcgccactctctttaaaagttgatttttaagcggttgaaggaatgttagtttcatagtttcatgtttcaatatgcaaacgtcagttttaacacgattatgtagtgtttataatcactcttcaaagcctaaacttggataggaagattggagcacttaaagaaaatcaatgatgggtgcacaatgtgcctggagtagtgttgggcgtaggatacctagggcagtggtgggcgcagttggccaataggcgcagctggttaggataccttgagcaacaatccattttatacccctttgttgtactttgaagaattgatcgcttgaactattgtgaagagaagtcaaaattctcctacgtgtcaatatcgctattggtgtaattaagtatcgagtcttatataacatataacttaatataataatttttaaatagtatcgttaaccaattacaaggtaacgcatttaaaggatgctagtcactactagtacccactaacagcgatttcgaaaataagaccttatcaaggcccaataaagatcatcccctcgtgggcctagaaatattgctcatgtca

SEQ ID NO: 242687 - DNA, 1783 bp, Cannabis indica
gttaataaaataaatattgaattaaattagatagaataatcattgaatacaataattttaatagtttgaagaatattatttaatagtctgaaaagttcaattaaagttttggaaaacaaaaatggtatataatatatgttgtaaaaagggttagttcataatgatcttatggttacacctaatttttatcggaaatacactaactaaatcataaacataatatgacgattataataaaaaccaagttccaaaaaggcaccacaacagtattgttatgatctccaatttacgtttgtatttttttttacaataaataaaataattttaaaacccgactacgtaaatagattttcctgatgtgtgggtgcctggtagggacacaattttttagataaattttttttcaagcaattaattaataattcattgaaaatagatcaaaccctttataggtgtgtgtaagttgtttttttttatttaactaaaccttttatttttaaaaagctaataagttaattaaataaatatttattggttataattgatgcgaaagctttctgatccacttaccaaatttatttttttagtagtagtctttatttgacttgcaaacaaataaatttagtgagtggtgaccgcgcgtattaatatttatatgttaaatcacataaaatcaactgaaaatcacataatcaaatatgcattttaccaattacaaaaatatttatgatcgaatatctaaacatgtatatactacgtacaaccaaccaattttattcataacaaataaattgaaagaaacaaaactattggtcgttgagtgtaattttttaattttatgaaagaaaataaaaagactaattcttgcatgggaagtgaccaaatgaaatgcaaacaaagagctattacttttgataaaagcttacgtgtgtacagacagaaaagtgggccttagttccattttctttcagaatattctttctacttttctgggcccataatattttcaaacccaaaaagaaaaaaaaaatagaaaaaaattactcgattgattttcaagtattaaggagaagcaaccacggttttcacattaacaaaagcattattaacgattctttctttcttaagcaaaatgagtttaacaattatttttcaatgtaataaaatatgaaatattatttaacaatgattattatatataatataggccatgcatgcatgcaatgtatctatgtttgagtttgatgataaggtcagcaaacaaaacctaggctattcttggatgagattgccacgctagccaaacaaaggaaacaccacttgtttgggaggatccaaatcaccatatccaaaatgcttggtttagaagtggagcccatttagttagttgggccattgagaaaataagtggggtccataatattaataaactataatataaattatacatcaatattggaaatatccaatattatagctaattagctatacacttataacttaggctattaggccggcaaggtgttaacctcaagcctcaacctccatccattccaactcaaatcagccacccaaatttgattgaaaagataaactcaccccatatataccctctaatcttctctttaaaatatatattttttcttttatttctcttctttctaattttgtaattgtttttcttttcttaaaaaaataaaagtttaagttagaaacactagagagaattttattaaatggtcagtgtaacaactatatttagatattgaaaaaataaaaaatt

SEQ ID NO: 242688 - DNA, 1106 bp, Cannabis indica
tgtccccgaaggtttgagcctcaatttgatccgactgttaaaccttatggagagtggatgaaagcaatcaccaagaaggaaaactacctcataggagctcaatggcttcggtctaacaatgaggatgaaggcggagtggctactggcggaggacggcaccggaatcatgtcgaggatttggcaattaattcgcctacaagggtgcgatttgctggagacaattcaggcacgaaaacaggagggaatcaaggcttaattcctagagaaaatcaagggattgataccattgatacttatggtaataaggataatgatcagatgaatatggaaagtcaaaatgatgatgctctggtaatagtggacaacaaaagaagacgcacgggtaaggatattctgaatgattcacttgttttggatgaaagtaatgtgggctttgttgacaatttggaagctatgtcaaaaaatggtgtacaggtgggccttggtgttcaggcccaccaatcattatgagtatcttgtcttggaattgccatgggcttgggaacccatgggctattcaattcattaaggatttagttatccaaaagcagcccaaagttgtgtttctttgtgagactttgtcaaagtctgatgtcattgagaaagttcggttggctataggtttccagggtgctttttcggttgattgtagagggaaaagtggaggtgtggcgttgttttggaaggatactgatgatgttaatttacttgggtttggggacaattttatagatgttgttgtcttgggtagtgacggagttcaatggcgtcttacgggattttatggcgaaccaaatagaagtctacgtaagaatacgtgggatcaaattcgctatctcaaaaccaaatacacttggccttggtgtattatcggcgatctaaacaatgtttcttctcaatcggataaaagaggtggtaatccatatcccaattggcttattgaaggcttcggggacatgttggaagattgtagcttaatagacatggatctttgtggatatccttacacctgggagaggggcaggggtactaatgcgtgggtagaagtccgtattgatcgcgcctta

SEQ ID NO: 242689 - DNA, 9920 bp, Cannabis indica
aaaaataccatataaattggccaaacttaaatgtgccatatttatcataagaatttttaaaatcccatactaagtgtaatttcctctaaagggtgtatagtaaaatttttcaaaacttttattatattctaattaacttttatacctacaatctattttttttttattacgtctttctagaaataattgtaatttttttttggaaagctataatggtgtaattcccgactttagaaatgtagctattaatacgaaattaatgtagctattaaagttttataggagcattttcgtcattttactgaagtgagaagatagaaattattggtgtacacgagggtctgtaacaagcacaacaacctcccctgaagaaaaaaagattagcacaaatattactataaaaatactccaaacaccacacagattagttacactcactcatcactgctcacttcaccggcatacgacgccgtttccccgagaaccatcaaccaaccccatggctctgaagtccttcatcgatgttcttcccaattctcacttccccatacagaatcttccatttggagtattcaagcctgagccaagttcagctcctcgaccgggcgtagcaatcggtgactacgtcctcgacctctccgagatcgcctccgctggtctattcgatggtccgattctcaagaactccgattgttttcagcaggtttgtttggttaatctcgcaatatatgcttttcgtgtatgtattataatttgggtaatggtgctgttgtattagtaatttagtattaagttaaatcaacaatggaaattactatttggtttcttagccacttaaatgcaaaatggagtttcgttttccactccaagtttatttgttgattttgagttttccttttttcccttggtagcctaatctaaacaagttgttggcattgggacgacctgcatggaaggaatctcgaattactctgcaaaagctattatcatgttagctaagcgttaatatactgtctagtttaagtttttttaattttacaattatacatagtacaaaaaaagaaaatctagagattatagaaaggctcatatcaatttatatatttattattttgatgcagctactgaaccaaaattacgtgataatgcaaatttgaggcagaaagcactcgttccaatggtaacatatatatatatatatatatatatattacattctattattattattttgattacacgatcgatatgaagatattttaattgtgatcataacgtataactggtccatttgctcagaacaaggtggaattgcttcttcctattgccgtaggggattacacagatttcttttcctcaatgcatcatgcaaagaattgtggaaccatgtttcgtggaccggagaatgcaattccacccaattggtattgtttttaatttacattttaaggctttgtgtgtgtgtgtgtgtgtttaacatatatttatttatataaattatactttttcatccattttaaaagaaaaaatttacattttcaagttcgtgaagtcatttcactgttgtccaggtttcaccttcccattgcataccatgggagagcatcatctgttgtaatctctggaacagacattattcgaccgaggttagtatgttcactgttttctctttgtttattcaatgctttgttagtcttgtttggtaattggttaaaaaagaaaaaggtatcatacagggaaaacatggacaaaagctgaactataatttatgagaattaagatcatggaatgtaattagaatcgttactttacttttgctccagccctcactctctcgctctaaattccgatccaatttctctctctatctctcaccacatcccctcttctccatttcactatgctttgttattctttattttcttagcatgagttttcagtccttctactaaatgtaggtacgattaaagttattttccttgagttattttttcccgtaactaccaaacacggcagaaaaaagaaagagtaggggaatttaatatatatagcttcattatacataattattttccatcatgcattacctacaatctatcttgacttaatcactatgatattgcttgcaacacgaaaaaatatgcctggatctgtgcaacctcttcactttctgctgggaaagtctgtatgagacagttttaagtttgaatcaattttatttagagtagattagaaattgaaaaatgatcacagatggatactgaagcatttttttgtggcaaacaatcattttgatagactacaatgttttcctagtttagtttttagattgaactagtcatcatgttttataaggattcttttcatatggttactttttattttttgggttacagaggtcaaggctatccaagtggaacctctccaccatattttggtccgacactgaagttagattatgaactggaaatggtaaaagttttacaataaggaaaacctgtctttgttctgctcaacatttgatagaacaaattactatttttactttttgctaatgattcgctgaactgttcatttgctttttgttatgcacggattctcttgattgcttgtaggctgctgtagttggttcaggaaatgaacttggaaagcctgtgaatgtcaacgaggcagcagatcatatttttggacttgtgctgatgaatgactggagtggtatatacattttcttacgtagttttaagtctctcggtgttgttatccattttatatgctgcttgacacatgatggttttgacagcaagagacattcaggcgtgggaatatgttcctcttgggccatttcttggtaaaagttttggtaagaactaattttataaatatatgtctgaattctctgttttcagtgacgctgttatagcatgtgggttagcatagcaggatttacctaactttatcttttcaaaatatttcaggcactactatatctccttggattgtgagccttgaagctctagaaccttttgcttgtgctgctcccaaacaggttcgtaattgtttaatagcttcagaagctaaacaccagttaataaaataataaaattgtgataacttttttatgctgtatgatgtgcgctttaaatggcaggatccccttccattgccttatctggctgaaaaagtctctagaaattatgacattcagttagaggtatttagctgtaatcttaaacaagtgcttatgtgcaactaatttttctacagcattatttggatcatgattaaatgcatgttcttgctaggttgagatcaagcctgctggcgtagaggattcaactgtggtcacaaagagtaatttcaaacatttgtaagcacccattaattccattacatagtagattatgtacccaattatttctctattgcctcaatctggatttcttcaagcgttcttttggttggttatatgctcaaattggaatcatataagacatacttcagtttgacaaacggtgtcttatatgttatgtcgagccgcttttttgatgttttcttttaagaatgtcttaaaatccgcttgtatatgtttttacatgatggccaaaacttccctctaatatttattttggtaaactcatgttacagatattggacattgacacaacagatagctcatcatactattaacggttgcaacttgagacctggcgatatcctgggaactggaaccattagtggacctgtatggtttcagtacttttatatgtatataattgttgtgttgacgtcaataataataataattttgtgttgataatttcatatgaatctggcttcagctttgcacttctattgttttgatttaggttaatcattctgagtgttgtatgttcaaacaggagccagattccttgggatgtttgttagagttgtcatggaatggacagaagacaatatcactgaaaggggcgacccgtaaattcctagaagatggtgatgaagttatcatcactggtttttgcaaggttctcgattcactaagacctctcttcatttttttcctgaaattttttaatgattattttcttttcctggaaatataaagaatgatgatgacagcaatatatatttccacatcatagaatagatatctctagctgtgctgtgtgcatgaatatatcactttcagagttagtgttcataattaatgaaccccttttcgataaaaagaaaaagaggaaaaagctagactattttgatagcacttcatttgtttcaaataggactttaaccactagtagtgggtcgcaacttttgcttatgccttaaactgttagattacatgtgatgtctacttaaaagagatcttaagagaccatgaccagagtccgattctggttgaaaaaatgtttgagaatagttatacagaagaaaattaatgtaaagcaaattaggtactaatatcttcaattagtgaatatttgttaaaataaagagtagatgtccgttagtttattatgcattatgctttgagaattgagatgtgagtagtttgtttgatgttatgattgcatcataaataatccttcaaaatgctgtgactgaatatgtatatgtgtatgaacattgcagggagatgaatacaccattgggtttggcacctgctcggggaagattgttcctccattgccttgatgatgttatcaagtgttggattggattcttcaaaatcgcttcatttaatcattttaatgtcttgtcatcattagatttaggtattgcttttctacatgactctgctgaataaactgttgcttaattgatactttaaactgtattcgataaaagtttggtagtgtagcttctaccatggatgaaaagtctatttgatttttacgtactagtcgtaactaacatcatggataaacttgaatatattcccgaacaaagtgaatcctacgtacgcagatatgactattacaattagatgtaatgatatatctgaccgtcaatatagatagagaatgttatagagtgagaaatacatgctaaggaacacgtgagagttcatatattcgcgacattttatttacagtacagaatcacaaataataacatatgaacccaatattaattttagattgaacaacaatcaattgattaatttattagtttaatgtgagagaaagacaggttaggttgctgtataggaattataataagatgaggtctttcaaaccgaacatggtctaataataacatggtttaactttaattttaaagaaactgaagcgggattcttctactcccttttctttataaattataataataatattaatatcagacccaaaaagagaggattttttagcgtgtgccaaaagcagatcttacatgctgctggttcctactaaacaaaacggtgcacacgccagccatgtctattacgcgccaagagaattcaagaaacctcatccttctactgttgtttgctagtcattacacttttatatttcaaaaaatcacttttccaatcttcgataatattatttctcacattcctttcttactcactctgttccttacttaccacttagcacaaactaaagaaaaattaaataatgacacactctcacagaggaagcttctactccaccaccgtcacttacactttccacaatgaccaaactacccctacctcccaatcaaactccacaaccaacgccgtccccgtccactccacagaagctcccatcccaatcaccgttcacctcccacaacaaacccaacccaattctgcgcccgcagccaccaagattcaatccgcctatcgtgcccacaggattcgaaccctccacagaacaatctcgtccgttgattcggcagccgatgaactccaacgagtaatccaacggcaggacacggtggatgccataaggagcgacgagcgggagaagctgaggatgaacgaggccctgatggctcttctactgaggctggactcggtgccggggtgggacccggcggtgcgtgaagcgaggaggaaagtaagtcgccggattgtggggatgcaggagatactggacgcgattacagaatcaaaggtagaagatggacagtcctatttctgggggtacgatgggtttacgagaaattgggacgaaatactggcggaaatggaggaggacgtttgcaagagcaccggaggcgatgaattggagaggttctgcgctgagcatcttgggtttcgttgcctccagaggtttctgcgcgagccctgattggatctggatcctctgtgttacaacctactcaattcagtttagatggcagcttttgtcgtcgacacgtgttttcaagcctttgtacacttgtagtaatgtactaagatctcatagaataaaaaatgattctcctgctaactgtgtatataatgtagatgtagttgttgtggtatattgtcttgtttaactgttccttttctttttcctcttctttaaatgttcagtactactacttattggacaacagatcacgagtgtgtgttacccttaaaatggaaggaaaaggacttgcccatatgcaataatgtcattcattttaggtattgagtttagggtgaatctttataatatcttcaaattataatccatttacatgtaaaatggtgtcacaaagccagaaaaaggaaagagtttcttaaatctatttatatttatgctgttattgaaacttaatgagtttcatgtcaaaatcacaattggttaattcacacgtgtcatggggcaccactgaaattggatgcattctaagtcgtcggcaagctgggtaatttaattagtaggtagcacctacgcgtttagggaagccattttacaagaggaaaaaagagagtgcgtaatgcgcatcacgagtacagtaaaggcttagttcgactaacgtgcgccatttccaaacaaagacgaagaggaagtaaaggaagagatggaggccgattggagagatagaattctctttccttttctgggtataatctcattcaccactcttctctacttaaacttcagcgaccagctcagctttccagttctatggcaacccaaaatggcctttgtcggcaccaactcaacccatttcgtggttgcagaagacgaccacggagggaactattcagaaatttacgttaatgggtggaactcgtattggttgatggagaagagtatttgggtttcgtctcgatccaaggtgtcgaagatgctgagaatgggagctcaaatgggtttaacagtttgcaggacttgggctttcagcgatggttatgggtccagtgctctgcagacctcacctggggtcttcaacgaaagagtctttcgggttcgtgtgtcagtcagtctctctgaaagttttgtttgtttgaacttttcttttttcttttttatttactattaagtttttatgggaattgcaggccttggattatgtgatcgttgaagcgaggaagaacaagttaaggttgattttgagtcttgttaataatctaaatgcttttggtgggaaaactcagtatgtcaggtgggcagaagaagctggtgttaatgtttctcaaactgatgattcatttttctcacaccccactgttaaggattactacaaggcttatatcaaggtaagtttccttgacttcaacttcattgtacctcggattctgctaattacaattggaagtgattagacaagtttgagaagtaatatttacatcaaattatgcttaattctacattttagcgctcatgtgttgataacacaagtgttcaaatggaaaaggtgatatgggattctaaagtagtttaacttcttagcaatatgtacatacttctaatagagctgttcaggagaactgtgattgttgatgattttaaatagaaaaaatcagatcttagaataatattaatatctaagtctgttccccagaattcttctgtttctcagttgctaacatacaatttttttggatcagcaagattgttacttcaattaacttttttggaactcagcatgatattagaataatatatccaagtctgtttccctgggtagcttgtttttttttctgtcattattcatgttttaatttcgagtatttcagaagtttgattctgcaatttagccgagaaaagaaaggtaaaaaaaaggttgatcaaatgcttaacttgccttctgcatacaggcaattttaacaagaaagaattcactcactggagttaaatactccgaggaccctgctatctttgcttgggagcttataaatgagcctaggtgtttatccaattcatctgctcctgttcttcaggtaaatataaataaccaagctaaaagtaaagatgaccaaaaccaagtaaagaaaagaattcatttttctaagcatataacacaaagtggaaactaatattgagacttttttgttcttaaatatcttggaaaaaacaggcatggatcacagagatggctgcatatgtcaagagtctagatgaaaaacatcttctgactgttggaatcgaggggttttatggtccaaaaactactgaaagatctaaagtgaatcctggtgaatgggcagcctcacttggatcagatttcattcaaaattcagcatcgacaacattgattttgcttctgttcatgcttaccctgatagctggtaagtgagtttcattaatctggatactcagtagtcagtactttccttaattcatttgttaaagaaagaaaaaaaagcatttctcttctagttaaacttttagttaatttttttggcttttttgcaggatccaaaaaggtgattctgaagcaaaaatgaattttctttctcgttgggtggattctcatataagcgacggggagcatgtgctgaagaaacctgttttaatcactgaattcggctcttccttacgtatgaataagacaccagaagacacaaacctgttgttaaagactgtatatgatagagtctatgaatctgctaagaagagggaagcaggggctggagccttgatttggcagttgctagtggaaggagtggacgaatatgctgaccagttttctctagtagcatgggatcatccctccatctataaattaataacaagacaatcatgcagactaaggagaatcttcttcagtggcaaaacaactaagggacttcacaatgaagatccttgctaaagacaggactataaaagaaccataacaacaagaaagtacgaggttgcctgaccagtgatcaatttggaaattagcatccctattttaaaattggaattatcttaaatgcccttgagttttattaatatatatatttaagctgtagggtgtgcataacaagtgatttttttggtcaaaataagtgataaaatgtttttagtgtatataacttgtttttgaaaattctgtaaccatgaagttgaaattatatagtaatgaatccacaacatctatcttttggttatgaatgaacatttccagttaaattattcatttgaaattaattggggttcagaaatagctaaatgatccaatattacagataccaaagtaacattagaaatacatagacgaaatggggaagttactcatctaagacatgcagctacacttgcatttggacatgcatttcttacaatcagagagttttggattgccatttctgccacagttacagcgctgaatgcagttggccctggagctgcccccccacaagcacttggccatgcagcggagcaccggaacacacgaggggcaaccacacctcatctgcttaagaatgcagctttgcatcgactaccatcatatgaacatgccagcgctggagcatcatcagccacacaccagcagcacacatggtgcagcatcatttctcatca

SEQ ID NO: 242690 - DNA, 2839 bp, Cannabis indica
ctctaaagggtgtttttgtagtagtggatatatatatatatcatatatatagatgttcataaataaaattaaaaaaccctatggttgaattcaagttcttacatgtttgaatatatatataggaagatatattattattacaaaaattttctctttttcaattttgatatatatatatatatatatgatgattaatatgatgaacaacttgtttaagcttctatatatattattaacagaaattagagtcatatatatcgatcgatcttacatacatatatgtcaaataaaaatactttctaaatcattattaattatagaaattaatgatgacaagatcgaagcatgcataggttgatctatatgttaatttttgtttattttttcataaaattataacttaaataatttgattgtaggctaattatacagattaattattgactcaaataggatatatatatatataaaaaatattttaatttgtgattaataatttttactcttttggttgaaaactatagtatatgattaagatggcaagagagaaagtttataacatggatgagaatgatcataatgatgatgatcagattacaaagaacaacatttcaagaataaattcttttgagaagttctcaagtgatgtatatatttccccggacaccccaacttcggtcctgtctgagttagctcgtgatgattttaatgaagcaaataagaaggttgctagggtttcgggtagtgcttctcctcttcttttctcacttagagttcaagcattggggaagttgaatccaattgatgttgttaataagcatttgtggcttcactattcacaaaatacactaggctttgataataattctacaattttagggcaaaaaaatagtcaaaatttagatatgaatcagacaatattattagatgatggtgataatatttcaaatatggcattggaaaaagattcttcaaaagggttattggttacaaaatcgaaatggtcatcaccattacttgaacacccgaaaacaatactttctaaagcagtattagagcaaccaccaacgcctttgttgccatcaaaaggaggagaaccggcaccatcaccaccacctaaggcaattggaaatattagaggtggtccgccgccaccacctcctccattcggtgcaaaaatatccttgcgacctaagaaaacagatagtaaactaaagagatcaactcaaattggaaacctatatcgtcgtctcaaaagcaaggtggaagggaccaataataaccctaatgggagaaaaaataatggaataagaagtggtacaaatggtggaaagcaaggaatggctgatgcattagcagagataacaaaaaggtatacaaatatagtgttataaaaaagtattataatatctcaagattatagttttcattacactaaatttatgctatgtaaatgttaggtcagcatactttagaaaaattgaagaagatgttgaaaagtacacaaatcccatcttggagctgaaatcttccattagttgtttcgaaacaaaagacaaggataagcttttgaagttccacaaaaatgtggaattagttcttgaaaacttaactgatgaaacacaggtaatactcagggttggcctaagcatattaagcagtttgagctattattctccctatattaaaagattcatttttttaatcatccctatatatgcatgatataataatttatttataatgtatagataataaatgttcataacaacaaacatgcacttaaaaaaaaaaaaaatgataaaaatatttgtggttctaaatacatataattctaaaaattttgcttattctagaattaatgtaacatttttttatgctgaatttgtaaattattgattgatttttttttttcaaagtccaattttaatttttcggctaaggcctccaacctgtttgggtcggccctgataatacttatatattattaattattacaattaaatatatattcatatagtgtgatgattgagggtttaattgtgattaggtgttgtcaaggtttgaagggtttcctataaagaagttggagacattgagaatttcatcttcattatacataaagtttgacaacataatcaatgagctaagaaattggaagattgaaagcccaatgggccaactccttgacaagcttgatcgttactttgacaaggtgatacactccaatctaaactctcaacacataaaaatgatagttttctaaattttgttactctcttttgtagaaactatacatatatatatatataataattgagagatagggagggtttatggcatgtgaaaggccaatacaaaatgcaatagtttcaaactattatttagaaaatggtaattttctaaattttgagacccttttgtgtagaaaaatggtattggtctaaaattttaggctaaatagtaatttttccccccgaactttgacatgtactaaatcatgccccatgaacttttttggtcgttaaaaattctccctgaactattaagattgttaaatttaaggacttttatctaattttagtgaaaaaattctaacatggatgaaagttcaggggacatgatttaatacatataaaattttgaggggcatgatttggtagatatcaaagtctggggagcatgatttagtacctgaaatagtaaaattgaatgaaattagaaaaaagtccttaaatttaacaatctcaatagttcaggaggaatttttaacggtaaaaaaagttcagggggcatgatttggtatatgtcaaagttcggggagaaaaattgctaatta

SEQ ID NO: 242691 - DNA, 788 bp, Cannabis indica
aggtaatttttttttacttattaaatttagttaccatttttgtccactattcatatttaagttaaaatatattgctccaagtgtatactttattttattctgttattatgttctgtttgtgtgaactttgaccaacaccaaaccttgtactctttccatttcaaaaactaattcaaaaaaactcaaaagagttataattttctattactacttgaaaaatcaaataaaaattcgataaaattctttcaattaataaaaattaattgagtaaaaaaaaaaaaaaccacaatcaaactttattattacaacttgaaaaatcaaacaatttttttaaaaaatgaataaattttttaaacaaactatctccttaccgaattaaaaaatatacagattaatgcttattaatatttatataaattcatatttttttttgaacaaaaattaattcattaaacagcaatatccgctatcacaatagactgaagagcatgtgaaacattgctctcagtaaaaagacgatcagaccaagaacaagcaccgagagcaacacaatgtgcggctttgttagctgatcgtttaacatgacaaatagaaacattatgtaaagaagaaagaatcaattgacactcctgaacaaacaaaccaaaaactgatggaagagtaaccgagctattaagagcttgaacaacagcaatacaatctgtctcaactagcacattggacaaattcttcgacttcaaccaactaagggcctccttgacgctcaatacttcagccacagccggctg

SEQ ID NO: 242692 - DNA, 1004 bp, Cannabis indica
ttatcaacatggactgtttatgtgtacactcttatacacgtgatacacttatattagtacacctaatataattatttcataattattacaatttaaaattaaaaaaattaaagtggtaaaattatcaaaataaataaataaatgtatttattaattattatttcttctttatttcttcttttttttttttttcttctatacccttctcttctctctcacatctctggaaccctaatgtcttcaaccctctttaccatcaaatacgactttgtctgcagcgttccctagattgctttcccaatcaccacttgtgtctccgtctccaaccccaagctaatgcatcacaaggtggtcaaggactacgacatcacacaagccatcgaaggccgcatcaaacaaggccaaagccccctcaatatataggacctcatcacaagcaacacctctgttcttgagaccatcgcgttgttatgatcagttgggcttagtgtcaccaacgttgttgttttgattgatcgggggcaaggaccaggccaacccaagcattaggcaacttgggccattgtacaagaccccccatattaaaaagccatatttttatcatccctttacatatataatataatagatataattttgataatgtatatataatacatgttcataacaacaaacatgcacttacaaaaaaatattgatagaaagttgcaatcccaatacacatgattctaaaaaaatttcccatactagaatttttgaagtatatcttcttttgatttttgaaaacaaaatttataaagtattgattaataattttttaaaaaaataaaaggcctaattttaattttttcccaaggcccccaaatcgcttggtccggccctgacaaggagggagggacaatctcaggaagaatgggatttgacttcatgccatgattaagcttactgtgatagttaggacttttagagggcatggaaagcttggttcttaagtttttggaaga

SEQ ID NO: 242693 - DNA, 1122 bp, Cannabis indica
catccaagaagagcaaagatatcaatggtggtggcagtagtaacttccttcatatttggattggtgctatcactaattctcatactcacacgaaatcaatatccttctttattttcaactgataatgatgttaaagctcttgtgaggcaactcactcctgtcctagccacttgtataatcatcaacgacattcaacctgttttatctggtaattataataataattaatctaatattctacaatatagtatataatttgacccttttaaatatatgaatatactaattttaatggaaaatcaggggttgcaattggagctgggtggcaagcagttgtggcttatgtcaacgttgcttgttactatatttttggaatcccattgggcctcttattgggctacaagctcgacatgggtgtgagggtaagtaatcatgtttagaattttattataaacaaaattataatctctacatctgatactaattatattacaaatttattaaatatcactacacataacctataaggatttactaaaactatgtaaatatttatgacaattccttaatatattaatcttgcaacatggttatcaactcaataattgtttggaacaaaaattgttcaattttattacgtaccctgaatcatgttaaaaaaaataatgacttaatatattccaaatgtaacaatagattatacatgcacgaattgggaatcccaatttatactgtgcactttttctagtttctaaaaaaaaaagcaaagtgagcattatatatcatctaattttctatagcgttcttaaaaattgtatgattagatttttctctttttattattttattgaagatgtatattattttgacattgttaaagtctaaaataatattgaagcattttgttgcctataatttcgtatataaatttcagggaatttggtatggaatgctgtctggaacagtgctccaaacttgtattctcttttggatggtttacaaaaccaattggagcaaagaggtaatcctatataatatttatattgtttcttttttaaaaaaatattattatttaatataattttatatcaaaatcaactatttatgaatatatatatatat

SEQ ID NO: 242694 - DNA, 1058 bp, Cannabis indica
tatttattttttaaaataaaataataatatcctaaccataaataccttagattcaaatttgtttattttgctaagtttaatgtattaaattataagatatgaaatataatattagaaaggctaattatgatttttgccccctgaactattgagattgttagatttatggacttttatctaatttcatttaattttactatttcagtgattgtttatgtactaaatcatgctccctagactttgatatctaccaaatcatgcccctcgaattttaacatgtactaaattatggctcctgaacattcattcatgttagacttttttactaaaattggaaaaaagtccttaaatccaacaatctcaatagttcagggggtatttttaacgaccataaaagttcagggggtatgatttgatacatgtcaaagttcagggggcaaaaatcctaattagcctattagaaatatctcaattttaaaattaagagattatattatattatctttattatcctaatttttgtcctctggcttggcagtccttatgtggataaaatcagtaccacgtggtagtacaactcaccaataagaatgctaggttagtacctcaacaaacggagaccccaacactcaaacgggcatcaagtgataaaccagcttcctcatagaagctggccgaccctacggtcgatcaacctctggatagcaccatggtcggccatcctgcaacctacaagggtctggccagccagggaaaagcctgcagggttatccatgcaattctacacgtggacacatgatttgggcttcgaattgggccctaaaagcccaatagaatagctgagtaatatctatgttcatgggcattttggtcttttgtaattaactaatttaatatgcaagtatcttagggtttcaactgtaaattagggttttaggcttcctatataaaggcctttaatctaacctagaaaacttaagttcagtttaagcctgataccagcctccaagctctaagcctaagtctaataactcacctcttcttcactctctctcaca

SEQ ID NO: 242695 - DNA, 634 bp, Cannabis indica
acgatcactctagattttaccttatgcaaaaaaatttgaaatgtttaagaaatttcatgaatttctagcaatattgaaaaacattaaggtaagtggttaatgatcttgcgaactgataggcgtggagaaatatttggtgaatatgcagttcaaagatcattaagttaaattttgaacagtatccaaaacttacctgcctagaaatttgtgttacatattgatgatagtatacggtgtatgattagttactagtagctgcctaagtccttctagggatataccccagtgataggaaaattttagaatgatggaatggttatgtacttagtgtacaccattactagatgcatggatgtcctgatcgtgaacttaagaaaaactagaactgctaactaatggttccatgtttgatagctattctaagtgattaggagtggagcatcccatagtcattaagataagaaagtgtttgtttcaacatatactacttttctaagaaaatgaccaagtctgaaaacattgtagccttggggagtacttcatggcactatctttttggggcttatataaagaatgatataattcgaatttttggacgactagagagatacaaacaagcaattttgagattaga

SEQ ID NO: 242696 - DNA, 658 bp, Cannabis indica
ccaaaaaaaaaagaaacgaacatgctagaccaccaaaaacatgacaaaaagataaaagagctgcatgaatagtaccatcccataaaacatagtcacatacaaaaacaagcaagcatatgagaagcgacatacacattcttaaataaaattacatacaaacaagttaagagaggggaaatattctcctaaagctagcatttcttgctcaaaaggaagtactaaaaagtgttatcatctttaaacttaagattggggccatattggtccactcctcagacatataagatttaaaggtgggattgctcgcatataacatcttaccttccattagacaatggtcatacctataaaaaatttcatctactcaagtgtaaattgacatatcattctcgtaatccttatgggtatatgtggtgagatttttggaaataagtgttggggatcacccaactctatttgaaaacgtaaggtataagttttacactttacatcctggtttaaaagtctcataatcatcatgttcaggacattaatctcgggctagagtgtcaagtggacaaaagttttgctagctatttttgagatggtcaagtcgactcgacaagactctccctgttaacccaaaaactttcccaggtgacgtggacacaatatttta

SEQ ID NO: 242697 - DNA, 500 bp, Cannabis indica
attatttaatatataatataacaaccatatattatataggttggctggaaattgtattttaaaaaaaaaaaaacatgaaatttgctccggagttcacaaaaaatttatatcctcttatttttcattaaaataattatatgaaaaaaaatatatatttttatgtttgaagttttaatttatgtttttatagtattctataaaaaaacaaaaaaataaaaaaaaattacatgaaagtaacaagaaaataatatcaaaataacaacaaagtaacataaaaaataatatataaataattaaaaatcaacaacaaaataacaagaatacaatataaaaatataccaaaagaccgaattttatataaatagaatctaaaaaactgtaaaaatattaaaaacttcgtacaagccgtatttttataatttttttttaggctgagatgcaaaatgaccctaattttggagggaaaactaagttagcaaatgtctcttttttaaaaaaaa

SEQ ID NO: 242698 - DNA, 499 bp, Cannabis indica
aagttttttctttctatataattttcattccagaagattttggtaattggtgaatatatcatgagctggaaacgctctgttctagataaatttgttaagtcaaattttatttaatagcttagtcgtagctttctaattccctagctatatatattataattatatatatataagtaattgtatattcattttttgttgagtttgcttgaaaaaaaaaatatatattttgtagaatttaaatataatattagtttgaatgtttaaaggtatcgtggactccctcaaaatgagtttactatttcttttaattaaattccatttatatcattgattggactgcttcaataagaagatactatatatatatatatatatatgtgtaatatatatgcgttctagaagaagaatattgtagagatattttacttgcttgttatagatcattctataattgaatgtgaagatgtgattattaagagataaaagcttgtgggaatag

SEQ ID NO: 242699 - DNA, 544 bp, Cannabis indica
tcagggagggggcaatgatgctgactatggtggcttgaaatcatgtagggaaggtgctttgggttgataccaagtgtttgcccttatgctagtgctatgtggcgaagttgtatcttgtttgttggcgttggaggttattgcggagaaaagcttgcaatttattactgtggaatgttattataacagttattaaagttgttaagggactaaattcgagatgagaaattgagttctatgtagctcattatacgagccttatgagctcttttatgggatacaacttttccaagatcctttaacactataaaaaaagtcacctttagtgataattttttaatcacaataaaatttttgtgactaaacatagtatttataggtataaactgtcactaatttaattttagtaataataaattgtgatttttgtgactaatattttatgtcacgaattttttagtcacagcataagaatgataatttataattagtcacaatttttcacttttgtatttaaaaataaatttttttgtaatgtaattttatt

SEQ ID NO: 242700 - DNA, 709 bp, Cannabis indica
attaagaaaaagttcagttgtcatttttacaaccagatctcagttttggggatacatatagctaatggtactgtagtacagttgggagaactattatattaatattggagaaatactaagagaaaccttgtgacatgtttttattagtgtatctaaatacttttatataatttttgatttaataaataaaatagaaaaatattaactagttaatggatgctatattggtatattgttagacacatttttaatagcaagatgtaatttcttatctcattttttaagtttgacgttccaaaaaactaataaataaaaggaggtttatttacaaaataataataatgaggtttggctttattacaatgtatattaaaaaaaaaattaaattgtgttccacaccaacaatatataactggtgcaatgagcatcatctgtgagatgcgtgtaataatggaagctcatagtaagattatgaggggccccgtctgagtatccctactctttaactttttgtagtagcattttcttgaggtggaaataataggcgacaagtaaggcgatcaatgaaaatacccactcaatccaacggtccgaaatcaaaaataatattatttttatttaaattttgttattatagtatggttttgttgttatgttgtgtgaaccttgtgtaaggtactaggttcgattgtaaaagtagtagtaggta

SEQ ID NO: 242701 - DNA, 719 bp, Cannabis indica
ttttcatttatttatttattttggcaggagaaaatcatcgggtgctacgagttattaatgaaagatattttgattgagagtactagtagttgccgtaaaccaaaaataattccacaacttcgcgttacggctcgatctaatagagtgagatcaggtacagaagattcatcctcctcctcctcctcatcatcatcatcctcgtcatcatcttataaaaggaggaaattaaataactgcttatgggtagatgatgacaaaggaaactcctagtgagaggtaaaaggaaaatggtggcccaagttgtctagaaaaacctcaatatttttttggagggttttgaaaattgagagattaatattgactttgggtgatgggtgagtgagtgtagagtatatatatatagtatatgaaaaataaaaaaataataaaaaagaaatatatatttatatgtatgtatgagagtttggtgagtttttagatttgttaatttttttgaggtgggcaaagccatttcatttcatttaatggctttgcagattcccaagggaaggggatttgtttttgttaatattaattttggtgtgtcagaaaaaaaaacaaagaaaaaaaagtagaggagagaaagacagagacagatctgttttaatagtggagtcatggagtgtgaaagttaagtgggtggattgaattcaaagacagcattgattattgaatgaaaa

SEQ ID NO: 242702 - DNA, 577 bp, Cannabis indica
ttcactcctgcccgattccaacagctttgtgcataggtgcattcaagcaaaacatgacttattgattcatcatgaatattgcagaaaacacacaagcaagggacatcaacatgcttagttaggagttgcactcgtgtaggtaagcatccagtaagcgctttccacataaaatgcagaaccttagcaggaaccttgattttccacaactttttccaaacttcttcttccatatcagcactccaattgcctttactaagttgtatatgcttgtatgcactttttaccgtataaactcctgagttttcatgcttccagtagtagttatcacctctacccgagtttattggggtgttcaaaattatagccgcatctctgttgttgaagagatctgctaccaaatccacatcccaacttgcaccattcatctgtattagttgcctaactctgcattgctcaagagcaggatgtgtagaagttacatacgggttaatcccatctgccagccaaggtgatccaaggacagctactcccctacgccaattctgagatgtgcaccagtaaaaatcagggactgagt

SEQ ID NO: 242703 - DNA, 3505 bp, Cannabis indica
ggatcactcccaaatgcagagagccgcaggccacttgtcatggagttgatcggttagccccttgcatttttgctttacacaacaggtctcttaatgtatttggtttgagtgagaatgataccttcagaggtgtcactaacttcaatacccagaaagtaactcaacttgccaagatctttgagagaaaattcctggttgagtttggaaataagagaagtaatgacatgaggatcactaccagtgatcaagatatcatcaacatacacaaggatgattgttgaatgatgaggtgtatgttgaaagaacatagaatgatcagacttggaagaggagaaaccaagattgagaagacactgttggagcttttcaaaccaggcccgaggtgcctgcttaaggccatagattgctttgtgcaatttgcaaaccaaattgcttccaggattgatttcaaagccaggaggttgggtcatgtacacttcctcttgcaatatgccattgagaaaggcattgttcacatccagttgcttgacacaccatccattggacaaagccaaagtgagaacagctcgaattgtgacaggcttcacaacaggactgaaggtttctgtgaagtcaaacccaggctgttgatggaagcctttggcaacaagtctggctttgagtctactaactgaaccatcaggattctccttaattcgatatacccacttgcaccctattgccttctttcctggagggagaggaatgacagtccatgtagcatttctggctaaagcaagagcctcatctgccatggcttgattccatttgatattctgcaaagcttgagcaagagtatcgggaatactagaaacagagtaggtctttggtttgaaaataccagacctggaccttgtctgcattctgtgtgtagactgagttgctgttacagaagctgatgtaggaatagatctgtcagcagcagaagaggttattgcaggttggtgcacaccagaacatggaatgctctcattattgccagtgataggaacactatcatgagcctgtgtctgactaagaggctgttgttgagtgtgtctattgagctcaaggtcaggtacctgaaaagaactagaagctggagcatcattagacctgttacataaatgttcaaagccaggaggggggcctgaaagtgtatcctgaatagtgacagatctgggagaaacattctcaaagccaggtggagggcctgtattcgaagggcattggtcactgagattgtttggagtgcagggttgtgtaatggatgtaggttgggactgtgcaacaggtgagactatgggaatttgacaacttggaaagtgaacagacccaggagtaagtggtgtgacgtgattttttgtgagtgaagagtaaggaaaggaatgttcatcaaaaatgacatcccttgaaatgtatagtctccctgtggcatcaagacacttgtaccctttgtgatttaaactatagccaaggaaggtgcatggtgcagacctaaactgtaatttatgtttgttatagggtcgtatgtttggataacaagtgcacccgaaagtcctaaagtaagtgtaatcaggttttgtttgaaaaaggacttctagaggagatttgtggcctagaattggggtgggaagcctgttgtgcaagtaaacagtagttctaaaagcctcatcccaaaactttaagggtaaagtggcttgagaaagaagagcaagaccgtgttctacaatgtgtctatgttttctttctgcaagaccattttgttcatgggtagtaggacatgaattcctatgaatgactcccatttgttctagatgtggtgtgaatgacctgtattcacctccccagtcagtttggagacattttagtttgactcctaattgcaattcagcttcagctttgaagtttagaaaaactttgacagcatcaaatttattctttaacatgtagatccaagtaaacctagagtaagcatcaatgaaatgcacataatatttgtaaccattgaaggatatattgtgtgctggatcccataaatctgaaacaactaattgaagaggtgctgtgtaaatggtttgagatgcttttggaaaaggtagcttgtgaattttgccaaggcaacatgcagcacaaacagaattggttgttttattaatggacatattgcaggcattaagaacctgttttacaatttgttcagatgggtgtcctaatctattgtgccatatatcaaaatctgataacttggcaccattacagttggtacatgaggttttatttggatctagatgaatagaagactgagctgaaggctgagatgacaccatgttggttgacaattgatgctgagatgaggaagaataggatggctggtgtggttgaagaggtgaagacaaaagctgaaggtcattggagtcaaatgaatacaggccattcctgtacctccccataagcaaagtggctcgactcacctggtccttaacaaaacaaaggtcaggatggaattcaaaaaacacacaattatctctagcaaatttggatacactgactaaattttttgttaattcaggaacatggagaagatttttgagcagtaatggttttgaagataatgtgtttgttgaaatgtaagtgtgaccaatgtgagcaataggcaaacctgttccatcaccaatgtacatgcgatctggtccttcatagtcgctgctattcagcacattctgagcttctggtgtgcactggttagtggcaccagaatccggataccaatttggatcatatgcacggtctgaggcagtgagatgagtctgaggagatgaagttgatgcagacacaggttgttgtggggtgaaggttttgtcaaacctataatagcaatcctgagctatgtgaccaatgtgaaagcatatctggcactgaggtttgtttgaggaagttggaaattttcctcctcgagttgaattcgaacctcctctgagattgttactgcctcgtccagttccatagaaaggaacttgattgtgtaattgtcctctattgaaaacactgttcgatccaccattatttccaaagttggatctcgaaccaaaattaccatagccattgctaggattggtatagtaattttgatttgagtttccctgcataggttgtctgaaatttctgttattggcatagtgagcttcaggtgaaggatctgattcatttgttgagacatgagcagagagatcaagatcagacttctcaattcttaattcagacgcaagcagcagagattcaatctctgcaacagagtaatcttcaagacgagtgttagtggagatgacaaacgtgtcatattcgctcggaagacctttgaatatggcagcgatgtgatcacgatccgttaacacttcgccaacagaggctaacaaatccacagtttgtttaactctaagaagatactcgttcaaggaaagatgacctttcttgagattttgaagtt

SEQ ID NO: 242704 - DNA, 585 bp, Cannabis indica
agttgacatttgcgaaggacaacacctggtttgtgcctgacgacaaggatggagcttcaacagtttgtggctggcaggatggatggaggttcaacgatttatggttggcgacgagatggagcttcacccgagaggatggaggttgaattttggcctttagttttgaaatttatatgtatatagattgtatatttaggtataaatttctagaaagtaggaagaagtagaacgaaggagttgtggtggtgagtgaagaaatttttattttggtgaatttgaatattaagttgtggtggtgatgagtagtagtagtttcaatgtagtgattgtgggattcaagaagatgaagaaggtgaacaaaaaaaaagaaaggtaagagagaaagaattgagagagaaagaattgagagagaaagattttttttttctaaactttgtaaattttaattattctattaattttttgaacttttttatgttaaagtaactgttttttttattttatttttttaatgaatttttaaataattttttaaattttaaatgatttattatatttttaatggatcaatataaatgtaccaca

SEQ ID NO: 242705 - DNA, 599 bp, Cannabis indica
gagaatataatttgatttgttttggaatataataagtttttggagtactgatcatatgttatacaaaatactaatatcattatcttgactaccccactatggctaggctactacaaaaaatgatctttcattgactcgtacaaaagaaattcctataccaatgactaaatcttaggaacaaaatatatataataataaatgaatgaagactttttatagtgaaagaattgttattttcatactcgactccatccatgcttgattatgatcaaataacacaatacctatttttttttttatcaaaaatactattgtataaagaaaggatttatttgatgtttacactaaacaaaaatattttctagttttaataacaaaaactattctaactattctttaaaataaatatgagtgtttggcatgattggcatccttaattttttctttctcattatacttttgtctatttttcatttatttattttgaatatttcctcacattatttttctcgtccttatttttctctaaatattatttttagaataattaacttttttagttccctgtacttatgacactatactatgatgccccttaa

SEQ ID NO: 242706 - DNA, 815 bp, Cannabis indica
tatatttttattactcccaactaaacgccacctaatagagtatagttattattgaattctacgcattttactttaataagtactttaaaccaccaactcatatatactagtacgaattaccacccgtgcccaaacaaaccttgttagcaacttatgaccatgataattgatgactattatggattagattctttccactatggcaatgcaaaagatgattagaaaggtaaaacaatagaagttctatttctcagctgggaccaaaatgactcttaatggtatcagttcccacaaaaaaataaacccgtcactagttgaggtcccccctatacatataacagtctcgcttgattcggttcatatattgaatttctgaggaacactctcataatcatcaaggtcaaaccttggtcgctctctcccagcctgagcaaacaaacataaaagatttataagtgatcaatgattttcccataataaggttcagctcagctaaaatcgaacgtgattaattgattattaactcacctttgctaagtataaaggatcacatgagatgtgctcatccatggcagtcagcttccttgaaagcatcattatcctgagaattacaaatgagaaaatcaaaacagagaaaggcccaaatgtgatgcttctactgaatgcctactgtttttttttcctttggatagttgttccgctattttaaaaatatatatgcaatctacctttgaatcgatgagtcaatgtgttcgatcatctcacaggatttatactgttcaggatcctcatggaatctaaccattccatctttc

SEQ ID NO: 242707 - DNA, 1167 bp, Cannabis indica
actttttgcttattcaatacttgtggctgagaaactacttgatacatcagtaaagaagattttacctacaaataacgatgaagttaccagcagtaattcaagctctttgtggaaggattttgtttataaattaagattgaatcatttaatttaaaagatggatatgagaactttactgtatctaaaatttttgtgccagatgatatattagaacaagctcatgaatccaaaaagagagaggtaatatttcaatgcaagttctaatttcgaatcaagaaaatattaactcaatacattacatgttatatatatatatatgtaatttaagaaaataaattgtccattatttttgtaggaaataaatattgacaggaacgaaaataattctgatagagtaattcttttcacactttctatattatatttattgttaaaagagttagggagattagttcaaataataattttctctttattattaacatattacaggatttggaagatttggaagttgaagatatgactgtcgctggtgaatgtagaaagagaaaatttcaaattgttgatgatgaagaagaagtcgatgatgatgcaaaaaattagtacacgtgtatttagtgatggttttggccttttggctatctttcatttgtgtggttggaaagattttgtttcttttaagttggttttagtctaagtttttagttcaaaaaactgtttgtgtggtggttgggtgtgtatgccattttcgtttatgtgtttcatggttgaatattgggctttttgactatttatttccatctattgttaatatggttgttaaacctctagactatatggatttctcagtatttagtgtttaaattatttattgactgtgtaacagtaatttttctattttatcaatgtcttgattgagatatgttattattttaaatacaagttttattattgtgaaatttgaaacaataaaactaaaaaccattgggaaatataaagcaaaaataaaattgattatttcaataataataatcaagatcaatatgaaaatcaataaaaataaaaatatatataaggaaaaaaagaatgtacaaaacattctacgtgccaaatttattgtccttattcttttttaatcttttaatttattgtcttaatatttatgtt

SEQ ID NO: 242708 - DNA, 755 bp, Cannabis indica
ccttgtcgtcttcaaatatttcaagatgctcttggctccaatccaatatttttgtcctgaatttgactgataccagctcactactctcggtgcttagtacactataagagaaatgggccttttacttacaaattataattgtaggaaaatattacgtaattgtaggtaaatgatattacctacaaataaacaaatattttatatatttagtaaacgattgtggtgaaatatctacacctacaattacgtatatttgtaggtaaaacatattgtggacccactcctcttgttagatgttaatgactaactagatgatgtgtcatcttatgtggcaatcatgtaagttgaaaaatggcaaattcttatttgtgcatgtgtcatacatttattaggccatatcatactttatcaagccacgtggcaacaataatataggtcatgttgttatacccaaaattagggtagaggacacgtgtcaagattaagggaatgagaatcgatgcaatatctcttatagaataactccttaattacataagtatcaaagtatatttgtaacccgctgactgtaaggtcttaggcgaggaatcaatgtacaaacttgcacgtatattagcgagaaactatatgtcgccaaatacgaatagcgaggcactggagaaagcgacacataccaactataaatgtcattagcttgcaatgaacaactaagtgtaaaagttggatcagctcgaagaacaagtaagcgagatgac

SEQ ID NO: 242709 - DNA, 909 bp, Cannabis indica
ttctggtggaaagtttgtcataaaatggatacttgttcgtgctaatcttaacaataggggaatgaagattgaggtgcagtgtgctcgctgtaacaagacccgggagaatgtcccacatgccttgtggtactaccaagaggtgaaagtagtgtggaagttgagcaggtaccatcatttgtttcccccttattcttcggacccgaatctgcttggcctccacatgcaaacttagctttataagtcaaattttgagaggttcttggttactatttggcgaagggcaaaataagtttgagcatcacttgggtttacttgcagctgcaaacattatgcattgggctgagtcacttttaacccctcctctatttccttctatgtccaacaatagggttaggggtgttcacgaattggtttggtccagattttcatcatattttttttaaccaaactagtataatagttttttgaatattggaaactgttgcccttgatttttcccacaataagtggacatggataaagctgacacgtgaatctgtaagaaccatcacttatgaaaaatcaactaagtcttagacgaaagagaagtatcttagggaaggcatctcccagaggagggcataagaagtatctttactctccggaaggccagagtcatgctaaggcagtcccgggaggtatacagatctcttgaatagtcacttcacatttaatgccgcatgggggaagacgtattgaaattcccatatgacagacggcgtaaccctccttttttggctattacactataatcgatgagcctattgacggctactttatgaggaatcacatcagtcaagaagggataaaaagattatatccacctaaccccctatgatacctactgtataggtcatgtatttcctagtt

SEQ ID NO: 242710 - DNA, 582 bp, Cannabis indica
aagtattgttccttcctcgaaagcacctatttccctatttttaataaagatgaagaaggtaaaaaagtcagatcgtcaatctgttactcggaatgcgtccagattgatcaattgtcaacctaggtgctgggtgctcaagcaccgagtgctaaaaaatgaacttacttcgaatctgattatgatgcctcaaatatgtccgtgatatgtctaattgatgtcccaatgcaaagtttaactcatatgcactaagacagtcgcgaaaactaaaaccctagttgggaaggtcaacttgagccctaggtgaaaccctaggtgcttaggttagcttacgagttgcaaattcgtgtaatttcagctcccagggcctggattaggttgctccatatcttcatggtacaaaatactgaaagacagtgagtttgattcaagttattgaaattcgaacttccatcccggagttcccaaagtcaacatgggcgcagggtcatggtcccctcccaggtcgactgctatgattcgagtctactcaactccgtgacatcatccttctagccacgtatcaaatattaatgtccacatcac

SEQ ID NO: 242711 - DNA, 746 bp, Cannabis indica
ttcttgtccatcttaataggaaaaaagtgttcgaaataattcatcttgttatatcccttcattagtattagcagtgcgaggtgatcatcactctatgtctaacgcgaggcggttgagtgtgctacttttattcagctcgggtgggagaatatcatcttcttgtatatttaactgagtttatcccgaggcagatatatgtctcgtcaatactagtttaagagttattattcttgtctcgcgtaagactaaacagtcaacgagtttgaatattttctatcaaacttacatttaattgcaacaagtaatctaattgcatttaatgatacaacatcattagtatattttttgagttgatttacatttcttctgtagaacacgtgtcaacttttggtacatagctaaatttcaggtttaacaacttctaatggaaattataccaatgccaacaaactaacatttgtggtcatttctcatcatgacacttcaaccatcattccttaagtaatcaatgaacacatccttgtttggactcatgtggtaagtattgtcaaggatccattcatcttgatccgtatgatctggtgcaggcatgtccaatccttgaagtttcatctttaaccttgattaatctccattagaattgtagttgtcatccactacaacattggaatcactgccattgtcttcttcttccttgttcttctttttactgtctcttaattctcaataatttctaattaagtgac

SEQ ID NO: 242712 - DNA, 455 bp, Cannabis indica
gttggccatgcttgatagattaaaaactcatgacaggctgctgcggtttggaatacaagtgggagatgtttgctgcctgtgtgaattgcagcccgaatcctgccaccatttgttctttgattgtgatgttacaggtctctatttgatggcattaaagaagtcgctgaacaggaatgctcaagcttgtaatctccaacagctacttagatggatttatagagctaaaatgccaaagtttaggaaaagggtgcttgctgctgccatcattggactggtgaacaacctacggaagacccgaaatgaggttatttggcaaaaagcaagggtcaatccggaaagagtaattgaagaaactaagtggactatcaagacccgaattgatagagtaatgcctcaaaagatcaagaacaatgatagggaatggtccttgctttatagtgtatttgattttcttg

SEQ ID NO: 242713 - DNA, 445 bp, Cannabis indica
ttctactgtgcttgtaatcaaatttattttttttccttgtgggacttcaatgaagcagtaagttccaaacatctctcctggaggagtccaatatatttttctttttgaaaaattttgaataacaaatttcaaataatccattttcttgtttgaaccaaatgataagatcagaaagtagtataatttttacatgatcaaagtgatgttacctttcattgtaagcaccagtttgaatgaatttcacttatgcaaaaacaacagtgtttggggttagcataaatagccttttagtgcagcaataactcaaaacaaaataatacctctacaaaaaaaatgtgctcgtcagtagtagtcgagacctgccaacatttagttcacctattatacaaataaaacaataattgattattgagatgaaaatgaaaaaaaacttaatatatatata

SEQ ID NO: 242714 - DNA, 847 bp, Cannabis indica
tgggtgactttttatttttatttaataaaataataaaatattatttatataaaataaaataataataaaacaaatcctatatttaaactgagattaaatattcactcgtaccatcaaaaattgcactgcccacatcgctccttggtttcttgctccgctggaaactccggtcccaacccttccactgccaccaacatcgctccttggatattattgttgttgttaatccacctccacaaggattgctttctcgtagctggtacaatgccttgatgggatctaggattgctttctcgttttagaattttcggcggtggctttcaggttagtggcttttatgcaagtttccattatgtgtttctaaatttatattgcaagagtaatatgagttaaaactacctgggtggatctgccttatatttcatgagttaaaagctattattatgtaatccctctccttgaacattacttgaaagttgaaacggatgtttctttgacaaagatttaacagcttaaaatactattcagccactaaattaaaaagaaggaaaagaatctataaaaaccagaataaaagtaagcccctattttcgtgatctcctattattatatacaaaatgctgtgtgggcttatcactttctagcactagaagaagtttatatgctagggaatgagctgttgttagttttctattggcccctgtccttttaaacatagatgtggcggtggcaatttcttcaattggcatctcttttttgttaactattactctttaagggtttcactcataaaacttggagattctaggagtaccaattagctataaaaaagaaagaaaaaagtaaa

SEQ ID NO: 242715 - DNA, 1187 bp, Cannabis indica
attggagagatttcctcggaccctccgggaattccttggatcttagtgggcacctacgggcctcccaatagcgtggataaagagctttttttggcttaagatgggtgactatgccctcaaaactactcatccgatcctcttcttaggggacatgaatggaactttgaaggatagtgaatgctttcattaccacgggagtgtgtctagatactcgttcgacttcaggcgtatggtggatagagcgggattgatcgacttgggtttcctaggcccgaccttcacttgggttaaagagagtacaaacccggcagtaggggtagccatgaaaagagctagacttgatcgtgggcttgcctcttcggaatggagaatcctattccctcaagcgatcatcaaccacctcgctgcctctgagtcggaccacaggcctttgctgctcgatacaatgggaggtgccaagtgcaagggacggcagttcaagtatgaaaatatgtgggcgcgcgaccctcggagtttctgggtggtgaaggaagcttggaaacttagaaggcaccccaatcccatgattaactttcacaaaaaagggaaagccactagtcgaaagctcttgagttggaacaagacgcaatttaaacacttatctcagcaagttcacaaggcaaagtcccaacttgaagaggcagaaaagaacataaccaatgtggctgacattaacaacgcaaaacaacagctctcagaagctctccttagggaagaaatccattggaggcaaaaatctagagttcaatggctaaaagaaggggacaagtgctctaagttttttatggcttcgacggttataaggcgaagaaggaactatatacaatgtatcaaagaaaattcggatggcgactggatacgagatcaggacaaaattgcacaatgctttcttaaccgatttaaggagatcttcacaaaagaccaccctagccccattcagttgagtccaggcctgtttcagaaagccttgacggatcaagacaactcatttttgaatgaaattccaagtgaagatgaagtgaagagagccatcagtgatatgggaaaggacaaagcccctggccccgacggctatcccccaagcttctatgtccatcactgggaaacagtgaacaaagatctcaccgagatggtggttcattttttca

SEQ ID NO: 242716 - DNA, 544 bp, Cannabis indica
tactaactagtttacctatcttaaagtgtttgattttctagtttcagttacaaactaatttagctataagtcatttgaaatatatatatatatatatatatatgtagtttttttatactgactatatttaacatatgacttacaggggaatacgattttttttttgtttgtttgttaaaattaatcatgtacttataaactatacattttctcaaaagttcttctaattttaacccacctccaaccagaaaaaatggtgggagaaatgtaaaatagggaaaaataataaagaaaaaaagtatacctgtaatagtttaatcagctactctggcatatttgggcgattctggaatggatgatcaagtccatggggtttgggcgagggtttctgggtttggacgagagggtttctgggttaggacttgggaggttgtcgaggttgtactctgatatgagtactgtttgcgattttagtggatgactttttatcccggttatttagttaaaaacttggataaaagggtttcacactaaacccttttat

SEQ ID NO: 242717 - DNA, 762 bp, Cannabis indica
ctcaattgaccttacattacacgtcccaacaatataaatatatagtagatgttatatagcaatactaccctattgtattggtgccacttaataaacccttagaacggacaaattaggtactgacgccctctctctattctattattacattatgcaggtgcaaaagagcacgatcatcacaatttgtaccctaaattttcagtgttgtattttaatgagttttaagttattttatttatttatttatttatttaatattttttttttttttctaaggaatgagttttaagtattttaattacacgtttagcaaagaaaaagaaaaatgaaaaatagttttttaaaattttgcccttctaacaagttttgatctatctatagcctatataggaaaatgaataagaaaaggcaggttgacttatgtatatatggaaaatgccaaaggcaccaaaagcagcgaaccatcattagtacatttaatatctcacacatttaactaactaatataacgtaacatcgcattgtactcttatgtatagaagtcgatcgaaagactcaaacacatggaatatataatattatacattagaatatctttagcaagctagttatatgtctttattataagaccaggcaccacactcacacttactaattaagctctgaacatcaaacatatctcacttattaattattacgcacacgacatagtaattaaacacagaacagaaaataagataaaaagagtgttaattattatgt

SEQ ID NO: 242718 - DNA, 1003 bp, Cannabis indica
tcatcacagtgtaggttccctgtctctgttactgaacatgctgatggcttattccttgtttcatttgggtgtgagggtgataaggggagaattttggaggggcaaccgtggcactttgctcaaagtgtcacaatatttgctgctcctgaaagttcttttcctatcacccctgataatctccattatgtccctttctgggttcaaatatatggcatcccattcatgtgcaaatctcatgatctagcccgttttatagcttctgaagttggtgatctcattgaggttgataaggatactgttaaggagggcacagggccttacttaaggattagagttctgttggatgtgaatctttctcttagaaggggaatgaatattaggttcattcgtatgggtagggaatttgttaagtggatagatttcaaatatgagaggctccctgatttttgcttcttttgtggaaaacttgatcataccaagaggtattgtcatttttatcttcaaaaatgtgatgaaactcaaactgaccctccttgtccttatactatccttttgagagggaaagaaaaaattgttgataagtctatgcctttccaataccctcatcctcctgcaattacccttgttgatcatgctgctgttaaccttcatcatcccactcgaaactttctggataacatcattagttttccttcctttctaactggtaatggcagttctggatctcattttcttagtccttatactagctcttcggttatgattcctacacctcttaatcctaactttgataatgctttttctgctggccttgtgttgcgtccctctgctttcacctcctactccactgactctttggtggttgccactactgttggtcctatggaggtggtctctggtgctttgagcactatggttcctactgagatgatgcctgcttcgagtggacctgctgctgctgttggagatactgctgctgttggacagccggaccctttggttc

SEQ ID NO: 242719 - DNA, 1359 bp, Cannabis indica
tatgacttggaagacaaagccatgtgaacttcaaatgctttatgtctcttgcacacatgtcaaaccttcccaagtctcttcagaaccacttatttagaggccttattagatatggatgcattcaaacacttcattcatctatataaggctacataaccacataaccaaatcatcaagtcctcacattctctactacaaaatattgttttgaattactctaatacttcttctaaagaaaaatcatacaaaggaatatcaacatggcatttggattgactcgttttgttcagggtaagaaggctcttcgaagatcgctttcaggcatcaaagaagcaactttgaagtgttcaaccattccaaaaggctactttgcagtctatgttggagaagatcagaagaagcgtcatgtagtacctctttcgtacctaaatgagccttcatttcaagacttgcttagtatggctgaacaagaattcggatatgaccatccaatgggtggactcacaattccttgcagtgaagacttctttaatgatatcacatctcagttgaactgatgatgttatttgtagtactgacatagattcatagaaaacaattttgtagatcatatactttcaacctttttcttacaaagaaaaggaacttttttgagtagttgagaaactaataaatagaaatgactcatttgattaacacttgttcacttttgagttgaattaattccatttttcttgctgctaatcaatgtctctggcttttatttgagaagaatttagaatcaactaagacataaatattagtgtatcacaaatgatcactaataatgacttatgtgtactaactcaagtataagtatgcaccacttgagttaaattttcattgtagggactagaccatgagaatcaaatataacaagaaacgtagaccaagagcatggacaagtaccaatttaggggtaggaaaaggttccaatccaataaaactttatggaaaaaaatttgcaatatatttctttggaatcattcttgggaacatattgtccccaaggaaaggtatttcaaggtatttgattcacactatctgtgaaaatgtttttaaaataatagtaagttttgttagtgatgtatccatgttactcacgattaagcacagtgtcgagttttcttacaagagaagtacaagtaaatccatttctcgttttgacttgtggagaaaaaaaaattatataaccaattagttttaagataaaatcttatgattcttgttatggtatcagagttgtattccttgcggacattttatcaacacctttaaagatggtgaccctgttcactctgatatggttcaagattagta

SEQ ID NO: 242720 - DNA, 1045 bp, Cannabis indica
ccctcgatcaagtcacatcagataaacattgacagctagacgcgcatcacccattcggacaattttctagcgaaatgaagtccacgtgcgaccatgaaggtcccacgcagacttggaagacaaatgttaccctaattttatcactatgacgtggcacttgactggtgacacatgtataatatttcataacctaggctgatagttatactcctagtagcccatgaagattgatatgaagctcaagtcatacctgaatgacagaatgtctgaaaaggtcagtgatggacatccaactagcttgatcacgtgaataactcgcatgcaccaaccagggggtgcgaattgccaaattcagagatgaacatcgttattttcatgcttgcatgtcacgaagaaaatccctatatttgtgggataaattcagagaataaaggcaataagcctagatttcccaatctctttattgtaattatggaaacatactaaattttcattttatttgttatagattaagggaaactattcttcatgtaattaacctctataaatagtggtttaatctcactattcaggaacatgaaattattcagagagaaaacgctcaagagtgaaacctcgatctaagagtgaattactcatagattattgtaagagatttcgagagaaattagagcattcttgctcactcctctcacaagtcaatagaactaaaaggggagtaggctaataccaaacataaggggtcaaatctctataaatctggtgttttccttactttatgctctttgatttctattatttatttattcttatcgctttaattaagactcactgtcattggccaaaagcgagatcaacactgattttttttgtggcaaagctatctaattctcacttttgttatgttatttacccttctgttagtaaatttctactaatgactaaggaggattatctatgtgtacccaagtgtacatattttatgtttttattggtctacctaattttttaatatttaaataaaattaaaaattatataaaaaaa

SEQ ID NO: 242721 - DNA, 1651 bp, Cannabis indica
gttgatcttaacatcgacacaatcataaagaccggcgcaaacatgtaaaagacttgaaaaaattgaaaaatactaggaatgctaattactatttcctattacaattatttaatcatcttccaccttcgaaatcacatacaatatttcttttcgaattttttttctatagaagtacttgttatagttacagtatcatccttgtaaatttttaaaaaaaatttcgaatagtttacagtactgaaaaacagagttcctgatattcgaatttaccacgagcgttcaaaaaacttcaaacgtattttcggtactataaactattcgaaatttttcaaaaatttacagggatgatgttgtaagcataacaaaaaccctcgtgaaaaaaaaaattgaaaaaaaaaattccaacatgtgttttcgggcgtgaagattggctaagaggttgtaacatgaggttgatgatagcactccacgaaaaatatatataggcatccaattttgcacctattttgtaaaattactcattgtattttattgtaccgcataatgaatctcacgtactttaatgttttctaatattttactgtaattttttttatttatttaacaatcgattgttgtaagttttttaatgattatcaattttgcataatttaaaaataaaaaagtacaaaatggtttatgcaaatgatagtttgtgatagttaatagtacagtagtactacagaaggtgggtcgatattgtcagcttgagattattttggtcttttcattattttatatattctatgtatttgtgtagtggtagtagagtacgttatatcacatacccagtaaatttatagtttctacttgatgcttagtaaaagtagtgtacaaaatattacatactattggaattattttacgaggatcttagatctactcacaagaatgttatttaacatcctaaacatgaagttctaaaacgatatgaaataaacacatataaagtataagaaaccttacagtggttgcagcagaatataatgtatctttccactcagatctctaacccttgtatcctttctgtcgatgagcatcaccaagatctgagcccgaatgtccttctgttgaatctggattcctcacgatcttacaaactataattgaggtaccacttgatgtgtgtgggcactactctatcactcaagggtttcaaattttaatagtgaagaagaagacttaaagtgccggcgaggttagggagagaaggcacttagtttttttcctaaagaaagatgtgttatatttttttgaagccatcactaccaatttatagcaaaccactagggtagggttagaattatttggcattaaaataatgaaaaaataaatgataaatccctataagagtggccgaccatgtaagtggataatgggccgcacttttgcaattttgctattttatcatttctgcatctcattttctcaaaaatgcaaattttccaatttaaccatttaaatgccaattctaattatttaataactaaaaattaattattaaataataatgtcatttaatatatttattaattagactaatcaaagtctcttaattaacaaatgtacccttgaaactttttcttcacaatttcgcccgtacttagtgaaa

SEQ ID NO: 242722 - DNA, 547 bp, Cannabis indica
tactaaactagtttataaaaccacacacgtggcgctcctataggatagggcgttacactgctggagtcctcatctgaggggttattcgcgattctgtgcaggacatggtgcaataatttttaccaacccatcaactggaaactcctccttatccagggacttttaggcaggtcaaggtgacttgtacccactgcgaaccaacttttggaattttcatgcaatccttgagcgatactccatgctgagtggagccagactggctagcatttacgtgactagatcatcatcccaagggactagggagatgtctgatgcaacccctctaatggttgttccttttgtagggataactagaaaagctcttgcccatggatgctaagtgggtggacattctacttttctaatgcaactttctttactatcgcttctggggactttcaatccctctcagctgcgcatggcctttttgaagttgtggccacctggccacctacaagcagtgtagagctctgagtctgagagcacgtagcacagtcccatcttgagc

SEQ ID NO: 242723 - DNA, 597 bp, Cannabis indica
ctgtagagatcatacatccagataagttatcaagagatcattcagtaagatacttttgactaacaatgaagaaagattgtgtatactacgtttgtaagtgtgagcagtgcgaatgctataccaaaagttccaaaaactctactaacaaaataatcctgatgaacagacgtgtgaagtttggtgaaaaggtgaaaatattagagtgtaaatttaacttgtgacaacttataactttcattttactataaaaaaataatcatattatttataggttatgaaatgacataactttattcattttatgttcaaacgtgtaaacaatataattttcattttacaagtttttgtacctatgaaatgtctatattattctattctctcttattattgtgattgttgaaattgtgtttaatgttaattttagtttcatttaatagatataagttgttatttttttttttttgaatgggaatatgaaattttattaaaacaaattaagaatcaactattacaatgtctaacaattccgaaagggaatcatcaatatgaaaaatacaaattgagaaacataatgcctatgggtttggtattgtagct

SEQ ID NO: 242724 - DNA, 1240 bp, Cannabis indica
gttatagaaaatcttacattggtagtagaggaacgaatatatttcgacgactgctcactgactgacataaaaattgaaaaagagcattttcatcattacttcacaccttgattttgaaaggcattaaatatagagatactcataaatctttggtctccttggtcattggatgaggatcgcacttcgttccgaaaagatcgtggccatccactccttcctcacattttgtcttggagtataaatacccttggtaatccttcagttaccacttttgccttcttttccaaattttctaactcccaaatcgcatcagacttcttgccatccaaaaacttcgaatcgcattcaaggaagatcatctgaaagacatagtagattactgccttcgcctgttgctgagaatagggctcgagaatatcccccatcttccatcgccagtgatcaggacaactactgcagaagaaatcacaagcctagactttgggaaggaaattgagtcgttgatggcctccatttcttgtcttcaggagaggtgcgatcatcttcctaaactaaacccagcaacaatcaccttaaatctccctttttcctcatcaagtacatcatttttgctcgtgttttaacttttacgaatttatcactttaatttatatatgcatgcactgtttgaggatgaaattagggttttttcatctgtgcgaacaccaccgtaggcagatttaagagtcatagaatgctttacttcttcaaattttgcatttaagaatttcatcaaatatgctagccaatttttcgcttaaggtccttatggttttgggtcaataacccattggggtcgtctcccttcttacattattttgggtttagagtctagaacgaataattcctaggaactaccgtttctaagtagtgtgtctagtagtggtatcactaaggtaaggaagattacctggattatgtatagaacgttcaaaatagacatccaagtgaaaagttatggcaaaaatacaaagactaatttccttgataaagtcccattctaaaagctccccaatcatggaagctactctgatcgtggaagctcctctgatcgtggaagctcctccgaccgtgaaagctcctccgatcgtggaagctctccgatcatggaagcttctcttgggcagtaagggctcaaaaattcccaatttttaggccccaaaattatctcccaaccaaaccaaaagctaccaaacttttc

SEQ ID NO: 242725 - DNA, 1583 bp, Cannabis indica
ataatttataatgtaaaaaataactttttaaaaaatctttttaaattatagaaaattattgatggataacttaacatatcatcaaatacataaataaatttaataaaataaatactaaaatatgataatatatattttttgatacttttggcacaaaaataacttgaatgcatccattcgaaaaattgttcctcaattattccaaagctcttatctaattaatttgtgggccaattttgcctaatttcacaatcatggccaaccattaccatatctttcttttaatctcttgcattttctttattagacataacaacaataccccattcccatgcaaatatatgaatttaatttatatgtgaccccttttcttatcttaacacaaaattggcccaaaaaccaaatatattttattcttttatgttctcccaatagaaaactcgatgagaccaaactttgatgttaaactaatattaaaaaaaatataattttagcaataaatttatttttattttgaactataacactaaaaatacattatttattattatatatataaatacaaataatacatatatatccaagaaacttaattattcaactattatttaatttaaaactaaagaaaataatcttattgtggtctacaatgtccactaaattttgtaaaatactattatagacaatctcatttataggtttaggtatgcaataatctagttggattatatatttagtgtgaaactactatttttgattgttgagaatcatggggttccatctcaaaaccaattggcaatgagtggagtagcccatgttcttatatatgactcaattctctaccatttattccatgtgggacattgtccacaatattccccctcaagatgatggctatttttttgctcatcaatcttgaaccgtatcagagtggacatggtcactatctgtataggtgcggatcggatatgatcacttgcccgcaagggatatggctctgataccatgttgagaatcatggggttctatctcaaaaccaattggcaatgagtggagtagcccatgttcttatatatggctcaattctctaccatttattccatatgggacatttcccacatattgatattttataggccagttagaaatgacttaagatgatcactaatgaaacttctaaagcttatttagaagaaatcataaattgctcattggataatttagtcattgacactagggccatgccaacacatgctactccacacaccaacacacacattcttcttttcataatattgaaaaaaaaatatcaaaagagaattgaatgtattttaagtatcacatgctattaatttatgtcattgtacacttttattagtgtctagtacaaaagcatgtgtatttaggtttaaaaagaaagggtacattttcttggacttgattttatatatgtttcaaatttcaataattaataatcgatcgatcgatcaaatcttagatcaaacaaataatagaccgaacgaaacgaaatttcatccttgagcaagacaaagttgaaaccttttgttagtaatgtcattttt

SEQ ID NO: 242726 - DNA, 533 bp, Cannabis indica
tttaataaaaaaaaagtctaacataaagttcaagggacatatggtttagaaaattagattatatttacaacttttagattaataattacgtacagttcttattaatttcctatttttttaacttactggtttcgatttttttttctttttgaatgaaaaaaaaaaattaatgtactttaaaagataaagatagaaaatgtatgaagactgatcaagagtgctacaacatatgcataaaaatgagtgaaggaataggataatataaactactttcctaaaatacaaaaaataaagtattattatttagtttaaactaataatataactactttcgacgtacctaccattcactaaaccttaaactaataaaaactagtgtacgactaaattaaatataattcctattagatgcacgttttaactttaatattattactatatatttttaaaggaatcttttttcttcattattattttcaaaaggtttcatttattcatgaagtaatgaaaatatagttgatgatgacttcatg

SEQ ID NO: 242727 - DNA, 822 bp, Cannabis indica
tgtgaaacaatttaatgtaaatacaaaaaaaaaatattatttttaatgaaatgtagaactaagcattaataatttctaactatacaaaaatacttgatattaaagatgaaagaaattattttaagaagggataactataagcatatattgtacaaattattaaaataaaactaaaatacttatgtaaatacactaggtttcatcgtctatcttaataataagggaacttagaaacccataaaaatattaactaaaaaaggcggtaaactaacactgagtgctttgatcgttttttctagaattttctgtctaaaactatattgaattttaaaaacataagcctctatttataaaaagataaaaggactaatgtgcaattaatttattaaaaattacatgtgggtaaaaatgtaaatacgaatagttaaaaccacagtgacacgtggcacttgctgattggttgctttgtatgagtcggtgccacgtgtcaccgtttgattggctgtaaaaagtaggagcaagtggacttttttgggataaagtgctcggaccgagagaagcccagttgcgagcttggggcttgaggcgcacacacggccagggtgaggtcgtgcgcctcacgcacgcgtgaagggaggaaaagggacaagggctgggtggctgatgcagatggctgtgcagaaatctgaaggtgccacatggcactgatgtcaactggagaggaagatgagcttattaggatttttgtccattgtgctctgttttaggcttcaaaaataccaatttttatggctttgggccatagttttgccattttttttt

SEQ ID NO: 242728 - DNA, 843 bp, Cannabis indica
aaaaaaacattgaaatttttaattcaacctttagttttcaaagaagactaaactattccattgaattagcaaattaatacaaattcagtcattcttctttttattcaaaagtatataaattttttaatgaccaagatatccttaccaaattgtttaacaaaaaagaattaaacaataaatttggcttctctccaaaatcttcttattagttttgccccacctattaccatatttttttgttacaagtatgtatctttggtagcgctatcattttgtatgccaattctgactagagtagatcagaaaagaaatttgtattgatttgctaatctaaggggttttttttcctaaaaaaattagtatatattgagcttttcaccttaacccaaaatatgtttatgaattgtccttttttatggaattcactatttgaaacaatgtttctttgtcaaaagatagtattggcagtaaaaattgataccaaacaaactgtgatttatgattaggtgaaaacaggtatgctaccttctagtggtatagtgaaggttcttcatcagagtctcaaggattttccagttcgaggtatgtttttgtgctcacataaattgttttttttgggcttcttattgtaattctaagagcatttgagttcacttggtaaaattaccaaaggcaggtttagtggttgaccctgtaatggtgtctacaagcggagatgttttagctgctccttctgttcttgcagtgtttaggtatgaggaagaattgcaaattggttcaattgtttagcttatgatgtttttgtccatgcattgtgtgcttcacatgcttgagaagcaagga

SEQ ID NO: 242729 - DNA, 1056 bp, Cannabis indica
ctttggccttgttccctaggattttcttttcttatgttcctagagaagctaatgtgttagtccacaactttgctctaggggtggccaatgagttagtgtggaatgattctttttcacctctaaattataatatctgaacctttgttttcttatgtgattatgagattatagctttttacaaaaaaaaaaaaaaaacgaaagaaaaagaaatctatattttttttatgtttttgtttttgttttggaggtggtgggaataggaaattgatattgttgaaaaaaaaaaaactaataaccttcatgttgacttttcaatccaaatacccaatgaatcattcttgcaaaaatgtgtaaattttacaaataggaagatgcccattagggcaatagggtccggtgatcataccattgatgacaataatagattttagaagcccttggatcactcacccatcttttaatccaagggctgaataaccaagattgatatcatagaaagtgaggagagtggcaatagtgaaagaaaaagactaaagtaatcagattgggtccaccaagaaaggacatcatgattccttacctggccaattagtcccgctctaatatatatatggatggctccttggtggccttaaattgagacacccactcatacttagtacattgttggacttaaatctaaaaaggggtataccgaaattcatccaatttaattacaactgattgatctaatctcagcccaaaattggatatctaattataattgaatcggatcggatgtaaattttaaaaatcaattagatcggatcagttgttggatcgaacatctgatccaatggataatcgaccaaaccgatccaattataatccaatagtcattcaattatatttatatatttttaaaatacatttataattttatatatttaatatattcatttaaacatatatattacttgatttaatatacatttaacccataagattaaagaaagaaaaccttagatttaaaatatcaattctcattttcctaaacgctaataaaattgtcaatac

SEQ ID NO: 242730 - DNA, 593 bp, Cannabis indica
agtttgtacggcagtggcattttcataaatatcttcaatattgtccagaacgggacgagacttcgtattcgccatttatttgggtctacaaatacaatggtgcaatcaaattggagaaataatgtgatttggtatatggttgggccatgtagaaggctaaaagcttagctctttaaggggaccctggtgtcagctctccaccacccattggcaccttggtgctaagtgagctactactagtcagcgggactagtagggtgggcatatgaggatgatgaggggactcatatgtctccatgagttggagtactcatggacattatctggccaacccagtagtgcgtctatgaagctgccagatgttaacgggtacgttttcattggcttgccgatatgctgcttgcacaggacgtggcctaaatgtgcgccttagccacgagtctcgacacgagatgacacaggtactcattcgtgggctagttgtcataagcgcatgggacagatgcaccatgctggaaagagacagaggtctaatgtatgcaactagtctgacagcttgtctcgagggcctgccaacatgcgtggaggcaagg

SEQ ID NO: 242731 - DNA, 710 bp, Cannabis indica
gaagcagatcactgtgcctaagtcctctgttgaagcccaatacaggtcctagctaacaccacgtgcgagatcctttggctcatcaacatcctctctgactttggaatcaaacattcacaacctgctaccctctactatgacaaccaagcttccatacacatctatgagaattttgtcttccatgaacgcaccaaacacattgacattgactgtcacattgtttgggaacaaatcatcaaactctcccaggtttcttctcggaacatcatagcagacatcatgacaaaagccctcttcacaacacaattcaacacattattgtccaagatgagtgtcaccaacctcaacacctcatcttgagggggagtgttagaaaccatgagtgagtatgtgagggtgcactctgtttcctctgcactctactgcagcatagtttaatccctgcagctgacaggttgttattattcaatcattgctgagggaatattctttcccttttcggttatgcattgttttctgtgtatgacacttgtcactattgtattggaaatgccaatttaatgcaaagttttgcctcagtctcaaattgagctgataaatccattgctgcattttctctaaaacttaacttggtatcagagccaatccggccttcaccaatgtctacaggaaactctcagactcccttccaccctaccaatcctaaccag

SEQ ID NO: 242732 - DNA, 904 bp, Cannabis indica
tgttctatgttatatacaaatagatcttgggttaattaatgttaatttatctaacatataatggttgtaagatttacataatactatcagcttataataatagaaagttaaggatatatgcatgagtcgaacttgcacaaaaaagtaatttcatgaagtgatatggcatgacagaccaaatgaagtgaaaaactgaattctttgcggtagagtaaggagatttcgaagagcggaactcaaagaatggagaggaaaaggaaggcggcgaaaagaaaagagataaagccacgtggaccaatcgacacaccacaagaatcacaactttttggcgacgcaattcatgtattgcattgggaaaagtttcattttacttgcgtattgccagcaaaaacttctcctttctttgactcactagaaatcctttatcggcacataacgccccctgtgaaggagatcaattgcgcccacacaagttaatggtgggaacatgcaaaatgcgaccaattgctcacttagtatacttgtataagtagaatgttttttccagggcattaccaaagtaaacttgtatcagatgtatcggctatacatctgactggaccgatattaatattggaagatatatcataaacttactgttattttttttctacatcaatatcacttagttgatcttaggtcaattgatctcaatcctgagatggttaagttttagttcaattgtactatacgggttttttgacttattcattaccaacttacccataggactagccatacttacatcttggaaatgcggtagtgcaattgagttggggcgataatcatagatatggaatctatagcttctataactatttagaagtgaaacaatagttttcttagagattggcttaacgcgata

SEQ ID NO: 242733 - DNA, 963 bp, Cannabis indica
tccgctgcctgaaaaggtgagcccgtgacagttggtatcagagccaagctttatcacgagtgggaggtgaacctggttggcctatcgtagagaggatgtaggcgtgtggaaggatgctagaaaagataaactaccacatgtgattgtagagaggcgcaacaggatgtttgaaactcgttggcatggtacaatattgattgggcagtcagactgtatgcttgatacactaggccgagtttgctcgagtgacatgtaagccgcaggaggcgcttttgttaaaaaggaagctcgttggtgtgggagtggaagtattgcagggactgtcagattcttgttagtcacgacagaggtcaagagttgatgaccgagatggttcatattggaatagacatggaatgcttcagttgctacattgtgtgtcaagagggacgcacatggagaccaagggggcagaggccgcaatggtcagagtatggttgtacttggaggtgttcgcatgtgacttttatttgatcagtatggaagtgccgagacagttgagtgggatgtgttggcttgtttaaacgttagagggcgtaagtcacacaaaggcatcaatggagatgcggagttgtggaatgaatgcatcaaagaagctagcggggctgagaagaccgagcgcaagcgttgagatggcgctagagtttgtgtcaaagccagagggttgtaccagcgagacttagttagtcatatttgcatgcgaaggtcaagaagggtgctagagtttgcatgaaggctagagggttgcatcattggaacttagtgcatcgtggaagccagaagggcgtgatgcaagtatgaattagttggatggttgagcggcaattgcatgcttatggaaatcgataggggtgctatataagatagttgactcgagagtcacatcctgcggggatgcagttttagatggcatggtgtgcatga

SEQ ID NO: 242734 - DNA, 764 bp, Cannabis indica
ataattaattattatttattttttgtaaaggggtttgttaattatttatgtactttgatgaaaatgactaggattaggagatgtttggttagaagtaatgaaatggaatggaatggaaaggaaacaattttcattccattttttttgtttgattgcattttaaagtattggaataggcattctaatttctaatggaatgctctttttaccattttagtggaatgactattccattttaataagaaaagaatgaccattccaatgtaataagaaaacaaatttaatgatttttttatcacttttttttatgcattttaaattttattcaatttcattcctattcatattcccattctcattcctattcctatattttcattcctcccaaccaaacgtctcctaagtgttaatatgtaattttacaccggcttacaggaataattatgtcttaaaaatataattatagagaattattaagagacattattggtgtctaatactctcctcgttattatatcattattattgtaattacgtatctagtctcatataacttaaaaaaataatttttatagaatatcgctaattaatagtgaagtgtcacttatttaaaattttaggcgatactggtgccaaatagcaatgttcagtggcggatccaagatttaattttagggtggacttagttatacatttaatataattcaaaacaacaatttacaagctaaatttagggaaatcatagtaaatggccccaaatcata

SEQ ID NO: 242735 - DNA, 490 bp, Cannabis indica
tttgtgacttctatttttagtcacaaattttctaatcacaacgtatgaatgctaatttataattagtcacaacgtaaaaatgctaatttataactaaaactaaatttttttatatcgcaacttgtcccatcaaaaatgctaatcctcatactaaataaatacattataattattgtaaatacacatatgtaaagaggtcaattttcccaggtgggctcattcaatattcatgcatgcatttttgtggttttgtggctattttgttgttattcattttgtctgtctctctctatatatattatatggtccaaatgaaagaaagtacgtaagaagaagcctttgtttaattacatacaaaagaataatagtgagtagtattaattggaagctgcagtttgttgatcaatccagtgaagggccggggagatgagaatatttgaatgtgatgttgtttggtgtgtttgaactttgaagtagacattattaatat

SEQ ID NO: 242736 - DNA, 2103 bp, Cannabis indica
aaacacctcatcaaaatttagtagttgagcaaaaataccaacatatcctaaatgttgctcgggcattggcattccaatcctctcttcccctagtatattggcctcacctaattaacaaaactgtttatattataaataggactcttacccccttattacaccacaaaattgcctatgaactcttgcagaataagcagcctacctataatcacctaagaacatttggttgtttagcatacacttcttctctaactagcaagagacataaattttcccccgtgctcatgcctgcatattcattggttatcccaattgtatgaaagcatacacactacttgacttggccagtaatgctatcttccattccggggatgttatgttttatgaaactatttttcccttaaaaggttcttaaacctttgatctcaacaccttttttgctaaatctactgcaagatctcatcctgctcctattatcccttcccagcacatcaacatcgaactacctactgatccccctaaggatcccatactccctccccccatagtatctgctgatataaagaaagcaactaaaactggtagaaccaattctaaacctacccatttcaaaagatttcatatgcaattcttccactgcacatccacttgacaaatacctcaagtatgtcaggctccacaaatcctttaataatgctattctccaagcatatatcgaacttgagccaacattatacagtcaagcatcaaaactctcccaatggcttaaagccataaataatgaattctttgccctcaaacaaaacaactcatggtcctttgtatctctccctcatggatgccatattattggaaacaaatgggtatataagatcaaatacaattcaaaaggtgaagtagtacgatacaaggctcatcttgttgcaaggggatgtaatcaacaacatggtatcgactatgttgacacctttgcaccagttgcaaaatttaacactctcaaactctttcttgcccttgctgccttaaataactggccccttcaccaaatggacataaacaatggttttttacatggttatcttgaagaacaagtctacatgaaaatccctaaaggctctatgtacatgagggggagcttcctccaaatgttttttgcaaattgaacaagagtttatatggtttaaagcaatcttctaggcaatggtttgctaagttaagcactactctacttagcaatggctttactcaatctcccaatgatcatttcctgttcactagatcataaaataacactttctttgcactccttctctatgtcgataacatagtcattgcaagcaataatgacttggatgcatttgccttcaaaaccttcttaaacttgaaatcaaggatcttggtccacttaattttttccttggattagaaattgctcgatccaaagcaggcattgttgtctctcaaagacccttcaccctcgaattctcactgaaactggatcacttggaatcaaaactatctcgactcctatggaggccaacatatcccttagcaaagacattggaccccttgtttcatacccaacatcttacagaagcctcattggacaactattatacttaacgatcacacagcctgatatcacttttgtgtcaaccgtctcagccaatttcacagtgaaccacgacaacctcacatgaaagctgccaccagaatcttacaatatctaaaaggcacccctggccaaggtctcttcttcagctgctctgcatcaacaccaaataaccctttccaactgcatgttttcttagatgctgactggggaacctgtctagacaccaaaagatccatcaccaatttctgcatctttcttggcccttctcttatctcctggaagtccaagaagcaagctacagtctccaaattttctgcagaagtcgaatataggtctatggcaaatactacatgtgaactcctttggctattcaacattctcaaagactttggcatatcacactcgactcctacagccctctactgtgacaaccaagctgctctccacatatctgtaaatgttgtatttcatgagcgtaccaaacatat

SEQ ID NO: 242737 - DNA, 5041 bp, Cannabis indica
atgtatgtcaaggaattagggtcaaatctatttctattttagctttaccaaaaacttgatctcaagtgtgtggaatgtatgttaaggaagggtcgaatctatttctgtttcagctttaccacaaacttgttctcaagtgtgtggttgatggaagtccttggacgtttaatagactccagtttttatttggccgagttctaaaggaggggacctgaagtctatgaacgtgcgatacgatctgctacggtgtacattggtactgttgttgagtcggatcctaagaataattctggcttttggctcgagtatatgagagtttgtgtgactgttaatatcgatgaacctttaaaatgacgaatgaagatgagacaaaagggtggagaatagttttgcactaactttaaatatgaatgtgttccaacgtttaacttagtttgtagtattatcgatcattctaagaatttttgtcataaagttttcgatacgccagtggaggagattatgaaatcgtatggtaagtggatgtgagttcagccaaagaggcagaactatctgttgcattctcaatatcgttggtcaggtaaggaggtgttgagttgaattgggatagttttcttgagaatgatgttgtaccggttgatcatgcagctttcgatattcaagacactagaaaaggaaagtttctagggatagaataccaaagaattgattttgtaaatcaaggaaggataatcaagaatgctctcaataagggtattattattgcaaataatattcctaattttgtgggaaataattaatgagttggcaaatagtagagttggtgttaaaatgggtcatcacgaaactaagaggcattgacctaatgatgatgagaatgagtctcatgaggctatggctatggagactagcatgaatactattgtggattttggttcgaattttgatgggctcgcaaaaaatgggctagatgtgggtcttggtttccaggcccgctaggtattatgagtattttgagttggaattttcgtgggcttaggaatccatgggctattcaattccttcggtgtctcataatccaaaagaatcctaattttgtttttctttgtgaaactctttgtcataaggatgtggttgaaagggtgtgtgtgtctttgggtttcgatggtatgatggcagttgaagtttttggtaggagtgatggtgattctcttttatggcaaaataaagatggtattgatcttcttagttttgcttataattatgttgatattgaagttatctcgtttggttcttatttttagcatttaactggagtttacggtgagtcgaagagaagcttgagttctgagtttttagatcaacttcgtgcacttgcgatggaaagtaatctcccttggtgtgtggttggtgacttaaataatgtgctttcccaagatgattaaattggttgattgagggctttcaaaatacccttcaagttttgtggtcttattgattttgaacttactagtcatcagtttacttacatgggagaaaagtcgtgctactaataattggttagaggttcgtttacaccgagcgtatgtgactaatgagtggatgctactcttccccattgtgaaattgtttaacatagaagtttcctcatctgatcattgtcctttgttgtttgacatgtatgttgctgcttttgtggcctaacaatgcaaatttttctttgaaaagtgttggctgcgtgaaccattttgttatcaagtggttaaggattgttgggagggttgttctttgtttggtatttaggaaaagattcagctttgtggagcttttctacttgagtggggaaaagatattttggtaattttggttctcgtataaagttctggcaaaaagagattaagagattaaaatagggtcgggacaacgattccattcagaaatataaagaggcataaaataatctatttaaagtaatgactcaaaaggaagttttctggcgacgaaggtctaagtagttatggttccaagaagtgatcataattgtaaatactttcatgctaaagcgtattctagtcatcgtgtgaatagtattcataaaatttggcgtcttaatgggagttgggcggactgggatacgggaatcccaaatgtaatggtgaattattttagggagctttttgctccttctgatatcgatgccactgaggttcttaatgggattccttgataaataaatgatgcagacaatgaggctttgttgaagcctatatgcgatgaaaaggttaaagaggcttttttccagatgcatccagataagtcgcctggtctagatgatatgactcctggattttatcaaaaatgctagcacatagttagggttgatgtggtgaagcaagtccgttctttttttcttttttggcgacttacctgctggattgaattagactaacatagttctcgtcccatagaagaagaaccctcgaaaaaatggatgatatgtagcctatagctctttgtaatgttctctataaagttttctctaaattgttgatttatagtttgaaggaagtattgtcttatattatttttgataatcaaagtgctttcattccggatcatttaatttcagataacatcgtgattttctttgaggttatgcattatttgaagacaaaaagggttggtaaagaagggtatttggctcttaagttggatatgattaaggcttatgactgggttgagtggtcttatcttcatgctatcatgctaataggggttttaatatttggatagtggagttgatttatcggtgcatttccttggtaagctatactattactcatggtggtcgtgatataggtcctattatatccctgacaaaggtattcatcagggagatccactgttactacatctgttcctaatttgtgaagaaggtttctctagtgttatcaagcagtttgaggctaggggtgtgttacatggctgccaggtttgtaatgaggttcttgtaatttctcatattttatttgtggatgatagctatgtttattcaactcctccaaacatttgagaaggcttctggtcaatgtattgatgtctctaaatccacgattttctttagtatgtatactatccaatatattaaggaattaatgtgtgggatttcgggaatgtcagaagcctctgctgatattatttacctgggtcttccttgtatgatgggtcataataaaaatgttatactgagctttctgaaagataagatgcaaaggagaatttagagttgggaaggaagaatattatcaaaggcttgtaaggaggtgttgattaaaacggtagcccagtctttttcgacttctgctatgtcagctttttttcgtatagtggatttgtgtaataaactagaagggttgatgagtaatttttgatggaattttggttcttctcactctcgtggggtgagttggtttagttggaagtgcttgtgtgctcctcgtaatttcggtggtcttagttttgaagcttgcgtgagtttaatctttttatgttagggaagtaagcttggcgtctagtcaccagggagagctctcttgtaagttgtctcgataaggctcggtattacccacgtggttctttcctttaagcttctcttggtcccaatacaagttttatatggaaaattattttggaaacccaagatttagtgagggttaagactaggcaatcagttggccaaggtctgatattttcatagttagggatctgtggcttctatattctacgtcttcttatatctcgtctagagtggggttggatggttgtaaggtggctgatctcatagtggtgggttcaagagaatgagaattggacattaatttaggatcttttaatgaatgggatagagagctcattattaatattcctcttaatatttttttgcagtgaatgatctttgatattggtctatggatattaacgatttgtaatatgttgaggaagcttataagtttctctgtaaggctgattcttttaggttaagtagtgatgatgtgaaagcttgaaagatttcttagagccttcatatttcgcttaaggtgaaccaatttatgtggtgtgcacttagtggttgtttagccaccaaagtacagttagtatgtaaaaatgttcctcttgatttgtgttgtcctatgtgcaatcaagccgatgaatttatttttcatttgctagttagctgttctttttctaaagcatgttggacttgatctattgtgaacgctagtagtgtagggggattgatttttgggtatggtttggtaatttaatgcagcaacatgttggttgttctggggtgtgagaggaggtggccatggttgtttgggtggtgtggcagacctgtaatacttagggtttggcagaacaagactccttcagcgattgaagtggttctttcgactcgtgcagcccttaatcaacggacaataactcaattgaaaataaggggttctttattttcatctacagttttggatgaagaccttgagcgttggactaaaccagatattaatatgattaaggtaaatgtcgatggagagattttcatgtcaaaaatgaagttcgacataagaatggtggctcaggatagtgatggtcaattggtggaagcagcctcgttgtgtcattctggtcacgtgatgaatccaactttggcagaggatgtgaggataaaagaagctcttagttgaattaaggctaaagggtgggctagtgtgaagcttgaagcagattcgttggtagcgatttaagctatttctagttcgttgaatgtgccttcttcttttggtcaaatagttcatgaatgcaagattttgttagcttatttaccatttattaaattatgttttgttaaacgttctgttaacaaggttgtttattgtgttgcttgttcttgtttttattcatatcgtaattttagtttagagaatgctcatgttgaacttttatctattgtaatagttgatgcttattaattaatgaattg

SEQ ID NO: 242738 - DNA, 3382 bp, Cannabis indica
tttacagcatgcaatgaaatgtgttcagaatttgggaaccgatacacgaaagagagcatttaaaacctgggcaaggaaatataaataaacataatagtggaaatggcaagaaccgagatgaatgggtagagcttcacctgatcactgtagccagcattgcgagacataacaaccccccatcgactcccagcagttgccatagaggtcacgtgaaagccttctctccattttttattgatccatttgaagggaaatgaatcacttactttgtaagattgttgagaaaattgagttcctgcaacattaaagtgcagaattgagtacaaccacatcttagaaacacataaatttgtatatgtgtctgcatgtgtcttaaaagtttcggggttttcaatatcaactggcaatgacaacaaagctaaaataataattgaaggggaaaaaaactaccttttgacatcacaacaagtgagcttccattgttggaacctgcaatagaactaatgtaatagttcttctcccattgttccataatccattcctgtgtatttgaaaagaaagtcaatttaatagtcccagacagtatccaagcaatgacaatgtgactataagcaattaaaagtacacagacagaaatataccttatgtaaaaagaagggtgatagttcataaacttggcttgtaaagccagtcccagcgtccataataagtgcccagagattggaacaagatgacacacaacttatcagtaggccatctgcaacacctttttcaacgtgttgagccaatcttgcatcagccacattataatggtaccttaattacacaataataaacggtgatcaggcaaaacacaaatggataataatataccttgcctacacagcgcggcataacttacagcggacattaatccaagaattcattttagtattaccaacagaacaaaataacataacctaaaattcagaaattgcacctctgtttcattggcggccgagcattgtaaactgaaatccattgtgtcgctggaactcctagacggaccttcttccttggttgcccatcatcatcttcctcaatattcaatctacctcgtttttgtccaacttggctaataatctagcaacaattacattgagatagtgcataaatacgttatacttaataagcatgagttgaaatgagaaaaaaatcacccatgtgttcacactactttaccttttgagcaccgtcaattttaagtggcctaccggcgggatttgaaccgatcaaaccctcgaataaagatattaattttgaatagttgggctcttcatcaaatttcatgttaaccacaatctccagaaactgcttcagaggtgcagggcagaagcagcacaacatttcaggagaagttgccatctttttcttgcaaactagaaatgatttgttatcaccctgaggaatgaaaaagtcgtagagaacgtgaataaacaaatatgtggaaaaatcagaaaaaggaccaaaacaaatatataatatcaagatatggtgtacctgataaccctgccatggtaacctccctcgtaaaagaaaaattagggtatatgctagagattccagatcatctcttctactggcagttcttcccaagtgagcatgaacactagcatatcgaacagttcctctgagaattgaacagaaagaaaattcttagtcgaagttaaaagagctacatgaaaactaactactgccaaaaaactgcaattcttaattcacctaaacatgtcaggacgctgatcatattcaacatgctggccattagagctgtctttccactttgttgctgaaatatcatccaattacaaagaaacacaggagattataaactaaacaagagaattgaaaacaaacacaaattcaaaagatgaaatgaatttacttacctaatccaagatcaacaagaaataacttcttctcttgtgccgttgatggctgaccgagtaaaaagttttctggcttaacatctccatgcacataactgacaaaaagaatataagttaaatcaaattttataagttacaagatgagaaaaaaggcaatttcggatatagattggcataccctcttgaatgcatcttctctaagattgatagggactctacggcaatacaggccaccatttctgcagacatcctgtatatatgcgccagtgcaataaatttgagtcagtacatttagaagtagtcatcccaactggaagtataataattataactcccaattttctaccaaacacaatcagtttaacacaacaaaatgagccttgaacaatctctatcacaaagaacaccccttttcagtttatgattcacataaattatattatacatccaatgcactttagcttgaatgcacttaatcgattaagcaaatcaataatacttgtggtcatataaaatatttggttccccatgactacatattaaatttattggtaaagcctgatgtgtaaaaagaataaacaataaaatgcttgataatcctgaatacttacgcctgccctgaagtgttccatacatcccataagctcggacctagcatgtccataacctacagtgacgtattacacaatatagtttcataagtaaatcacattggaaaaaaatacgataaaggaacacatgatagacacgaagaaggaaaaaaacagcataccataacatagtaatctccctgtcttcctttatagtgcactttaggcactccgtgactaccaccaagggtgctgttcaaagaaaaccaacattaagaaacgaccattcactgaagatgtgtagatactatatgttatcataaagaaagaaaatgaaatagaatacccacttgtagacttgccactcataaggaggaccataattacaacctttgctgttcctatgctcaaatttaagagcaacctgataaaattaaaaacaaaacattaattccaaaaaaattaaaagatacaaggttcttctataaaataaaaacaaaaaactgaaatttaggctggacgaacctccgttgctccaggaccgctcaagcgatcacttcccccagtaacacgacgaccaacaaaaacctgcccaaacccacctttacccaacttcctatctaccttgtagagcggtgaacctcctacttgaaccttaaaaagggaaaagatacaaaaagtttcaatgcaaaaccaacaatagcaagcttctctataatgatacaaaactattaacatataagatcattcaaaccgagccaacaatgtcagaaacaacaagcgttagtttagagtaaatgaatgaacaatggagattttctccaacaaaatcctgaaagtataatttatctgctgacaaacaat

SEQ ID NO: 242739 - DNA, 1171 bp, Cannabis indica
ttgcttactggaaacccaaaaaattaaatgtgatatgatatgatatgatatgggcttactatcagtaatttgagatttctaccatgtccttcgttgcacatagttcttccacctaagtatgttgcaaactattatggtggttgttggttaaaacagttcgagtgaaatatggtgtctttaatttctgaacccatttgagaggaattttattaagacatgtggcaattagctattagaaaatcgtgaagctggatgaatgacttgcgttaatattattatcttgaattgtacacattagtgttgacccggtccaaaatttcttttgtctaatttttctgaaatagttggattgtgcaaattgaatctcacttctaggtttagtctcaagagaaacttttgttcattttatcctattgaatatgtatgcagattcctctagtacttctgcaacccaagctgaaaaagaggaggtggattcccgctctatttatgttggcaatgtaaggtttctatcattgtacttattcttttgcattttggattttgttgattatttactcttgcgcagtctctaagaaatttatgcaagtattatgtgtcattacatatttttaagaatgacttgatattttgatataggttttccctgtctggttgtttgctttagtttcaaggtctctgtcacttgatgtgtgtaaaaggaatctgctactttctcacaacattgggaaacattgcaagtcgttgttcatgctatcatgatcagcttcaccaaatgttagacccacatagttggcaattcaactctgcattagtctatgtagttactagtttggtattctgaatttgctttgtgtattcactacatatactttttttttttaaaaaaaaaaaactcttctgtttttggcaattcactctgcattagtctatgtagtttggtattccgaattttctttgtatattcactaaacatatattttcattcattttccttgaatgaaaagaaaattaattattcatgcttatagaatttcttcttcttcttttttttttaaaaaaaaaactaggatcccgcctaaccctacaatatttggggacgaggaaactataacgattgctatgtaggtacccagatgggactcgaacctaagaccttgtgggagcaaac

SEQ ID NO: 242740 - DNA, 948 bp, Cannabis indica
tctttcttccttgtgcatgaacaatctctcctgagtttggatctccgaaccacaaccttgggttccaaagcttactccattgtaagcctcttccacgaactcacactgctcttgttttgattctcagcactgatctggagaaatatttggatctatgtaattttctctctgttgtgtatctgatctgaatctgagttttttctgttttgtttctttgttgataaaaattttggctttttatatgctgttgtagaggagtacagatataggagagttagttacaaagtttgttaaaacactttgtaactaacttagctaatctgtctaggttgtttagaggccaaaggccacaataagtttttactacttgtaatcatattgtaactgttctggttttacagtaaatatggggatttactttcaagagagatgatactctatacttatcactttattactcgaaaggattgtgtacactagcatattaattttcacaacaactgttatccaattataaagtgtcacatggatttatgttggacaccttaaagtgtcaaataacaatgctcatttataatgttataattatgtacattctatctttctatatgtacaacaactaacataatttttgcattactattatgaattgctaatcaattataggatgtcatatcaacatcttaaaatatcgaataacaatactcatttataataaaataattagcaattttgtctcatgaactttcgacactataacatgccccttaaaatatattgtttgctaaaaatttccccacaacttttacatttatagaaatttagtcattctgttaagttttgtctcattattccatttaggctaaatagtaatatttccccttgaactttgacatataccaaattatgccctctgaactttttttgccgttaaaaatttcccctgaa

SEQ ID NO: 242741 - DNA, 526 bp, Cannabis indica
ttttgaaaacggataaaaaacagtgttaaaaaggctatttttatgcatttgccaaacacaacttagcattttaagtgggactttttatcccggtttttacataataaccgggataaaaggtcctcatacatttgggccttttaattgttgggccgactacacatataaaaggaacaataacttttagggttttatttttattagggtttgtcttatttttcctcccacccgatctctctctcttctatctctgtctaagcggctgcccacatggagatcaaatgggctctatggtgtctctaagctgcaatccttccatgttttctatttttcgtgcatcatcacaggccagcggcctttttctggcgaaggacgagtcaacggagttcagatccgacctccatgccttttgaaacttccaggtacttctttttcttttttgttcttgagagatctatgctccacgtcctctaatcttgttctacttctttttttcttttttttttctttatttttttgaaatgcc

SEQ ID NO: 242742 - DNA, 758 bp, Cannabis indica
actgtgatagaataacaggaaaaaaaaaagacacgtacaaattttcaaatgttagaaatgaactcccaaggacacaataatgcaatagtgtatactatggaactgaaaagagagagggaaaaaaaactaaacaaaacaagaagaaactatattaactttggcaatcagcatatacccaacaccaagcttgacctggtaaattggttcagtatacatataataattcatatgcattgctatgaattgccaaatgatgaatccattcaatttctgtagttaactttaggccagtaacaattaaggtaaagcttgaggcagttactgcagtaacaacaacgcctaatggattactcactttagcggcataacatgaagcactgaacagttgctcatcatcagtaatgacacccttctcctctaatcttttctttatctgttcacgagcccccacataagtaacaccatatacagaagtcatcactgtctgtttcaccaatttcctatcaacctgaaatcctccaaatgtcatatttagttagcacatgtcactaaagatacatatatcttagttgagaacttcaacttttaaaactctaaaaatacaaacctggtcgattaagatcttggctaatgaagcacatgggtggcgagcaggatccttgttgctgtccttaatcataatagcgtgaaccctacaaaggttatgtatacacattaaaagattgagttgagcccaaaatatacatttgttttttttt

SEQ ID NO: 242743 - DNA, 518 bp, Cannabis indica
ggcctcaactgctttgcctcttttttaagaattcttctttgtgggagaagaagaagcagcagggacaccttgcacaatctccctgactgaaggctcagtctcctttgctgtaatgatttttctcttcgaacaggtctccatggcagctaggaaactcgtgttgtttgtagaaaggaaaagacaaatagttagtataacagaataaatatgaaaaaaaagataacatgtcatggctacaacaaatggatcatcagcaacttgctgactctcccactttctccatcccactactagccgaataacttttccaagaaatacagatattctccctgaacagtctaggtcattccgaatggaattctccccctcaaaggaattcacatctttggacttgctctagacagaataacaatttcactttatttgtcctcttcatcatcccagagaggcattgtccaagagtcatcagaaaagagagcatccaagtagactcactgacatgacattatcaagaaaaa

SEQ ID NO: 242744 - DNA, 462 bp, Cannabis indica
tgagcttgaaaggctgaaaacatggcctttttacaccagaagcacaagccagccctttccctttaacttgcggatcaagccgcaatgcctcctcaatagcagcctgggaaacggcctcagcatgtccaaaatccaaacttggtattgctgcagccaatgaatgagcagcatggaccatatcgggcgtaacagaggcaggggtgtcactgacaatagtggagtcagtgacaacaggttgacttgcaaagagatttgggttcattggggtgggaatcataacatctagaagatctcccaggagcactcaagttagaagagaggccatttgagaattaagcagtgaggtaaaactaacagattgagcaaggaaagggttgttaggttgaccctcatgaggaaagtcagtaatatcaagatcggctatggtaatagtgttggaatttttttaccaggatcttagat

SEQ ID NO: 242745 - DNA, 736 bp, Cannabis indica
tctttctccaatcgccattgaactcctcaaccacggcttacagcaatgaatttctctttgattcaattcccaataccagacccataccctaactttgagcaccatcaatggcggtcacacgcgaagacaatgtttacatggccaaatctcgatgttggtgggcacacattcgaggagcgaaacctattctccgttgcttacaagaatatatggctggacctcgccgtgcctcgtggcggatcgtctcttccattgagcagaaggaggagactcgtggtaatgtcgaacacgtgtccaccatcaaggaatacaggtccaagatcgagaacgaactcgcctccatattcgatgatattctggatctgcttgagagaaagcttgtcccttctgccaccgccgctgaatctaaggtcttttacctgaaaatgaagggtgatatccacaggtaccttgctgaattccaaaatggttctgattgaaaggaggctgcctaaaatactctttctgcctacaaggctgctaaggttaggccttttggtttgattcgattcatttcatttggatccattcacttttagtttttctgattcgatttgattcatttcatttggatctattcacttttggtcaatcgaattccacctctggtcatgggatgtttttgagatgtcaattttatttattttgccatcatctgaaaaattttattttagacgattgtgatacatgaaatgga

SEQ ID NO: 242746 - DNA, 657 bp, Cannabis indica
ataaaaatactagagaaagacttccaaacatgtaaaaatgtctttaaagaacaatatcatactcatttaaaacttacatcttattagaaactaaatttactaaatataaacagtcagtaaatacgataatacgagaataacagagacgcctacatagaagagagaccttgtagcatagccgaagcctccaccacatgcggttcaagcatactaatagctggagtagcaacaaaacaaagcacatcctcattagattgagatataaccgccctcatgcttaactaccttttttccaagcaaatgccagaatccacaaacaaattaaattttactaaattcaactcagaagtcaccccgctatatgagaagaacaagctaattattggatttattcactacaaaaaaaaactacttttagtgataatttttgtcacaacataattttttttatgattaaatatgattttagtgacaataaaaagttacttgtgactaaaatatagtatttagctacaagttgtcactaatttaattttagtgtcacaacaagtattgtgactaacaacacatttagtcacaacaaattgtaatatttatgactaatacttttagtcatggatttttcagtcacaacataggaatagtgatttataatta

SEQ ID NO: 242747 - DNA, 1035 bp, Cannabis indica
aaattttttccatatcatatttggtgtataattttgacagatacataataaatctccatccttcatcctacttccagcctgaaaatcaagtgtaatctgaaaaacgccaaactgccttagcatgcttacaactaaacatggcatgtcccacaaattcacaagcattggaacacaaactacacattgcttatgtgattattttttgctggtataaagcagcagcagaaggaagggaattctgtataattttctagccgaagatcttcacttttgaagggatatttaaaccccaaaatgactccaccaagatgaggctgaattcgaagtggaagaggaatgttgaacctccaaagagcatgcaaagtgataacctgattgaaccgtatattccccatgaactgtgtgattccacacccaacaatcatatggagcagtagtggacaatggaatagtgagaattttatcaatatcaacagcaaaaaaatccatttgaagtgattgtaaattccattcatgatcattggtaatataatcagcaactttggcatttggtaaaccagaatagaatgctagtgtgaagattgattgacctggaatccaaggattataacaacgaatttgcaatccattccccaccttcatcctcaatcctttaacaagcaactcacgatcccaaacaataccatgccatgttagcgatgaattattacccttgtttgccatcataaaattacaattcaaaaaatatctcgcttttagtatacgtgacagcaaagaatttgaattgagaaagatccgccaagcttgtttagccagcaaaccttggtaaaaatggacataagaacgaaaacccaaacctccttccatttttgttttgcaaagaaatttccacttttttcaatgagtctttttcttgtcttcagttgaaccccaccagaattgtgccatcattgtatccaactggttacaaaagctcttcgaaagtttaaaacaactcatagcataagtgggaattgattggactaccgctttcag

SEQ ID NO: 242748 - DNA, 877 bp, Cannabis indica
ggttctccgagcactacggtaggacttggattgatcatgacgagaatggacttctccgtaatgtaatagaagagtcacagtccagttccccgggctttctcccttctcgaccagacgaaggagatatgaattccattcagacgggttttattatacattaataatttaaacatataattttaatacttggtataatttgctgtttttattttctcaatgcaattttattaatcaaaatagatgttcagtaagtttctttcatatacattagcgggcattattattaatatttaactaaaaaaattgtttggttggaaagtaatgaaaatatataaaaatagattaatatcattttggatcacgtattatacaaaatttactatttgaatcttcaattttgttaaataataaattagaccctgtattttttaaaatggtacaaacacagagtccaaaatatttaccctataaaattggaagaataaaataaaatttaaaatttaaaatgtataaaaaaattgataaaaagattaattttttttctcatctttgatttttccttccatttcaaaatacagtatagtcattacgaaaatagtggaaaaatcattcaattagaatattattccaatactttgcttgtttactaataagcaatgagaatcaatggtaagtaataattattcactttcatttgtttattttaatttattaaaattaggaaaggaagaacttgattaaataaaagataaaagaaaatgaatattttcctcaccaattttctaagaaatgacaattaaaggtatggattctatttattttgatttatttatttttaaaattaaatataaaaagataattttgtcctttatatgtc

SEQ ID NO: 242749 - DNA, 601 bp, Cannabis indica
ttagttagggtgttacagatagaatttggtttgaagccttgtaaatattagagatatttagattctctagttggaaaatgctatagagttgtacatattttcttggaggaatgaaaatcactggattcatccaacaaaaaaaaaagtacaaccctaaagatcattgccattctagtaaagaaggcaagactgatgacagaagtctcctttaaaaaacatcagactacaactagaagaagaagatgaaaaaaattatatccgtacaagccggcagttcagaactaatacatgtaaaaaccaaaatacatataaaaagttatctattatagttggtcatggattttaagactatgaagacgtacctacacctacaggagagcttaaatattatagcatttctattttatgtgacacattataattagttgacagtttttcatattatttattatatttaagatttggtagactcgatattaaaatacatcttttgtgatgcttgacaccttaagatgtcccttagtatttctctaaatattaattgaatgttgtatcgtgatcccgtatgttgtatagacaatatgggtagtccaaaatttaa

SEQ ID NO: 242750 - DNA, 534 bp, Cannabis indica
aggtcggtccgcacacctgatttctggactgaggtaagaaaagtgttatgcatcacttcggattaagtgattggtgattgtgtttattatagtctcaattatgatcggcatcctggttatgtgtttattatgccttggttatgaccgagggttggaaacagtcattaccgttacgagtaattactcttgaaattacggataggtttcttacttatcgtttgctgtatcggggaacgatattgacatacatagctcgtggttatcgagtggtaacggtactttatgaagtactgagattgtgtgattattattatgaagttgtataagcatgttagtgtgcgatgtgttatgtttgcgtgcattttgttacgatatgattaattgaggtttatgttgttatggtttaatcacttttttggctgagtctctatgactcataggtgctaatgttggatatttattttaccaggatcttagatctactcacaagtatgttatttaaacaccctaaatgtgaactttctaaaacgataa

SEQ ID NO: 242751 - DNA, 752 bp, Cannabis indica
acttgaccttggtagacttacccaaaatgcactgctcacagaagtccaaatcttgtaaagcatctttcccaacagtcctttcttcttcaacacttccaatcccttcaagctgacatgtcccagtcttttatgccatagagaaattgaattggttatttcttttgaagcaactgaagccaggttgcttgaggtgattccttgtagtacataaactccattgatcatggaacctttcatcattaccattgatccttttagtaccttgagaattccaccttcaacccttatagaacacccttctttgtctaacattgccacagaaatcagatttctcttaatgtctggcacatgtctaacttgatgaattttcatagtggctccccctgataattgcaattgtacagatccaatcccaactattgagcatgatctattatccccaagccttacagttcctccatcaatttccttgtaattaaggaagtgttctttatctggacatatatgaaaagagcatccagaatcgatcacccaatttgacttcacagaaccattagttactaccattacatcagcactttcatacccttcatctgaagccacatctgcatttccataccttctgtgatctccctttttcaattctggacagtctttctttagatgagaagttttgtgacatatgtaacatcttttcttgaattttgactgagtctttcccttgttcatgtttccatggttcttgttctctc

SEQ ID NO: 242752 - DNA, 1101 bp, Cannabis indica
tcaaaattctgagtttgttcaatgaataaatagacaatcctcctgtctctaaccgttacaattaggcacaatatttggcatcactagtaagtgaatagtgaaaagtcttgtccttgtgtccctatgccaactgtcaatcattgaaatactcttattggtcacctgccttaagctacaccaactattaccaaatacaaatacataaataaataaaacatggaacacttcaattaattataatatttttctactttgtgtatgtaaaaattagaacatttatcaagcaccataattaataatatcaaatcaaaacatcacaagcaatacaaaatctaaaaattaagcataaaaataagagacaaaatttttatatggaaacctaatgtggaaaaaactacgcagaccgtagttcgattaaatcatccactatcaccaaagtttaataatgagattataagttttttctttagtaaaactagaggctcgcaacaacattaagattaaacaattttagattactaaaacaaccatcatcatcatcctaaaaaataaatacgaaaaagtttaagtcacaccaagtgaatattgtagaagagcaccttagagagaacaatcgccaaatatgaacggtagataggtagaatacctttcaatgatttaccacatgaaatttaagttaaaatagatgagaatcaatcacttgatctccaaattaaagtgtcaaaacctactttctctctctagatttcttctctcctttccctctcttttttctttctttctctctctactggttgtgcttgttctccatgacacacaccaaaaacaaccaacttctcattttttttaattacaaatgggttgttgtctttattttggtccaaggcccactaaatgtggtggacttaacaaatctccccttctgccttaattagtgggctcaactaagtccgctcttcgcctacacgttttaagcttctccttagacaaaacctttatcaacatatcggaaccattctcattggtatgcactttttctaagtgcaactctttcatattaaggacatcacaaatccaatgatatctaacatcaatatgctt

SEQ ID NO: 242753 - DNA, 688 bp, Cannabis indica
aaaaaaaacaaataaattaatttaaaaattaattatttaattttttttcattctcagcccgacccttattcttctctctccctttcgtcttcttcattagaacctccatagccaccatagtcagaagcttcagccatcgttttcgcttttcccactcagtatcctatctctcttgaaccctaatctcactagccccacaccatcgcatcaccccaaaattcaggtcgtcgtcctcaggttctccctttcttccctctaattaacccagtgctgccatcatcacctctcttcattaagctccacttctcttaaacccattcgaactacactacccctagatcaactggtgtcccctatttatacaatgccttgtcattcccatgcttcccttttttaccatgtccttctttctgcctatatctgaaacattctgagcaaaatagatctctagcgagaggtttaaaaatgcctcattatcgaagcctcatcctgcaatgcctccaatatgggcattttagaagttcgacaacccaatctccaattatggactttgaattaatggtggtgcaaggtgaagaaatacagaagatattgaacaagagcttgcaaaaagaaaaaagataaatagtgttgagaatcatagggttccatctcaaaaccaattggcaatgagtggagtagcccatgt

SEQ ID NO: 242754 - DNA, 836 bp, Cannabis indica
ttaaataagtattttcttcgatttcacgcaattcccatgggttcgacctcgttcttcacaatctccatactacaataaaaattcgtgcgcttgcgagttgataaatgtaaaacgtaccatttcggtatacaacatattggttatttgggatgggtatttgtgtagctcttgtggtaaggtttattagtgaatgggatttatttttgcgggtctggagaatcttaataattgtagcccttcggaagagaaccaagttcttaaagtcttggctaaatcaataccaacaactattcaccattttccatcttatttctattacttgctatcatttgagtttaatctatcaaagactcgaccattgaagcattagaagaaagcattaggggaatccaaacaaaaacgaacaccaacatgaacctcatgtaagtggagattcaatagaatctagacaagaagcttgaagaattgatgggccgaatgactgttgatgcacagattagcaagatcacttaccgatggtacaacagccaatgacgactgccatccccaagtggatgaaggagtagattcacccctggctgcgtcaaaaattctgccaggccagccaccaccaccatcccagccaaccttgttcttctctgcacagttgcccaacttggaattctgatgtccaagaatgaatcttctactatttaatggagacaaccccaacgactagattttcagagctaaacaatattttctcttaagccaattaacagattccatcatacttgaaacatccatcattggaccatctctaatggaagatggaaaagttaatctatatttagcac

SEQ ID NO: 242755 - DNA, 883 bp, Cannabis indica
acataaaaatatttcattgttattaacaaacttcttcatttttcgatagagtcttcactggaagctacaaactcaattgcaacatcttccaatccatcatcgctatcactatctggatcactgatattatgtttaggaagcacataaacaaaaacattaatgtcaactctaacacagaaattacaataatcatcattccacattcgtagtgcgtactcaacaatcttatcagtaacatgatacagagaggtatggagatgtgtatcactgagcatttggttaatggtttctttttcatccgtcttgtcactcttcatcaacttctcatgtggaatagaaataatgttatcgtaacaaactccaccatcaatgtcgtggtccagcaatgattctccaaattcttcgtttgattgattttcgggaatacgtgaaaatttagcaaataggtgaattatataaaaaaagaatggcccatactatctacgttgatgttgttaatagtatcaactgattcgatctggaatgacggatcacctacaacactcgagtactggtactcatcttctctataacagttctactcaaggatagagagtgtggatgtaaagagaccacacacacatatatacactaatattaaccattataaataatttttttctatatgttttaaactattataaataattcgcattttttttaatttttccgatgattataaaattttatacgaataaaaaaaataatcttcaaagagaatacatattgaaattagtgatcttgagaaatgtcaaaattttcacatcagttgcattaaatattaatattggaactgcacattatcattacttattaatataaaataatagttcatttttttttt

SEQ ID NO: 242756 - DNA, 552 bp, Cannabis indica
atttttgccacttaccctccacagactaccccaattcagactacaacacaatataagtcactgtcgactactgttgctaccactaaaacaaaattgattggtactactgatttgaacaaaactcaatctgatgtctatggaaaagaaaacgtacaacctaaccgtgttttcaaacgacaattcggctctaaatccacgagacaaacactcaaacggtgtagggccaaaaattcttaaaatttttcttcactggatgaagaagctgatctcaatcagtctatttccacagataaggtggatttgactaattctcaagacttttcaacggagattgctaagcaatctcgtggttcgccatgaaaatcttaagttggaatgcacgggggtttgggaacccgagtgcattccaccgtctgcgtttgcttgttaaagagcaaactcccatgttttgtttcttatgaaaacaaaggttactgtccattctcttgtacgttttaagaaatctttacatttcaataatgtattagaatatcctagagttggtttgaaagg

SEQ ID NO: 242757 - DNA, 944 bp, Cannabis indica
aatttaaattccctagatatttataaatctatctatttaaatttgcttccaaatatttttatctatttataatatttatttttttcatcttaattattttactttaaattctctttgtaattatcttattttttatgtatatattctatcaactttttccttaaatctctttattttttaactttaaattatctccttattaattctcttatttttctatgttttttattttattttatttaattaaaagatcactaattaataaaaaaaattgcataatcatgataactaataaataattatatataattaaaaaaatattaactaattatccaaaaatacataaagaataatttattttatgtatagagcgaatttattgaaaaagatattaatgatcactataagtgagatacaataataacatcaactttaaatatagtattgaatacaagtgagatacggaaataatagttgtttagaaattatatgatgggttttctatagatttattatcttctttttgttatagatctctatttttgtctgagcattgtttagttttaaatttttctttactgtaaagtacatttgaagatatttctttatattttctttttttatataagaaatcgtataataatttcttttttttagaattgtttaaatttatctatataaatttattatttttttaaacaaatattttcataaaaaaaattatcactaatcgaacgcaaccgcacgcgaagcgcggcttgttcactagtaaattatataaatgtatatgtgagtgatagtgataccttcaaactcgagaagaacagcaaactcgagaatgcgaaaaggaaggcgaaggactctccggtagcctaaaaagctctaatgagcgaagaggatgagaatgattcagaacatattcacacattcatacacaaaacaac

SEQ ID NO: 242758 - DNA, 3266 bp, Cannabis indica
aattacataaattaatatttttgaaaatttatataacaaatatcttcatgaagttactattactccaaaaagaccaattaaataacaatataagtttttggtgtagatttgttgttattagtcttgttttatttttgagtaatttagttaatttaaataattagtaaatagtaccctttcaaaacaaaaaatacaaatagtattataatgatatacattagcacacaatatgaatcagtaaaaaaaagaaaatattgcttctgaaattaaagattcaataatattaaattaattaaattgattgtaatatttaaattttaataattataattatttttatatgagcttctataattattgttgaaaaaaaatattaaaattattttttttaaaaataaagaacaaatatttcatccaaaaataatatgagagtaatacaccatgaaaaaaataatagagaagtcattctatactaattcaccatccaccgtgtatacagtgttaattacatgattatgaaaactgattactaaaatacatgtctattttataattttaataaaaaaatacattaaaattataaatacatatttaatttaatgattaactctttatttataataaaaatacaaaatatataacacaaattaaactaagaaacgaagttggtaatattaaaaaagcaggggacttgaataaacaagacacgaaatccaaacacgacatcaaattaagtttgaagtcgtgttggacttactttataaaaagtatgtcaatggtagtagacatatatttacaactccatgtccacctatcattgccataactgtggaggttgaaatctttttactctcaatctcaagggtgttcactcttacatctgatggggtttagagatgaacaaattctctcagccaaacactctttttgtggaaaatatatatagtgtttgaaggtacaaacaaaccaccataactctattgtgatttttgtgaccaaaagactattgaatgcagtcactgcactcacttatttatagttcattaaatgcattttccaaagtttcaataacccattcatgggcaatcaaatcaggttccataacagatatttacatagctaacaacatccttaatgggtattcgaaatttcaagactttcggtatgcccataaactgtttgatgaaatgtttcacagagacactgtgtcttggaatacagttattgctggtaatgtaaactgtgggaaatttgagtttgcttgggaagttttgagaaacatgagaagatttggatatgaacttgatggttacacatttggaagcatacttaaaggagttgcttttgttaacagatgggatattgggcaacaattacattcattgttatgtaaaattggttgtattggtaatgtttattgtggaagtgcacttctggatatgtatgcaaaatgtgagagagttgaggatgcatttttggtgtttgaagaaatgcccgaaagaaatgctgtttcgtggaatgcgttgatttcgggttatgttgaagcgggcgatcgaggtactgcgttcgctctttttaaatgtatggaagaagaggaaagtgtgaagtttgatgatggtactgtctcaccacttttgacattgcttaatggtgttgagttttatcagttaactatgcagattcatgggaaaattataaagcatggtgtggaatctaataataaggtttgtaatgctttgattagttcatattctgattgtggatctttaggagatgctaagaaagtgtttgatggttcttttgaaaacagagatgtggtgacatggaattccatgattggagcttgtttagttcacaacaaagaagattatgcatttaaactctttatggaaatgcagtggtttggatttgaacctgatatatatagctatactagcattataagtgcttgttttgaagaagcacataagaactatggaaaatctctccatggtttgattacaaaaaggggacttgaacaatcagttccagttaataatgctttgattgctatgtatcttaagtcaaataacagatccatggtggaagctttgaacatatttggatccatgaagttgaaagatcgtgtttcgtggaactcgattctgactggattatcacaactcgggttgagtgaagatgccttgaaactgtttgcacatatgagaaatttagctatagaaatcgatcactacacattttcggctgtcctcaggtcttgctcggatttagcaaccctccaattaggccaacaggttcatgtattgtcacttaaatcgggccttgagtcaaacgaattcgtcaccagctcgctgattttcatgtatgcaaagtgtggaatcatagaagatgcaaagaaatcgtttgaaaacaacccaagagacagttcaatcacatggaattcgatcattttcgcttatgctcaacacgggcaaggctacattgcactgaacctctttgaagaaatgaaaaacaaagaagtgaaagccgatcacatcacattcgttgcggttttaacagcttgtagccatattggtttggttgaacaaggctgcaagcttttaaaaacaatggaaaccgagtatggaatacctccccgagcagagcattatgcttgcgctgttgatatgtatggacgagcagggcatctagacaaggcgaaaacattggtcgaatcaatgccattcgagcctgatgcaatgctgtggaaaactttcttaggtgcttgcagggcttgtggaaacattgaactagctagccagattgctagccatcttcttgaagtggaacccgaagagcattgtacttacatactcctttcggatatgttcgggtatctaaggcgttgggatgaaagagcaaatgtaaagaggcttatgagagaaaggggtgtgaaaaaagtccctggttggagttggatagagattaagaatgaggttcattctttcaaagctgaagatcgtttacaccccaattctgatcagatatattttgttcttgaagttttgatgtttgagtttagaacaacactagatgttgttgatgatgattttgatgttttgattgacaatttggaggatttggctttgttttctgaacctattccagttgctttgttttctgagagtggaatgcaagaccatctcctccgaaagatgtaaaaaattgagttatattatatttagcacaacaaatagtgagataattatataaatattattttttgt

SEQ ID NO: 242759 - DNA, 339 bp, Cannabis indica
tgaattttttttaaaaaaaaatctcatatgacatcggttacttgtaataatcgatgccagagggtgataaattttcaatgaaactacatatggcgttctatgtaatcaggagtgcaattctgaatcaggagtgcatatagtgtaattctgaatcagaagtgcatttatttttggtgtatatagtgttttatgtaatcaggagtgtaattctgaatctatagtggagtcaggaggaattaataagttatgaaatttacttggtaaatttcagatctacttattgagagcttggttatataggaccacggtccccacactaactgggataatattgttttg

SEQ ID NO: 242760 - DNA, 2157 bp, Cannabis indica
tgtcattttttgttctctatcttaatctcacaactcacaataaatcaaaataatatcttatttcttcaaaaatttcaaatatcacccattctcacatcttcattctcctccatgactcaatgttagtaaatatttttctctcaatattcatcataagtcaaattcatctctcatacattttctttatttttgcgaaatataaaatagaggagattcaagagaagaaattgacaacaaataagaaaactcttattttatagattcaaaaaaaaaaaaaatacaaagttcggttttaggcaatttgaactgatcgaaccgcggtttacaacggtcggttctaaggaagtttctggattcgtaggtcagttttcgaattgcaccaatctagaccgaaaaccaaaatttggatttttatatgaaaaaatctgaccaaaccgaccgatgttcagcccaactttctctattttattgttttaaaaaaacattaatagaaaaatattttggagtgagttttttttaaaaaaaataataataaaaatattatctttagtaaaaaaacaataatagaaatatatttttcgaataggagcagttagttttaaaaaaataacaataaaaagatattttttaaataatgtccaatgagtttaaatttaaattgcaatgtttaaaaaaagaacaaatttgtaaccacattttttttttgagaagattagaaatttgtattgcttcaaactttttaatctatacaaataaccaacactttctttttgaaagcctgcatacgaaacttacacacattaattataattgttttcaaaccattctatatatattctcctcatcttttttggccaaatcgatgagattctcatcttcactttctgttgaattcgttagtgactgactatggtgtactcaatttctggtgccatagaacttcatttcgacttttccatatatggtagattcactaaattgtagcaacaatggtcgtggcacagacctgctgctgaaatctggtgtgtcttgctcgtttgagcgttctcaagagctgaagtagaggggttgttgctgtgattctgcatccaagccagttgacagtagcttcaagatattttctactgaaatggtattcaaagaataagtgcaaattgctttcatctccttgctcacaaatcaagcatctcttatctatgacaatgataattaaagcaatctatcctttatttgtagtcgattaagtacaacaagccaaataaagaaacgatgtttaagattaaaaaatccccaaacctctccataccagctttgatattcatatttcgggacaaccaaggagtatccttgctgaattgtgtacctatgttggagaaattgttgcatatcgatatgatgttttaatctcttaaacatgcacaatttgttgccagtaccagctgctttgggtggaactcgtatagtcccaccaattgcttccttttatgtatacattatgcacccatttgacccacaagttgtcctgctttgtggctactacccaaacatatttaccaagggcaaccttgtgacactgttttagcaaaatcatgatttttcccaaataggaatgtattgctattaaaactagattgatgagtgttgttcttccagcaaagaaaatatgttgtgagctccaaattcgaatcatgagaaccatctttttaattaaactcaaacattcagcttgtgaaagtttccttgagcaaataggcaccccaaggtaccgaaatagaagttgacttcttgcaaagccagaggagtctaacacacattacacctccgattggttcattcctgagcagtatatgaaagacttctcaatactttgttttaagctagaagtttctagaataatttaagccattgaagaagtcaataaattgaattgtaatctccatggaaaaaaagcaacacgtcatccgcaaaacataaatggttgagcttgagttcctttcatcttccatgaaacttgaaatcttttttccttcctactttatccataatccttgataagtattccatatcaagaataaagataagcgaggacattggatctccttggcacagtcccttttttacttcaaaaaagccatggagttcaccattaatcattag

SEQ ID NO: 242761 - DNA, 615 bp, Cannabis indica
aggcatctctaatgcttgaagttgcagcttgaaccttgattactgtgaacacatctccatcagaactgtagttatcatccactacaacattggaatcactgcccttgtcttcttcttccttattcttctttttcttgtctcttcattcccaacagtttctaattaagtgacccactttgccacaatggtgacacttaatggtttcccttggtcttgatttggatcttaaatttcctctggatcttgaattgtatctcgatcttgaatttcctcttctatgttgtctttctcgagccattaaagcttcatcagatcttgattcttgctttgctgccttttgccaattcaattaagcatcccttgatctcagagttctcattacgtcttccaaagtgagagtgtccctactatacattataaaaattcccaagtctttaaattggttaagcaaaccattaagaacaatcacaacttaatcttcttcattaatggtttcctcatgttagtagagccaaaacaattctattcacatcatctatattctgttctaaataagcagtagcatttaatttaaaaccataaaatttcccttttaagaagatctatgtgacagtg

SEQ ID NO: 242762 - DNA, 542 bp, Cannabis indica
tcgaaattctagcatttaagaaatgcaatttcgaaaattgattaataaaataaagaaaaaatatattttgaaaattatttaaatttagttgaaaaaataaatttcaactaaaaatatatggtcattcttaagaagagatttcatgttgatgatgtcaaatggcctatgtatggaatggatgaatgtatggagcatatattcctttgatgtagcttaacattccacctttggagattctccccgtggcatatctatcctatttctagatcaggaatccatgtttggaattgggttaagttaatttggggtctcaacacaaagagcataaatgttgattaagtttttatctatgcttcagttgtggtggatactattttggctcaaactaaattgtgatgtcataattggtttggacagttcgtgtattgcggtggtcgctagagacaattttggtcaggtggtctggatttctacgactaggttagacttttcagatgctttttgtggcgaggtggatgcgtgttgtgttggaaattatttta

SEQ ID NO: 242763 - DNA, 860 bp, Cannabis indica
aaagagataaaaatgataaacttaaaaaaaaaagtaaaaataaaatatgacaatataaaaaaggtatagaatttaattttctcagaataatgacattgcgagcctttgaaaggcttgtcaccataatgggcctaaaattatatcggtcggcccctaagttataaggagctgaggcaagcctggcccatggacctgggcagctcacatattttgggatagatcctatacccattttttggtgtttaatgaagaatgctaaatgttagaaataataataaaaaataaaaataaaaaaaagtgaaaattattttatagaacttttttttttagaaaaagttaaaaatacatgaaagtaatataaggtacctggtttttttttcctataaaataagtttttgaaaaatgtcaaaaatgaacagattatataaactcataaaatttgtaatttcttaaaaaaatataaaaaaaataccatctttttaggttattattattattattttcaattaatctttctagcttaaaaattcatactccctcaatatgattcataatttttttaaaaagtaaaattttccaattaatgtttcgaattcattttgtttcactcgctaaatgttaaaaaataattatcttgctagtgaattgtgatgaatctaaagtaaaggtgttttggtaaatttatttgtttcaacttcgcgagtcgtattaaaaagctcaatgccatgtagtagcaaatattaaatgtatgaaacatgaaaattaacaaaagaaaatgaaaaagaagcttttcaaggttaattgtttatgtcttataagagaagaacaaaaagattgttgatagtgaaggcagcctatat

SEQ ID NO: 242764 - DNA, 565 bp, Cannabis indica
tatataaatcattctaaaatattttttctctctcatctacatgagatttgtcacattttttttttaaataatctaataatttacaactctaaaagttatccaccatggtctcaaatcacattaaattaaaaaaaaaaattaggtaaaaaattattttcttctaataaaaaaatatcatgtggccattgtctatattgagcaacattttacataaaattggtcttaaaaattggaccacattacatatgtgacaagaccacttcaagtcactactacaaaaatagtttttctcgatgtttttaaatagtcgtttaaagtattcacgtcggtttctattactgtcgcctatacgaaataggcaaaataggcgacggtctaatgtggacttcccgacggtttgaatgtaataaaaaaagaagaaaatacagatttttctgccattaatggcagaaaatctgcattttccctcattttttcctgcattagttttataattttacttaaattaaaataaaacaactaattaattttgttacaataacaactaactttaaaacacattaaa

SEQ ID NO: 242765 - DNA, 741 bp, Cannabis indica
ttgttgagaataattatagtatagagtaattaagtaactaatatataagtatagattattagatagcggaatagttgcatggaaatggggctgattttggttgggactgttccctccctaactctattctctatgctatgctacactactactactactaattcattattatttattatttatttaaaataatatatatttgagaaatgctaaagggcaccattggtgcctagcaccctcctacgtgtcaatatcactattggtgcaattaagtatcgggtcccatatagtttaatataataatttttatagagtatcgctagccaattgcaagtcgacacatttagaaggtgctaggcaccactggtgcccaatagcaatgctctatatatttatctttgagtatatattggatactgttagtagtgttagatgtgtttttgcgattaattaacaatactttttaaaaattattatgttaaattatatgatattcgatactaatagcgatattaatatataaaaacatatggggatattctttatgagtgtaaaaaacttccatatcggttaaaaatatattattttattttatatctctttcacattatttttgatattttttgtttaaaaataatccaataataagtatttttaaaaattattaaaataatattattgttataaaataatataaaataatataaagtagatgagaagaaagaagaagaagatgaagag

SEQ ID NO: 242766 - DNA, 543 bp, Cannabis indica
gtttaattgttggaaagaaataaaatggccaagcagagtgactctaaactttaaaagtacgaggaaaggtttgcaaccggattcacaaagaactttgattttatttggaagttaaagtcgcagttgcgggagctgtgtcccgagttgtttgattaaatttcgaggacgaaatttctataaggaggggatagttgtaatatcccagaaattaatatattacttaattggacatattttattaaatatgtaattattttggtaatgaagtatggttatgatcttacttagggtaattggtgtgaatttattaaatgattaaataaagcgtaatttattaattacggagattatatcaaaatatgtgggtatcatggataccatttttgaattaaaatattttggggttcggcgaccgtggaaactagacaatgtggttaggaatgacacgacatttaaagatggattattttcgaaaatattccagactagtttagaattttagaatgtcgatttgacggattagctagaattgccaaaaatgcc

SEQ ID NO: 242767 - DNA, 484 bp, Cannabis indica
gcggcgcttaactggatcaacgcaaagggtaaaatgaggtggcgatggaaattgattccttagtagtggttcaagtggtgtcatttgatttgttagttcaagaatattgtaagatgtatattgtcttatttgaaaaaagttttttttttatattttactaaatgatgtgtaagtaaggtcactcattcactagtgagtgagtcttgtgagtattgttttatattagattacatgtttaatgtggataatgttccttcagatttgatgtctattaattatcaaaagatttgtttttattcaaaaaaaaaaaagttatataaagttaaaatataatttatttagcaataaattacaaaatataatttataaagaaaatgtctcatatgtcatcgctgccatttttatctttttaattaaaaaaaatgtaattagctaaaaaaaattaaaagtatgttaagtacacgtaggatcaattgagcaacta

SEQ ID NO: 242768 - DNA, 607 bp, Cannabis indica
taaacgttcagggggcatgatttagtacatgtcgaaattcggggaaaaaaaattaactaattagctttaagtctatatagattgtgggcttattcaccaaaaaaccgaaacatggaggtggggatgaccatcaaagaacggagccggccgcgatatcgagagtgcgactgggatggtgagaccagggagtggaaataacacatttgactctcttgtcttattaccatgattagttaaaaagaaaatattaagtaatagaaataaaaatatgaggagcaaaatgattagttcaacttgtggctggcaatttgttcttggtcacttcgttttcaaagttggtcctttttcttttgtttgttaaaataaaatgagagttctatttgcacttttattattgaaaaaaaaaattaaataaatttttaaaattactcttaatattttttaatttttttttctacattattttatgttaatttcaatacttattttaattttatttttatatttttttctaactcatgtatattttttttctaagaaaatttcatataattttgttgctataatattcaaaatataatttaattttgtttgtataggtattttt

SEQ ID NO: 242769 - DNA, 3589 bp, Cannabis indica
aagaatgggtgattaaaaaggactcaaagaaagcagaagtgcgtgttggtggaaaagaacatacagaagaattccaaccagccaaaaatggttggaaagtaaaagagaaagggcctcctacacaaacagatacgaataactcatttacagttcttgaacaagctggtgaaactttagaagttaaggcagcagggggggaactagtaggtggagttcaagagcacaatacaagagaggggggaggtccctctcttgttcatggatagaataatctgttggaacgttcggggaatcaatagccagcaaaacaacacaatgtcaagcaatttattgctcttcaaaaggctggtcttgttggtctccacaagacgagggttaagtcttaaaaacttggagacttataccaaagaatgtttcaagggtggtgttttacatcaaacttagcttggcacaaaggtggaagaataataatggcatggaatcatcttcttttcaatatcgctatcatcaaatgcactagtcaactgattcattctcatattgagactataaataacaggtataagttctttatcacctttgtttatggtttcaatgatgaaaatgggaggaaagttctatggaatgatttgcgtagtatttctaatcaggagccgtgggttgtatttggtgatttcaagaatattctctataaagaagagagaattggagacaaggcaagaattggcacttttacagctttcttagattgtgttaatgattgtcaaatttcagatgtgaaaagcagtgggtgcttcttcacttggagtaataagcaacattcaagtgatagaatctattccaagattcatcgggtactaactaatcaatcttggatggatttattcagaagggctgaagctctctttcttaatgggggaacttttgaccatactccagtagttttgaacatatatcctgcttttcctagtggaaggaaaccattcaaatacttttgtatgtggtccttgcaccctagttatcatacggaagtcaagaaaatctgggaaaaaaaggtagttggatccaaaatgtttcaagtggtttcgaaattgaaagcattgaagattttctttagagaactaaatagagatcactactttgatattcaggcagtagagagaaaggcaaagcaagacttagatgaaattcaagggctacttcaccaaaatctgttagacttaaatctgtagaaaaaggagcaagaagcaagagaactgtatgtgaaaatccataaagactactgttccttcttgcagcagaagtctaggataaagtggctcaaagatggggatgaaaactcagctctttttcactcaagcatccgagagagacggttctgtaatagcatcctatttattagtgatactgctggaaatagaattgaagatcctgatgagattacaaaggttttcctagctttttatcagaatctgttgggatcaaagatagagaatagaagggttgtaatcactaaactagtcacacaaggtgcttgtgttacagatcagcatactcagattttgatggcagcatacaccatggatgaagtcaaagaggctgttttcagcattccagcaacaaaggctcctgggcccgatagatacaatagctccttttaccaagataattgggaattggtcaaaaatgatatatttgaagtagtcacatctttcttacatacaggccagctgctcaaggaactaaactcaacaattattacacttgtgcccaaaagcaaatgtccaaatattgtaagtgaatatatacctatagcttgctgcaatgtactttacaaagtagcaactaaaataatttgtagtcgcttgaagctgattctcccagatattgtagcttaaaatcaaggtgggtttataaaagggagattcattgctcataatatcatgatctgtcaagacttgataagaaactatgggaggaagaatgctaaggctaactgtatgataaaacttgatctgcataaggcttatgacacactggaatgggactttttaggataaatgatgcatgctcataagtttcctgctttctttatcaaactaatcatgacttgtgtctcaactcctaggttctctttactcttcaatggatccttacatggcttttttgtagctaagagaggacttagacaaggggatccaatgtcgccccttctatttgtactgggaatggagtacctcagtagaatattgaaggcaattggagataaagaagattttcacttccatgaaaggtgtgggagcttaagaatcaaccatttgagctttgcgaatgatgttctcttttttgcaggggtgattacaaaagtatatatttgatgctcagaggcctcaagttatctcaatgacctcaggccttcaccctaatcaatataagactgctctatactatagtgggatagcagatgttgaaataaggaggatcattggagcctctggtttccaaaagaccagtgttcctttcaaatatcttggagtcttaatttgtgccaagagaatttcttgagctgaatgttcagttctagttgaaaagatgacttcaagaattaaagtgtgagttccaggaatctgtcttttgctaaaagagttgtactgataaattcagtacttttgacaatacatgcttactggagccaagtcctcatccttaccaaaaaaaaagtaataaaggagatagaaagtatatgtagaagcttcttatggacatggaaaagtaatatgaatggtcctggaagcattgcttgggaaaaatctttgcaaatcaaagaaagcaggtggacttgggtttcaagatatagcaaaatggaatcaagctgcggtagcaaaacatgtttgggcaatttccaataagaaagataatctctgggtgaagtgggtgcatagtgtgtacattgatcaagaaaattgctgggggtacaaagcccctgaccatagcagcttgtactggagcagagttgtaaatgtaaaagaggtagtgcagctgattttgcctccagatcaatttgttgcatcaaatttcaaaatagctcatatgtacaagcttttaaatcaagaacaaagaggcttccatgttagcaagcaagtttggagcagattaaatgttccaaaacacaactttttactcttgatagtagtacagaacaggatgaaaaacaagagacagacttcaaagatttcagatcattgctgatgcttcttgtctactgtgtaataatgcagtggaaaattctctgcacttattcttcgattgcaggtatgctcagttctgcttacaagattaaaaactggctgaactggaggtccaaagatgaatccctgtagagcgtattgagatggattgatcgagcaaagttgagcaaattcaaagtaagctgttacacagcttgcattgctgctttggtttacaagatatggcaatccagaacaaaatgttatggaccaaagagagtattgatccgaaagtattcattcagaaactaagtggctggtaaagaataggattacttgtgtaatgcttaaatgtatagatc

SEQ ID NO: 242770 - DNA, 620 bp, Cannabis indica
ggatcacatcactgccaacatggaccaatatttctgaaaaaaaattggattcatcccatcaggaccgggggacttatcaggatgcatttgaaagactgcctctttaacttcttgatccaatataggccgtagtaaagcctcattatgctcatctcggacagtaggcacaacacagtccaacacttcctcctagctagtaggttcggcattaaagatctccttatagtactcaaccacgacattctcaagcccattatcccattgtctgaagttaccctcagagtctttcaacatagtaatgtgattatttcgttttcgcgcagaagctttagaatgaaagaacttactgttttgatcaccagcttgaagccataactgtttagatctttgtcgccaaaaaacctccctttggttaagaacagcaaaaagctcctttttagcctcatagaataatctcttcccgtcctcatcacgtcgcttcttatattgcttcaacaaccgattgcattgcttgatgcgagaagaaaacttgccaaacacatcctttccccattgctgaagagcactaccacattcatgtattttccgaccaatatattgccccgctaatgaagaccaat

SEQ ID NO: 242771 - DNA, 1249 bp, Cannabis indica
cccaacccgaaaacacttcccatactcttattaactgctctttggctgctacttgttggcatcagctaggtgtcctctatcaaactcccttcgccacctttgttcatggctcgaataggttttttcttctgctgccaccgaagacatgtgcaaaatagcaatggtttgctggatgttatggaaagctcgtaaaaaaattttggaaaaataaaacttcctctttgaacgagattatggtatcagcatttacttctcttgatcattggagaaaagctcaagatattacttcatcagctatattttttgacaatataggtgatcaaaatgagctttgggttaaaccggagatacgaaccatcaagattaatgttgatgccgctgtacttgaacaggaaaattcctatgggtttggttttattgcccgcgatcatcatgcttccccactccacattcaagccatgtatcatggaggctattttccagctgaaacaatagaagcaatgggcatcaaggaagcactcagttggattaaaacaaacaactggaaaggcgtcatgattgagagcgacaatatgttagcagttcaagcaattcattctactcagccaatgacttcggtatttggtctagttgttagtgattgtagaaatttattatcctctctttccaatgttagtttacgttttgttagacgatcagcaaatcgagctgcccactttgttgctaggcacgctcggtctttatctggtcgtagcattcttgggacttctattccccctgatcttcaaactattttgtattcggaatgctaatttaatgaagttgcaatttcatgtcaaaaaaaaaaaaaaaataaaaaaaaaaactactttaatatgaaaagttatttatttattaattttttaaaggaaaaaactacttaaataaatgttctaattcaaaatgtaacaatttatgctgattatcaaacagtgtatataattttaaatatattaattatgtaaaaaataaaattttaaaattaattaagcttaatataaagaactgagaaaatttctactatcttcaacaaatcacaccagtaaccactagtaattgttctatgagtaactatccctgcccactggtgccgaacaaagaaccaccaagaatttcatatcccatagcgatttggtcacgccttaacaacaacagcaatataataacaaaactttttaaatatgaatatgtttttctaatagatatagat

SEQ ID NO: 242772 - DNA, 584 bp, Cannabis indica
ttttcagtaattgactttttttttgttatttatttttcaggatctttatgggggaattgaagttgctgttagatagacgttagaattttttttttgtacacgtatttttggcttttgaaatcataacaatatcattctaacaataagaacaataaagtaaaaaattttaatcatattatgagaataatatgtttaagtaaattagatgcagtatatattatgtttgaatttttttatatgtttaggtttaagttaagttctcactacgaaattcataaagtaataagtatagtatacaatacaatatattactaaagtacttattgtgaaaatattttttttataaaattgaaattccaaagaaccaaataattctgtttttgtcttatttatgttgtcaatcaattgtaaatgaatgcaaactcttgttgtgcaatctaagcaaaagaaaatgaatgttcttgtgttatcttttgtttctttttaggcttcaatactgcttcattcttgcaagatcgtttgttgtgtccttttggttgcaatttccacatttgatttgtaattgcaactcaattatatttttg

SEQ ID NO: 242773 - DNA, 573 bp, Cannabis indica
attcatctattgatgtgaagaagaccaagtccatggatgaggtcctcggaattgaacccattcttttctctgaggaggaagatgatactgaagtcctggtgaatgctgaggaagtacattcgcctgctctggatttgaacagtattaggagggaggagatacggatggacttttcgcacttcctggaaactaagcaatacagagaagctcagaatctttctgctattgcagttgcacgaggtaaggatgtaattcctcccatactaagatctggtaacatagttcgaaacttggattcaaaatttgctggctccccgtctaaacaaaaaattaaaatcacaaaggaggatatccaagaagaggtagacttttggaccccttcaataatctgttatgtacttggggctaatcccccaatgtcaattctggaaggtttgtgaggcgggtttggaaagataaaattgacaaagtggggatgatttctcatggtgttttcctggtgcgttttaggagtattgcagaccgtgatcaaattttatcaagaggatatattttcttcaataaacgcccggt

SEQ ID NO: 242774 - DNA, 721 bp, Cannabis indica
atataataatgagatgtgtgagtaattagtagtatgttttattagccgtaataaggatacatgcatcctccctatacttagggatttgaaaataaaaattgactaagtatatacatgtgagtactactgacaataaaacttcaaatgctcgacattccaagctctttcaaaaattgaatcgttaagatcagaatggcgataggttgcatttctaattttttcagcaatgaggtatggaccttcccagttatcgctaaaaactccatgtgttgaattgcgagtatttggcagattttactaagtactaagtcttctactcacaaatttctctccttaaactttgagctaaagtaatgcattgtgcattgttcataggctacattttttatttgagtttgatcacatttttcttccaataattgcagttggaaaagtttccccaactcagtcctcgatgttataaacatcgtgacaaaggaaactagcacctacgtcaactgggaccatgtctttgcctcatatgaaagagagaaggggttctgctaattttttatcatggtgtggtgttgtatgaccataatatgccatatgcctttcctttcttcaagatttcctttgatggaatgtttgattatcttgttgactgccttggttttctcattactttggggttgtgcgactgtagaaaaagatttctgtatccccaagtcgttgcacaatg

SEQ ID NO: 242775 - DNA, 982 bp, Cannabis indica
ttatttgcatatgcagattattcatcatagtagcaactttgaattgaaacattattatcacaataatgatatcaaaataaaaaaaagggctcaaaagtttttatgatacacttattatactgctttttgataattttattatgtaacgtttgtatgaggttgaaaaaagtatataacattagattagatacgattacgacccaaccaaaactcttcccttattatcttctttctgacttttctctttatctaaagtaagaagataaggcaattgttttactttgggtgaaaaaagtagtattctaacggtttaaaaaacgttgaaactaatagatatatatgtatactttttcattactcaaatcatcataaatatttcacaatagttgttgttgtagtaataaaataaagtgaaaggtaagtttaagactacatatctatttctattctatataaagtatacctatataattgaaattcttagtttttgagaattatatgggtgacttttaatttttatttaataaaataataaaatattatttatctataataaaataataataaatatcctaaattaaatatttgaatttcaactgatattaacaatcacctcaattaaatatcctaaaacaattgaatcacctctaccacaatcgaaaacagccacgatctaccacctccgatccccaccgccgtcgacagccacaaccccgtcgccgaaagggtactctctttatctctctctctgtaaatgttatctaccaaattcgagtactgagaagaattttgtggtaaatcgattaatccagttttccggttgatttgatttttttgagaaaagggttggatttagattcagacgtgatgggttttttggttacaatcctaatttttgtataagggagtttcttctccgtctcctcagacagataccatacgagatagtaaatcaaatctcagagtaccataaagtcatgac

SEQ ID NO: 242776 - DNA, 726 bp, Cannabis indica
agcttctacatggtatcagaagtcttccatggagtcctcgattccatctcccgatcctactccctctactgttacaaatcctcctccagaaatgacggcccaatcctccattgctagctcctctgtctggaatcccttttccagttccctgtcgacatccctcacgatcaagcttgatcgtgcgaatttcctttcttggaaatcccaagttgttccaactgttattgggcatgatttagatgaaattctcttcaatggcactcctccttctcaaatcttgatcaatggcaacccaaaccctctttatcaacagtggaagaaacgtgatcaactcctcctttcatggctcagatcgtccatgactgaaggtgtcctggcctcggttgcaaatcatcatacctccttcgcggtttggcgtgcgttggaacaacgctttgctagtcaatcgcgtgctcgacttttacagcttaaaggtcagttttcaaatattcacaaaggcaatctctcgatttctgactatgtggataaagtacaaagtcttgctgattccttggtcattgctggttctaacattagtgatcaagacattgttcttcagatcttgaatggattaggtgctgaatttgacccggttgtctctggcatcacttcaagaagtgactctttgtctcttgatgaggttcaagctcttctcatgtctcatgagagtagacttgaacatcacag

SEQ ID NO: 242777 - DNA, 7884 bp, Cannabis indica
catcaccattataatatatagaatagaaatctactaatctttcttactacattacaattcgattgaagaatctaatacaaaagtattaacaaattgaaccaattttttattaaaaaataacatgttgggtggcaaatttctcaagattgtattatatatgttattatgtacatggcccatgcgtattttgcatgctaattcgattattcttcaaaaggtcaaaatccaatgagtcgtaggggagtacacttttgtactaaatatattatatagtataataatattactgatccacatcggattgaagtacccactcgatttttaagaaacaaaattaatatacaagtaatatatacaaaaaaaaatggataattatttaaagtacaattttttgtaaaaaaattacatttttaagtttatagaatttatttatttatttttttatatttttataattttttatagaaacaacaagaaaactacataaaagtaagataaaaataatatgtaaataataaaaaatcaacaacaaattaacaagattacaacataaaaagatcgtatttttcgtaaataaaatcaaaaaaattgtaaaaatatttaaaattttgtaaaaccatatttttgtaaatttttgttatttttgtgtatttgtgaaaaaaatcccttaaaaaaaataagagaacagttttcctaaaaaaataatggaagagaaaagagatcattcatttaatagtttaaacaatttttcatttatagatttttctttctctctaaattctaacatgaaacttaattttatttgttttttaaaaggaatttaataaattcttttcgcatatctttttcaaatattcataacacgaaaataaatcaaataaatttgtacttcctcacttattagctttgaaactttgaatttgtttattctttcccctttttatgttcctcgattttttttttctaaaattaaagtagttagatgtattatcaagacaggtagttattttcttcactctattattatttcttaatatacataataaagaaatttgtgttagtatttttttttttttttaaacaatttgtgttagatttaatttaatgccaagttaacactataataatagataaagttgcgtgacaaaaaaggaagcttttatctaaggatacttttttgtaagttaacattatctccttgcctttcctgtgttattatatatttaagtttttaagtatatgtttcgtcattgaattgtaaataaatataattctagctccaacttaattatttttacatatgaaagaatgaattattaaccgatggttggtttctcacattcttttacatggaaattctgtgaagggaataattgaacaacatatatataacataaatctcaacttattagcacactatcatgttggacctagctggataaaactagtctatcaataggcttttattatgataaagagaatcaatagattctgaaactaaagtacagtaaaaaaacaaatactaagagacatcacaagtttccagttaaatcttagtatttctcaatatacattgtatcaaactaatgaactatagtattagtaacatagtaataatttaacatcatgttgagaatggtggttagttataatttctaattatcaactgtattggacaactaatacttttccaagtaggagttgatattcagtgagatggatgactagatggcctaacggtggaccctccaacacatgtatatgttgtcccacaagacacaagattcaaccctttctgtatgtatttaaacataattttcatcgttatcctaaaagagaataaaatctttagactcatttcagaaatagccaatcagagccacctgcatctttgtaattcttccttttaattaattgcctttggacatctaagatctaatctcatatagtaattatattaccctctgaaattaaccaaggagtccccaatttgtactgtgaaaagtgaaatatttgatattaatgtgtattatgtggtagacagctaaacaaaaatgccaagagcataaaataaaatgatgataatatttgatacttctactaatagctaactccaactccaagaaagttaaaagtgaaaaaagtttttaaggcactcgagatcagcaagcaaggactcaaaaatattttcatatttgataatggaccaatctcattatcaattaaatatggagaaaaatcaaattaatacgaccatacatttacataattcataatcatgaagcttgatattaaaaataacaactcaaataaataataaagtctagatcagcagtccaaatctgaggtggtccttaaagaaaatttcaccatctcaagaaatgactctataaccacatatgatctcccattttgacaaaaaggaaactattaaaacgtataggtagtctctttctgaaagttaaaaagaagtgttctcaacctaagaaaattgtatgttaaaagactgtggagttttcactaaagcaggattcataaaaaagtatatgaatgatcaatgtaggacccctgtattagtggccaactcatcaattacattaacatatatcaagtagcatttgtcattaactgcctactttttgcaacttaagtaccaggagaacactacagatatctaatgttcaaaccaaaaagttaagaaagaaaattcaaaatacacaggtcaacttaaaaagttgacagaattatcagaaaaacaaaagccatcaagctagtttttgagtttgggatcaaactatatatttatttcatattgtttcaccctgaacacaactagttcctgcagcatatgaatggcaactgaagctggtattccggatgtcatattagatacggtatgttatcgtagaaccttgatcgattctttgtcaaatagcttttcctgtgtttttgcatgtcatgattttgtttgatgatataatatctaggatatatactttatagaatcctaaagattctaaactgcatcatgttttttctgtacttgttttccttttagaataattagcattataaatgatgactaataaaattgcaagatcatttaacatatagaagaatagggaattatctttactttgtttcacccctttgactagatagtctacaaatttgatttcaatagaggaaaaggccagtgcatgaagtacccatcaaagcataaatagattcaacgaacactaggttaaactatatggtttagttttaaagctttgtttttgttatgcataacaaatcaatacagccttttagctttctttcacgctatagcagattcttttaatcattttttcattacaaatttgtttttacacctgcaaagtgctatttgaatgtgaaaatgatcaagaagaaagaggtccaattttcataatatttacggatcaaggtgattctagctttaagaaactccaattgccatgtatggaattggcctttcactttttagttgattcataagacaaagctaaataaatcaagcttactctaagacaactctcagatcgtcacacaatttctcaagttatcaaaatcttttaaattgatctaggaaagacatttatgcctagtctgaaataatagtttctatgaatctggcctcatttaaagtgaaagagaactatgatatcgtatttgtgtgtgtgtgtgtgcaatttaatttcattactaaagaaaaaatgagagaaaattgtgactataagtacctttttgaacgtccaactttggcacactgcctttatcaaatctaatgtaagtaaaatttcttcatgcagaaaggtcaagcggaagacgtgtcctttactaccggacagtttgaaaaaactgtcaatgaagatatctctgtggaattgaaaaaatgtgaaagtcagacaagtgaatattctgaaactaacaaagtcgtatcagagaacaagcaagtttcagatagcaccaaggtcgaaattataaagaatgtagttggcaaaaactttgggaacttagaggatggaagttttttgacagcaccctcagctcccattgtttgcaaagaagaggctagtaaaccagaacattgtctggttgacgaaccgaattcatctgagagagagatttcgaagaaagcaaagcatctgcaagaaggccaagaatttgaggtttcacaagaagcagcaagagacggtgaattagtggaagagaaaaaccaggagccagattttgatgaaagaaatcataatattggaacgagtttgcatgctgtagaagctggagagacagagtttgagtttgaacgagaagaaatcatggaggataagattattctcgatcaaaatgtgagtgtaatcttgcatcagcaggattctgttgatgaagaaagtactgaaaagaagacaaaagactcggagaaagatgaaagagagaaaatggaggaaagccaaccagagctatttaataaagatgttcccagcatattagaggctacgtccgatcacaataatgaggtctcagttcataccactgatttgaccttaagcagggatgatcaatcagacacgaagactaatctcagagacgaaaaggtagactataacatcaagatagaaaccacacctttaaaggaggaatatgcagaagaaagggaattcaaaggcgtcgaggaggaagacaagtgtattgatttggtgactgagaagagagggtctgaagtaacttgttactaggtgaagatattggcaaagtgaagatagagaaagatcgtataatgtgcgacaggtactggggacgcctccatctacaaccacaggtttaagtcaagaaagtcagagtaataaagctggagaccctgtgaaggacaaacttgaaaagatacttgtggcagatgatgtgggtgagcgagatgctgaaattacagaagagaagcataaagagatttctggtacaccatgccaagagacaaaccaagacgataatgaaacaagcaaactagagaaagatgaaaatccaattgaaaacgaattgcaggataagagcagctcagttactctctttgatacaaaagaagaagatattagctcacgagaattaagcaatgcagaaattcttaaagagtactctgaaatcaggtcagattacattgccaaagagagcaaaatagaagttacagagccaactggggtcgttgaggaaactgttctagtcagcagcactcaacaagatcttgatagttcatccaggaaacaagaagacattcatgaacgaggtgagaagctggatataactgaggctgcagaagaggaggcacaaggaacagaaggatccaatcttgtagccaccgatgactttaatagtactgtcgaatgcgtccaagaaaaattacagaattggattctagaaatcatggggctgaagcagaggaggcacaagaagcagaggtatctggttctgtgttggccaaggatactagtactgtcaaactcattgaagcagaagaacttacagaattagattctacaagggatgaggagcacatagacgatagtttgttgcagcaaaatgaaccagaagaaaagaagcttcaaacagacttgaacgtgatttctgagattagccatgcaggttttggtggagaatctgcaacaattgcctctgtcatcaaggatggagaaactgaaaacattgaagaaatctttgagaacaaagagaagagagaggaaccagaccctacttgcgaaacagagattatggtaatacatgtttgcaacctcttctttcagtttctaaagcttttaaactatatgaaatttatatagtaaatcaggtccttccaaaagttttatctcttgacattacattatactttttccaacaaataactaacgggtgcctcttctttctggcagaatcccttgtcaattcattcagataataagattcaaagtacagtagctgaattcctgataaatgaagcagacaattcacatgtaccgtgtctcttggttgaacaagcagaagttcaagagaaggttgacgaagcagatcaagaatcgcatgaagaagactacaaaacaaacgaaacatccaaaacagatgaaaagccttatggagatgaatcagtctatcaaggctcagagaaagataatttgcagcatacaacatccgagagaacagtgcaaactaaaatagaactggaaataagtgaaagcactgagaagcttgaggaggattgtggattgcactctaaaggaagcttagagacagaagctgctagagaggacatatcaggggaggtgaaaaaggagaccgaatttgttgatgtggacacacaagaactcactacaaaaagtaagttttagattttcttttctctatctatccagtataagcatttatgttgtgacaagaaaatgcaaacttgtatcaaactatataggtcgaaggccaaaatatgcaagttgggaaaattgttttagctaatcaataattatagtgtttacaattggaaacaataaggagaaatttaaatatggagattaagagtggaaaatagataatacattttatgagaatgttataatgtttggagtttatcagagaagtaatgcatttgcatatgatgcaggtcatgaaactgaagaaggttcaatgttagatgacattaaagtcgatgacacagtaagagagatgacggacaacccaagtgatcaagtggagattcatgaggatgaagccttgacatcaagaggtgatgatgagagccagaaatcagaaagcaaaggacacattgttgatgatgtcaaattttctatactagaaacaatccaaggtgaaaccagtaagagaaatcaagacacggtaaaagatgcagaaaagttaaatgaagaagaatacaatgcagagatcaaaaaggaaggtcatacagctgcattttcaccagagaatgtgcaagaaacattaaaaggatatgaaaatgatgcagaaatgtccaaaagagaggttagattatgcaaaacattatcaaaccagctttctattattggaaaagtttagacttttgggttaagtctagtgaccaatttgaaaattatctattttgcaggttgttgaagagggagaaagaattggagcaggtgaaagcattccatgtgaaacaagaaaggacattgaaacatttgttgatgcttcatcagttaaggaagaaggcaaagacctggatcccattaaagctttgataaaggagaataaagttgagggaaaattctctaccaatgttttgaatgacaatgatagcgatgaagtcaaagaatcagaaagaccactagagctagcatcaaaatctgaagaagatcatcaacaggctgtacagaaagatgaaccagaagagaaatttgaatgtttgctacaagtgacacctaatgaaattgggacagaaccatctagtgaacatgctagaaatataacctgcgtagaggtatgacttctaaatttttttaatatattggttccttgtgaatcgtacttgcataatgttcccatgcttcggtaactagaaaagcaaatgattgagcttgaaaagcttatggactataattagctcgagaatatcaaataaaattaactatgcattgctgcatatttccaattataattttctggtttcttcattaaatatctagtacatcaaaagatgtagtgaagaagataaattgtactctaattaaacaatttattctgcagatcttcgaggagttagaaacaactggagcaagtgacagcattccatgtaagacaaatgaagatcctgaaaagtttgttgttgcctcatctgtgaagcaagaagatcaacatgaa

SEQ ID NO: 242778 - DNA, 544 bp, Cannabis indica
cactaaaataaaataaattattattgttttatgtctctaacaataattaaataataacaaaaaataacaaattcaaagcaaaagaaaaaaattgtacgcgtaaagatgtttaattttgatttagattatattttcctaataaataagaataaaatatacattagagttttaaaatgtatctatatcatatgtattagatttttaaattactattttttacattaaaatattaattgtatatataattcttttaaaatatatattgttaactgaagtcagcaactattaattagagttgtgcgaagaaattaatgagtattaaagaagagaatttttatgtggttggagcattaatgagccttaatccacgagtcactattgttgatgagagtttttctcacaaagaattttcagagtcctttcttttaaatcactcgggtatttataggcttataatggtggtaaaaaggtcaccattatcgtgtttgtgtgagtcatgctttgcaaaatttcccaggttagatcatagggcatgattgcctac

SEQ ID NO: 242779 - DNA, 823 bp, Cannabis indica
aggacaagcatagaggcagttccccacacgattagccatgacaatagcccccacatcagtcataaattgagtaagacccataaggcccgaacccagattgtcgtggcattcaagtcaacagaatgccatctaccatcgtcaggtatcaagaaaacaagcatggatccataacaaggggaccaaggagccaacctgacaatagcacgagcttcattagctttctgaagttgaaacacaaagaattttcgacttcatatcacttcttgtaagagccaacccttggacgaattctgcatcccataaagcattctcctcagagtaccattaaagaccttctgtttagcaaagaaacaacccaagatggactttactatcgtgttattcgtaattagttcatccagttcaatctagaggttataagtcatcttgtaaaacatctcaatctcctccatagtttcttcaaccaatttagcatcattagaagttcttgaaagattctctattgaagcaaataaaaaaaaatagagagaaaactcaaatgagtacctaacaccaccaagcaaaaaactttcacaaaaaagttcaggacatgcacaatctaaaaattaaaatattaaatctgaaaatatagcgaagccaaatatgcaactcatcattgcaagagtgaaagtgaaaacactcaagacaccacaaagggtttgcaccaccactctctaccaccatcgaggtcgtactctgacattggtacggggcaaaaaatccatccccattacttgtacggagggaaattataaaatttagggtgttaataaaataattcttt

SEQ ID NO: 242780 - DNA, 1061 bp, Cannabis indica
ggttaaacgattcaactcaaacacagtccgaactcatttaagacaaacctaaagccatttcgtgcgagcttcgagtcatattatcgcgtctggtctgttttgctaatcctgtacagggttgattttttttcttttttcaaaaaaataaaatacaattatttaggttcaattttgtttgtgattcagaaattttgtttttgaaaaaagtgaatttgaagcaaaaattaaatttatgtgaaattaatttttaaaaatttgtttggttgtaatgttactttattatttttaagtattttttacaaaataatttaagtttttcattcaacaaagaatcaaaggacaaagtctattataaagttcaatgataaccaaaagcaaatcaataccaataagagcgagtaaatggcaacaaggctaatagaccgatcaatcgaggcacaaacgtccatcgtagtcatactcattttcaagtaccatactactattgatggaaggtaaagaactaaaacaagaatacaaaccctcagatctactctaacacgaaaaaattcattactggactaataaactaaatcaaaacaacaacataaaacattaaatctaaaaatagatctaagataaaacaacaacaaaatataaaaacaggaccataaataccacaccaacaggggagaaagagtcaacccaccaccaacaagctctctgcgccggagggaatgtgaaacccaaccatccctccatctcaacccatctctgagcttcaaaagaaaaggcagagggccaaaaataccaaaaacaaccgagcaaagacgactaacactgttggaggcctttcggtgcttcctctggatctcaaccgttgtagaccacaaggtcccaaaaagctcgacctcccctcaatggcgacttcaaaaatattaatataatttatttttcttaatgaatttattcattaataagaagaaaaaaaaaagataaatacttgcggacacataaaatagctagagagaattttagtccctcacatttttatattttagcatttatagtatattttatta

SEQ ID NO: 242781 - DNA, 1602 bp, Cannabis indica
aaagaagcagtgataaccttggctattagaacatgaactgcagtggatgaagcagcaggggtgtcctcctcagtgaggactagagtggatctttcctcatcagtgagagaaagattaaaacgaaaaggggatccatgtcatttacagcacacagatttgaaagtggctgcaatggaaaggggtagaagaaaggtaaaaggataacaagagatgagaaaaaacccagaaaaggagcggttacatgaagaaaactgctttggattgaagggagcaatcgggtaggaagttgaaatgaaagaaaattagttaaaaacacttaactgctatagacccaaaaagggcacatattatataaacagttttctcactggctaagtttgtaaaaattaattagaaaagaaactaaaatatatatgggcaagtgttattattttcagggctacaatcaaaatatgctattttatagtcaaatatcattattttaagagataattaatttttgtcttaatcaaattttgtatagtaaaatatttaattttgcagtttaataattcattaatcattagtttaacacctacacttatataaacacaatatagactcttacctattgaaatctatatatgtagtgtagctaaatataaatatgtataattatattttttaatttttttttgttgttataacaagtaatatatctccctttaaaataattattttttttaaaaaaaaaaattgaacacaagaaagagaaagagaaataaggcgcgtgagtgtgccacgtaactagagttccgagcaccggagattccgcatcgcaaacactcattttttccagcttgcacgttattcatttatttccttattaccattagtttctatatttcctattcctaaaacatgaacgttaatattattaaaagaaaaaaaaaatatataaacgttgtatgtaaattaaataccagacagagattaatatatagtaaatagagctcattcataatagtatcaatcgcaagacaactatataataccacaccttcacctcaaatctcaaaagcaacaaaagattttcgttatcatggtgttctctcttttacatgatatcaaataatgattgtgaagccttggttacaattaattgtttagtgattaagtttagtttagattaatagagacataagtattcttcagttctattttttacttatcctatattaattaattattattaatgagaagttagtccatagcctaaaaatggatttcacaaatggccttctactccacacatacatattcttcagttcaatttcgttgaattgcttgcatcagaaaataatccatttaatactccattaggatctgggactgctatattctgataacaaatttcgttagtgtccactttttcttctgttttaccattagtttttggaacatctttccattttttgtcagctcctcataggtttcttccgccgtaatggtacagtcacaaagtagaatgattctatcaacctgtggaagaaaatgtagctggttttcccttgtaattcttgcttgatacacttgttaaaaacctggagaggaaagtgactt

SEQ ID NO: 242782 - DNA, 1253 bp, Cannabis indica
taataaataaaaaaattaaatgacatggaccaatgaacgagtgacacgtggacactaactgtcacataacggagaggtacctacggaagttctagagtagtgacggaaggtatttttaccgccaaaaataggacttaagtatttatctgctattcggcataaaacttaggtatttatgccgcaaattactcataaataaaagaagaaaaacgaaaaattttaggatgtagtgtaaaaagccccaactctattctttgggtgcacatacataacatccaatcaaaatttaggatgaggggcaaatgtgtctttttatttacctttagaattccaaaacagtccctttgctgaaataatctgggcatcgggcttgctctggtcttctatctactaaccaaccgagttctcagctacactatcggtagtactgctctccttcacattccttctatggcgaatcagactcatttctgaatctttctactaaggtaagttacttatgtatatttcttccttcttttccgaattattttattggaatttccttgaaacaaaactggttatgctgatatatatgtatatataatactaaaaagattttggcttttgaattttgagtccttagattatggatttattccattgggtttgatattccttgtcgtttttgcagattttggtacagtagtataaacccttttaaacatgaagataagctatagtgctatcacaaaacccagctttttgcttgtacatcctgagttgccagcgattatatatcccaaacctcacttaacttcaaatcctgttcttcaaatacctcgtagacatgagaggtttatgggttggtcacaaagtctcagtattcttcttatacttctgatagaaggactagaaataggaataattctagggattcatctgttcctaaggtagacaataaacccattagcttgggcaggaaacaaggtggttcctcatctctttatagtcgtcctagtttgctagagatgaagaatgagaaggtagaaaaccgagccagggtttatgagttcttaagaggacttggtattgtccctgatgagcttgatgggttagagcttcctgtgacagttgaagtcatgagggaacgtgtggaatttcttatcagcttggggcttacagttgaagatattaataactatccacttgttttaggctgtagtgtgaagaagaacatgattcctgtgctggattatcttggtaaattaggt

SEQ ID NO: 242783 - DNA, 859 bp, Cannabis indica
agattaacaatcctcttcatccctcttactccccattctctctaacctctccatccatcctactctccctccttccaccaaacatagcctaaatgaaaaataaaatttcttggttgaaagaaattttttcttatttaataactaatatattgtttaactttcggtaataaaattaattattatattaaaagaaaataataaataaaaaaaaatgtacctaatcaatttagggagtgtagacatataaatttttctacaaatattttctcaattttacaggttccatttttgttctcttctctggtcacatcaatttgctggtttgtggggtttttaattttccttgttttggcattgaactagcttggagctttaaagttctcttcactagccattgacctgacacatcatcaacatgtgatcattgttattgtcattctaactaaagtaattgtcattagtaggcatgacttaatatctaacaaataattaataatatactataataattaataaattaaattgtgtaagattttagatttaattctattaataattatattttaagatagtgccaaatattatttgtacctactagtatttatcttccaagttctttttcttattattattttttttttaaaagcctttgaagtactaattattcatcgtaattacaataataaacagacaggacataataccaaatcaatgaaagctacaaaaactatagcaagataatatcatgtatacattattagtaaataagaaagatacccatttgttggaaaataataattcaacaaaatacatagataaaattgtggggccacatgaaaatcttgacaaaataaggaga

SEQ ID NO: 242784 - DNA, 628 bp, Cannabis indica
ccttgacatgtaaatatgttgcgattctaaccatggtttggctcagttatcccagtgatattcattatttagaagcacgcatacttatgttcatagttacatagaagaagtttgcaggatacctgttatgcctaggtgacatgctcctgaaaaagactcgagtttgacgagggtctagattcaaatctacccatttagcccatgtagtgagtcctttttggtatgcaatcattggattcatacttttgtagagagactgaccttccatgtaatagtcccacctgaattagttaaaataacacaatgaggagaatcatgagagttctttggcatgatgttatcatataaacataataaaatttatagaaaacagctaagacttgagatagatatatgacaaacttaaatgaaactgagtatatctcaccttgaatcttgtaagttgaattaagaaataaactaaagaactgtccatggagtcttgaattcaaaatcacttaaccaagccttatactttcttgtctcatttttctttctcattgagttacatgtatcaaacacaaaggcataaaagaaatgataaagcaatgaatatttatataaaattttacttacgaactccatttgt

SEQ ID NO: 242785 - DNA, 1660 bp, Cannabis indica
tgtacatgtcaagatggtacgaattagagagttcaatctcgggacgatttgggttagtcactgtccgacatatttgtaaagctgattttgattatgaatatttatattatgggttaggcaggtattaagtgggattatgatccaactaatttagttcaacataaattttaaattcgctaaaagtgagtaagtaagcataatttataaattacaaagatttatatatcatgtatgaatgtaatatgagctatatgttgataaaaatatttttaggttcggtaaccctgaagaccagattggatgccaaaaatgtcacaacagttttagttagaattattaatgggattgttgggataagtttattttagaaataccagggtattttagtgtactcgaagttggccaaataccctaaaagtaaaaatttcttagtggctaaaaaataataggaaactaataataataaagtttttattaatattatattattattatctcattattattaatatattattattataatattattttatatatatataaattatcgtttttttaaaagcttattatatatattatgtgataacataagcaaaaatgaaacgaacgaaccctcgtcctcccccttcgacgaaaccctctcccttttatattcattttcttcgattttaaatccaaaacctagtaatctaagctctagtagtagtgggatagcgaattctcagagcaggaaaacttaaggtaaggtttaatttcattttaagtttaaaacaatttgtttcatataggggctttgtgaattagaatagttatgaaggttctgaccttatagaattgttctcgggtagtcatgggtctagttctgttattttcttgctacaattgaggtaattttggattagaaattgagttagaactttatatagcttaagtccaaacattagtggcgtttgctaattaagggctcgattttagtttatattgcataagtatggtagtatgtatggtatgtatgtaccctatgaagtttggggtggtttggacaggttccgatagcatttcggtgagtgcctaaacttagaaaatcacatttttacttgtgaaaaaccggtcaattggttttggaactggtcaaccggttctagccaactagtttactatttcgggcagcgtcgggaactcgggaattgtatttttgccataaattttcacttgggtatctattttggacgttctatatactatttcgaagcttgcaacgagctctaccatacggtaaatgttttagagccaaaatatatgttttattttagtgtatttataatgtggggtttggtagaaaatcctagattgtcttatatcaatattaagcagtgttttaggataaacaattattggtttaccgttgttgtgacataggaccgagatcatcggggatagttcctcacttggtatggccgacatgtatgaatctagattaaaggtaagaaaagtatattgtactgcatagtacattgtattgtaatacaattaatattgttatataataaaaagattgattggttaagcaatgataatgtgatgatacaatggatataatatatgggctcacctgattaggtaatgtgattttccgatatatggtgctaggctatga

SEQ ID NO: 242786 - DNA, 1078 bp, Cannabis indica
gattgaaaaatgtttgcttactcgtgagaagcatccctctcgtttcggcattatgccatgagtgtatgggaggacctcttatggcttgacgatttttgcgaggtgaggcatctttcttttgctgagcaaggatagctaatccttgttagccaagaaatatttgtacctcacttcctcattcgccattggcgtcagtcatcttttcttttttttagatcaaacttcgccttctcaacaatggtatttcctcaagtgtcccgcattccacgccctcggtactacgttttatccatgcgggccaacttgtaggtcctaggtgggatgactttagcaatccgataggggccttcccaattggctcccaaaactccagctcttggatccctagtattgggaaggacctttcttaataccgattctccagtcctgaatgcatgcatgcagactctcgaattatactaccgggccaccctttgttgatacactgccaaccttatttgggctatgttcctcctttcctcctttcttcgaagaggtccatgttttctgccatggctttttcgttggactccttattaaaagtcttcacgcgaaatgaattgagcttcatctcgatgggaagcacagcctcacatatgtatgtcaaggagaaggatgtttcacttgtggtggaggagggtgtgcttctatatgctcagagtacattcagtagttcatctacccatcaacctttaagcctttaaaaaattttttgaggtttttcttgattattttattcaatgcctcgactttcccattagccaggtggtgcactaccgccgagaatcccctcttaatgcccctctccgcatagtaagaacttaacaagtctccctaaaactgggtcccattgtcagtgatgatcttgtgtggcactacaaatctacatattacgaatttgttgatataggacacaacttacctagcagtgatgttgactagtgcttcagcctctacccacttggtgtaattatctatggctactactgcatacttcgctctgccccttcctgttggcaaggccccaatcaagtcaatt

SEQ ID NO: 242787 - DNA, 1084 bp, Cannabis indica
tgaaatctatgtgtttgatagaatgagaggtagaaggccttattttaggctaatataaaatcataaaattgagatatcttatctattttgctaaggacaactgaatttcacaactaaaagatttatttggttataaattgacatttgctagtaatagaaatatcattgtgttaatatgtttgacatcttctatttgatgtttgataagtgttgtcagctgacggagatagggggaacaacgggaggccatgcccacccctaatatactttgttctttttaaaatttgtgtgcatatgaactgtttggttaaatctctcaataacctgtatgtgttgtaaaatgttaattgtgtgttttataatatgtaattatactatttaactcaagcttacctaacattactaatccaaagataccccaatgatttctagtgtaattatatttcttgtctattaactcaaatttacatgttgatatgctgatatgcttattcaaggttttggtatgtcttaataaagttcatgttgtttcagtacttgcaaaatatggacgactgttctatagtatctcctgtttgcatctttattgactattttatgaaaagaaataatgaatctgaagtattcttagaatggaaagaatgatgtatgggtcatggctagctgtagcaattgcttactgtttttaggttggcatgaggctaattagcatgagaagttactttaaagaagttatctatctttgaattttgattagataatttatatgaaaaaattaatatcaattaacattgtttaggaaaatattatctgattgattttggatatacaaatatgtctggttttctttccccatatcgaggagaaagatatcatttgaatcaatatgcagatcataatctttcaggaaaaaaggagttgttcaattatcgacattcgtctttgagaaatatcatcgagcggtactttggcgtattgaaggctcgcttttctattttaaagcaaatgcctttgtatgatttgaaaatacagaagtacattgtgattgcctgttgtgaatttcacatttttataaggacaaatg

SEQ ID NO: 242788 - DNA, 805 bp, Cannabis indica
gtcttttttactctcatgatccaactcctccacgattatattaaccgtttaatcttagatcgacttctctatataagtcatattataacaacgtaagaacacatcctttcaacaaaaaattaaaattttcttctttctttaggattttatactcagagcaataatttaaggtgtaatcgaatgtcggtgtaaaatatatcgtatataaaggttgttttatcatgagaacgtcgtggttgcaagattgttgtgcacacttcgggcagagccgagaaacgtcttaaaaaaagggaaattgtccgcgactcaaccagaatcttctatcggtaatttattccagttttattttaaatttggtataatattgtcatatacattttaaagtataaatataatttacaccaagataaatgaataatttttatacataaaactgtaaatgtataaaaaatctaatcattttttcaaatagaataattttattattttcttcttattttgaattaaaaaaataactagataaaattaatatttgaggacctaaatactggaccatcacacgcacgccgggctggcgggtgaggtgtcacttattttttaaagaaaaattatttaattaaataaatatatatttattaattaattacttttcactgccatgatccaactcctaccgtttaatcttagattgacttctttatataagtcatatctgaaaaaggtaagaacacatcctttcaacaacaaaacaaaattttcttcttccttactattttactcagagcaataattatcgtatacaaaa

SEQ ID NO: 242789 - DNA, 1180 bp, Cannabis indica
aaaaaaaaatcttttacagtaaattaaaaattatgtaaattattttaatttttaacataacatctcaaaagtctttttggaagaaactacaaattctaactttttttaaaagaactttttatatttttatccaaacacccctattttttaaaaaattataaaagctaaagaattaaaaaggtttaaaaacaactcatagaaaaggaatgaaaaaatctttttttcttaaagctcttagctaaaagctaaaaaaatattatagaagctaaaaaaaaatcttttccacttggaccaacaaaaatggaaaagaaatgaaaaaatcttttatttttccttttaaagaaatgaaaaaataaatcaatttaatgatcatattcataaaataaataaatataaaataaaataaatgatatgatgataattaactgtcacccgaataccatgtaacgacatgttgtcttgttcgcttacgatgcagtccaaacaacattttgttttggcatttttggaatccatcactgaaatatgtcagttaagcaactttcataagggtattctagtaatatcacgaaaccgttccttgtctgaaaaaatatcttcgccacgtgtcacatatatttggtaaggatctcagttatgagtcccccgagagagtgagagctctctctgagcttctgtggccatgccatggcttcccaatcgctatgtggatggtcaagttcctctccaacctcttctactgtgaacccttcttcttcttcttcgttgtgcagaccgtttatcttctttgcctttcacccaactccgtctaaacgcatcgtttcagtttcagagcttcctttttacgggattcttcttcatcgacccgggctgctactttcaaacagggtgaaggaagtctatcgattcgattgcccgtgctcgagctcgaaatcggacgcgaattcggtaaatcgatccgcaaaacaaacgaaaccaagcctgagtttcaagaccttgtctgcgaagcgatctctctggaggaggatattttttgcgtccaaaaaagttaggagcatcattttgctcaatgtcgtcactcttgtttatggtaatccgtgaattttataattgaattaataatttatgatatagtgagagaattgtgggttttcaactgtaagctgctattttcttctgc

SEQ ID NO: 242790 - DNA, 953 bp, Cannabis indica
tacataattgtgctaacattatgaatttgtggtggaataatctctgttgggttttgttttcctttatgaacaataaacaataaacaaactttatgaagatgaagataagtttctttcaaatgtctagtactgttttttgttttagtactagaaaatatgagacatgggtttgatttaatattaagtttgagtttcattttttttctagtgattttcttccattatgaatggttaactaattagactttatgttggtacagtgatagttatgaaataatttacagggaaagtttgaagtttcataaagggtccttaacttcattggagaccttttaattggaaagtgcttatgaagtttatgaatatgtggagaaatgaaaacaataatttttatgagtttcctcgcattagtaccttcattactcatttttttaatatctatattagaatagatgagagttgcttttgtcaatttctccttgaaagttgttataaagctaatgagagttttcttaagctcactattcagttggagaaaatgctactgaaatttttattttcatgattgacttatttcttgctctgtcatcaacagggttcgtatctattaactgattagctagtagaacgaataatcatatccaaacttgactactttcatcactactcattttctgccctctattagaatagattagtgtcctttgattatgattattggttagagattaatatctcaaacttaagttttagtgcctaaattcaagattaactaaaaggaaatagtattgtatgtatgtttctatgcatcagcaaattcttccttttcaaaagtaacaacattaaattccataacacatgaacttcttctacttgtactttatgttagatttgtttttgtaataaagtttgtgttataaagcatttttgtttttaaactattaaaaaccata

SEQ ID NO: 242791 - DNA, 5266 bp, Cannabis indica
cctcttaaaaaagttttcacaggaagctgatcataccacctccataaaaattgagattaaggctatatatttaatttgtaccttttagaaattataaaatttgaattgatatttaacaaaataaaatgttcaatcggtaatttttacaaaatatgtaagatctaaactagtatttactcaaaaaataatagataacaaaattattgaacatcatattaatatttttctgttttttgtagtgtatataattgtgttattcataattaaaaacccttatatttacttcaattcaaaatataatactcaaaaaattaaaattaaaaaaaaaaagatcaaaactgaatgtcgagtgtggtgctcaagttcatgaaagcttctaatgtttgattcttgtttaaaacttatattattaatgatattttatttacttctattgatcatttgttgtattgtcctaaaatataatatagttaatgtggtttttggagtttatatttccaaaaaaaaaaagttgtgcatcacgcatgatgctaacttacttattaaattaatttatataacaaataatgaatattatcttctttgtattgcattataaaaataggacgttgatcaattccatattcatagtacgtaagagaatacgaaataagggttgacaaagggaataattaaacaaaattactgccactccacatatataattatatataataatgtacataatcaaagataattgtatatagatgaaatgaaattgaaagtgaaaggatagttgacattaatatattctaaagtggaactaattcttacactactcttcatatatatataagataattaatgataatataagataatttagcttgctgtactaattaaaaataaaataatataattctctgtatgactaatttaattaattaatgtagaaaatgtaaatagagaaaaagaaatattgaggggctgaaggtaaatttgatggcaccggaaactcaatactgatcccaaacaaggtaatcaaaccacatatatatactctttaaattctaaaacaaccaaaaaaaaaaatatataacactaaaagtctaaaaatcatgatgtatgaaacggcaaaagagatgaagatggtggagaaggttgggattggtaatcccaatattttggttaccaaaggttttaagtcagttaaaggcatttttctaagggctgctaacaatatcaactccttctttactaaggtaagagatgatttttcttacttcttttgcttattcctttttattattatcatcacaagttactgattgaaataaacatttgtcccccaagtcagacttttcaccaactgatgtgctggccgagtttgatcatgatcgtgacgatgttgataagatgaatcttcacatgttcgttttatctgacgacgagtactataagataagcaaatacccgattttgatgatgatagggtatttgtttattttaggaggctttcatggaatcatttttagttttctgtgggagaaaaaaattcttttaggatttccaatttttacgtttgtgtcctctgtagctctacttttatattagagctttttcaaaaattaatatataacctttagctatcgatctctacattaatgaatgagtcctatatatttagataagtgagaatttgcaattggaatcagtagatcgagttcacaatcataatttcttgtttcgtgtaataattttgatggatgtgatcctttgatgttattaatatatagaagtagttattatttttcgttttttctcttttgaatagataaaaatgttcaaaattattaatatgtagtgaactatacaatctttaacttatctatataatgagacatgataaatgtgtcaaattttatgtggatgagagagagaaaaaaataaatttaagatgatttgtgtattttggagtattacttattaccctattagagatgcttttagatgaattgtacaaatcacttgttataataatgagtgattgataaccttaagtaattacaaactagtgattaaatagaaaatttaaggcttgctagctatatatatatagctaaaatatccttcgattgctcacctatgcgtttccatttcaggtcaaaattgtagttgttttatactagctatttgtctcctcttaattcaaaaattcataagcaagatatattaaacatattcatagaggatatactattttttaaaaaagttataggcatatatatatattgttagatgaaatttaaaaacaaaaatatacacacatttgtgtactagattttctcatttgaaaaaagagaaaatgctctataccaataccctagcaatttgtaattaagcttcagctctttgtttgtaaaaagttgttgagagtgcaatacaatcttatttgattaccaaaaaaaaaaaaggaagaagaagaattgtatataaacaaaactaaatattcatgtatatataattacaatactatataatattattgtttaaatacatacacgtgcatgatgatcaagaacaaaagcacatttaatttggaacattattgatgatataaaaccataggagaggttgtatgtgagaatagaaattccaagagtgacagaaatgatagccagcaaaagggtacaccgggccagcttggggtatctttggcgtaaagtaattgttgcaaaagaaccaaagaaggagaaattgagtgacaatacaaaagcatagaataaggtaataatattattactattattataattattattcctaaatatgatagttgggatcatcactactgtaacaccattttcatctatgatcttctcatatggtaattggactagtgctaatgttgttgccactgttccccatagtatcacattttctggccgataataagagtagtacagcttatcatcatcacccttcattttttatttatttttttttctatttcaaaaatcaaaatagcaatagatacatatttgtgagttgggcaatgtttatatatatatatacataaattagataacgttctgtacaagcctttttattttttcttgtcgttctatttatttaattaattagttttgaacagtcaacggcggttgattattaataaggaaaaatgtcatgcattactctttcattaacttgatgcaaaaggcacacacatatatatttatatatattcaaattttatttgatgatacattattattataaatttgcaacacatagatattatttattgataaaaatttacaactgctacaataatatgtgcccttttgtatctgttgccgttatgtgctttaactgtcattcgtgttcaaccttggacgcattcaacttccttattgccaagttttttgaatttctgcttacataactactcccgcccaccttcttcagccgcctcttcccgataaccaccactgatcacggtagtctaccgcctgttcttatctttctacccttccctgccataccagacgcaatggatcctctctccatgcgatttcaacttcacactttcactcacacaagaagaaagttcaattctaacactgtctgacatcccaactatatatcccctctgcatcacgatccacccatattcttcttgcccgtgtccttactgaaaaaacaatctataagcctgccttttatgatcaaatggcaggacattggaaaggaagattccccattacaataactgattacaaaactgagatgtttcacattgctttcggttgcgaaggtgacaaacgtcggatacttaataaacaaccatggcactttcagaatcatcttatcatctcatatgcgccaggtgctatgcaaaatgtcacaaaggaggatataatcttcaccactttctggactcagatttattgcttgcctttccttagtaagtctaaggcattggctgaagcgcttggttataacactattagtgagtttatagatgtgtttgaagactcagctaatgaaggatggggtccatttttgcgtgttcgggtcaaactttatattgctaaaccactccctcaaggacaaatgatccgtctaccaaaagtaagggatgaattttagatagaatatcgttatgaaagacttcttaaatttcactttgagtgtgggtgtctcgggcatccatttgaacaatgcatctcttttatggagcatattgacagtggtaatgatgatgatcttccctatggcccgtgacttaaaggtgctaggcttccctctaataattatgatcgctaccgaacgggtttcaaaaggtaatgcctggccttttatcacaagaatggctagaaggactttgaccacaagtttaccgttgttatcttcaagaacttcagccaatccataaccgatatttgaaggtgaatcttcgacccttcgtcaaccattgttgagaacaaatcatatcactctcctatcctgaatatcatatcaccttcaagcattaacaacactagattaccatctacaccaacttcatctccaaatccaccattacccttggttcctcctactgttaatgactcaaacagccgatccacacaaacaccccttgtcatccccattaacccctctatttcatcttttctggcatcaccaacaatgactaactttacccccaccaatacaaaacaaccacaatcaatttcagatcaacacatgctccaacctactcatacttcccccaccataacagatctttcacacatttacataccagatattgaaactccatctattgcttcaaactattttgcaacatatcccccaactgctagttcataatttcctgtgaacccacccacaaaacctcttacttcccacatcccatcagatcctcaaacaactttcacaccagcaaaattttttgcctctgttggttttctacatcactcaaccatagtgcctgatggtaacaaagaaaacattgaaccaagtctcacacccaaacgaccaaatgacaccctctctatgaggaagatacttaagagatgtcgtggcctcaatggatcaacctccactacaacaatataacattaatatcagcggacacaataccgacgggccacgtccgcccctaataatgggattaatatcggtggaagtgggggcccgccaaaattaataaatttttctaatttatttttaaaaaaaactaaataaaaaactcattagcggcgggcatttattaata

SEQ ID NO: 242792 - DNA, 623 bp, Cannabis indica
gcataaaaaccaacagctatatccgtccagtcttggagccttgcttgctgggatactaaatacgaccattttaacctcttctagtgtattggctgtagtaagcaactgaacatgttgctccgtgatacatgggcctcttctaattaatttggggtctacagttctcctattaataatccgagtactcaataagttctgatagaactcaagaaatgccttggttaagccctaatgatcttctaatatcttgccatctgcatcttaaatggacaaaattctgttttgacatcgcctctctctgatgctagaatggaataaagccaaattttcatcaccatcctttgaccaattgatcctagacttctgttgtaaaaacaaacagtaatctttatgcactttaacatacagttccttggcctccaattcctgaatctacacatcaatgtctaaagggttttggtgaagcaacccttgaatctccagtaagtctttctttgctttcatctctgctgcttgaatatcagaataagattctttattcaactttctaaaggaggattttaaggccttcaatttcgaaacaacttgatacatttttgtaacaacaacattttgctcccaaa

SEQ ID NO: 242793 - DNA, 829 bp, Cannabis indica
gtatattattactgttatcaatgtactctaagtggcataaacaacatgtatgctaaacatgtaataatatatgtgtaacattatactaatcttaccttgattctgaattcaggtgtaacggccaacctgagtagaacaactgctcggcgaattacaggctcctaaatcacatcgatcacaacatggataagtgacacataaatcacaaccggggacttaggttttaaactaaaaacctatctactgcaacttaacatggtaataccctaaactaacaggaaattaaccaaccaaagctctgaaactaatacaaatcgacaacacaaatttttcggggagtccagcagcaaatcctagtaaccggtttacaccgaaaaacccaaaaatttcaaaacctaaccaaatcgatctaaacattatcaaaccttctagacatgcatattataccccaatagatatattccaagcaataaaataactacacaagcttcgaatcaaaaatcgccaatgaagaaccaagcttgagttctaaaactcaaaactttcttaaccctactaaccgccaccaaaactagctcaaatcaacataatatagcataattaaactccagaaaataatatcaaacaacaacagccactatagaactcaaatacccaaaatcatgcaaattcagtaacttgaaaatcaagaaactaaaaggcaaagtgttgggagtttacctagagcttgagatcacttaaaactttttgtaaattacatgaatctgaagaagaaatccagaaccctagctgattctatagtgttctaaagagagagagggagagagag

SEQ ID NO: 242794 - DNA, 721 bp, Cannabis indica
attaatagagaaaagggaagaaataggaaaggaaaaaagaatacgagtggtactctaacaattatatcctatcagtcccacttggaacagttcaaaacaacgctactacaaagcaaaagaatgctcacaataaaccattgctacatattctcttctatagcattaaaatcctctaaaccttgtcacccactcgtgacatttgtactctttttgttgatgaagaaatgctgtttttacaaaggcctggtcctacgacctaatgctctcccacaaagaagagtattctttgggattggatactcatctctccatgaatttgcaggtgaatacactcgaagatagagttgttgccccaagtactgcctagcccagttttcagaccttatgttccacattcccacattatccaaaggcatgtaaactgcagtccatgatttgggataaacctgtaaaaacacgcacaaaacattaacaaagatataaaaacattaatcatatttgtgcagattaacaagacaaagcaacattaataagtacctgaacagtacaacgagaaattgtgtccctcaaattgtatcttaatctggcctcaggggaccattgccctccatccatactgccatattaaaaaactcgaactaatcagacaattttgcattgattttttttttcaagaaacaaagttcatgacatgagctttaccccacaacaaagaagttat

SEQ ID NO: 242795 - DNA, 720 bp, Cannabis indica
atgattcagttgcgaatgaggtgtgtggatgtgtctctcgtctgccctgattgtaacaaccacgaggaaacaacatttcatgctcttgtatcttgtccagcggctgctctttgctggaacagagtcggcattggtacagcgatgcaccagcagcaggaaaattttttcgactggtgctcttcgaattttctggtgctagaggcagatcagaggaaacttttgattgctctttgttggtccctttggaatgcaaggaacgacagagtgtggaataacaaattggtgagtgtagaaagtatagtgttgtcggcaagaacttaccttaatcaatggcaaactgctcagagtttaaatgttacatacccgagtcctggtctaatgccaggtgacggtgctgaacagtggcaaccaccacatggagatagtattaaggttaatgtcgacgctgctatatttgcaaacacaactcagtttggtttcggttttgttgttcgtaattcacaaggtctatttgtcgaaggggttaccaaatgtttcaatggttcggctacaccagaatttgtgtaagcattgggagtcaaggaagccttaagttggatcaatcgcaatcaaccaactcaagttattcttgaaaccgactgtttagtgtttgttcaagccttgcgtagttcaattgatatgatttccatgtttggtcaagtggttaatgattgtaaggca

SEQ ID NO: 242796 - DNA, 1175 bp, Cannabis indica
tactagaaaattgcttgcaagaagtgtgatatggtaaaaaaaaatgcttgaatagctattcccctctagttaggtttttctcctagttgttacagcatcgattcagcgttactccagcattcttgcacagagataatagaaattcttctaggcttatgagaattttccaaaactcacaatttaagttctaccatctatattcacatattcttatatcaaaccagatttcagaatactaattaagcatcaattcttaagttatgcaaggtaaatgaaatattcctattgcacttacaaagaaagacctacatctaggatttctcttgctccattcaagtttaactactagatctagcccttaaggaacaagatctagcttagaaaattgttattcatggccaagaaataacaatcaaataaaatgaaaagctcacttgaatgaacagaggcaaaaatgctaaaataagcttaaaaattaatcatacccaacatagaagttcataaccattcaaacctcaaaaatcaagctcatatgcaagtaggaaattaaaatccaaagtaaaaaatattcctccatggctgctgccctttgttcataattaacatagtttttaatatccaagtacaagaaacaagaaaagagaagagaagaaagaaaaataataaatgagagtaaaagaaaatcaaacacaaagcttggttctcctctctttcctccctctgctgtatttttcttctgcaattacttctctttcaaaaatggcagctgctcacgttagagagaagatggtgtgtacttgactttcttttctttttgttgttcggtccatagggtacaaaaatgacaccctaaaaacagaatcccaaatcttttgcactttggccaactaggtttagtcctcctcctagacatcatccagctggtctaatttttagtaacaaacatgctcctgttgatgtggacagctaaatttcgtgttttcacgtcactaccagaatgttgaattcgtttcagcattgcttcagtaatgcttcagcaatttgtcccaatttcagcttttgttcccacttcatccttgcttccttttctttttcctaacaatttaattcttctttttcaacaacaaacaagcacatttaattagaaaaaacacaactaacaatatcaattttta

SEQ ID NO: 242797 - DNA, 603 bp, Cannabis indica
ttatcgtgagattaatttctcattattttttaattgtataaatataaactctatagactgtaatatttaacataagcataaacaaaaatattttttctaaaattcttcatatttttatatcattaaaaattcataatttcttttttttaaaaaaaaatcaattaatgtcaaagttaatgtaaaaaaaaaaaaaaaaaggacaaagcccaatgtgcttttttgaaaacaaatccttaaaaagaaattattttgtcaaataagaaacatcaaatttttttactctatttacctcacacatttatagtagatcatacatcacttctttataattttctttaaaccatttaaataatatatttataatacacacaaataataaaatattagaatatagcagcaaaattacctaaattttatattttttaacatttaatcacaaaaactgattttttgatgacatattttgttttgctctttacactttcgttcaaaaccctcagttaaatgtcacggcagatacatacgtgtacacaagagtacacgtggtaaaattttagtagtccacgtatttttaattttaaatataataaaaataatttaaaa

SEQ ID NO: 242798 - DNA, 700 bp, Cannabis indica
tttttaaaagttgttttctgtttttaaaaattgaaaagagttttcaagttatgtagccaaatagccctctaatcacttcacttcattcaccaattcaaaagaatttttcaacaaggtggattttggttttgggaagccatctaaggtagagccaatcttaggaaagatcatgagtaaccaatgtggaaatagagtgatattgttggatgctgatcgatggggtaaaggatctatggaagcctttatttattatattagaacacaaacaagtgtcattatttgaaagagatgaaaatttttagcgttaaagctcctaactaatttaatatcttctagtaataaatgttatctctctctctctatatatatctattctatataaagtgtgcctatataactaaaattcttggtttttgagaaatttatgggtaacttttaatttttatttaataaaatattatttatatataataaaacaaatcctactaatatttgaactgatattaaatattctacaatcacacccatttaaaaataaaacgtcacttgaatcacctctgccttcaattaaatcaaggttaaaagccaccattgttacaacctcttactacgcacaaaattttctaaaacaatcgagaaagaaaagcagagcctactaatatttgaactgatattaaatattctacaatcacacccattt

SEQ ID NO: 242799 - DNA, 756 bp, Cannabis indica
aatcattctaccaattttattcctgtcacttcaagataatttccattcttctttacttaaaattttgtcccaacttttacacaaacctatacatctatctccaaataatacaaatctattatgtttgaaatttgtcttaattatgtgagggtgtaaaggtaatttgggtataatacttataaaaaaaagactaatttgcggcaaaaatacttaaattttatcccgagtagcagataaatacctaagtcatatttttagcggtaaaaataccttccgtcacacttctggaacttccgtaggtacctctccgttttcttccaagtaagtgtccaggtgtcacccttttattagtccacatcataaatttttatttttcattttaaaattcaattaaaacttatttaaaaatcattttaaaattaaaataatatatttaaaatgtataaaagtaaaaataaaacttattttttaaattaaaaaaattacaaaattaaaaaacacataaacctaaaatctgattaatattaaaaatcctacaaaactaaaatctcgttcttctcccccttctcttctgcatttcaagggtctcaatctctgcgtccgaactcagtctaggccgagagctgagaaagggagaaaagcctaaacgagaggccttaaactcgtaatgggttagatcagcaaatgcatttagagaaagggtataagaagaattgggcatttgattgtatttggtaacgaaagccatattgtcct

SEQ ID NO: 242800 - DNA, 1243 bp, Cannabis indica
aagtagacataattaaatatatttgttacattagagtgaacctatattgactgtgggtataataagtaaatttatttttactatatattctaaatcatatcatatagttgtttatatataaattaataaaatcttcaatcttgagatggttaaactttagttgattgtgttatctgagtttgatgtaattagggttgaacctttgagttcggtttgacctggacctagtcaacccacccagagttctgacccgtagaacctagttgcgttggaaaacatgtttccacaagcggtttgggtccaccccgtttagttttctcgggtgggttctagagtgttttttgcacttgcatgggtttgggttagacccgtaccaacccgcagcccaggcatttaataatttattcattttcctaaaatattacttttaaacttagcataataataaaaaaaaaacctaaaactaaaacatataagacaccctgacttcataccaagccctaagcaagaccatacccctcctctcattcgacgacagtagccccatttggtcgtcccaccctagatcggccctccctcaacgaagataaccaaaagccctagctggaggtctcctattgtggtccttagagcagactagagctctcttcttctcttgtaatcaccgttgaagtcgtctctcctcctcggtccacgatgtacaacagtcgtagatgtcgttgtgtaatatctttgaaattttgggatttctttctttttttttaaaaaaaaaaaaagagttgaccaagccaactcggtcaacccacagcttgtgagctagtgacctgcaaacccggtcaaccctcccatttcacgggcaggtacgaatactattttttgagtacgaaactagcgaacccagcaaacttgcccaatgttcaaccctacatacaattacatcttgggagctttgtattttaattaagtaagaatcatagacatggacagctatagctctgtttaagaagtaaaacgatagttttcttttagcttggttaaaggtgcactactacaaaaggcttattagcatcatttttataaatgacatatataataattgcgtcagttcgtgtaaccgacgtatatacaggggacacaaataattatcctattatgtcgattcgtaattgacgacattaaatagtatcgtcaattttgaattgacgcaatataaataaattattacaccatatacgtcggttca

SEQ ID NO: 242801 - DNA, 705 bp, Cannabis indica
tacgatcctcgggacatcagggattttgttgttagtcgctgggcgacaaatattttgtaaatgaatagcaaacttttgtaaagtattttgtaaacgggatcccgaagtattttgtatgtaatactataagtttttaattaaatagcaaaattttaattaatcacgattttcattaacctcattgattagcaacgagctgcacagtatgcttaaaatcacgttaacacgcctatgctatttagggtgttacacgtcagttattacataataaccgatgctataggcccttgaaaacccttcattgagacctaaattttaataccctgagattagtaaaatagattagcaatcatagttagaaggaattaactataattgactaattatattattatattattagttatatgagattatttaagaattatcgcatttaagactctgtctatgagttaagggtatttttgtaattttgacctgggaagggttaaaccataattttaatattaatcatactaatggactatattattatatagtatgtttatattataggtgatttttgagaagttagcaatggactaataaactttcatattgggctttaattgaatgattagctaccttgtaaaaataccatagtattttactttcgtagttaatataactttaactctctctagaaaataggtacaataatctaag

SEQ ID NO: 242802 - DNA, 1237 bp, Cannabis indica
ttcagatgtgaattttcgcacaacgaagagttatgtaactagaattgagacgaatgaatcgacgtactctgaggacgcctgaggttgaagattaaatctgaagaaactcccagaaaataggtcaatgatagagagggcatgcaaggtattgagaagtcaagaatgattttcgcagaaaagctcgaagggttgaaaggcagaaatggtgaagtagttgttttttcttgaattttatactttaagagtaatcaccgttagatcaagaggaaaaagatctaacggatgagaacacggaagaattagaaaagatgggaaattaatgctaatgatgtgcctcaaaatcatgaaccaccaaaactcaaagcatgaaattttcaaaaattggataatacaaaaatactcttgcaatcatttaaaaagctctttttattaaaaaaagaactgtttaagggacaattgttatactcaaaattcggctacacttcaaagattgacacgtgtctttacagtggaatatgaaccacctgattttaataaaaattatatcatttaaatgcaaaagaaaagaataactcattaaataaagaatttaatagaaaatattcataactcgatgactatggagtcttaagcgagacaaggataaaagactataaaaacctatattgacaagatacatgcatgcctcggagtacacagacccaaaaagataattcatttattcgaaggagtgaatacatttatgcaaagaaacctcgggttatgaatagcgagacaatcacctcgctattttaaagaaacttgacgatgagaatcatttgctaacacttagcgttttttctacattataatagccaaggataataactcggaaataagcgagatacaattgtctaaatcagcattaatcatctataaggataagaattaccagtagttaagcggttatctagtattatccacatacaatttaaatgaaacgtaggaattgattacgtttcatcaacggttatattttgaattgaatgtaaataactgccaacttatattcttataaataggggcagattctttagaaaaagggacggagaatttgagagagaaaatacatacgatcaattgtatattgtatcttgtattcaaaaaataatcttaaataaaatagactcgtggagtatgcttatttaactgcaaaactacgtaaaaatatctcatgttatttatatattatttattt

SEQ ID NO: 242803 - DNA, 1409 bp, Cannabis indica
aaaaaaatatatattttaaaatataaaaaaaaatccaaaaatatttttatatatcaaagaatgatgtattcagaaaaataaagtagagatattttaacgtacgtacaccttttattatcacatgtaatacatttaaaattaattgatcatatgctaattgctaactaatcaatcataaatgacaatgtattaaacttcatgattagagacttttaattatttttaaaaaaaatcgcgtcgtctattatcactctcttttttttttttttttttggtaattaccactctttcttatacaatctgtattatatatattatatatgtgagataatatttatttgtcttatttgcattgaaggaactcttttgaacaatcaaatcagttttaattaatatatgaaagttatagaaagaaaaaaaaaaaacacgaagaagagcaatgtcaaatgtggtggatgccctaaaagtttaatattgtctaatcaattaagaaatataaatctttcaattaatccatatattttataactatataaactgatttgttgaacaaagcaaactttagtgtttagtccatttggttcaactttgagattggccacgtctaaatcaacaactaagattataactctttgtattaaatgaaaggtggtaatgcaaaagtagtccactactattaattaaattaatattggtggattaccacttaagaaagccaataatagttttggtatggaaaattaagtaggtagtagttttaaattaaggaaggtttattaggataattaataatgggctacctagttaacaagattgcttacctaattttgtttggttccaaataagctatagatgtggtcttggtcaaattcagatgcctaaaactgacatgaacatgaaactattgtgaaaaccaaacaataccaaagtttgttaaacaagatgaagactatcccctaaatttgaccctataacctatcttctctctttggtcattatcgttccctatttcaatttcaacttcaatgtgaattagtactcaaaaactaccaaaacaaagtatgtgcaagtttttattactttaattggtaataagttatacatgtatcaaacattttttttattattattattttattttagtaaacaacttttttgaatatgaattttagtaaacaatttaaatatacatatctcaataaaaatggcatgcacatgatggcttggcatattttttaaaaagaaaagaaaatttagcaagaattaaaactttttataaaagaaagtgttttttcttttcagaaaggatataagaaagtgtctactgtgaatttatgactagtttggcctttttttattgtaaaaaaaaaaaagtaatttgtgttgcttttgatgggattaatttaaaa

SEQ ID NO: 242804 - DNA, 5353 bp, Cannabis indica
ttttttttttttttatttatgttataactagcttacatcaactatatgttataataagtatttaacaagataatatctgtgtatattatatattaatttgttatgtgtagtaattaggcatgagtttgtgttacaatacaacacagggactataataacaatatttcaatcgagtcgtgatgatatattactactgttgaaaattttataataattagttttctagggcgctctactataattttagtatgagtaaatagcggcataagtacccaaaattttaagtttgtaagcggcataaatttaatgtttatttttagtggcataagtacccaatgtttgtaaaactgtaatttttcttcagttttgtcagtacagactccgttttaaatttattaaaggaacatttgggattaactgatactacatgtttctgtctagacccaatgatcaagaatttagaccttatatgtggtctgtttaagaaaataacagggtttgtacggacaaaattagagaaaaattacagttatacaaacattgggtacttatgccgctaaaaataaataatgggattatgccacttacaaacttcactttaaatatttatgccgctatttagccttttagtatcgtagcagtatatatatagttgtaaatttaaattgagttgagtaaaatgacttatctagcattcaattttaataaatgtttgaagagacagtattagaaaatatatgatcaggagaatatattaaaagtacgtcgtcttgattattagaaaaggacataaaaaatcaatgtgagaataaagagaactatagtcgaatgagttttattaacaactttttttcttcttcactatgcaaccatatcacttagacaaccatcacacacacgggcgtacactcattgtagtgaggttagtttttgtttttattcattataacaaaataaatatttctaagggattttaagtaccactcaacagtggtattattaatattgatacactttaatactaattttcacctatttagtttaaaataatactaaaaatgtaagtttaacaagttaaaccagaattggtaaaattagaaaaagaaactcagagagaaaagaagagaaacagagagatttaacagagcgcttagctcaagaaatgagcacaatccttttatttgtagtcaaggaattacaaggcaaaacacaaagttagttgagaaactaactgaaaactaactaactaaactaacttaaaatagactaagatcccccctcaaatgaaaaggggtagtagccatttttagtactttgcctttaagatacaagaatcgatctatagagagagcttttgtaagagaatcaacaacttgatcaactactgggacatatctgacagagagctccttggccataatctgatcccttacaaaatgcagatcgatttctaaatgcttagatcgagcatatgaaaaattggattagctgcaagagctgctgctccttgattatcaacccagatgactggtgtgtgagctggtttgatatgcagttcagataacaaattgataagccatcttagatctgcaacagtgttgggttgacttcaaaattcactcttagtgattgatctaacaacaacattctgcttctgtgcagaccagaagataagatttcctccaagaaagactacataacccctagttgatctttgatcatcaatacaactagcccaatctgcatcagagtaggcacacatgtccattgaagctggtgatctaagaagcaagccgtgtgaaattgtacttctagatatcgaagtagtctcttacaagctttccaatgagtgaaagttggggcatgaataaactgtctgagtttattgataatgaatgcaacatcatgtcgtgttaatgcgagatactgcagagctacaagtgtgcttcgataaagtgtgatgtcctgaaatggttccctatcagacatatataatttttgagtagagctggtgggattggggcagcttttgacaccaacaataagctgaagtcgaacaagtaaatcagtgacatatttgttttgagaaagatacatacatgcagcatctctataaatctcaataccaagaaagtagtgtataggacccaagtctttcaaggcaaatgatgcatttagatcagctatcaatttagagatcaactaagaattaggtccagttactagtatgtcattgacatagactagtaggttgattaaatcagatgttgaaccatagacaaataaatatgtatctgatcttgaagcttgaaaaccccactacagcagtgtttgcattagtttctcattccaagctcgtggatcttgctttaatccatagagagcattatgcaattgacagacatgagttggtttgcttggatcctcaaatcctcttggttccctcatgtaaattgtttcatgcaaatttccatttaaaaatgcattgctaccatccaattgcttgacaggccaagctgaagtgatagctaaggtaagaacagttctaacagtaacagtttttccacaggactaaaggtctcttcatagtcaataccaggtgtttgtaagtaacctttagcaactaataacctagatttatatgtattcaaagaaccatcaacattaatgttaatctgatacacccacttattatcaataacatgcatatgtggttgatatggtacaatgatccaagtttttgatttaaccaaagaagtgttttctttttgcattgattgaaaccattttggatccttgagagcttgctgaatagaccttggttcagttggaaagagagattcgagagctggatgtcttgctgataggtaagccttaggtttataaatcccactttgagaccttgctttcattttgtaaattaattcttgatatgatgcttgagtcatgtgttgtgtgaacaggctgcacaccagagttggaggcaccatgatcagtagcatgtaattgctgagctattacatcagattgaacatgctactccaaggtgtttgtagtatttggattaggaacagaagttggtgatgtggctgtaggcatataagaaacatgctgggttgttgctatgggaggaagattggtgttggatataggtaggtctatttctgagttttgtaagatcataggagaaactgacacagaagtgtctgtgttctgtaggttggaactaggggatggcaataatagttatgggattggtagtggtgatgccagaggttgtaagggggtggcaggttgggtgatggatctgggataactatttgagtgggcaggttggtaagcagagtggtgggtgggtgatctcgtatgagtgcttgtgttgataggttaatattggtgttgtgtatagtaggtggtgatggagcagtagcacaaccagaaaatgtattcgatgtagtaacagtagtgggaaaaatacatgtagcacaaggtaatgaagatgaagaatgtacctatgaaggacatgaagcattgaatgcaggaaaacaactttcattgaacacaaaattccttgcaatgtagattcttcctttggaattttcacaaagagagcctttgtgatgagaggaatatccaagaaggatgcactgatctgatctgaactcaagcttgtgattgttgtaaggtctcaagtgtggaaaacaagcacaacaaaaatatttactttgggggtgtcaaagaggagagcgaagtgaagattctggagatagttcaaataaatgagggatgttttccccttaaatatttgggggttaatctgagaccaactaaatagaaagcctcagattgtagcattattcttgataagctgaacaaaagactcaattgctgagcaagcaaaaaaatttctttaatttgctgggagagttcagctcattcactcggttcttctggggattcgtaattattggatgagtctatttatccttcctcaaaagattactttagagattgataaaagttgtcgcaattttctttggggaaaaacaaggacccgaagaaagcttcatcttggttcttgggagtaggtttgtcttccaaagaattatgaggggataggattttgagaaggaaaaaagtggaacattactttgatggctaagttttaatgggccatagctagaaaggaaggtaacctttgggttaaatggattaacaccatttacttaaagggttaaaatatctagaatgtcactatcaagcaggatatgagctggtgtttctaaaaactccttaagctttgtcatataatagatgagtttaatctgtttcaggctaaaaaggggggaagggggaggttcaaggtgaagtatttttacaacaccttgcttactgggaacaagattgattatgacacgaatgtctggaataagctaatcacaacgaaacacatgtatacttattggaaagtaatcaataacctgttattaactagaaaccacttgaatagaataatgaacatcccctcatctcactgttcagtttgtgatctagaagatgaatcccatgatcatttatttatgaattgcatctatactaagaaaatagtagttgaaatcgactcttggatgggtactttttattggccgagaaacaggttggagcttatatttggtgttcgaagccgcttattggcctaaaacaaagttatcaatgcagtaattgctacaacgatatacatgatatggacaaataaaaatagatgtgtttttgattgtgtttgtagcacggttaaggcaatttgtaataaagagataatatatctagtgaaatggtgtattttgggtgttttcaattccaatgtaaaaaatagtgataagtatattataaatgtaattgagggatggtagagtgttgtgtgatttgatgtgggttgtttgcctttgctgtatctttgcttgtttagttttgaataaaaaatttcttttgttaaaaaaaaaattaattagcaatgacaagattaacaaatcaaaaatgataatcggagaaaatagggatgaacaaagtatggaaaaccagaaatgaataaatcattaaaacgataaaatcaacagaagaatatatactggttcaagtccaatagatcaatatgatctatgactttactccaattctggacaccactaaattctctttattaattgagcaagaacatgtataatgcattcgagatcgattctctgatgagttctctcaaagtgttccaactctcacactcttacccaagaatcttcttcatctacaaaagattcttcatacaaaacccaaacccaatctctctctctcttttctc

SEQ ID NO: 242805 - DNA, 799 bp, Cannabis indica
gcctaaattaatagtgagatgatttaatttggggataattctttctctggctcttcaagtatcataatttattgctttgcacaatattgagctaatactaaaaaaataggggaaaaagtaattgattgaagtttgaataaaaagtaagtagttctagttatatgataacccaaaaacaaaatgcaataaattagtttatgcattaaataaccatttccattttgttacattatggagcccaatagtctatcaatttatgtacaactaattaagtaatgccagatttagaattgtactggttgactagattcacattcatggaaaaaaaatcccaatgccatgtatgccatttaatattatttttcaatttcaaataaataattggctaaaacataatgccattatatttttaaaaaataaactactataatagattatagattgcatattcctttttcttttcggttgcttggaagattacatattccatttgatgtcctactacaccttatgaatcatctatattatttatttattgatggagaaaataggtaagatagcattaatgctcactcattttgtcaattgttcttagtagttagtacatttgctatagttcctttaaaggaaagggtctcctttaattaggggtgttcattcgatttaattcgcactttttttggttcaaacaacatttaatccacattaagtgtggatttcatattttggattccaatccgatccacataacagtttaaatccaatccaatccaatccgcaatagtgcggattggatcgg

SEQ ID NO: 242806 - DNA, 1639 bp, Cannabis indica
gaggagaaccttagagtggcattagcttcaagatgatatttgatcttggaagcaacggaattatgcagataagttgttgcaaggtctctaacttatttggtttatttccatggaccacccaatttctttccatccaaattaaccaaaaagtacatataatttgctccatctcagccttcgagtaaatacaagatagattagacaaataatcacctttgcacattgagaaagattttgccaatccaaaactagatttgagtgtgatgccatattaatcgggcatacttacagcaaaagagtgcatgtccaacagactcacaagcttgatgacaaacagagcaagttgaatccatgattatttttcttctaaccaaggaagcagctactggtaaggcatcgtggaaaatatgccaggtaaatattttaacaatatgatgcagctggaaagaccagaaaaacttccaccatgatgaagctgaggtggtgcttgagctcaaattagcttctttgaaggacgacgctagatggtaacccatttgaactgtgtaaaggcctgagttgtggtaatgtcaaataagtgtatcttcactttgaaaaaaaactcaaaggcaaattctatccacatccaattgagagaaactttgttgtaacatgggtatattctattctctttcctcagtgatcagatttgcaacaacaccatcaaaaggacttgtataccgaagatggaggaaagtattatgccccaaaattcgtggatcaaacctacatttgacccttcttccttctctaattttccattgaagaccctctaagagcaattctttaccccaatgaataccttgccaagtcatgcagggagatgactaagatttgcttcaagaaaagagctattaaggaagtatatactctttaataactgaccaagaagagaatcaagtttctccaaaagcctccaagcttgatttgctagcaaagcttgatgaaaaatgtataaaagatcaaaagcacgtacctccttcagcctttgtctaacaaagcagattccatgaacgtcaatgatttttgaaccccaccaaaagtttgccatcatagacttaagttgtgtgcaaaaataaaatgataggcgaaagcaactccttgcatatgtaggaatatagattggactactgctttgagaagcacttcatgccccctgctgaaaaaaaaattcactccaagtgtgcataagtctccatattttttcttttatattgttgaaaatttccttcttatctcttttagaatatgagggcaagccaagataattttcatgacattcacaaaggggcatggagagttatctatggaagataatttgtgcagccaatgttatgtaggagagaaagacatgacagacttatcggggttgagagcttgaccagaagcacgatagtagatatctagaaccctctttagggaaagatatgagtcctcatttgcttgacaaaagaggagactatcatcagcaaaaagcaagtgagaaatttgagatggtcgtctcgtaagtttgaaggctactagataattattcagcctatatggaaataactatacagtttttggcattattccaatcatagattaactactagtgtta

SEQ ID NO: 242807 - DNA, 1840 bp, Cannabis indica
gactttgtaaagcgatctaccacaacccaaaccccgacctagacccagacccctggacccaaactctggacccagaccccgaccttaacctgacctcgaaccttggactcagacctccagcaccgaccccggactcggacctgaccccaatcctggcctcagccatcgatcccaaactcgacttaaataaaattaacaaatgaaatttacagaacacattttttttaattaaaaaataaaaacgattatagaacacatttttattttttttaaaaaaataaattaaaattttacttttatttttgtaattaaaaaatttaaaaacaaaatattaccaaaactttaatcagtgatatttaagaaaaggatatgtttaagaataatcatacatatataaaagtttcaagctctagaagatattggtttttcaatgttattaaacatgttatataaatatgattaacacctcaataaatccattttttatacagcaaaataaaataataaaggagctagcatatcaacttatcctgaacggcaagttggggaaaaatatgattaacacctcaatatgtgtcttatgctttgtttttcatgtcttctatattatatattttgtcttctttattaatcttaaatactaagctacatataattaatttacatactacttttccttccctatttataggtaccatttcttgcatgctaaccaaaccaaaccaaaccatatataacaattataattattaattcattccaaaatgagtatccatagtactcatagagttagatcaattgtggttttatttgttttatttggtttggtatttggtactaatgcctctagagctcaagattatggtaaaactcctagtggtgcagctagctttggaagtggaattaatggtgcaacagaatatggacgacgcagtgctcggagcacaaccgaaagtgtagtcggccaaggacgtagtactcgaggaaataatggtggtgaaactggtggaaaaggtagtggtactagagcagaaggcggtggagatagtacgggaggagatgatggtggccgcggtagcattggccgtattgggtatgctactaaagatcaatatgcaattaactatagaggtactggcgggcagtagccatggtggctatatggttcatcaaataaaaatttgtgtattaatttcactatagagttccattcttactcattaatattatggaagtttatgtagtatgagtaggagacctattatattatatgagattaggaatgtgcacctactttctttctctaatcgaatatacatcaattaagcattgctgcttatctacttttaatgaatggttctctttgatgggttgattatattatttgtttattgcttgcaattggttgtcctaggtaagatagattgggattttttttaaacataagaatcggagaacttttacactttttcacaataatagtaccactttttgacaagaatgtcggatttagagtaatcctccagaagagaaaaagattattactataaattgataagtgaattaatatgtgagatcttgtgtgtcaaacataatctcttgaatgttaaacaataaagtttcacactcaacgattcaagttgcacatgaagtgtgtttaagcaagaataaaccctttaaaagttatggaatgacactcttatctaaaccaatacataaaattgcttctagtcctatatcttttcagttaaactatataattttaaggaggttggtattattgaagcaaagaagtgtggagtgtctcaatgttcctaagcatagttttgtgctttggata

SEQ ID NO: 242808 - DNA, 884 bp, Cannabis indica
ccccaaataggagtagatcttcgaactaacttaaactgaagaagaaacattcagggcggataaatcctgccctaaaatggttaaccaaggggataggataggccaaatcttgctgacccctacggtgtaccccctgttaaccctaaggaggagctggcaggataaaggccagctagagatgatcttgtagtgcaagcacaattggatcaactcaagagccttgtacaaggcctgtccaacccaaagctgtttgacctggaacttgacagggcccgagtctcacctttctctacacgcattaacgtgttgcccttaccaaccacgttgaagatgccaacttggaaaatgtacattgggaaagaagatcccctggcccatattaaatattttgaaatccacacggatttgaaaaatgtgatagacgatacccattgcaggttttttccaacaatgttatctgaaactacacaatagtggtattttaagttgtcccgaatgagattttattcgtagaacgctttcacgactgagctctacagagagttttcgtcctctagacagataccttcccaactaaagggattggttaaaatgaaaccaaggctagacagtcgttgaaagactatatccaaaggtttatgactgaagccataaaggtcaaagccctgactatagatgggtaatatacaattataattggaggtatcctacctctatgtgaactttagagggacattaggaaaaaaatcaattaacaatatgagagagttttcagaccgcgctgatagtttcataaaacttgaagaagctgtccgacaggtgtagattggcgggtagacacatgccattgtgtcgtacaagaaaccccttccgatgaaaaaaga

SEQ ID NO: 242809 - DNA, 1207 bp, Cannabis indica
gagataggaccttcaaagataaaattattgaaaacatgaaaataacacaatggtaccagaaacatagaaatgaaacaatatgaaatatccatcaagaatgaaacaattttttttattgaaaatgaatagaagtgaacataacaacccattttgggggttaaagaaattgaggagtcaagtgagtatataacattgttacaaggcatcttatagtgtccaatttcatagtgcattgttcattgattatacttaaagagcacacacaagcttcttttcataatgtgtgataatttacgagtaattagcaatttaattacattgaaatataaagattagaattagtatagtacatataaccaaccaattagtgctcaaatttatttacatgttaaccaaccaattagttgattccatataaaacagagttaaactatttagtaatttagctttggagaatgagaaatttgagattatccattatacagtttgatcaattagtacttattgagcacaatacaacactttgggattggtagcttttaatttaaattcccattttcatttaagttattataatactttttcaatagaactatattgatatcttagttattataatactttttcaatagaattatattgatatcttatgtaaaatcatatttgttgtagtgaatggatgatttttttttcattcctgagtaagaatttatataaaatttacttattataattctaccttatacacacaagagattatataattgacctaaattattattattttattttattttaataaataacgatatttctcaaaatataggagaaaaaattgagaaatttttcatttttatctaatgtgggaatatatttgtaatttgtatcacataattaaaacatgataaggaaaactaataacatatatttttttttgaagcgtatttagttggtagaaaaatatttggtctcttaattttccttcaaaagtattaaaatatcatttcactattttagtagaattgactaatagatggaaagaccattcaaattgcaaagttaatttaagaatgtcgttcacaaattatagtgtcgtttttattctttttctatgaatgtcgttttcattctgaaatatcagaattacagagaatttttttctttgaatgaaaattacagagatcaattagaaaaaaaaacaatttgt

SEQ ID NO: 242810 - DNA, 567 bp, Cannabis indica
aaatttattgtaaattattataaatttatcgaaatttattgtaaattattataaatttatcgaaatttagcaagatatcttaaataattatattgtacatgactataaaacaaattaaactaattttttattctggataccgaaacagataaaatgtgtatcgatgcatctattttagggggtgtattttagaagcactcaatatttttcacataaaaaatttggtactttcacagtgcactccataaaaggattgcactgatacacctctatctgtttcagtatttatgagaattttttatttgacaaaattcagaataatttacaacatagaaagtagtgttcaaatattctcgttcacacacgcataaaataaaagagtcacgtatacaatatattctgtgaaccttatttttggtgtgttgaattaaattaaatttcttaaaattttaaaagatgtcttaaataattacaacatacatagccgatcaaaaaaaattaaactaaataattgtctctgagaactaaacaaatgcattgttgtatataaattgtagaatttacata
